United States Patent Application Publication US 2007/0067865 A1 - sequence listing, part 34

SEQ ID NO: 208407 - DNA, 289 bp, Gossypium hirsutum
gtccggaaaaagaattatgaattcgccgacgacggttagggattcatcgtcgccgacacggatcggggctcgttcttcgatgatggactggataagagcttgtggcttgtcgggattagccggtatgaagatcgataaagaagaactcagacgaaggctttcgatgcctcagtatctacgccttgctatgttagattccattaaaaaaaaagacgtcgacggcggcgatgaacattttcgttcgcgttctttcgactacgatggtacttgttctcaatctcctatcggt

SEQ ID NO: 208408 - DNA, 294 bp, Gossypium hirsutum
tttagctatagcatacactactagtacccactactagcaatggcttcctcaatgatctcatcggctaccattgccactgcctctccggcacaggctaacatggtcgctcctttcaccggcctcaagtctgcctctgctttcccagtcaccaggaaggccaacaacgacattacttctctcgcaagcaatggcggcagagtgcaatgcatgcaggtgtggcctcctactggaaagaagaagttcgagactctctcatacctccccgatcttacacccgtgcagttggctaaggaa

SEQ ID NO: 208409 - DNA, 355 bp, Gossypium hirsutum
caaccttccacttctgtggtgaggtgccaccctgttgcaccctccggactaactgtgcgtgcaagctcatatgccgatgagcttgtcaagactgctaaagctattgcttctcctggccgtggaattttggccatggatgagtccaacgctacctgtgggaaacgtttggcctcaatcgggctagaaaacacggaggctaaccgccaagcctacaggacgttgcttgtttcagctcctggccttggtcagtacatctcacgtgccatcctctttgaggaaaccctctatcaaaccacaattgatggcaagaagatggttgatgttcttgttgagcaagacatagtccctggtatca

SEQ ID NO: 208410 - DNA, 308 bp, Gossypium hirsutum
cttagctatagcatacactaatagaaccagttgcttcacaagggtctctacaacaactgatggggtaccattgacactggctgtccggcacaggctaacatggtcgctcctttcaccggcctcaagtctgcctctgctttcccagtcaccaggaaggccaacaacgacattacttctctcgcaagcactggcggcagagtgcaatgcatgcaggtgtggcctcctactggaaagaagatgtttgagactttctcatacctgccggatcttacacccgagcaggttgcttaaggaagtggattaccttc

SEQ ID NO: 208411 - DNA, 183 bp, Gossypium hirsutum
cccacgcgtccgcgtcgctagccttaactcttcttcttctcctccgactcttatccaagacggcccggtttttgctgcccctattcctttgctcaccccgagagacgagatgggaaacaagtcctacgacgaagccattgaagctctcaagaaacttttcagtgagaaaggagaactgaaagc

SEQ ID NO: 208412 - DNA, 309 bp, Gossypium hirsutum
ggcaaatactacatttgcctcagctattcaaattggtgaccctgtttctattgatagagccgcgtacgctttgaaaaattcaaatgggattgtcgaggaagcgactgaggaggagttaatggatgcaatggcacaggcggattctacaggaatgttcatttgccctcatactggagtcgcattgactgctttaatgaagcttaggaaaagtggggttatcggagctggagacagaactgttgtggttagtacagctcatggattgaagtttacacagtccaagggttgactaccactcgaaggagattc

SEQ ID NO: 208413 - DNA, 363 bp, Gossypium hirsutum
cccacgcgtccgcttctaagttcaaaacattgatgacaatggcaactctaagcagtgcttggcgttttcatcttctcttgtttccttgcatgttcgatctcggtttcgggacgacccaccactttcctcgaagattttagaatcacttggtccgattcccatatcaagcaaatcgatggagggagggccattcaacttattctagaccaaaattcaggctgtggatttgcttccaaaagacagtatttgtttggacgtgtcagcatgaagatcaagcttatccccggtgacttggccggaaccgtaaccgccttttacattgaattctgatacgggacactgttatgagacgaggcttagatt

SEQ ID NO: 208414 - DNA, 200 bp, Gossypium hirsutum
gtccgaaaggactttgctttgcctaatttgcaagctttgaggtcgactgaaagaactatggctgaagagggacacgtaatcgcctgccacactgttgattcatggaaccagcagctcgagatgagaaaccagtccaagaaactggcggggacggatttcacagcatcattgtggggtccatgccggtgattttcaaccaa

SEQ ID NO: 208415 - DNA, 369 bp, Gossypium hirsutum
ggtcgacgacgcgtacgtccgcggacgcatgagggcaacggcatggtcttgggcaaaattttcgacctttataattcgggatgtgcaggcaatacgaatttttgggagcttttgaagaaggcaatggcttttctgtttaaggacccagctaagctttcagcgtaccgagacagaagatttaatggttcgcaagaggaattcgagcaagcgctcctcaatttgacaaccgtctacataggaaacatgtctttttacactacttgaagaacaagattatgagcttttcttttgagccggtgaaattaataaaaatattatgggccttgtcaagaactctaaaacgccttgcggcttttgctttttctttgt

SEQ ID NO: 208416 - DNA, 302 bp, Gossypium hirsutum
cggacgcgtgggggcaagggcaagggcaagggcaaaattttcgacctttataattcgttatgtgcaggcaatacgaatttttgggagcttttgaagaaggcaatggcttctctgttcaaggacccagctaagctttcagcgtaccgagacagaagattcaatggttcgcaagaggaattcgagcaagcgctcctcaattcgacaaccgtttacatgggaaacatgtctttttacactactgaagaacaggtttatgaccttttttctagacccggggaaataaaaaaaatttttagggccct

SEQ ID NO: 208417 - DNA, 235 bp, Gossypium hirsutum
gtccgataaaatcaggaccggatatgcgaagctcagctttggttcgagactggctcgtcagtctcatgatgctaagactcttccagcattgccctgccaaatcatgaagcaagatggagatagactacgatcccttgcactctttggggcaggggtctcagggcttttgggttgtgctaccatagcttattctgatgaggctgagcatggtttggcggttcctaactattcttgg

SEQ ID NO: 208418 - DNA, 266 bp, Gossypium hirsutum
caacggcgaccccttcattggaagcctgtagactccaatcacctcaagccccttaattgcgtggtacctttccaacctcccagcctataggacggcagtgaacccacttctgaggggaatcgaagtgggtctggctcacggcttcctcctggttggtccattcgtaaaggccggccctctaaggaacactgcggtggcgggtcaagctggttccttagccgttgccggtttggttgtgatcctacacttttgcttgacgatgtatg

SEQ ID NO: 208419 - DNA, 401 bp, Gossypium hirsutum
cgcgttcgccacacgcgtgcgcccacgcgtgcggtatttccataactggtttaattcccttcatgcactgtgctccatagtcttggaacccaaggacagaagactcttttagcatttcaccgcaaagatggagataacaaatgtgagcgagtatcaagaaattgcgaagcataagttgccaaagatggtgtatgactactacgcatctggtgctgaggaccaatggacattgcatgagaatagatgtgctttcaccaagatactgtttcgtcctcgtattctcattgatgtaaacaagatagacatgaccacgactgcgtttggtttcaagatatcaatgcctatcatgattgccccaactgacatgcaaaaaatggctcattctgaaggggagtatgcaa

SEQ ID NO: 208420 - DNA, 186 bp, Gossypium hirsutum
acctttgctgaacgtccaaatggtgaacgccacactcatgaacatcgctgatgacggcaccaacgttgagctccccggtatgtacaacaaggaagagaaccctcgtgttccgatcattgtcaccggtaacgatttctcgacgctgtacgcgccgctcatccgagacaggcgtatggagaactttac

SEQ ID NO: 208421 - DNA, 221 bp, Gossypium hirsutum
cccacgcgtccgcccacgcgtccgctttctgttacattacttctctcgcaagcaatggcgggggagtgcaatgcatgcaggtgtggcctcctactggaaagaagaagttcgagactctttcatacctccccgatcttacacccgtgcagttggttaaggaagtggattaccttattcgctcaaaatgggttccttgcttggaatcggaataaaaggaggga

SEQ ID NO: 208422 - DNA, 189 bp, Gossypium hirsutum
gcgcgagcctgtcgcgcgcactcctataataactcgtccgctttttattccatgaccgtttttgttgacaagggtgcggaggatatgatcaagagcgcccatttcttaactaccaatggtggtgcttcagtttggaacaataactcatcacttactgtgggagcaggaggtccatttttccttgaagac

SEQ ID NO: 208423 - DNA, 372 bp, Gossypium hirsutum
caacaaaatcagttgcttcacaatggcctctacaaccatggctctttcttccccatcattggccggtaaggcagtgaagttctccccttccacccctgaaatccggggaactggccgtgtttccatgaggaaaaccaccaagcctgttccttctggtagcccatggtacggtcctgaccgagttttgtacttgggtccactttccggtgagccaccatcttacttgaccggtgagttccctggtgactatggttgggacactgctggactctcagctgatcccgagacctttgctaggaaccgtgagctcgaagtcattcactgcatatgggccatgttgggagctcttgggtgtgttttccttgacctgtt

SEQ ID NO: 208424 - DNA, 250 bp, Gossypium hirsutum
ctcacccgttcgagccccaccctcccgattgatactacttttcaaacacattttcccttcaattttcgtataaggtcctaggaaaagaaatatgagagagtgcatttcagttcacatcggtcaggccggtattcaggtcggaaatgcttgctgggaactttactgtctcgagcatggcattcagcctgatggccaaatgccaagtgataagactgttggtggaggagacgatgctttcaacacctttttc

SEQ ID NO: 208425 - DNA, 302 bp, Gossypium hirsutum
gcgtctctctcttcatctctctgaaccaaaaagtctttagcttttcgcttcgagagagaccatgttggtttaccaggatctcatctccggtgacgagcttctttctgactcattcccctacaaggaaatcgagaatgggatgctgtgggaagttgagggaaagtgggtagtgcaaggagctgtccatgttgacattggtgccaatcctttatcccaaggtgctgatgaggataaagaggttatgaccaacctgtgaaggctgttgacattgttgacactttcaggctttaagagcaaccccc

SEQ ID NO: 208426 - DNA, 229 bp, Gossypium hirsutum
gccagtgagacaggtcgttgaaaaaagtgcagaaaaaccggttgctgtcaaggaagaaggaagcactagttcactacctgaaagggtacaacttggtaactctcctgtgtacaagttagacagaaaactcggtaaagggggtttcgggcaagtttttgttggaagaaggatatctggtgggacggggtgcagtggaccagatgctttcgaggttgctttgaagtttgag

SEQ ID NO: 208427 - DNA, 280 bp, Gossypium hirsutum
attacactgccggaaaaaaatcatggccaccgtcacgacgcaagcctctgccgctgttttccggccatgtgcatcgaaaacacggttccttactggttcttccggtaaggttaaaccggaaccgtttaattaaaaccaggggctgttacatcgactagctcattaaaagttgaagcaaagaagggggaggggttacctggtcttccttcaccagctaacctgaatggcagtcttccaggagataagggcttagatcctctgggatgggctgaggaccctg

SEQ ID NO: 208428 - DNA, 360 bp, Gossypium hirsutum
ccgtccgaattcccgttcggcatcacgcgttcgcaataccccatttttctggttcctttttcaagccattttacaggcacttcccagttgggagaaggggaaaatggcacagcttttagcaccctcaactcaatggcaaatgacactaccaaagacctcaacctatggaagtcccattgcaacaaaaatgtggagttctctggtactgaaacagaacaagaaaggagctgctaaaagctctggcaagtttaaagtggttgccttgtctgaaaacagcactgtcaacaggctagagaacttactaaacatggacgtcactccatacaccgacaagatcatcgcttgatacgtttggatagg

SEQ ID NO: 208429 - DNA, 269 bp, Gossypium hirsutum
ttgtacgctcctttctgacgccgggctaacgcgtgtgcggacgcgtgggcggacgcgtgggagctatagcatacactactagtacccactactagcaatggcttcctcaatgatctcatcggctaccattgccactgcctcttcggcacaggctaacatggtcgctcctttcaccggcctcaagtctgcctctgctttcccagtcaccaggaaggccaacaacgacattacttctctcgcaagcaatggctgcagagtgcaatgcatgc

SEQ ID NO: 208430 - DNA, 284 bp, Gossypium hirsutum
gagacgctgaaaagttcaccatctaaaaagcttgaagtgctttcggctgataaatgaccagaataacctgtcttctcccccttggaaaaacgttctttcctctgctgtgaaagttctatacctatttttttcacattttcgctgtgaaagctcccttccgttcctcggtcctcttccgcagagatgctcttgatgctttgggattggctccgtactgctgtaggagaatgcttatgactcatgtcgacctcattgaaaaacttctgaactacaacacaattgag

SEQ ID NO: 208431 - DNA, 263 bp, Gossypium hirsutum
cgtccgagtaccgtttgttttttctttcgacccacgcgtgcggaggattaggttattgaaataagcaagaaactttatgttcgacccgggattggagtccgagccaagctgagaaccaaacactcgggtcatttcggatccacctcgggtgagaaaggtaagttcgggttgacaacaatccacattttaagggttgttaaaaagcttcaggattcggggatgcttgattgtctgcaattgctacacttccatattggatccca

SEQ ID NO: 208432 - DNA, 221 bp, Gossypium hirsutum
gtcgacctgtcacatatattaacgatgagcagtaatatcaatgtccggcgtcaatagatgagctgaagaatgaagatatacagcttcttttgaactcgatccgtaagctttctacgattgcacgtgcccttggggaagaaaggactcgaaaagaattgattccgtttcttagtgagaacaatgatgacgatgatgaagttctccttgccatggatgaagaa

SEQ ID NO: 208433 - DNA, 256 bp, Gossypium hirsutum
cgtcgagttcttatgcgatgccggtttggttgtgatcctcagcatttgcgttgacgatgtgtggagttgcgtcggtcaaagaatgtgatccattgatagcaccgagcctaaccctgactgggaggaagaaagagccagaccagttgcacaacgggtgatggatgggctaggttcactggagggatcttctttggtggaacatctggtgtgacttgggctaacttcctactgtatgtccttgaccttccttactgct

SEQ ID NO: 208434 - DNA, 191 bp, Gossypium hirsutum
cccacgcgtccgaaagaggtacatttccaaaacagagtttgaaacccacaaaaaaccagagtatctttggatctcaatccaaggcaagatctataatgtaactcaatggagtcaccaccaccctggtgggccacttccattactgaacctcgccggtcaagacgccaccgatgctttcatagcttatcatc

SEQ ID NO: 208435 - DNA, 245 bp, Gossypium hirsutum
  unsure (1)..(245): unsure at all n locations
gtcgctttgttgagaaaagtactgcatatcatccttggatctggtctgctgggaatgatgaaatagaatacatgccttacatggatgaagttgtcccttttaagtcctatctccaacggtaccctacacctcatttgtcttgtaaaagcagcagcccaatgtggtatgctattagacgtgcatctgctcatatcattgngctatcgagctactctccatttgtgaaatacacacctcaatatgag

SEQ ID NO: 208436 - DNA, 262 bp, Gossypium hirsutum
cgcgtgcgcgagcctcaacggtgttttgtgattaaaaaaacgaccaagattgtggcaaaacaagattgcttccctgcatgaaccatggctagtggataacggcttgaagggatctagcatggagattcgccatggcaggactgcacacaacatgtcgccttcgtcattgcggaaaaaataggacctgacgctagtttccaaggttgggtatgcaatgcttaggcagttcctcgccaaccttcaataggtcatattagggacc

SEQ ID NO: 208437 - DNA, 330 bp, Gossypium hirsutum
  unsure (1)..(330): unsure at all n locations
tccggtcctgaattccccgttgtacgctctcgtccgcccgcgcttccgtggatttccaatggttctgctganaactaatgaatggaaaggtagttgcttgccatatttcttgataaggattattataaaattaaatacaaaaaaatactaatctttacaaactgcgtcctctttaaagaactctttcttttctttccctctttttcctttttacttaacccttatcacctttccttttctttctttctttctttcctcttttacctatttccctggttttttaaattctcctttcgaattcatggcattctttttccccttttaatcctt

SEQ ID NO: 208438 - DNA, 298 bp, Gossypium hirsutum
cccaggcgtccggctggttggggagagaggacttcaactctcaggtgggcataagcagatgattgctatagccagggcaatgttgaaaaacccggcaatcctactcttggatgaagcaactagtgctctagattccgagtcagaaaagttggttcaagaggctcttgatcgtttcattattgggaggacaactcttgtaattgcccatcgcctttccactattcgcagggttgatcttgtaccttgcctccaccagggaagtgtttttgaatttggaccacatgatgacctctttgcc

SEQ ID NO: 208439 - DNA, 242 bp, Gossypium hirsutum
  unsure (1)..(242): unsure at all n locations
gcgtccgcccgacccttccgtggatttccaatggatctgctganaactaatgaataaaaaggtacttgcttgccatatttcttgataaagaaaataataaaaataaaaacaaaaaaatacaaaattttaaaaactgcttcctctttaaagaaccctatctttctttccctgttttcctatttaccaactctttacccacctttccttattctttctttcttactttcctcttttaccttttc

SEQ ID NO: 208440 - DNA, 301 bp, Gossypium hirsutum
tcgggcaaacacaccaagtcaacctaaagccttatgcaccatggctacctctgctatccaacaatctgctttcgttggccagaccgctttgaagcagtccaatgagctcttacgcaaagtcggagctttcgatggtggtcgtgttaccatgcgcagaactgtgaaaagtgcccctaccagcatctggtacggccctgaccgcccaaagtacttgggtccattctcagaccaaatcccatcatacctgacaggtgaattccctggtgactatgggtgggacactgctgggttatcagctgac

SEQ ID NO: 208441 - DNA, 246 bp, Gossypium hirsutum
cccacgcgtccgatatttaactatagcattcactactacattttcttctagctctggagggataattatggggaggaaattcttcgttggcggcaattggaaatgcaatggaaccactgaggaagtgaataagattgtgagtactttgaatgctggagaggtgccttctcaggatgttgttgaggttgtggttagccctgcatttgcgttccttcctttggtcaaaactttactgatacccgattt

SEQ ID NO: 208442 - DNA, 83 bp, Gossypium hirsutum
cccacgcactcgggtccactttccggtgattcaccatcttacttgaccggtgagttcccgggtgactatggttgggacactgc

SEQ ID NO: 208443 - DNA, 266 bp, Gossypium hirsutum
ctcttaaaccttaccttagtggataacatctgttatgtaagtcggcgaaacgtatccttagcgtagggaaatggattggctttgagggctgggcacggtggtcccagacccgaacccgacggctgtcggcgcactgctcgagctgttcccgcggccagagcggaactccgcgtgcctgccgggggacgtactgggaacggatccctcgggggcattccccgggcaactaacagttgattaagaactggtacggacaaggggaattc

SEQ ID NO: 208444 - DNA, 411 bp, Gossypium hirsutum
cccacgcgtccgatatttagctatagcatacactactagtacccactactagcaatggcttcctcaatgatctcatcggctaccattgccactgcctctccggcacaggctaacatggtcgctcctttcaccggcctcaagtctgcctctgctttcccagtcaccaggaaggccaacaacgacattacttctctcgcaagcaatggcggcagagtgcaatgcatgcaggtgtggcctcctactggaaagaagaagttcgagactctctcatacctccccgatcttacacccgtgcagttggctaaagaagtggattaccttcttcgctcaaaatgggttccttgcttggaattcgaattagaggagggattcgtgcaccgtaaatactcgagcctacccacgtactacgat

SEQ ID NO: 208445 - DNA, 177 bp, Gossypium hirsutum
attatgattctttatttatgttaataataaagttactattactgaatgaatcaaatcatgtgtatcttggatcggttctatggcatccttgcttcccttggataatggcaaaaagaggccaacaacttgtttttagggcttgataatgcctgcaaaaccacactgttttatatgctc

SEQ ID NO: 208446 - DNA, 195 bp, Gossypium hirsutum
gtccgggttagggaaaccagcggagtacttgcattatgatttggattctttggaccagagcctggctaagaatatggctggtgagatcattggaactaggaccgaagttgccgacttgaaggcgacgccgtttcagccttacagcgaggtttttggtctacataggtttagggagcgtgaattgatccatggacg

SEQ ID NO: 208447 - DNA, 339 bp, Gossypium hirsutum
cggacgcgtggtcggacgcgtgggaaatctgtgatcatcccaatctttgccatagcaatcagtacttttgttagttttagctttgctgctatgtatgggattgcagttgctgcccttggaatgttgagcaccattgcaactgggttggctatcgatgcttatggtcccatcagtgacaatgctggaggtatagctgagatggctggtatgagccatcgcattcgtgagagaactgatgctcttgatgctgctggaaacaccactgctgccattggaaagggatttgccattgggtcaacggcgttggtgtctttggctctatttggtgcctttgtgagc

SEQ ID NO: 208448 - DNA, 318 bp, Gossypium hirsutum
accaccatcactgcctactcctcagccatggcaaccaccacagctgccaccgtgtcacattttttcggtacccgtatccaaacctctaacccaagctccggtagaatccaagctaggttcggctttggaaccaagaaagcaccacccgcaccaaaaaaggccgtccctaaacgggcatccgatcgccttgtttggttccccgcgcaaacccaccggaatggctgacggacaatgatcggagaccgtgggttcgatcctttcgggtttgctaaccggctgaatacttacagtacgatttggactcgttggaccaaaact

SEQ ID NO: 208449 - DNA, 420 bp, Gossypium hirsutum
cggcattgcgtgcgggacccacgcgttcgcggacgcgtgggcggacgcgtgggcggacgcgtgggcggacgcgtgggggcttccatcaacggttggtgccttacctcctcttcttcctccaccaccacctcctctttttccgctcgtcgacgacctacattgcggccttcggtcgtcgctagccttaactcttctccttctcctccgactcttatccaagaccgcccggttttcgctgcccctgttcctttgctcaccccgagagaagagatgggaaacaagtcctacgacgaagccattgaagctctcaagatacttctcagtgagaaaggagaactgaaagctgaagcagcttgcagggtagatcaaataacagcagaggtaaacacaacatcagctgacggcaaaccatctgactct

SEQ ID NO: 208450 - DNA, 360 bp, Gossypium hirsutum
cggacgcgtgggcggacgcgtgggaaatctgtgatcatcccactctttgccatacccatcagtacttccgtcagctgtagctgcgctaccttctatggtacctccaccaccacctcctgttttgccgctcgccaacgacctacattgcggccttcgtgcgtatctggccttaactgtccttcttctgctgcgactcttatacaagaccgtccggccttcgctgtccctgttcctttgctcaccccgagagaagagatgggaaacaagttctacgacgaagccattgaaactttcaagaaacttctcagtgagaaaggagaactgaaagctgcatcagctgcaagggttgatcaaataaca

SEQ ID NO: 208451 - DNA, 401 bp, Gossypium hirsutum
cccacgcgtccgaggaaaacaaaccgcgtcaacctaaagccttaggcaccatggcatcctctggtgatgcacaatctactttttgatggccagaccgctttgaaacagtccaatgagctcttacacaaagacggagctttcaatcgtgggcccgttaccatgcgcagaactgagaaaaatgcccctactagcatttggtatggccctgaccgcccaaagtacttgggtccattataagaccaaattccatgatacctgacaggtgaattatatggtgactatggatgggacactgttgggttatcagttgaccatgggacattttctaagaaccgtgagcttgacgtgatccactgcagatgggcattgcttggagccattgattgtgtcttccctgaaat

SEQ ID NO: 208452 - DNA, 417 bp, Gossypium hirsutum
gccacgcgtcacgacgcaaactgaaaggcgtggaggatatggtgggcctcgaggttctttccgtggaggacaccgtggtggttttaatgatggagaatctggagagggggagcgccctcgcaggatgtatgatcgccgtagtgggacaggacgtgggaatgagtttaaacctgatggttctggatgtggtaattggggtagtcctacttatggaattgcttccgaggcccaaaaaaatgtcccttaaaatgaaaagaatgttggcttttagaaacaatttttagaggaaaataccctttttttctttcaaggggaaaatttttaatttatctttggagaaaaagccccaaaacaccgggatgacttttttaaaatattataaaatttttttggagaaaaaaaaaaattttttttttc

SEQ ID NO: 208453 - DNA, 409 bp, Gossypium hirsutum
cccacgcgtccggcaaaggtcaaggtcgtgaaggtcacttcccctgggaaagtagaccaagatggtatatccaaggtgattgagcagataatagatgaagaagatgaagaaaaagatgctgatatagaaagcatagaagtggatgatgaaattaagagtgataatgaccaagagagaggtaaaattgagatggatgtggataatggagttattgatagtgataggcaaattgaaattgcaattaaagttgttgttgggggtcttgaacaaaagctttctggcaaggttcctgcattagagtcacttacagttcctgctaagctagtgaaaaaggggcacctagctttttaatttttttttagaaagggacgtaagccaacaagatactattttaaaggcaaagggtttg

SEQ ID NO: 208454 - DNA, 365 bp, Gossypium hirsutum
cccacgcgtccggtcagatttcttttttctctctcaaaaatctctgaaatccaatactctccgatcctctgatcttttctttgacttggtttatgagcttgaaggagaaacccattcttggcggtacgcggattaagacccgcaaacggaatattgctgcgcccctggacccttcaccatttgctgatgcagtagtccagatctatttggataatgctggtgacctggaactggttgcaaggagcattgaatcttcaaatcttaacttatcaagatacggtgacaccttctttgaggttgtttttgctggaggccgcacacaacctgcctcacttaaacttgatgaaggggagtgcaacccttac

SEQ ID NO: 208455 - DNA, 322 bp, Gossypium hirsutum
tatattcagctatagcatacactactagtacccactactagcaatggcgtgctcaatgatctgatcggctaccattgccactgcctctccggcacaggctaacatggtcgctcctttcaccggtctcaagtctgcctctgctttcccagtcaccaggaaggccaacaacgacattacttttttcgcaagcaatggcggtagagtgcaatgcatgcacgtgtggcctcctactgggaagaagaaggttgagactttttcatacctccccgatcttacacccgtgcagttggctaaggaagtgtattacctttttccctcaaaa

SEQ ID NO: 208456 - DNA, 324 bp, Gossypium hirsutum
ggatgttttagtcaaggaaggagttcccccactcagtcacacactttgtttcaattttgcctattgccattcttttacatttatatataaaacagacctccgtgtccttgcttgatttgtatcacctaagtttggttggttcagattaatttgagacatataccagataaggtagggtggaagaggagggatgaagatgccgatagggttcaggttccatccgacagatgaagagctggtggttcattacttgaagagaaaggccttaagccttcctttacctgcttaagtcatttccgagtttgatgttttggggactaatcc

SEQ ID NO: 208457 - DNA, 239 bp, Gossypium hirsutum
cgccgcacccggcgcgcgcacccgtccgattatatcttcctctccacctttgaaccatgtcggcttttgttggcaagggtgcgaggagtcgatcaagagggccacgtacatcgccacgccaggcaaaggtattttggcggcggacgagagcacaggcaccatcgggaagcgtctctcgagcataaacttagacaccatcgagtccaatggccaagccttccccgagatccttttaacct

SEQ ID NO: 208458 - DNA, 418 bp, Gossypium hirsutum
gataaagtcaatgatccttacagcgtgtctgttcccatttatgtgctttggcattggtttcatggtgaatacagtcgctattttctatggatctctagcagctattccttttggaacaatggtggttgttttcgtaatttgggctttcatttcattccccctggcccttcttggtacagttgttggaagaaactggagtggtgctccaaataatccttgccgtgtgaagaccattcctcgcccaattccggagaagaaatggtatttgaccccctctgtggtgtctttgatgggaggacttctgccatttggcagcatattcattgaaatgtattttatcttcacatccttttggaattacaaggtgaagttctttttcctaggttttaatcatttgacgagggacaaaaatacattt

SEQ ID NO: 208459 - DNA, 387 bp, Gossypium hirsutum
gccggatgagattactcttaacacgcttttatatgagttttttaagaatggacggtttgatgatggggagaagatatggggtaaaacggtggagaaaaacgtggagcctgatattaggagttataatgctaagttgcttggattttcaactgaaaagaaactgaaagaggcagttaactgggttgaaaaaatgaggtgtaaaggacttaagcttgatgtgtttaccttcaattatatgatacgagcttgtgtaaatgaggaaaaattggagcatcctaaagagtggtttaatcaattggggaaaaatgattgtgcaccagaataacttgacttttacgacgttagttccattccttttgtgagaagggggatttagagttttgccct

SEQ ID NO: 208460 - DNA, 234 bp, Gossypium hirsutum
catgggcgctcctttcaacggccctaaagctggctttgcttttccaagcaccaggaaaggccacgaccacctttctttttttgcaaggcatggcgggagaatgcaatgcatgcaggtgtggcctcctactggaaagaagaagtttgagacttctttataccttcccgatcttacacccctgcagttggcgaaaaaagggaaccactttcttttagcttgtctttgccaaaaagg

SEQ ID NO: 208461 - DNA, 255 bp, Gossypium hirsutum
taccggcggaataccgcccggtcggcggacgcgtcaggccacgcgtccgcccacgcgtgcgctttctcttctcttaccatggatccttacaaggttcgggcttctagttcctttgattccccgttctggactaccaattctggtgctccagtttggaacaataactcatcacttactgtgggagcaagaggtccaattctccttgaagactatcatttggtggaaaagctagctaatttcgacagaaaacgcata

SEQ ID NO: 208462 - DNA, 397 bp, Gossypium hirsutum
gcctgcacgtaccggtccacacgtccggttatctctgagggtgtcttaataaacgccttcgatttactttcggtttccatttacttctttgtttctacgtttttgaatttttagtaagcgaaaatgagagagtgcatttcagttcacatcggtcaggctggtatccaagtcggaaatgcctgctgggagctttactgccttgaacatggaatccagcctgatggccagatgccaagtgacaagactgtcggaggaggtgatgatgcttttaacacctttttcagtgaaactggtgctggaaagcacgtccctcgtgctgtctttgtggatcttgagcctactgttattgatgaagtgaggactggtacttaccgtcagcttttccaccctgagcaac

SEQ ID NO: 208463 - DNA, 344 bp, Gossypium hirsutum
gcatacactactagtacccactactagcaatggcttcctcaatgatctcatcggctaccattgccactgcctctccggcacaggctaacatggtcgctcctttcaccggcctcaagtctgcctctgctttcccagtcatcaggaaggccaacaacgacattacttctctcgcaagcaatggcggcagattgcaatgcatgcaggtgtggcctcctactgaaaagaagaagtttgagactctctcatacctccccgatcttacacccgtgcagttggctaaggaagtagattaccttctttgctcaaaaggggttccttgcttggaattcgaattagaggaggga

SEQ ID NO: 208464 - DNA, 221 bp, Gossypium hirsutum
cccacgcgtacgcccacgcgtccgcatgagtggtgttacatgctgcctgcgtttcccgggtcaggtaaactcggacctacccaagcttgctgaaaacctaatcccgttcctcaaactacatttattgagggccgggttctctcctttaacgtttcgaggttcccagctgtacatagttctaactttcccacacttaacacaccaaatgtgggatctcaata

SEQ ID NO: 208465 - DNA, 254 bp, Gossypium hirsutum
attacactgccggaaaaaaatcatggaccttgaaaatgtatacatcaatgaataacatccacagagataaggatgttgaaccaacagaatttgaggaatcagttgcccaggcattctttgatttggagaataccaaccaggatctgaaaagtgacctaaaggatctttacattaatacagcagtccaatttgatgtgtttggtaaccgaaaagctgttgttatccatgtcccctaccgattgaggaaagctttt

SEQ ID NO: 208466 - DNA, 398 bp, Gossypium hirsutum
  unsure (1)..(398): unsure at all n locations
ctttgttttccaatagttcgtaacaatggcggtctcacttcaagctgcagctaccctgatgcagccaatcaaggttgctgcaccatcaaggaccaatgtgccgctcaggtcctcccagagcgtttctaaggccttcggtttggagcctgttggtgctaggcttacctgctctttgcaaactgacctcaaggacttggctctgaagtgtgttgatgctaccaagctcgctggtttcgctcttgctacatctgctcttgttgtctcgggagcaagcgctgaangagtttcaaagcggctaacctactctgaaatccaaagcaagacatacatggaagttaaaggaacaggaactgctaaccaatgcccaaccattgatggtggtgtcgactcttttgcct

SEQ ID NO: 208467 - DNA, 220 bp, Gossypium hirsutum
tgcatttgctgtacaaatatggtgcattgacagaggtggccctgtcttcgttgctgtttatcagcctgttcagactctcgttggtgctattatgtcttccgttgctttaggtgaagagttctatttgggaggtatcatatgggcagcgctgatcataacgggattatatttagtgctatgggtgaaaagccgagaaagaaaattcgcagctcaaggaaaa

SEQ ID NO: 208468 - DNA, 405 bp, Gossypium hirsutum
atcacacagaacacgagttgcttccatacatccacaggttacagtcaaaggatctctccttgtgtcatagtatgattccgttgggatcttgtacgatgaaactaattgcaacggttaaacggatcccggtacaagggctgtggttacgggcaatcaaccctttggcccttaagggcccgctcaggggtattaagaaacgttccattatttaagggaacagtattgtgccttacaggggtgagtcattctcttttaacctaatgccggggctgctgtcgagaatgctcgactaatggcttttcgtgcgtattatatgtcaagaggggaccatcatcgcaacgtgtgcatcataccatccttctgcacatggtacaaattctgcaagagctgctatttttggaatga

SEQ ID NO: 208469 - DNA, 157 bp, Gossypium hirsutum
cgtcggtcaatccctgaatccaaatggttgcatgctccaccccatacaatggcagggcttaatggaggctgtattcagaagtcagaaccctgttatcctttttgagcatgttttgctttacaaccaaaaggagagaatcccatacttaggatattat

SEQ ID NO: 208470 - DNA, 459 bp, Gossypium hirsutum
cccacgcgttcgcccacgcgtgcgcatgagtggtgttacatgctgcctccgtttcccgggtcagctaaactcggacctccgcaagcttgcggtaaacctcatcccgttcccccgactacatttcttcatggtcgggttctcgcctctcacgtctcgtggttcccagcaatacagagcactaacagtcccagaactaacacaacaaatgtgggatgccaagaacatgatgtgcgctgctgatcctcgacacggtcgatacctcacggcatcagccgtattccgtggcaagatgagcacgaaagaagtcgacgaacaaatgatcaacgtccaaaacaagaactcatcctactttgtcgaatggattccaaacaacgtgaaatccaccgtttgtgacattcctccgagcggattgaaaatggcatcgacgtttatagggaactcgacttcgatccaagaaat

SEQ ID NO: 208471 - DNA, 255 bp, Gossypium hirsutum
cccacgcgtccgggcacaagcaatggcatctatgactggtttacgtggctcttcacaagctgggttggagggtattctccaactcagtggccaaacttcgttgaacgtttttagcaccaacagattggctgtggctagaccctttttaaccgttagagctaaacaggtccttctcttactcttaactgaacacatagctttcctgggttttgttttttttacatttggcttactgttttctttttttaaaaactg

SEQ ID NO: 208472 - DNA, 242 bp, Gossypium hirsutum
gcacaggaacttgggtccactatacggtgagcacaccatcttacttgaccggtgagaaccctgtgtgactatggcgggggcgagtggtggactctcaaatcatcccgagacctttgctaggaaccgtgagctcgaagtcattcactgcagatgggccatgttgggagctcttgggtgtgttttccctgagctgttggctaggaacggtgtcaagttcggtgaacctgtatggttcaaggccg

SEQ ID NO: 208473 - DNA, 328 bp, Gossypium hirsutum
cattttcagagggcagctggtggttttggtagctttattatcaacaagggacctataattccgattccttttgacactcctgatggggacattgccattttgatgggtgattggtacacgcgaaatcacacggctttgagaaaggcacttgttgccggaaaaggtctagggatgccatatggagttcttattattggcaaaggtactcaccgatataaggatactcttgtcgcttgggtgttctattattaaacaataaacgttcattcaggtaaaacttatggtctttaagttcacaacgtgggaatatcgatctccttgaatttca

SEQ ID NO: 208474 - DNA, 119 bp, Gossypium hirsutum
cacagaccgaaaaggaccgatggaaagggttgttttacgatatttcggacgaccaacaagacattactcgagggaaagggatggtggattccttgttccaagctcccatgaatgatgga

SEQ ID NO: 208475 - DNA, 343 bp, Gossypium hirsutum
aaagaaaatggctatcctttgtgcttcaacctcaaccattttctcttcttcagagagaacttcgtttggttccttgaaaaagactattcccagtaaccaaagctcatttcttgggttcttccctgtagcagcattgtccaaacctggctctgttctgccaacaacactgtctttctctaaacgagatttccgggtttgttgccaggacctctctcttgtccttgaaaaccaacgttggatgttcgaagaatccgaggctgatggccctgacatttggaacaacacatggtttcccaaagctaaagatcacataattccagaaaaaacttggtttgttgttgat

SEQ ID NO: 208476 - DNA, 241 bp, Gossypium hirsutum
gcggtgagactctgttgtatacctgtagcatatagtaatagtaagcagtaatagcaatggcctacgtgcatgatctcatcggcaaccattgtcaccgtgaaccgctccttcacggtacaggccagcatggtggtccatttaaccggcctaaaatctgaacctgctatcccagccaccacgaaggccagcatctacatcacttctgttgtaagcgacgggggtagagtgcacagcatgcagg

SEQ ID NO: 208477 - DNA, 276 bp, Gossypium hirsutum
tacattcagcaagccttgcacaatggccaccatcacctctgccgctgtcgctatcccatctggcaccggccttaaagccggtgcaaccgcagctaaagttagcgccacagccaaggttgcagcctctccagtcccaagggtcagcatcaaggcctccctcaaagacgtcggtgttgctgttgcggcaactgctgcaagcgcaatccttgccaacaatgccatggccattgaagtcttgttcggcagtgacaatgggggtctgcctttcattccaaa

SEQ ID NO: 208478 - DNA, 407 bp, Gossypium hirsutum
agcggagactagtggttgccaatgctgctaagggagctcaagtggagagtgtccagatgagcggtgagaggaaaacagagggcaacaatggcaggagggagatgatgtttgcagctgcagctgctgctatttgctcggttgcgggggttgcaacggcggagcctaaacgtggtaccgcagaggccaagaaggcgtatgctcctgtttgcgttactatgccaactgctaggatctgtctcaactgatgcagtgccattgcacattgtttgagggccatgagactatgcttgttatgggcaggggctgaaggatgtaatttaataatgcttgtaaattttcatttttataattgagaaacctaattttaatttgtgtcttttttaaaaaaaaaggattctatctttttt

SEQ ID NO: 208479 - DNA, 382 bp, Gossypium hirsutum
caccaccaccaccataattcaaccttttcataacaatggctgccatcacaaacgccgctgctacatcctccttcatggggacactcttccccgacgtctacacaagttcagggagattcgtcgccaggtttggctttggcggcaaaaaagcagctcccaagaaagtctcgaaacgaaccccagaccgccctctatggtacccaggagcagtggcgcctgattggctcgatggaagtttggtgggtgattacgggttcgacccgttcgggttagggaaaccggcggagtacttgcaatatgatttggattctttggaccagaacctggctaagaattcggttggtgagataattggaactaggaccgaggttgccgccttgaa

SEQ ID NO: 208480 - DNA, 202 bp, Gossypium hirsutum
gtcttgcttatgatatctccgatgaccaacatgacattaccatagggaaaggtatggtcgagtgattgttccaagctcccatgaacgatggtcctcactatgctgtcatgagctcctatgattacattacccaaggccttctcacatacgactggaacagcaccttggacggatttttctttgccccagcttttcatggaca

SEQ ID NO: 208481 - DNA, 361 bp, Gossypium hirsutum
ggaactgttcttaggccaaccccatttcttggccaaaccaaaaatgctaaccctcttagagatggtgtctctttgggcactcccaaatatgcaatgggaaatgaactatggtatggaccagacagagtgaagaactggggaccattttaagttcagactccatcttacttgattggagaatcccctggtgactatggttgggacactgttggtttggcagccgatcctgatgcatttgccaggaatagggctcttgaggtcatccatggaagatgggcaatgcttgggagcactaggctgcattacaccacaggtccttgagaaatggcttagggttgattttaaggaaccaggattgttt

SEQ ID NO: 208482 - DNA, 257 bp, Gossypium hirsutum
cgcacgcgtgggggagaagcgtccacatcaaccttgttgtcattggccatgtcgactctggcgggtcgaccactaccggtcatttgatctacaagcttggtggtattgacaagcgtgtgattgataggttcgagaaggaggctgctgaaatgaacaaaaggtcattcaagtttgcttgggtgcttgacaagcttaaggctgaccgtgaacgtggtatcacaattgattttgccttgtggaagtttgaaaccaccaaa

SEQ ID NO: 208483 - DNA, 485 bp, Gossypium hirsutum
cccacgcgtccgcccacgcgtacgcccacgcgtccgattacactttcggaaaaaaatcatggcgaccgtcacgacgcaagcctctgccgctgttttccggccatgtgcatcgaaaacacggttccttactggttcttccggtaagttaaaccgagacgtttcatttaaaccagtggcttctacatcgactagctcattcaaagttgaagcaaagaaaggggagtggttacctggtcttccttcaccagcttacctcaatggcagtcttccaggtgataatggctttgatcctcttggattggctgaggaccctgagaacttaagatggtatgtacaagctgagcttgtgaatggacgttgggctatgttgggtgttgcagggatgcttctgcccgaagttttcactaagattgggataatcaatgctcctcaatgggacgatgccggtaaagccgaatacttcgcatcgtcctcgaccctgttcg

SEQ ID NO: 208484 - DNA, 154 bp, Gossypium hirsutum
accggaccgagaacttccgcatcacccaacaaaatcaactgctttacaatggcctctacaaccatggctctttcttccccatcagtcgccggtaaggcagggaagttcttccctttcacccctgaaatccaaggaactggccgtgtttccatga

SEQ ID NO: 208485 - DNA, 387 bp, Gossypium hirsutum
atttgatccccccttttctgttgctggtactgagagtcccagatccaattaaaaaaaatgaaggtgatagataagatccagtctttgtcacaggaccaagggaaagtggttttttcctttgagttcttccttccaaagactgaggatggagtggacaacctgtttgagagaatggatcgaatggtggctcataatccatctttttgtgacatcacatggggtgctggtggttccactgcggatctcactttggacattgttaacaagatgcaaaacatgatatgtgtggaaacaatgatgcatttcacttgcaccaccatgcctgttgagaaaattgaccatgctcttgagaccattaagtctattggcatttaaaatgtccttgcc

SEQ ID NO: 208486 - DNA, 236 bp, Gossypium hirsutum
gtactatcaccttgtgcgtttaggaatatcagtttgacgaaaatcgagtcccggccacacggcgagaggccgatccgtttgatagatgacaccaacggaggaaccggcgatcatatgaagtatatgttctacgtggattctctaagtgtacatgacggaactgatagcccaaaacgctgtacttgaggcccattagctcacttccttcttgatactatagcgcagagacccaatgg

SEQ ID NO: 208487 - DNA, 283 bp, Gossypium hirsutum
ggcccgaaggtgaagtacaggttggggtaaccggacaccgtcacgctgcggtaggcgtacgcccccgaactccattccgcggccagttcacgcccgcccgatccgatgaccggaaacggcgtcccggctttcgacacgtcgaaaccggtggcgaagacgatggcgtcgaactggtgctcgataccttccacggtacgaatcccgcgcggtgacagccgcgcgatcggccaggtcaccagtttgcagttgtcggcctgcaacgccgggtagtagtcactggaca

SEQ ID NO: 208488 - DNA, 366 bp, Gossypium hirsutum
  unsure (1)..(366): unsure at all n locations
acccgggcgccaactgctggaccgagctcaccagcaggtcccgatgctcgggcacccactgcaaggcggcgttggagatgacgacatccgtctcgggttcgggtgaccagtcngcgatgctgcccaatcggacatcgagtccgcgttcaccggcggcggccaccatttccggtgacgagtccacacccgacaccgatgccgccggccagcgccgactcagcgtctcggtcaggttttccggcccgcacccgaggtcgaccacccgacgcggtgcgtccgcggccacgcggttcaccacgtcgaagaatgggcggccgccgtgatcggcgaacgccagataggtatcgggattccacataccccgag

SEQ ID NO: 208489 - DNA, 408 bp, Gossypium hirsutum
cttgttttctcagctcagttcccatggctttcgcttcggttttccgtaaatcagctaacgcgttggctccactcgcgattcgactcacccgagtccagaggaactaccactcttcgatcttcagggctttgaaccatgggttacagtctcagaaaccggccgttaaccgtttttacccaaatagcttccatttctctaccgccgttgcttccaagaaaccctcttctgatgagtctctcatccgagttcttgagtccgagattcagtttgctgagggtgatagctctgatcaggttgtaggaactcctagtggattcccttttgaagtcgaagataaccctgggactcaaattgtaacattgacaagagaatataatggtgagctcataaaagttgatgttcacatgc

SEQ ID NO: 208490 - DNA, 456 bp, Gossypium hirsutum
cccacgcgtccgcccaaaataagaagaaaaacaaaaatggccatggcaatggcgcttcgacgactctcctcttccattgacaagcctctccgtcctttcttcaatgccccttccctctattacatgtcgtctttgccaaatgaagctgtgtacgagaaggagaaacctggcgtcacttggccaaagcaactgaatgctccacttgaaaccgttgatcctgaaattgctgacatcatcgagcttgaaaaagcgcgccaatggaagggacttgaactcattccatcggagaacttcacttcggtgtcagtgatgcaagcagttgggtctatcatgaccaacaagtacagtgaagggtatcccggtgctagatactatggagggaatgagtacatcgacatggcagagacattgtgtcagaagcgtgctttggaagcattcacgttagatcctgaaaaa

SEQ ID NO: 208491 - DNA, 431 bp, Gossypium hirsutum
tcgcccacgcgtccgcccacgcgtccgctttttcccaaatagccatggctatggcgatggcgggaactgcaaccttcagtatctcatcagctacttcaatcttccggacttcatcttcacttaaattctcttcaaaaccaatgcttattccaatgcgtttttctccaaaaacccaatctcctcccagaactctccggatttacgctttgactagtaacgatatcaaagtgggtactaaccttgaagttgacggtgctccttggcgaattttggagtttcttcatgtgaaacctggaaaaggggctgcatttgtgagaaccaaaatgcgcaattatatcactggaaacaccgtggagaaaacgtttcgagctggaagtacgattgaggaggcaaacgttttcaaggaatcgaagcagttcacatacaaagat

SEQ ID NO: 208492 - DNA, 450 bp, Gossypium hirsutum
cccacgcgtccgaggaaatcggaccatttcggattaataaaactggctcatccctttatcttaacaaatattcatggaatatggaagcaaacattctattcctggaatcacctgctggagttggattctcctacacaaatacgagctccgatcttaaagactctggtgacgaccggacagctcaggatgctcttatatttctcaccagatggatgtcaaggtttccggcctacaagcaccgagaattttacattgccggagaaagttatgcagggcattatgttccccagttggccaaaaaaatccatgattacaataaagctcactcaaatccaatcatcaatcttaaaggatttatggtaggaaatgctgtgacagacaattactatgacagtattggaacttgtacgttttggtggagccattccatgatatcagatagaacatata

SEQ ID NO: 208493 - DNA, 379 bp, Gossypium hirsutum
aaaaattctcaagcaagatcttgctgctgatttttctggaggccggctaccatgttcttgatgaatctacacattttagcagtgatcttcagccatcatccaagttcctcaggaagcagagcatagggattctcgaacttgggattttgagtgcaaagaatttgcagccaatgaagatgaaggatggtaagttgactgatgcatattgtgtcgcaaagtatggaaacaaatgggtgaggactagaactcttcttgatactctgtatcctcgatggaacgagcagtatacttgggaagttcatgatccctgtactgtaatcaccattggagtgtttgataattcccacaccaatgggagcaaagatgatgcaagggatca

SEQ ID NO: 208494 - DNA, 272 bp, Gossypium hirsutum
ctgtgcgtgttaacaatggcgatgactgtaaatgccgcagtgtctttaccatcttccaagtcatgtaccctgtcatttaaaaactcagtcactgtccctgaaagaatcaacttcaacaagagtgttttgtgcccaaaaaatgtcagccttggtggaaatgtggtttacattagagctgatgtcactacagaagctcctgcaaaagcaccaataatttccaagaaagatgatgagggtattgttgtgaacaagttcaaaccaaaagaacccta

SEQ ID NO: 208495 - DNA, 452 bp, Gossypium hirsutum
aaatgtcgaagcgaggacgtggagggtcagctggaaacaagttcaggatgtcactgggtttaccagtggcagccacagtgaactgtgctgataacactggtgctaagaacctttatatcatctcggtgaaaggaatcaagggccgtctcaaccggttgccctctgcttgtgttggagatatggtgatggctaccgtcaagaaagggaagcctgatctcaggaagaaggttttgcctgctgtcattgtgagacaacgcaagccatggcgcagaaaggatggtgtttacatgtactttgaagataatgcgggtgtcattgtgaatccaaaaggagaaatgaaaggttctgctataactggtccaattgggaaggagtgtgccgatctttggccaaggattgcaagtgcagccaatgctattgtttaggaagtcaaaatctgtgctttggactat

SEQ ID NO: 208496 - DNA, 444 bp, Gossypium hirsutum
cccacgcgtccgtttagctgcggcttatataggcgaatccatggagggtcatcattgactagtttttgtttttgaaatagtctagcccttttttagcttagcttggtccaatccaatgtatgcgcaactcaagataatctacttacttagggaccataaatatacaaatacgacgatctagagtaataacaaaaaagattacgatattagagaattgtaataaaaaaaggaaagagatctaattgaaaagatctttttcctaaaattcagggttggtccattttttttattacttatatttatatcatatttaccttcgatcaatattatccgatcaatattatctttatcttgatattgttttgtttattcaatttcaatattatgagtcctaaatagaataggaattcttatggtatcaatttagggtctattattttaaaa

SEQ ID NO: 208497 - DNA, 442 bp, Gossypium hirsutum
gttcgccggcgaaggtaaaaacaagagcgactcgcctgaagcgacgtcgaacaattcaagtgcaaatctccagaaggcagtgaagagtgaaccggctgagaccgagtcgtctcagccgttaatttccgatccaacggtggagaaccggggtatcaagagaaaagaccgagaaaaggtgaaagggcagacgaagaaaagcaaaacaacggcgaaagagagctccgacgacgccgagaagctgccttacgttcacgttagagctcgccggggacaagcaacggatagccatagcttagctgagagagcaaggagagagaagattaatgcacgtatgaagctcctacaggagttagtaccaagatgcaataagatttcgggcacagcgttagttttggatgaaatcatcaaccatgtgcagtccctacaacgtcaagtggagttc

SEQ ID NO: 208498 - DNA, 446 bp, Gossypium hirsutum
cccacgcgtccggaaccccaattggttccaggggacagcagatgcggtgaggcagtatttatggttgtttgaggagcacaatgttttggaattcttggttcttgctggggaccatttgtatagaatggattatgaaaagtttatccaggcgcatagagagactgatgctgatatcactgtagctgcattgcccatggatgaaaaacgggctactgctttcggtctgatgaagattgatgaagaagggcgtataattgaatttgctgagaaaccgaaaggggaccaacttaaagctatgaaggttgatacaacaatattaggtcttgatgatgtgagggcaaaagagatgccttacattgctagtatgggcatatatgttgttagtaagaatgtgatgttggatcttcttagagaaaacgcttccggtgccaatgattttggaagtg

SEQ ID NO: 208499 - DNA, 431 bp, Gossypium hirsutum
cgaagattgtgttcagcttgttaaagctaattccatccaaggcaacaaggtgaataatattggtgttgtttacactccatggtccaatttgaagaaaactccttcaatggatgttggtcaagttggctttcacaattccaagatggttcggactgtgagagtggagaagcggattaatgagatagtttacaggttgaacaagactaaagtggaaaggaaacctgatttgaaagctgagaaagaagcagtttatgcatcggaaaaagccgagagaaagcaacagttgagggaaaaaaaacgccgagaggagatgcaaaggcttgaaaaggaaagacaagcagaaataagaagctacaagggtctgatggtctttgaaaagatgacattcaacaaacaaattgcagcaacaagcaagtctttccatgaagtag

SEQ ID NO: 208500 - DNA, 451 bp, Gossypium hirsutum
tcgcccacgcgtccggtctgcctctgctttcccagtcaccaggaaggccaacaacgacattacttgtctcgcaagcaatggcggtagagtgcaatgcatgcaggtgtggcctcctactgggaagaagaagtttgagactctctcatacctccccgatcttacacccgtgcagttggctaaggaagtagattaccttcttcgctcaaaatgggttccttgcttggaattcgaattggaggagggattcgtgcaccgtaagtactcgagcttacccacgtactacgatggacgctactggaccatgtggaagctgcccatgttcgggtgcaccgactcggctcatgtgttggaggagcttgaggaatgcaagaaggcataccccaatgcattcattagaatcattggcttcgacaacgtgcgtcaagtgcagtgcattagtttcattggctac

SEQ ID NO: 208501 - DNA, 414 bp, Gossypium hirsutum
cccacgcgtccgattcaaaggaaattgaaactcgctcaggtccataaacaaaggaaagcaaagagaaagaagcttttcatttcaagggttttagcaatggcaaccaatacgcaagagcagcaatctcaggctggtaggcaccaggaagttggccacaagagccttttgcaaagtgatgctctttaccagtatatcctcgagaccagtgtgtatccgagggagcctgaacccatgaaggagctcagagagttgactgccaagcacccatggaaccttatgacaacatcagccgatgaaggccagttcttgaacatgcttcttaagttgatcaatgccaagaacaccatggagattggtgtctacactggctattctctcttagccactgcccttgctattcctgatgatggaaag

SEQ ID NO: 208502 - DNA, 422 bp, Gossypium hirsutum
ggcttacatcaacggatggtgccttaccttctcttatttctgcaccaccacctcctctttttgcgctcgtcgacgacctacattgcggtctttggtcgacgctagccttaactctttttcttctactccgactcttatacaagaccgcccggttttcgctgcccctgttcctttgctcaccccgagagaagagatgggaaacaagttctaccacgaagccattgaagctctcaagaaacttctcagtgagaaaggagaactgaaagctgaagcagctgtaagggtagatcaaataacagcagagttaaacacagcatcagctgacggcaaaccatctgactcttatgttgagagactgaaagaaagcttcgtttacttggacaaagaaaaatatgaaaagaatcctgctcctgatggcgagc

SEQ ID NO: 208503 - DNA, 437 bp, Gossypium hirsutum
cccacgcgtccggttccaagtttgttgtaaaccaagctagaaccagcagccaacatggcctcagtagcagcctccaccggtgccggctcccttggcgtctctgaaatgctcggtaaccctctgaatttcagtggtggagctaggtcatcggctccaacaccatccaactcatccattttcaagaccgttgctcttttctccaagaagaaggccgctcctccaaagcccaaggctgctgctgtcgccccggccgatgaagagctggctaagtggtacggtccggacagaaagattttcttgcctgaaggtctgttagacagatcggagatcccagagtacttgaacggagaagttcccggagactatggatacgatccgtttggtctgagcaagaagccagaagactttgcaaaatatcaagcatatgagttgataca

SEQ ID NO: 208504 - DNA, 447 bp, Gossypium hirsutum
cccacgcgtccgcccacgcgtccgcccacgcgtccgcggacgcgtgggcttttttacttagtggaaactgaaaaaacccttgagttgctttttcctttttccgatttactgtttgccccactacttttgaaatctcagttttggtttcactttttcttttccatccatcaatccacattttcattagacttttcatccctttcaatgggtatgaaaagggcagaaaagcaaccaacttttctgcttttaaataaactttgattaactcttcaaggggttgtcaagttttccctttgcttgttttttttttagggtcacaatggaagctgcttttgggttccataattagcagtgggagataaccccacttctttttgtttcttataattgcatattctttgcatctagtcggtttccttttccttttttttttgtgtgttaattata

SEQ ID NO: 208505 - DNA, 420 bp, Gossypium hirsutum
  unsure (1)..(420): unsure at all n locations
cccacgcgtccgctgatattggagatagcaccaggtgcgaagaacatgttcagtttcttgagggagtcagaggagattcctcagaataatccaaagctcaaagctcatgctgtcaaggttctcaagatgacatgtgagtcagccatacaactgagagagaaaggggaagtggtagtggctgatactactttgaagtatttgggcactgtccatgtcaagagtggtgtcaaagacccccatttcgaggtggtgaaagaggcactcttaaggacaattgaagaagcaattggagaagagaaatggaatgaagagatgaagaatgcttggggtgaagcttatgatcaattggctgaagctattaaggctgagatgaagaaccaccatgatgaaactgcttaattacccttttacttncttcaa

SEQ ID NO: 208506 - DNA, 372 bp, Gossypium hirsutum
aagagtcttagcctatgttggtttaatgactaaattatgttttaattgtgtttcatttgaaggcagaaggaatatttcggattgatgccgaaaatagtcaagaagagtatgttcgagacaagttaaacaaaggtatcttaccgcacggaatcgatgtccattgtttagctggtttgataaaggcatggtttagagaactttctaatggagtgctcgattggcttacacccgagcaagtgatccatttcaacaacggaaaacaatggctttaacctggtaaagtgctttctttaacaaaagcttgtttacttggatgggcttataatttgattgcaaattgttgtggagtttgaccattccaccaaattgaat

SEQ ID NO: 208507 - DNA, 425 bp, Gossypium hirsutum
ctcctccccggcacaggccaacatggtggcccccttcaccggcctcaagtctgcctctgctttcccagtcactaggaaggccaacaacgacatcacttctcttgcaagcaatggtgggagagtgcaatgcatgcaggtgtggcctcctcttgggaagaagaagttcgagacactctcatacctccccgatcttacacccgtacagttggctaaggaagtagattaccttcttcgctctaaatggattccttgcttggaattcgaattagaggagggattcgtgcaccgtaagtactcgagcttacccacgtactacgatggacgctactggaccatgtggaaactgcccatgtttgggtgcactgactcggctcacgtgttggaggagcttgagaattgcaagaaagaataccccaatgcattca

SEQ ID NO: 208508 - DNA, 449 bp, Gossypium hirsutum
ctactccatgtatactcccaaaatctctaaaaagggaaatactagtcctttcgagggcaactgaaagaggagaaaaaaaaatctattggttttgatttgtgaggatggtaatcgatacaaccaacgtcaagggacttacgggacgctggggcatggcagcaaagacatgcgacacatgttaatcagcggcagcggctattttctgtcgttctgattccgcttttatgtgcctcagctgcgattccaggatccactctgctaatgacaggcttgtttcttgtcgtcacaagagggtgtggatgtgtgaggtgtgcgagcaggccccagctgccgtcacttgcaaggccgacgccgctgccctttgcgtcgcctgcgattccgacatccactctgctaatcctttggctcgtcgccacgagcgtgtccctgtccagcctttctttgactct

SEQ ID NO: 208509 - DNA, 384 bp, Gossypium hirsutum
tctgtctctaccactgaaaacaaagaaaaaatggcaacggagatggcccttgtgaagcctatctgcaaattcagtacaagcagtccaatttttagcaactcccgatatgggaagttcaccaccgtcagaatgtcatctacttcccagtcaacaacaaaggccgccgcgaagggtggcaagaaagctgccaaaaccgccatcaaagagacccttttgacaccaaggttttacacaaccgactttgatgaaatggaggcgcttttcaacactgagattaacaagaaccttaaccagtccgaatttgaggcactgctgcaagagttcaagactgattacaatcagactcactttgtaaggaacaaggagttcaaagaaactgctgat

SEQ ID NO: 208510 - DNA, 434 bp, Gossypium hirsutum
cccacgcgtccgcgaaaaggttatagagaaattgcttagaaaccacctgtgttcttccctggagattttgatctgtttttctccttcattctcatattcttattgcttctagtttctttgagacgtatcgaacgatcggttttctgattttaaacactacatcgagatatattcttcttctcaaacatcgtcatgttgtcattaccttcaacttcctcatacatttctagaaagaaatatgatgttttcttgagttttataggtgaagatactcgcaaaaacttcaccgatcatctctatgctgctctaaagaggaatgggatcgtcactttcagggatgacccaaacctggaggccggagaagagatctcattaaaactccttaaagcaattcaacaatcatggtgctcggaatctgttttttaaaaacttat

SEQ ID NO: 208511 - DNA, 425 bp, Gossypium hirsutum
tccacgcgtccggaaagagaaggccggagtgaaagacaagacacagagagagagacagagagagagatgtcgggaggaatagcgcgtggttgactcgccgaggaacgtaaggcatggaggaagaaccatccccatggtttttttgcgaaaccagagacgttgcctgatggaacggtcaatttgatggtgtggcattgcacgatccctggtaaagcaggaactgattgggagggtggctacttcccgctcacgctccatttcagtgaagattatgccagcaagcctccaaagtgtaaatttccccagggctctttccacccaaatgtttatccatctggtactgtttgcctttcaatcctaaatggtgatagtggttggagaccagccataactgtgaagcagattcttattggaatccaagatct

SEQ ID NO: 208512 - DNA, 450 bp, Gossypium hirsutum
cccacgcgtccgagctaattgagctccatttccctagtaaacagagttctttttttcacagcaatggcagccatgaactccagtgttttggcatgcaactatgctatctcaggcactggatcatctgagcttaatgccaagcttgcttcagcaccatcagttgcttccccagttatgtgcggtggtcacaagttgcctgtgatcagagcccagcaggctaaattttctgattccaaaggatcaggtgccagtgaaggaagaagagctgctatgctctacttggcagctggccttttcaccacagctgttgcttcttctgcaaatgctggggtcattgacgagtaccttgaaaagagcaaagctaacaaggaattgaatgacaagaagaggttggcaacaagtggagcaaacttttccagagcatacactgttcaatttggcacttgcaag

SEQ ID NO: 208513 - DNA, 454 bp, Gossypium hirsutum
cccacgcgtccgaattcagttaacaatttcacagttgttttcttcagtctctctctcagccatggctgcagccatctccaccgtcgctgccgctgccgccgccaaccgagctctgggagtgtcagtcccaacctcagctttcatggggaagaaagtgagctcaagattcaacagcaccaggcaggttccttcgggaagttttaaggtgatggcggcggagaaagagatagacgaagagacacagaccgaaaaggaccgatggaaagggttggcttacgatatttcggacgaccaacaggacattactcgagggaaagggatggtggattccttgttccaagctcccatgaatgatggaactcactatgctgtcatgagttcctatgaatacctcagccaaggtcttaaaacgtacaatttggacaacaacatggatggtttctacattgctcct

SEQ ID NO: 208514 - DNA, 360 bp, Gossypium hirsutum
cctggacaccgtgactttatcaagaacatgattaccggtacctcacaggctgactgtgctggggtcattattgactcgaccactggtggttttgaagctggtatctctaaagatggtcagactcgtgagcatgctttgcttgcttttaccctcggtgttaggcagatgatttgctgctgcaacaagatggatgcaacaaccccaaagtactcaaaggcaaggtttgatgaaattgtcaaggaagtctcttcttatcttaagaaagttggttacaaccctgagaagatcccatttgtcccaatctctggttttgagggtgacaacatgatcgagagatctacaaaccttgattggtacaag

SEQ ID NO: 208515 - DNA, 453 bp, Gossypium hirsutum
  unsure (1)..(453): unsure at all n locations
cattctcatagctttcatcatcttcaaatggctaaatcacttgtcattgttatgttatgttggctcttagtaattgttttactgggagaaatccaggcatcaagcccttctcaaaaacaaagacaaggcaaccatggaaatggaatgtatggtgccacccaagggagccttcgtcctcaagagtgtggtccaagatgcacacagagatgctcagctacagcatacaagaaaccatgcatgttcttctgccaaaagtgttgtgccaagtgcttgtgtgtgcctccaggcacttacggcaacaaacaatcttgcccttgctacaataattggaagaccaagagaggaggccccaaatgcccttagatccctaactatatctatgttgntctctagttaaagtgcttaattatccaattataggccatcgatcttcttcttttttccctaaatgat

SEQ ID NO: 208516 - DNA, 399 bp, Gossypium hirsutum
cccacgcgtccggagactcttttgtatacctttagcatatagtaatagtaagcagcaatagggatggcgtcctccatgatcggaggcggcaaccattgccaccgtgaaccgctcctccccggcacaggccaacatggtggcccccttcaccggcctcaaatttgcctatgctttcccagtcaccaggaacgccaacaactacatcacttttcttgcaagcaactgttggagagtgcattgcatgcatgtgtggccgcctcttgggaagaataatttcgagactctctcataccttcccgatcttactcccgtacagttggcttatgaagtacattaccttcttcgctctaaatggattccttgcttgtaatatgaattatatgagggattctttcaccg

SEQ ID NO: 208517 - DNA, 430 bp, Gossypium hirsutum
cagcattgaaagtcttgaaaagcattggcaagttgggagaactaaaacgaccagtcgaggttattgcatttagtgatgaggagggagtgaggtttcaatctacctttcttggcagtgctgcagtagctggaattttacctgttacagcattgaagatatctgataagagtggtgtgacagtgcaagatgctctcaagggaaattccatagaaattacagaggatagcctgttggggttgaagtatgatcccgcatcgatttggggttattttgagcttcacattgaacaaggacctgtactagaatgggttggttttcctcttgctgtagttaaaggcattgcgggacaaacacgaatgaaggttacggtgagaggttcacaaggacatgccggaacagtgccaatgtcaatgcgtagggaccctatggc

SEQ ID NO: 208518 - DNA, 430 bp, Gossypium hirsutum
  unsure (1)..(430): unsure at all n locations
catacttgttgctctctaaacctgcaaagggtgttgagaagaccttttctcttctctccctgctccccaaaatcctccctatctacaaggaagttatatctgagcttaaggcagctggtgcttcctggattcagtttgatgaaccgacccttgtcttggatcttgactctcacaaattgcaagcattcactgctgcttatgatgatttggaatccactctctctggcttgaatgtattgatcgagacctactttgctgatcttactgctgaggcatacaagacactcattgggttgaagggtgtcactgcttatggtttggatttggttcgtggagcccagactcttgatttggtcaagagcaatttccctaagggcaagtacctctttgctggagttgtggatggaaggaacatttgngccaatgatct

SEQ ID NO: 208519 - DNA, 426 bp, Gossypium hirsutum
atcatttctctttgcagcaatgtgtgaaaccaaaagcttctacttgtggcttctccaagtcattggcttgttaggcattcttgctctttgtctatggctagccatgcgtcctaaaagccccaactacaccatcgtcaacttttcaatcccgggggcaaatacaagcaacgaatccgatcacggttccatacaatacgaactcgatatccaaaacccaaaccaagattccggtatatactacgaagatatcttccttatgttctatcatggggaagataaagttgggagaaaaactataccttcgttttatcaagggaaggataaaactcgtcaagtgattgatcaagtggatgttgagacccgcttttggactgttcttcgtaaagcaataatgaatgcaacggctgaattaaaggtcgatttgtc

SEQ ID NO: 208520 - DNA, 450 bp, Gossypium hirsutum
cgggtataaagtccaaaccgacccggtaaagaatactattgacccggattgtggtggtgttggtatacttggtattgcttgggcttttggtggcatgatctttatccttgtttactgcactgctggtatctctggaggacacatcaacccggcggtgacgtttggactgttcgtggggcggaaggtgtcactgatccgagccctgttgtacatggtggctcagtgcttgggtgcaatctgtgggtgtgggttggtgaaggctttccaaaagacttactacaatagctatggaggtggtgccaacgagctccaagatgggttcaacaagggcaccggcttgggtgctgaaatcattggcaccttcgttcttgtctacactgtcttttcaaccactgatcccaagaagagtgcaagggattcccatgttcctgtggtggcaccactttccat

SEQ ID NO: 208521 - DNA, 446 bp, Gossypium hirsutum
  unsure (1)..(446): unsure at all n locations
aaacaatgctgctgttttccgcacacaggaaacactagaggaaggttgtcagttaattgataagacatgggaaagcttccatgatgttaagttgaaggatcgcagtttaatatggaactctgatttgatagaatctatcgagttggaaaatcttttgataaatgcctgtatcaccatgcactccgctgaagctaggaaagagagcagaggagcacatgctcgtgaagattttacgaaaagagatgatgagaactggatgaaacacacattgggtttttgggagaatgagaaggtgagactggattaccggccagttcacatgaacacattagatgatgaagttgagtcattcccacctaaagctcgtgtctattaaaactcgtgctgtaatgcanatgggttatgatgatccgacaattcagcccggcataagttatggagaacaa

SEQ ID NO: 208522 - DNA, 424 bp, Gossypium hirsutum
ctagctacccatctccctattctcaatggctttggcaacccaagcctccctcttcactccatgaaccctccgcaccccaaaatgcggcgaccgcatcgccgccgtgttacggaaacaaccaccgttcctaaccgtccctagcttcaagtccccaaaaagcatcatcgccccacgcaccatcaaagccgaagcaaccgaagagaaagccgagacaaccgccacaaaggaagcaccagtcggtttcaccccaccagagctggacccaaacaccccatcaccgatcttcggcggcagcaccggcgggcttttacgcaaagcacaattggaagagttttacgtcatcacatgggagtcacccaaggaacaaatcttcgagatgccaacaggtggtgcagccatcatgagacaaggtccgaacctgctg

SEQ ID NO: 208523 - DNA, 454 bp, Gossypium hirsutum
ctctaatacacccactgtaaaaaaaaagagatataatttgatcagacggtgaaaatgggtggccttgaaactgagagaacaacaacaggatgggctgccagagatccttcaggagtattgtctccttacacttacactcttaggagcactggtcctgaggatgttttcgttaaggttatgtgctgtggaatctgccacaccgatcttcatcaagccaaaaatgatcttggcatgtcaaactacccaatggttcctgggcatgaagtggttggtgaggtgttggaagttgggtcagatgtaagcaagttcagagttggtgatattgttggcgttggttgtattgttgggtgttgcagaaactgccgaccatgcgactcagacaatgaacaatactgtcttaagaagatctggtcgtacaatgatgtttacactgacggaaaacccacccaagggg

SEQ ID NO: 208524 - DNA, 445 bp, Gossypium hirsutum
cccacgcgtccgtccacgcgtccgtttctcttttttgagtctccccatcgttcaaaaaagatgtgcaaaggtttagaacaaggagggaacagaagcagttcttgtctgaaacagggtttttcatcagggttggtgaattgtgagctctgtaattccagggtttccttatattgccaagccgatgatgcatatctgtgtaagaagtgtgacaaatgggttcaccaagctaatttcttagctctcaggcatatcacgtgtttcctttgcagtacatgtcaaagcttaacccagagatatcttatcggagcttcacatgaagtgatgctaccaacaatggtgacctcttctgaaacaagccactgttactctgacatggaaacccacctttcaacaacgctgaaaacaccttttctttttctctgactctaaaacttttctcttcttc

SEQ ID NO: 208525 - DNA, 452 bp, Gossypium hirsutum
cagagttctttttttcacagcaatggcagccatgaactccagtgttttggcatgcaactatgctatctcaggcactggatcatctgagcttaatgccaagcttgcttcagcaccatcagttgcttccccagttatgtgcggtggtcacaagttgcctgtgatcagagcccagcaggctaaattttctgattccaaaggatcaggtgccagtgaaggaagaagagctgctatgctctacttggcagctggccttttcaccacagctgttgcttcttctgcaaatgctggggtcattgacgagtaccttgaaaagagcaaagctaacaaggaattgaatgacaagaagaggttggcaacaagtggagcaaacttttccagagcatacactgttcaacttggcacttgcaagttccctgagaacttcactggctgccaggatcttgcaaagcaaa

SEQ ID NO: 208526 - DNA, 452 bp, Gossypium hirsutum
gacaaattgaagttaggaggatcggagctcaaagtgacaaggctcggaatcggagcttggtgttggggtgacaccagttactggaacaactttcaatgggatgatcaaaaattgaaggctgctaaggctgctttcaatggaagtcttgattgcggaattacgtttttcgatacagctgaagtttatggctctccgctcgccttatgtgctgaaaattctgaaactctactgggaagatttataaaggaaagagaaaatgataatcccggtgaagaggttgttgttgcaacgaagtttgcagctttgccttggaggtttggtcgtcaaagtgtcatcagtgcactcaaggattcccttaatcggcttggcctttcatcggtagacctttatcaactccattggcctggtatatggggaaatgaagggtatattgatggtcttggcgatgctgt

SEQ ID NO: 208527 - DNA, 443 bp, Gossypium hirsutum
gttcgtaacaatgtcggtctcacttcaagctgtagctaccctgatgcaaccaatcaaggttgctgcaccatcaaggaccaatgtgctgctcaggtcctcccagagcgtttctaaggccttcggtttggagcctgttggtgctaggctcacctgctctttgcaaactgacctcaaggacttggctcagacgtgtgttgatgctaccaagctcgctggtttcgctcttgctacatctgctcttgttgtctcgggagcaagcgctgaaggagttccaaagcggctaacctacgatgaaatccaaagcaagacatacatggaagtcaaaggaacaggaactgctaaccagtgcccaaccatcgatggtggtgtcgactcttttgccttcaagcctggcaaatactacgccaagaagttctgcttggagcccacttccttcactgtca

SEQ ID NO: 208528 - DNA, 429 bp, Gossypium hirsutum
cccacgcgtccgcccacgcgtccgcttggatttcgagacagtctccgacttgaagccggcctgtgtttatatgggaatgacatggagcaacatataacaccagtggaggctggactgacctgggccatagggaagaggaggagagcagaaggtggattcctaggagctgaggtaatccttaaacaactggaagaggggccgtcaatcaggcgagttggcttcaccttcaatggtccaccttctcgatcccacagtgagattcatgacgagaaagggaacaacattggtgaaatcaccagcggaggatttagttcttgtcttaagaagaacatatcaatgggatacgtgaaatctgggttacacaaggcaggcaccaaagctaagattttggtaagaggaaaggcttatgatggggttgtcacgaaaatg

SEQ ID NO: 208529 - DNA, 447 bp, Gossypium hirsutum
cccacgcgtccgcccacgcgttcgcccacgcgttcgctcaaagcctgtaatctccattgctgcgtcatcatccttcttttccaaacccaaactcaaacaaatcccacaactttcccttccaaaactccccaccccaaagttcttgaaaacccaacaaatcccctcactctcctccaccactctcaaatctatctccctcttcacagtcaccactttatcctttggcccaccttctcttgctgcaaaaatagaaaaggccgctcttttcgatttcaacttaaccctccccatcatgatggtccagttcttgttcctcatgtttgctcttgacaaggtctactttaccccactcgggaaattcatggatgagagagatgctgccataaaggagaaacttgccagtgtgaaagacacgtctgaggaagtgaagcaacttgaagaacaagc

SEQ ID NO: 208530 - DNA, 413 bp, Gossypium hirsutum
cccacgcgtacgctatagcatacactactagtacccactactagcaatggcttcctcaatgatctcatcggctaccattgccactgcctctccggcacaggctaacatggtcgctcctttcaccggtctcaagtctgcctctgctttcccagtcaccaggaaggccaacaacgacattacttctgtcgcaagcaatggcggtagagtgcaatgcatgcaggcgtggcctactactgggaagaagaagttagagactctctcatacctacccgatcttacacccgtgcagttggctaacgaagtagattaccttcttcgctcaaaatgggttccttgcttggaattcgaattggaggaaggattcgtgcaccgttagtactcgagcttacccacgtactaccatggacccttct

SEQ ID NO: 208531 - DNA, 325 bp, Gossypium hirsutum
ccatcacccccaaaaaacaaagcaaattgtagaagatggcaacacaagcacttgtatcatcgtctcttacctactcagtggagactgcaaggcagattcttggagctaaacgacaaattgggtcttcaaggaaaggatcctttgttgttaaggcagcttcgactccacccgttaagcaaggagctgatagacctttatggtttgcatctaaacaaagcctttcatacttggatggcagccttccaagtgattattgatttgaccccttgggactcttaaaaccttgaagtccaagaagggtcattgagcctaaatggcttgccta

SEQ ID NO: 208532 - DNA, 452 bp, Gossypium hirsutum
cagagattttagagagaacaaacaacaatttttgctacatctggggctgtactaaatggatggggctcttcatttctttgtgggggaaagaggagccaagcccttttgggtgccagcattggggccaaaggctcgccctcccctactgctggaactagaaagttgatcgttgtggcagccgccgcacctaaaaagtcttggatccctgctgttagaggtggtggcaacttcattgaccctgaatggctcgatggatcgctccctggagactacggatttgacccactaggtcttggaaaagacccagcattcctcaaatggtaccgagaagctgagctgatccatggacgttgggccatggctgctgtcgtcggcatcttcgtcggccaagcttggagtggcattccatggttcgaggcatgagctgacccacgtgcgatagctccattctc

SEQ ID NO: 208533 - DNA, 449 bp, Gossypium hirsutum
cttttgtatacctgtagcatatagtaatagtttgcagtaatagcaatggcctcctccatgagctcatcggcaaccattgccacggtgaaccgctcctccccggcacaggccaacatggtggcccccttcaccggcctcaaatctgcctctgctttcccagtcaccaggaaggccaacaacgacatcacttctcttgcaagcaacggtgggagagtgcaatgcatgcaggtgtggccgcctcttgggaagaagaagttcgagactctctcatacctgcccgatcttactcccgtacagttggctaaggaagtagattaccttcttcgctctaaatggattccttgcttggaattcgaattaaaggagggattcgtgcaccgtaagtactcgagcttacccacgtactacgatggacgctactggaccatgtggaaactgcccatgttcgg

SEQ ID NO: 208534 - DNA, 446 bp, Gossypium hirsutum
aaaaaaaatagaacacacaacaatggccgccaacacactaatgagctgtggcatagccaccacatttccttcacttctttcctcatcaaagtccaagttcagtggcgccgccgtatcgttgcctagtgctgttggtaccaatgttggccaccgtgttagcatgtcagctgactggatgcctggtcaacctagaccaccttaccttgatgggtcagcaccaggtgactttgggtttgacccactaagactaggtgagggccctgagaaccttgagaggtacaaagaatctgagttgattcactgcagatgggctatgcttgctgttccaggtatattggtaccagaggccttagggttaggaaactgggtaaaagctcaagaatgggcagcaattccaggtggccaagccacttacttagggaacccagtcccatggggtacccttc

SEQ ID NO: 208535 - DNA, 423 bp, Gossypium hirsutum
gtgagactcttttgtatacctgtagcatatagtaatagtaagcagtaatagcaatggcctgctccatgatctcatcggcaaccattgccaccgtgaaccgctcctccccggcacaggccaacatggtggcccccttcaccggcctcaaatctgcctctgctttcccagtcaccaggaaggccaacaacgacatcacttctcttgcaagcaacggtgggagagtgcaatgcatgcacgtgtggccgcctcttgggaagaagaagttcgagactctttcatacctgcccgatcttactcccgtacagttggctaaggaagtagattaccttcttcgctctaaatggattccttgcttggaagtcgaaattagaggaaggatttctgcaccgtaagtacttcagcttacccacgtactacgattga

SEQ ID NO: 208536 - DNA, 404 bp, Gossypium hirsutum
acgcccactcgttcgcccacgcgttcgaaaaaaaagcgcgagttcctcaaatggggcgatccgaggggactcagcaactcgcttttgctttgttcaaccagtttttttgcttaaattttgcaaaaagacaatttgagatgggagttgtcagagtttctagttcagctgtccgaactccagtaggattaggcacatagttttctactcaaagatgtacatttagaagaccttgtattatggcatttaaagcagacaaatttaataatacggctctagttacgcttcgagaccataatcttttgccggtggaaacggctaaagagcacccgaagagacgcgggaaagcgaaaaaggcttccaagacttgtaaccgtgactttactgatgaaaagtctccgttcacc

SEQ ID NO: 208537 - DNA, 306 bp, Gossypium hirsutum
cccacgcgtccggagacatggatgccgcaaaattaaatctgggttttaacttgttcttcatttttcagttaaaatttgtagtttttgcagctgtgggtggtggtggtggatgtagcagaagtgacttcccaccgggctttgttttcggtgcatcaacttcagcctatcagtatgaaggtgcggctgataaagatggtaggacgcctagcatatgggatacttttgtccatgctgaagggaattttaacgaaggcaatggagacatagcttgtgatgggtatcacaggtccaaggaaaatgttggac

SEQ ID NO: 208538 - DNA, 457 bp, Gossypium hirsutum
gtctctaccactgaaagcaaagaaaaaatggcaacggagatggcccttgtaaagcctatctccaaattcagtacaagcagtccaatttttagcaactcccgatatgggaagttcacgaccgtcagaatgtcatctacttcccaatcaacagcaaaggccgccgcgaagggtggcaagaaagctgccaaaaccgccatcaaagagacccttttgacaccaaggttttacaccaccgactttgatgaaatggaggcgcttttcaacactgagattaacaagaaccttaaccagtccgagtttgaggcactgctgcaagagttcaagactgattacaatcagactcactttgtaaggaacaaggagtttaaagaagctgctgataagattgatggtcctttgagacaaatcttcgttgagttcttggagaggtcttgtactgctgagttctctggttttc

SEQ ID NO: 208539 - DNA, 328 bp, Gossypium hirsutum
tccacgcgtacggtgaacgagctaagacgactttttcttcagctgcccagactgcaattgtgattgactctctctactaggggatcgattcatacacgacagttactctagctcgccttgcggagttgaatatggatctgcccaggaaacgtatggggccgcgacagaaatgcttgtgtgatgcgtatagggacaaaagcgcagtgcatgatgtggttctctgtctactggtaagactaagatcccaaacgttctaatacttgctgcgagactcattcaaccgtaaagagttctgtgagagcatccaccctgattaaactggggctta

SEQ ID NO: 208540 - DNA, 404 bp, Gossypium hirsutum
cccacgcgtccggttccgatcattgtcaccggtaacgatttctcgacgctgtacgcgccggtcattcgtgacggtcgtatggagaagttttactgggcacccaccagggaagataggatcggtgtttgcacaggtattttcaggaccgacaatgttcccgttgatgacattgttaagcttgttgacaccttcccgggccaatccattgactttttcggtgctctgagggccagagtttacgatgacgaagtgaggaaatggatcggagaggtaggagtcaatagtgtcgggaaaaagctcgtgaactcgatggaagggccaccatcttttgagcaacctacgatgaccattgggaaagctgttgagtatggaaacatgcttggtggaaaaccaagagaacgtga

SEQ ID NO: 208541 - DNA, 343 bp, Gossypium hirsutum
ctctcaggcatcaccatggcaacctctgctatccaacaatctgctttcgggggccaaacaggggtgtagcagtgcaatgagctcgtctgcatagatcggtgccgtcggtggtggtcgcgttcacatgcgaagaaccgtcaaaagtgctccaaccagcatctggtatggccctgaccgcccaaagtacttgggtccattctctgaccaaatgccatcatacctgaccggtgaataccctggggacatacgagtgggatactgctggaatatcagctgacccaaacacatttgccaagaaccgtgagcttgacgtgatccactgtatgtgggctatgcttggtgc

SEQ ID NO: 208542 - DNA, 276 bp, Gossypium hirsutum
ggcaaggtcaagttcggggacagagcatcatacttatggcaaccacttccattatcattgaccacattaatatggaccgaggcattggtgagtggatacacatgagctctcaacggaatgctgagctcgaccctgaaaaaaggctataccctgcaggctataatgacccactaggcttagcttacagacccatgaaaaaactgatcacctcaagttggctgaaatcaagcattcataagcttgccaagactgctatcctcaactttggcattcaag

SEQ ID NO: 208543 - DNA, 345 bp, Gossypium hirsutum
cttctctctcttctcttaccatggatccttacaagtttcgtccttcaagttcctttgattcggcgttctggaccaccaattctggtgctccagtttggaacaataactcatcacttactgtgggagcaagaggtccaattctccttgaagactatcatttggtggagaagctagctaatttcgatagagaacgcatacctgaacgtgttgttcatgctagaggagccagtgcgaaagggttcttcgaggtcactcatgatatatctcagctcacatgtgctgattttcttcgtgcccctggaatccagacccctctcattggtagattcttcacgggtattcatg

SEQ ID NO: 208544 - DNA, 214 bp, Gossypium hirsutum
cccacgcgtcctaaattggttggtcaagaaatgaggagctttcactggtgaagttagtgcggggatgcttgtcaatttgagcgggctttgtattattattggtctttctgagaggatacttattttgattgagtcaaatgagttctttgtggataagggtgcttatgcactttctcaaggcttgaaagtgatatcttggatttgtggaaacact

SEQ ID NO: 208545 - DNA, 322 bp, Gossypium hirsutum
gtgaaatcaatgcaccccgagatcatgttggcttacaatctctccccatctttcaattgggatgcatcgggaatgaccgatgaacagatgagagacttcattccaagaatagccaagcttggtttctgttggcagttcataacgttagctggtttccatgctgatgcattggtgaccgacacatttgcgagagatttcgccaggagggggatgctagcgtatgtggagaagatccaaagagaagaaaggaacaatggagtggacacattggctcaccaaaaatggtcaggtgccaacttttatgatagatatctcaagacag

SEQ ID NO: 208546 - DNA, 460 bp, Gossypium hirsutum
cccacgcgtccgcaaagagcaggaaaacaagaaaagcagagccgcatcactttttgctagctaataataacgttatatattatataaatattatacatcctttttaccctacgactccatatataagcaagtaaaaataaatatggctcgctctgtttcttcctttaagatccttggtgcttctgtttttgatgctctttatgtctccatatcaaggagaggttactcaggtgcaccgccggcggcagtgacggctagctttggtaggcctggagcgatggggaaagtggaacgaagatatgcgatgaaagagtcgtcgtcgtcggagacaagggcttattcttcagcttgggcgcctgaccctgttacggggtattaccggccggagaactgtggggctgagatcgatgcggcggatctcacggagatgatgttgaatcacaggggtagatcacagtag

SEQ ID NO: 208547 - DNA, 309 bp, Gossypium hirsutum
cccacgcgtccgcccacgcgtccgggaacgctgtcatttttgggcctgatgatactccttgggatggcggtacgttcaagctgacttttcagttcatggaggattatccaaataagcctccaaccgttcggtttgtctcacggatgtttcatccaaatatctatgcagatgggagtatttgtctcgatattttacaaaatcagtggagtcctatatatgatgttgccgctatactcacttcgattcagtctcttctttgtgatccgaacccgaactcttcagcaaactcggaaagcagctcgtattgtt

SEQ ID NO: 208548 - DNA, 342 bp, Gossypium hirsutum
  unsure (1)..(342): unsure at all n locations
gggctgaactggaagtccggagtagcgccggaaaatcgttctgggatttcaaattgacctaagagctttttaaaagaagaatggataggctatcgaatgcgttttcgttgctggatattgatgtggacgatcatcatcctccaccggcttcatcatctgcttccaaaccttcaggtaagagcataaacaatgggaagggcccaactgaactgaaaccggcattgctttcggaaaactacaagttaccccttgtttggattgacttggaaatgactggtttgaatattgagactgatagaatattggagatagctngtataattacagatggctatcttacca

SEQ ID NO: 208549 - DNA, 411 bp, Gossypium hirsutum
cccacgcgtccgcacaatcgattttgccgccggggaaacaaacgtttcgactcggagagggagagatggtaatgtcaccggtggttaacacgtaccctttgtccagctacacctttggtaccaaagagccgaagatggagaaggacacgtccgtcgccgatcgccttgctcgcatgaaagtcaattacatgaaagagggcatgagaactagcgttgaagcaattttattggtccaagaacataatcatcctcacattcttcttctgcaaattgggaacacattctgcaaacttcctggtggacgactgaagcctggagagaatgagattgagggtttgaaaaggaagctgaccagcaagcttggagctaattcacctgctcttgtgccagactggcagattggtgaatgcg

SEQ ID NO: 208550 - DNA, 387 bp, Gossypium hirsutum
  unsure (1)..(387): unsure at all n locations
cccacgcgtccgcccacgcgtccgcacctgttcaaaggccaaggaatagttggtagagcattgacaacagacaaacaatgttttgcaactgatataactgccttcagtaagacaaattatcctctctctcaccatgctaggatgttcaaactgcgtggcgcattagctattccactacaaagcatttttactggattggttgaattcgttttggagttattcttcccaaaagattgccatgaaagcgaagcacagcagcagatgctgaactcattgtccagttttatgcaacaggcatgccagagctttgcatgtngtatggacaangagcttgaagaagaagtgatacttgcccgtaaagaaagcggtaagtgccttctgatggga

SEQ ID NO: 208551 - DNA, 364 bp, Gossypium hirsutum
ggcgggaataatgtctgatgcaaatatcctaatcaacactgctagggtgcaagctcaacgatacacatatgcttaccaagagccaatgcccgttgaacagttggttcaatctctctgtgatacaaagcagggttatacccagtttggtggtctccgcccattcggtgtttcatttctttttgcaggatgggacaagaactatggattccaactttacatgagtgatcctagtggtaactacagtggatggaaagctgcagctattggtgcaaataatcaagcagctcagtcaatgttgaaacaagattacaaggacgatatcacgagggatgaagccttacaactcgcgctgaaagtgctgagt

SEQ ID NO: 208552 - DNA, 419 bp, Gossypium hirsutum
gaaattaaggctgctatcaaggcggaatctgaaggcaacttgaagggaattcttggttatgtggacgaagatttagtctcaactgacttcatcggagacaacaggtcaagcatttttgatgccaaggctggaattgctttgaatgacaactttgttaagcttgtgacttggtatgacaacgaatggggttacagttcccgtgttatcgacttgatccgacacatgtctaaggcttaagtgagtgagtgattgtgctttgtgtatccaagctttagcaattttaatttagaagagatgttatgagagaataaacgaattgtacggagcatatttttgtgtgaagaagggttgtttcagttttattaaaaaaaaaaaaactttaaaaaacatatattaaaaaataaaaattcaaaatagat

SEQ ID NO: 208553 - DNA, 390 bp, Gossypium hirsutum
tgatgagcaaccttccaacttctttaacagactcttcttttacccttttcaagcttgccattgcttcttctgatccttggcctttctctctccttctcttataaccccctttatctatatattactgtttgtttcatctttggccttcttgctttttggggctttgcttgctgaagatcaaaattcaaaaatggggattggaggagacaagcagcagcacgtgagcttccaccttcatatgccgaaccttcatcttcatgggttccatcatcatgagaacaaggacctcaaagatatcccaaaggggtgcctggcggtcctggtgggtcaaggccaagagcagcaaaggtttgtgatcccgctcatctatatcacccaccccttgttcat

SEQ ID NO: 208554 - DNA, 265 bp, Gossypium hirsutum
  unsure (1)..(265): unsure at all n locations
tgtcttagcaacaaagtttgtctataaaaaaatcagctctgctatcgggatacaaaagactgccaaaagcggaggtggaagtttgccaacgcatattgaaaagttttatgaggcaattggtctggaagtgcagaatggatatggcttaacagaaacatccccttgcattgctggtcgacgaccctattataatgttcttggttctgttgggcatccaattccactcacagaattcanagttgtagattccgaaactggtgaaatc

SEQ ID NO: 208555 - DNA, 365 bp, Gossypium hirsutum
  unsure (1)..(365): unsure at all n locations
ggaaattgctgaattatacgagtctgaacagaacattgagcaggccatggattattttgaaaaggctgctgatttcttccaaaatgaagacgtgtcttcttctgccaatcaatgcaagcagaaagttgcacaatttgctgctcagatagaacaataccagaaagccattgagatatatgaagagatagcgcggcaatcacttaccaataacttgctgaagtatggagttaaaggtcatcttcttaatgctggcatttgtcaactctgcaaaggtgatgttgtagcaatcaccaatgcgttagagcgatatcaggatctggatccaactttttctgggacgcgagagtatanattatnggctgaca

SEQ ID NO: 208556 - DNA, 216 bp, Gossypium hirsutum
tccacgcgtccgcggatctcgagaaccgtgtaggtgttggtggatatggttatccagctcttggagccttgaacgtcaagaaaggagcatatgctccactcataagtgcatttgagctcgagcatatcattgagtttgtgaaggaagcagggcgcggaggcaagggaaatttaccactggagggcacacccgagattgcaaagacagaagcatggg

SEQ ID NO: 208557 - DNA, 304 bp, Gossypium hirsutum
  unsure (1)..(304): unsure at all n locations
gaagggaaacaagggagcgcaaaacgggnggnacgaaggngaaagcggacagggaagagcgcccgcccgaagccgacatgcnagcagcacaagaaggaacacaacgccgcaaggagngggggagaacagccccccaaacaaagcnncgagccacgggagggaacaaaaccaagacaccagggccaggggcccaggcagcacggagagcccacgcacgggccggcacgaaaaagggacgcanagaggangncacccccaaacccaccgaaagcacacggagaaagggcggcagacgcggaagaag

SEQ ID NO: 208558 - DNA, 406 bp, Gossypium hirsutum
cttagtggaaggccaaggcactcgagttgggttctactcgacctcatgccctaaagtcgagtcaatcgtaagctcaacgggccaatctcatttcaagtcggatccaactattgctccggcgttgcttcacatgcactttcatgactgctttgtacaagattatggaccgacaattcgaccaagacgtttgtgcaacgtttcttgggcgttagagggttgcttggattgaccttcaacgttgaatttggtaaatccatggtgaagatgagcaacattggagtgaaaacgggaactgctggtgaaatccgcaaagtatgttctaaagttaattaaaatgaacattgaagattaagaataatgctatatacacaagtggctgatcaaagggaagtgcttgagtgtatac

SEQ ID NO: 208559 - DNA, 419 bp, Gossypium hirsutum
  unsure (1)..(419): unsure at all n locations
cggtaaggtagccgtttttgctttcagaaaatctaccgcagtttgcagttgagaggatggtgagagtcagcgttttgaatgatgcactcaagagcatgtacaatgccgagaagaggggcaaacgacaggtcatgatcaggccttcctccaaagtgatcattaagtttcttttggtcatgcagaagcatggttatattggagagtttgagtatgtcgatgatcacagatctggaaaaattgtggttgaattgaacggaaggctgaacaagtgtggggtgattagccctcgtttcgatgtcggagttaaagagattgaaggttggactgctaggctacttccttccagacagttcggatacattgtgcttaccacttcagctggtatcatggaccatgaagaagcangaagaaggaatgtc

SEQ ID NO: 208560 - DNA, 433 bp, Gossypium hirsutum
ctgaaataagtatggttgggttaacagagcctcaagcaagggagaaagcccagaaggaaggatttgaagtaggcgttgccaaaacaagtttcaaggctaacacgaaggcacttgccgaaaatgaaggggagggacttgctaagttgatatacagacccgacaacggcgagatactcggagttcatatatttggcttacatgcagcagacctcatccatgaagcatcaaatgccatagctttaggaacacgtattcaggacataaaattcggccgtcacgcacattcaacactttctgaagttctggacgaactatttaaatcagccacagttaaagctgctgcttcgagccacggtccagtaagtgaaccggttgcagtctaaacccttaatcgacagttttcggattaaaaaaaataggtataaattttttg

SEQ ID NO: 208561 - DNA, 457 bp, Gossypium hirsutum
cggccaaataccggatgctagttggaatggtggatgtcatattttctgatgttgctcaacctgatcaggcgaggattctagctttgaatgcatcatttttcctaaaagctggtggtcattttgttatttcaatcaaggctaactgcattgactcaacggttccagccgaggcagtgttccagagtgaagttaagaaacttcaacaggagcaattcaaaccttttgaacaagtgacgctcgaacccgttgaacccgaccattcctgccttggtggtgggtaccggatgccaaagaaacagaaagctgcaacataatggttttgtagtcttggttttaatccctaagtttcgtggctttggattaaaaatgatgaacatgttttgggatcgaacatctttcttttttggactaaaaatcaaacttatttctactgatgaaaaagggctcttaattagac

SEQ ID NO: 208562 - DNA, 285 bp, Gossypium hirsutum
  unsure (1)..(285): unsure at all n locations
ccaaataatccttgccgtgtgaagaccattcctcgcccaattccggagaagaaatggtatttgaccccctctgtggtgtctttgatgggaggacttctgccatttggcagcatattcattgaaatgtattttatncttcacgattcttcctggaattacaaggtttattatgtatatggctttatgctgctggtcttcctgattctcatcattgtaactgtttgtgtgacaattgtggggacatatttcttgctaaatgctgagaattatcactggcagtggaca

SEQ ID NO: 208563 - DNA, 457 bp, Gossypium hirsutum
cttgttccttgctttgagttgaccctggaagccttaaatctttaccatgaagaacttggtgttatccgggataatatgattgatttgattgacaggctttgcaaattgttgatgcttaccaaggataggatccttcctttacagactattgaccagctgaaatgggacttggggttgccttacttttacatcgataacttgattccaaattatgctgatttattttctttgtttcgccttcctgatgatcggattggtttgaaacttttatcatgggatgatacacttgctgtctcccagttggagaagaatgttgcccggcaaacagaagaagatttgaaaaataactgtttagcctttcctatagggtttacaaggggttttggactgaagagaaagtgcatgggatggttagaagaatggcagaaattaccatatacttcaccttatgccgatg

SEQ ID NO: 208564 - DNA, 471 bp, Gossypium hirsutum
agaaagaagagaaatctcaatggcgccgaaagccgagaagaagcccgctgagaagaagcctgccgagaagccaacggaggagaaaaagtccaccgtcggcgagaaagccccagcggagaagaagccaaaggccggcaagaagcttcccaaggaaggtccaggggccggagataagaagaagaagaaagccaagaagagtgttgagacctacaagatctacatcttcaaggtcctgaagcaagtccatccagatatcggtatctcaagcaaagctatgggaatcatgaacagtttcatcaacgacatcttcgagaagctggctcaagaatcttcaagactggcaaggtataacaagaagcccaccatcacttccagggaaatccagacggctgttagacttgttcttcctggagaacttgccaaacacgccgtttctgaaggcaccaaagccgtgaccaaatttactagttc

SEQ ID NO: 208565 - DNA, 411 bp, Gossypium hirsutum
cttgtatacaaggtctatacagatgggagatctaatatatctagacgtggaaggaaggcaacaattagagagttttacggtgttatattaccatctcttcaaaggctccatggtaacttgggggagttggatgatgataaggaggctggtgggagttctgccaagaaaagagtcgacttagataatagacatgggaatattgattttgagagggaagatgaatgtgggatttgcttggagccttgcacgaaaatggtcttgcctaattgttgtcatgcaatgtgcataaaatgctattggaaatgggaccccaaattctgagtcttgtccgtcctgccgggtaagttggaaaggggccaatcttgaaaattaatggttcctaacttgcaccgttaatggggttgccattaa

SEQ ID NO: 208566 - DNA, 326 bp, Gossypium hirsutum
cccacgcgtccgggaaaagatgcagatattcgtgaaaaccctaactggcaagaccataactctcgaggtcgagagcagcgataccattgacaacgtcaaagccaagatccaagacaaagaaggaatcccaccggaccaacaacgtctcatattcgccggaaaacagctcgaagatggccgtaccttggctgactacaacatccagaaagaatcaacacttcatcttgttctgaggttgagaggtggaattattgagccttctttgatggctttggctcgcaaatacaaccaagacaagatgatttgccgcaagtgttatgctcgtc

SEQ ID NO: 208567 - DNA, 297 bp, Gossypium hirsutum
gagcttcgaaaagaagatgcaggcaagcgataggtttaacatcaattcccagctcgagcatctgcaagccaaatacgttggaactggccatgctgatctcaacagatttgaatgggcggttaacattcaacgcgatagctacgcatcatatatagggcattacccgatgttggcttacttcgctgtggctgaaaatgaatccattggaagagagcgctacaacttcatgcagaaaatgcttctgccttgtggtctgcctccagaaagagaagatgattaagaactgctgggtgggct

SEQ ID NO: 208568 - DNA, 337 bp, Gossypium hirsutum
  unsure (1)..(337): unsure at all n locations
cccaaaatcaatggcgtcttcctcgtacaagaaatacgaaatcagaaagcgagatccaaaccctaaaaccaccgctttgttagtgatcgacatgcaaaactattttgcctccatggccaaacctattctcagcaacgcaattaccaccatcaacctttgccgagaagcttccatccccattttcttcactcgccactgccacanatcccccgccgactacggcatgctcggtgagtggtgggacaacgacctcatcttcgacggcaccgttgattccgaactgatccccgagatcggacggctttcgaaacccgacgaggtgggtgagaaaaacacg

SEQ ID NO: 208569 - DNA, 432 bp, Gossypium hirsutum
gccactctaactgttttgatcagtttcgcaagtcattttcagatacctcctcgacaacaccacaaaatcctcaacaaggagctcaacttgtaaccacaaacctatcaccagttgtgaatgcaacttcagaatcaactatctccgagttgcgggaagaaaggactgaggaaggtccctccaacccatctattatctcatgtgaaaaccaggtgctcccaaaactagtatgccctctatgtcgtggtgaggtaaaagattgggttgttgtagagcctgctcgtcatttcatgaatgccaaatctagaagctgttcctctgaaacatgtaattctactggttcctataaagacctaaggaaacatgctagactagagcacccttctgcccgccatctgaggctgatcctgagcgacaacgaaactggaggaggtt

SEQ ID NO: 208570 - DNA, 449 bp, Gossypium hirsutum
gcgatttggttccgacgggaagaggtttgagcatcttgcatttcttaacttggcgcaaaatgtggtctgcttagtttggtcttacataatgataaagctttggtccagtagaagcaatggtggtgctcccttgtggacttattggagtgctggaatcacaaatacaattggtccggccatgggtatagaagcattgaagtacatcagctacccggctcaagtgttggccaagtcctcaaaaatgattcctgtcatgctgatgggcactctagtttatcggattcgatacactttccctgagtatatctgtactttccttgtggctgtaggagtatctgcttttgcacttatgaagactagctctaaaacaattagcaagttggcacaccccaatgcaccccttggatatgggctctgtattctgaaccttgcatttgatggctttacaa

SEQ ID NO: 208571 - DNA, 470 bp, Gossypium hirsutum
cccacgcgtccgattggcatctctggaaactattgttccgacaaaaaaccggctgcggtaaattggattgaaggacgaggcaaatctgttgtctgtgaagccaccattaagggtgatgtggttaggaaggtcttgaagacaagtgtggaatctctcgttgagcttaacatgctgaagaaccttactggatcagctatggctggagctctgggtggatttaacgctcacgccagtaacatcgttgctgcaatctacatagctaccggccaagatccggctcaaaacgtcgagagctcgcattgcatcacgatgatggaagctgttaatgatggcaaggacctccacgtctctgtcacaatgccttccatcgaggttgggactgttggtggtggaactcagcttgcatctcaatcagcctgtttgaacttacttggagtgaagggtgcaagcaaagagacaccaggagcaaa

SEQ ID NO: 208572 - DNA, 376 bp, Gossypium hirsutum
  unsure (1)..(376): unsure at all n locations
gatttccaaaatacatcaaaaaagctgaaaatcagaatcttttctgtgcaaaaaatctggtgatagataaaagcattcaagctgcttatatacaggctatcagatctgcccagcattacatatatattgaaaatcagtattttcttggatcttcatatgcatggccatcatataaaaatgcaggggctgataatctgatccctatggaactggcactaaaggttgctagtaaaatcagagcaagggagagattcgcggtatatatcatcattcctttgtggccagagggtgatcccaaaactgccactgtacaggaaattttgtattggcagagtcaaacaatgcaaatgatgtatgatngttgtgcacaagaact

SEQ ID NO: 208573 - DNA, 422 bp, Gossypium hirsutum
cccacgcgtccgcccacgcgtccgacataagccacctgtctatgaacctccaaagaaagaaaaacctgaacataagccacctgtctatgaacctccaaagaaagaaaaacctgaacccaagccaccgatgtatgaaccaccaaagaaggaaaagtccgaaccaaagccaccagtttatacacctccaaagaaagagaagcctgaaccaaaaccatcagtatatgaaccaccaaagaaggaaaagcctgagcctaagccaccagtttatacaccaccaaagaaagagaagcctgaacccaagccaccagtgtatgaaccaccaaagaaggaaaagcctgagcctaagccaccaagttatacaccaccaaaggaaagagaaagctgaccctagccacccagtgtatgaacccgccaaagaagga

SEQ ID NO: 208574 - DNA, 279 bp, Gossypium hirsutum
ggttcctatggcaaccacggaagggtgcctggtggctagcactaataggggctgtaaggctattcatttgtctggtggagctacaagtgttctattgaaagatggtatgactagagctccatgtgtaaggttcggtactgcaaaaagggcagctgatttgaagttgtatttggaggaccctgataatttcgagaccttgtctgttgttttcaacagatcaagtagatttggcaggctccagggtatcaaatgtgcaattgcttgaaaagaatctgtata

SEQ ID NO: 208575 - DNA, 365 bp, Gossypium hirsutum
gccttcacttccaatttagggtttgcacgagccgtagtgcgccgttcgcatcaggaagaaatggcggtccctttgctgtctaagaagattgtgaagaagcgtgtcaagaagttcaagaggccccaaagtgaccgcaagatctccgtcaagacaaactggcgaaggcctaaaggtattgactcccgtgttaggaggaagttcaagggatgcactttgatgcccaatattggttatgggtccgacaagaagactcgccactatcttcccaatgggtttaagaaatttgtcgtgcataacgtccaagagctggagcttctcatgatgcacaacatgacatactgtgctgagatagctcatgatgtttc

SEQ ID NO: 208576 - DNA, 454 bp, Gossypium hirsutum
gactccgatggatacttgcatcttgttggtcggatcaaggagctcatcaatcgtggaggtgagaaaatatcaccaattgaggtagacgcagtgttattggctcacccagctgtaacacaggcagttgccttcggtgttcccgatgagaaatatggcgaggagataaattgtgcggtgattttaaggggaggaagcttggatgaagcagaaatcacgaaatattgcaaaagaaatcttgcgagtttcaaagtacccaagaaagttttcatcacggattccgtgccgaaaacagctactggaaaaatccagagggggatagtagcagagcatttcttggctcaaacgtctgccgctaaagtacccaaatttggagcttaaattcagcattgcttgtctattgcttaggtacatatttaagcgactgcaatttattgtttgtgtaaaaggggattac

SEQ ID NO: 208577 - DNA, 376 bp, Gossypium hirsutum
ggaatggttacgcagctgccttcaagtgatgaaacttcaactagtaagaagcaattattagctcgtcttgatgtttgtatgggaggaagagttgcagaagagctcatctttggccaagaccatatcacaactggggcaagtagtgatctgcacacagctacagagcttgctcaatatatggtatcaaattgtgggatgagtgatacaattggaccagttcatattaaagagcgaccaagttcagaaatgcaatctcgcattgatgctgaagtggtgaagcttctaagagaagcatatgatcgcgtgaaagccctgttaaagaagcaagagaaggcattgcatgcattagcaaatgcacttttggagtatgaaacac

SEQ ID NO: 208578 - DNA, 457 bp, Gossypium hirsutum
ctgctgcaccctctgattctcctaccatatttgacaaaatcattaacaaggaaatcccagctaccgtggtgtatgaagatgataaggtcttagcttttagggacatagctccccaggctcctacgcacattttaattattccaaaatcaaaggatggcctaactggtttgtctaaggctgaggagaggcactgtgaaatccttggctgccttctttatactgcaaagcttgttgcaaaacaggaagggctggaagatggattcaggattgtgatcaatgatggccctaaaggatgtcaatctgtgtatcacattcatgtccacctccttggatggcgccaaatgaactggccttcaggctaaataaagaagttatagttgatataggtatttcatgataacttcaataacgaaagcctgcatgtgggctttcatcgatgatcaatggtatacgctct

SEQ ID NO: 208579 - DNA, 340 bp, Gossypium hirsutum
  unsure (1)..(340): unsure at all n locations
atcttgtctttacagttttttgtctgaaaagaagaaaatggctactgtaggaagaaacgcggcagctcctttgttgttccttaacttgatcatgtatttcattgtgttgggatttgctagttggtgtattaataggtttatcaatggccaaactgctcatccaagtatgggtgggaatggagcaacaggtttctttttaaccttttcaatcttggctgctgtggtgggtatagtatcaaaatttgcaggtggtcatcatattaggtcatggagaagtgatagtttggctgcagctggttcttctgcacttattgcttgngctctaactgcattagccttt

SEQ ID NO: 208580 - DNA, 431 bp, Gossypium hirsutum
ggagaacatccccgtggaactccaaacaatctcatgccttacatgcagcaagttgcggttgggaaacgacctgccttgactatcttcgggaacgattattccaccaaagatggcacttgcgtacgtgattatatccatgttgttgacttagcacaaggtcatatcgccgcactgcgaaaactatctgatccgaaactagcctgtgaagtctacaacttgggaagtgggaaaggaacgtcagttttggagatggttgctgcatttgaaaaggcatgtgggaagaaaattcctctgggtatggctgccaggcgacccggtgatgctgaaatactttatgcttctactgaaaaggcaaagcgtgagttgaattggaaagcaaatatagcattgaggacatgtgcagggatcaatggaactgggccaacaacaac

SEQ ID NO: 208581 - DNA, 314 bp, Gossypium hirsutum
cccacgcgtccgcccacgcgtccgcccacgcgtccgggtgattcttggaaaaccaaacgtttctgatattttcccggtgcttgcaaggtttgacatacagggattggagaaagagatgactaaaatcgttaattctttcgataagcttttcaactccatgattgaagaaagagagaactttagcaacaaattgagcaaagaagatggaaacactgaagcaaaagacttcttgcagcttcttttggaactcaagcagaagaacgatagcggaatatcgataacaatgaatcaagtcaaggccttgctcatggaca

SEQ ID NO: 208582 - DNA, 438 bp, Gossypium hirsutum
  unsure (1)..(438): unsure at all n locations
cccacgcgtccgcccacgcgtccgagcaatattatcacaagcagcagctaaaaaaaaaggcaagaagaaaaatggcgtcagagcaatatcaagctatgaggaatgcaccacaagaggatcactgagcttttgaaagtcggtaaggacaagcgagctcttaaggtagctaaaagaaagttgggaactcacaaaagggcaaagaagaagcgtgaagagatgtccagcgttctccgcaagatgagagcccacggtggaggtgcagaaaagaagaaataaagctntattttcttggtttctcacccttgtcgtgctcgagtttctggttaggagcagctagagggttgttagcatatgttcaattttggtgtttgaaacttgaatcaggtttggaacctttgttaattgagtagagatgagaaatggaagaagtattacttt

SEQ ID NO: 208583 - DNA, 376 bp, Gossypium hirsutum
ggaattcagtggacaagtgaggaagaagagaagttcaaggctaaggttatggaggcatatgagagagaggggaatccgtactactcaacagctaggctctgggatgatggtattatagatcctgctgataccaggaaaattgtggggctctgcatctctgcttccatgaatcgcccattagaagataccaaatatggtgtattccgaatgtaaatggaatcattaacttgtcaatccgtactcttctaacctgaaaagaaaatatggaaaacaggaagactatgcaataaaaaatctggataataatgcaatgcatgtcatgatcaataattccttggttcaaatgtaaaagtcctggtgtaagggttcaggtgcc

SEQ ID NO: 208584 - DNA, 301 bp, Gossypium hirsutum
ctgccgcacaccagcctagcgtttccatcaggtagaaatggcggtccctttgctgtcgaagaagattgtgaagaagcgtgttaagaagttcaagaggccccaaagtgatcgcaagatctctgtcaagacaaactggcgaaggcccaagggtattgactcccgtgttaggaggaagttcaagggatgcactttgatgcccaacatcggttacgggtcagacaagaaaacacgccactatcttcccaatgggtttaagaaatttgtggtgcacaatgtccaagagctagagcttctcatgatg

SEQ ID NO: 208585 - DNA, 453 bp, Gossypium hirsutum
  unsure (1)..(453): unsure at all n locations
atcgctagaaacatgtgaagtgtatggctaacccaataacgaaagtttcgtaaggggactggagcaggctaccatgagacaaaagatcttctttctaaagagattcgattcggaactattatatgtccaaggtccaatattgaaataatttcagaggttttccctgactttgtccgtgtcaacaaacaattcgaaatgcctcgactcttttagaacaggtccgggtcaaatagcaatgattcgaagcacttctttttacactatttcggaaacctaaggactcaatcgtatggatatgtaaaatacaggatttcctctatctaacggttagcttctcttagctgcctttcgattcttggattgagttgttaaagcactagaaaccatcgtttctgaatctaattcaaacccatatttgnagaagattcgatcgttcttagtttgggatttttc

SEQ ID NO: 208586 - DNA, 410 bp, Gossypium hirsutum
gccacaatgaggcttcgagcatgttaaagaaccccatggacaggcacgagattgttcgccaagacgttaaacaagttatttgttcggtttgtgacacagagcagccggtcgctctactttgttcaaattgtggtgtcaacatgggagaatatttctgtgcaatttgcatgttctttgatgatgataccgagaaggagcactttcattgccatgattgtgggatctgcagagtcggaggtcgtgataacttttttcattgcaaaaagtgcgggtcttgctatgccattgcgttgcgagataatcatttgtgcgtggagaactcgatgcggcatcattgccccatatgttatgagtacctattcgattcgttgaaagatacgactgtgatgaaatgcggtcacacgatgcac

SEQ ID NO: 208587 - DNA, 416 bp, Gossypium hirsutum
  unsure (1)..(416): unsure at all n locations
cccacgcgtccggnctaatctttgcgttcttgttgttggagcacttggtggacgatttgatcatgagatggggaacctaaatgtcatatgccgtttctcgtccatgcgaatagtccttttatccaacgatagtctcattcatctccttccgaggacttactgtcacgagatacatatccaaacttccgttgagggcccgcactgtggactcatccctattgggacgccatcaaaaagcagtacaacgaccgggcttcagtgggacctgaataacacagcgatggaatttggtggtctagtaagcacatcgaatatagttaaggaagagaaagtgacggtgcaatctgattgtgaccttctttggaccatttccattaagatgttatagtagtggctgttatttattatatacatat

SEQ ID NO: 208588 - DNA, 401 bp, Gossypium hirsutum
cccacgcgtccggctggtgctgccattagctctcatatggacattgataaaactgataagaagcaattcgagaaaatcctatcatacatcgagcatggcaaaagagaaggagctactttactaacaggaggcaaacacattggccaaaagggatattacatacagcctaccatatttgctgatgttaaggatgatatgatcgtagcaaaaaatgaaatttttgggccagtaatgtcattgatgaagttcaaaactatggaagaggggattaagaaggcaaacaacacgacttatggtctggcagctggggttataacgaaagacttgaatgtggcaaacacttgttcgagatcggtccgtgctggtatcgtgtggatcaacttgtacgctgggttcgatat

SEQ ID NO: 208589 - DNA, 325 bp, Gossypium hirsutum
ccgatctgtgaatccaccgttatccttcaatatatcgatgaaatttggccgcagaatcctttgctgccggctgatccctatgacagagctgttgctctgttttggatcaaatttgcagatgacaagggtcttttaatgtcaaagctttatcgaggcaatggcgaagaacaacaggcggcagtgaaggagtggttggaaatgttggaagtcatggaagaacatgcgctgataggagtgaaaaagttcttcggcggagacgagataaacatggtggacattgcattttcctttgttgctcactggcttgggattctcgaagacgtac

SEQ ID NO: 208590 - DNA, 460 bp, Gossypium hirsutum
cgaatcctacaaacccatccatagaattggggcctgaattcaagaaggttggtaacttcttaagtcgattcaagtcaatcccgagcatcattgagcttgatagccttaaggtgactggtgatgtttggtttggtgctggcattgtgctcaaggggaaagtgagtatcgctgcaaaacccggggtgaagttggagattcccgatggagctgtaattgagaacaaggaaattaatggccccgaagacatctgagagaggcccgtctgccagccgaagtttccctgattttggtgtgttgcagtagataacgaacgcatcttttatatagataggaagtaaaataaaataaaaatacttggaacagaagtagtatttgcgtttcatatcacatatatatgttgtatgtcttgcgggagtttcccttgaattactatttttcgaggtatgaagaaaaacagtgt

SEQ ID NO: 208591 - DNA, 373 bp, Gossypium hirsutum
cttgatcaaccacgtgaaaaaagggacgcctaagaagcctggaaagcctatagaagcgtggatttttgccatgtttgatgagaataccaaaacgggcgaagaaatcgaaaaacactggggactttttcttccaaataggcagcctaaataccaaataaattttaactaaatagctgcacagaatctgtagatgaagggcatttcaaccatgctagctattctactttgccaataagagcgtatcacttctccctaggaagggagggtaaacaatgcatctatcaatttcaaaatactattcaaaataagatgatgaaaatcagtcccatatgttaaagtattcaaaataataagattatctcctatttagatt

SEQ ID NO: 208592 - DNA, 461 bp, Gossypium hirsutum
tgaacctacccttgtcttggatcttgactctcacaaattgcaagcattcactgctgctgatgatgatttggaatccactctctctggcttgaatgtattgatcgagacctactttgctgatcttacttctgaggcatacaagacactcattgggttgaagggtgtcactgcttatggtttggatttggttcgtggagcccagactctagatttggtcaagagcaatttccctaagggcaagtacctctttgctggagttgtggacggaaggaacatctgggccaatgatcttgctgcttctttcagcactttgaaggagcttgaggctgttgttggcaaagaaaacctggtggtgtccacatcatgctcgcttctccacaccgatgttgatctagtgaatgagactaagctagacgatgaaatcaaatcgtggctcgcatttgctgcccagaaagttgttg

SEQ ID NO: 208593 - DNA, 326 bp, Gossypium hirsutum
ggcgacccacgcgtgcgttacgcacataccacattttaaatggatgcatcatacaacacgatatcttccattgtagtgttggagcatatgaagaaccatcacgaccttctcaagaatatatcaaatttgctgaaagaggatagacttctttttcctcattatttctgccataaagcatttgcttaccactttgaatacataaatgaatatgactggataaccacattcttctttacaggaggtacaatgccttcaacaaatctgcttctatatttccaggatgatgcttctgttgtcaaccattgtcttgttaacggaaaacatta

SEQ ID NO: 208594 - DNA, 361 bp, Gossypium hirsutum
cccacgcgtccggctaagagaaatggaagtcgcccacgccatttctgcaagagcagtggatctgttgctcgtcacatacttcagcaattgcaggatgtcaacatcattgatattgatcctaaaggtggtaggagaatcacatcaaacggccaacgggatctggaccaagtagctggaaggattgcggttgctatctaagaaattttaactttctgtttttcatgttcctgagatttagtcgcttgaaaattgggttttcataggaagctgttttaaacattttccgttttggtatattaagttctgaatttattttgattttgatttttattgaaaactgatgtatgctatattttctttc

SEQ ID NO: 208595 - DNA, 452 bp, Gossypium hirsutum
cccacgcgtccgcttcgtgaagttggacttacatttcaccttctcaaggatgttcccggccgaatttcaaagaacattgaaaagagcctagctgaggcatttcaacctttgggcatttcggattggaactcgctcttttggatcgctcaccccggtggtccagccatattggatcaggttgaggcgaagctagcccttaaacccgaaaaactccgagccacgaggcacgtgctttcagaatatgggaacatgtcaagtgcttgtgtgctgttcatattggatgagatgaggaagaaatcaaaggaagatggacttggaaccacgggtgaagggctcgagtggggtgtcctgtttggtttcggaccagggctcactgttgagaaccgggtgcttcatagaatctctgcttaaacaagggtctaatgttcatgttggctagcccaggctgcact

SEQ ID NO: 208596 - DNA, 456 bp, Gossypium hirsutum
cccacgcgtccgaaaaaaaatggcttcgtttcatatgattacaacccttctttttctgctagcaataatgctgggtgcatcaaatgctcaactcagtgccccttttatgccaaaacctgccctaatgtgtccaccattgttagtaatgtgctgcaacaagctcaaggaaatgatatttggatattccctaagatcgttcgccttcattttcatgattgttttgttcatggttgtgatgcttcgttactgttgaacggtacggatggtgagaaaacggcaaccccaaacctttcgacggagggatatgaagttatcgacgatatcaaaacggcgttggagaaagcttgccctcgtgtcgtctcatgtgccgatgttttggcacttgctgctcaaatttctgtttccttgggtggaggtccgaaatggcagttccgttagggagacgggatagtctga

SEQ ID NO: 208597 - DNA, 460 bp, Gossypium hirsutum
cccacgcgtccggttttaaagcttctgcgtggggatgctggactttttcttaccaacatgcccagagatgaagtcgaaagctgctttaataaatttgaagaaaatgactttgcgaggacaggaaccattgcaactgaaaaggtggaacttttggaaggtcctttggatcagttcacacatgagatggagccatttttgcgcaagcaaggcatgcctgttcggttgaacaaaggtgttgtagaacttgtttcagactttgttgtctgtgaggaaggaaaacctttgtcacctgagtctgctcggatactgcgcttgttggggatcaagatggctactttccggctaaacttgatatgcagatggagccctgaggatttcgagctttataaaggactagatgaatcggacgtagaatgtgcctaaaccaacattttcagagtgaatatgatctcattaatgt

SEQ ID NO: 208598 - DNA, 433 bp, Gossypium hirsutum
gttgaagaaaatgtttcctgatgcaactgagccggtacaatatctggtgtcacattggggaacagatccaaactcccttggctgttattcatatgatccagtcgggatggcaggagatgtgtatgataagcttagagaacctttggataatcttttctttggaggggaagcagttaccgaggagcaccaagggtcggtgcacggagcttactcttctggagtcctggctgccagaaactgtgagaaccatctcttagagagattaggtgactttagaaagctccagctgatctcctttagtggtgatgcattattagaacccatatttcctctccagatatctaggatgtgaactttattttacccattacaaagacttgagtgagttgtcgtcattttctaattagatttaaaaaataaaatccaacatgtt

SEQ ID NO: 208599 - DNA, 457 bp, Gossypium hirsutum
gggaaagcgagttgaatctatggcgtcctccaagttacaggctctgtggaaccaccctgccggacccaaaaccattcacttttgggcaccaacttttaaatggggcattagcatagcgaatgtggctgactttgctaaaccaccggaaaaactttcctaccctcagcaaatagcggttactgcaactggaattatctggtcacgctacagcactgtaatcactccgaaaaattggaatctcttcagtgtaaacattgctatggctggaacaggcatataccaactaacacgaaaaataaaacatgattacttttcggaggcagagccagccgttgcatctgaatgatgacgaaatcttctgaaatcctttgtttttaatggaacaaattatcagttatcttgccttgtttttctgttaattaaaagttacactttggccctatggctttgaattatt

SEQ ID NO: 208600 - DNA, 428 bp, Gossypium hirsutum
ctgtaactgcttactatatgtcatcggacggtccaaatcacaacgagttcgatttcgagtggctaggcaataccacaggtgaaccttacctcgttcagaccaatgtgtacgtcaatggtgtaggcaacagagagcaaaggatgaacctttggtttgaccctaccaaagactttcactcttattccatcctctggaaccagcgccaagttgtatttttagtggacgagaccccaataagagtgcacaccaacatggaacacaaagggattccttttcccaaagaccaagccatgggcgtatatagttcaatatggaatgccgatgattgggccacacagggtggcctagtgaagaccgattggagccatgcaccattcattgccacttacaaagggtttgaaatcgacgcgtgcgagtgcccagtttcg

SEQ ID NO: 208601 - DNA, 382 bp, Gossypium hirsutum
atcaaggctccttcagttttcactaccagaaatgtggggaaaactctcgtcacccgtactcagggtaccaagattgcttctgaaggactcaaacaccgtgtgtttgaggtttccctggctgatcttcaaggtggtgatgaggatcatgcttacagaaagattcgtttgagagctgaagatgttcaaggaaaaaatgttttgaccaacttctggggaatgaattttacaactgacaaactgaggtctttggtgcgtaaatggcaaaccctgattgaagctcatgttgacgtgaagacaactgacaattacactttgagaatgttctgcattggattcactaagagacgcccaaaccaggttaaaaagacttgttacgctcagt

SEQ ID NO: 208602 - DNA, 456 bp, Gossypium hirsutum
cccacgcgtccgcccacgcgtccgcccacgcgtccgcgagactgtccctgttgatttgcttaaaggagagcacaaagaccctgaatttctcaagctccagccttttggaacagttcctgtcactcaagatggagattatgttttatatgaatcccgtgcaatcataagatactatgcagaaaaatacaaatcacaagggactgatctactgggaaagacagtagaggaaaggggtcaagtggaaaattggctagaggttgaggcacacaatttcaacccaccaatttacgccttgaccctacatttgatgtttgcttccaagatggggttccctcctgatgaaaatttgatcaaggaaagcgaggaaaagctaggcaaagttctggatatttatgaggagaggctgtcaaagaacaagtacttggccggggatttcttcagccttgctgatctgag

SEQ ID NO: 208603 - DNA, 298 bp, Gossypium hirsutum
  unsure (1)..(298): unsure at all n locations
gccgctttgtttggaatggagtgctttgcatggtattgcgcacgtgagataatgggaaggggtttgactttcaccgggtactatgtttaaggggagtttggatgttttttcgccattgcacgattgaattacggccacactggatgtgcatttttgttgtttttagagatttttgaagctgagaaatcagtgaattaacactcggtatagcctgaataagttgttatagttgaaagttgaaacggcttatgttggttnaaaacaaacaatttttatacaacaaatgtatgccttaaaa

SEQ ID NO: 208604 - DNA, 433 bp, Gossypium hirsutum
gtctgatcactctaccatcaccatgaagaagattctcgatacatatgatggtttccaaggggtaaaaacattggtcgatgttggcggtggtaccggtgccacgcttagcatgatcgtctctaagtaccccaccataaaaggcattaactttgatttgcctcatgtcattgaggatgctcctagctgtcctggtgtggagcatgttggtggagacatttgtaagtgtaccaaaaggagatgccattttcatgaagtggatatgtcatgattggagcgacgaacactgcgccaagtttttgaagaactgctatgaagctttgccagacaacgggaaagtgattgttgccgaatgcattctttctgattaccccgaccctagccttgccacgaagttggttgtccatattgattgcattatgttggctcacaaccc

SEQ ID NO: 208605 - DNA, 363 bp, Gossypium hirsutum
cccacgcgtccgcccacgcgtccgcaggctacttatgataagcttttatctgaggctcctagagataagctcatcactccctcaattttgtctgatcgtatgaggattaatggatcccttgctaggaaggctataagggaattgatggcaagaggatcgattcgtttggtgtctgcccattcaagccagcagatttacactagggcaaccaacacctagatgttttgctatagttttgcttaaattagttctatgcagtatttgcctttcttgactatctgtgaacgacttttccttttgctaaagacctccatctataatgtgtgagctacagcttcttgttggtctggcttaatggataat

SEQ ID NO: 208606 - DNA, 458 bp, Gossypium hirsutum
cagcatcatccattgattcccttcccttctgctccctccctcttccattaaaagagaaggcagaaagcagctatcaaaatggctactttgctagcggctgcaggtcgtagagcaactactctatctcgatccccggctctgtctcaagccgcttctctcattcctcgccgtggtcttgccggcgctgcggatcaccatggacccccgaaggttaattgttggcaagacccaatgaacccatctaaatggaaagaagagcactttgttattgtctctttatccggttggggcctgcttttctttagcggatacaagttcttcactaaaggcaaaggcaagaaggaagagaacatggtggaaacgacacattaatgaggttggagtttctaaattttacaaatagtccatgaataatgtgttgctggaacttccatgtccttgggcatcatcttcacttt

SEQ ID NO: 208607 - DNA, 383 bp, Gossypium hirsutum
atccgctccgggaacaatccgtggtgactttgcaattgacattgggaggaatgtgatccatgggagtgattccgtcgagagtgcaaggaaggaaatcgccctttggttccctgaatgccctgttaactggcagagcagccttcacccttggatctacgagtagaaatcatttggtagaagctgttgaccgtcatggctctgtcccggttgtttgttgttgttgttgccagccctttgatatttatgttactattatagtttgaagtggtgaaagctctgtagcattttgggtgtataggttaagttggagttgtgttgaaagctcctattacaacgccacagtggaggtgaacagcgtttgaataatcaaagctattttgtgt

SEQ ID NO: 208608 - DNA, 434 bp, Gossypium hirsutum
gtctgatcactctaccatcaccatgaagaagattctcgatacatatgatggcttccaggggggttaaacattggtcgatgttggcggttgtaccgctgccacgcttagcatgatcgtctctaagtaccccaccataaaaggcattaactttgatttgcctcatgtcattgaggatgctcctagctgtcctggtgtggagcatgttggtggagacatttgttagtgtaccaaaaggagatgccattttcatgaagtggatatgtcatgattggagcgactaacactgcgccaagtttttgaagaactgctattaagcttttccagacaacgggaaaagtattgttgccaaatgcatacttcctgattaccccgaccctagccttgccacgaacttggttgttcatattgattgcattattttggcctacaaccct

SEQ ID NO: 208609 - DNA, 444 bp, Gossypium hirsutum
  unsure (1)..(444): unsure at all n locations
atatggtatctgcgatagctttgcttgctgaacttgaccttgaatccctcatgaagaggagaagaagatcatcatatgtaagaatagtaagcaagcagatggtaggaattttcctcactatatgggttcgtaggagtttgcgcaggcatattcagaatctgaaggtgtctactgttggtgttggtgtaatgggttacattggtaacaagggatccatatcggtcagcatgtccatatatcaaacacttttctgttttatatgcactcacctgacatcaggtgaaaaagatggggatgaacttaaaagaaatgctgatgtgcatgaaatacttcgacgaactcgttttcattctctttcagcaattggacttcccanacgcatccatgatcacgaaagataatttggatgggtgatctaaataccgtatcacctgccatatgaca

SEQ ID NO: 208610 - DNA, 194 bp, Gossypium hirsutum
gaactgctcttgccttcgttacgttacgcgcctacggagagcgtgagttcatgttctataggaatcctagcgccgatatgctgttgaagccggaggaattgaaccttgatcttattaaaactttccagggattttacttttgaacaataaggttgatcggggagccctgccgataaacttatttaaagggcatg

SEQ ID NO: 208611 - DNA, 450 bp, Gossypium hirsutum
gcagagcagacagactagaaaagaagagaagatggagcaaacattcatcatgatcaagcctgatggggtccaaagaggcctggttggtgaaatcatcggcagatttgagaagaaaggcttcaatttgaaagggttgaagctcatcagtgtggatcgatcttttgccgagaagcactatgctgacctgtctgcaaaacccttctttaatgggctcgtagagtacattatctccggtccggtcgttgctatgatttgggaaggtaagaatgttgttaccacaggtcgcaagattatcggagccacaaacccagctgaatctgctccgggaacaatccgtggtgactttgcaattgacattgggaggaatgtgatccatgggagtgattccgtcgagagtgcaaggaaggaaatcgccctttggttccctgaatgccctgttaactggcagag

SEQ ID NO: 208612 - DNA, 436 bp, Gossypium hirsutum
tcgcacccctctcttctctttctctcatatcatctctttgtccctctggaacaactttcttgagaagaggttttccttctttttctaggcaaccaaacaaataagaatgggtgatatactgagtgaagaacagattgttgagttcaaagaagccttttgtctgtttgacaaagatggagatggttgcattactgtggaagaactggcaactgtgattagatccttagatcaaaatcccactgaagaagagcttcaagatatgataactgaagttgatgctgatggcaatggaaccattgaatttgcagagttcttgaacttgatggccaagaaaatgaaggaaactgatgcagaggaggaacttaaagaggctttcaaagtttttgacaaggatcaaaatgggtatatatcaactaatgagctgaagcatgtgatg

SEQ ID NO: 208613 - DNA, 450 bp, Gossypium hirsutum
cccacgcgtccgtcaggttgtatctggcttatccttgcccttacgcacagcgcgtgtggagcgccaggaattgtaagggtttgcaagacaagattaagttggttcctttgaaccttcaaaatagacctgcttggtacaaggaaaaagtttaccctgaaaacaaggtgccgtccttggaacataatggcaaagtcattggggagagtcttgatttgattaaatatgttgatagcaacttcgaagggccgtctcttctacctgatgatgctgacaaaaaggagtactttgagacgacgttatcacacatggacgaatttctagggctggtgtatgctacatttaaaggagactcaacaaaggatgctgatgctgcttttgatcacttggaaactgctcttgcaaaatatgatggtccattcctcctaggcaacgagtttactctggcggaca

SEQ ID NO: 208614 - DNA, 383 bp, Gossypium hirsutum
cggacgcgtgggaaaaatttccccttttcgattcaatcatgagtaacgaatatgagtatctgttcaagcttctgcttatcggcgattcctccgtcggaaaatcctgcttgcttctcagatttgctgatgattcttatgtggatagctacatcagtaccatcggtgttgatttcaaaatcagaacagtggagttggacggcaagacaatcaagctgcaaatttgggatactgctggacaggagcgttttcggactattactagcagctactaccgaggagctcatgggataatagtcgtctatgatgttaccgagatggagagcttcaacaatgtcaagcagtggttgaacgagattgacagatatgctaatgacagtgtatgt

SEQ ID NO: 208615 - DNA, 452 bp, Gossypium hirsutum
tgaagttaagtctgttgagatgcaccatgaatccctcccggaagctttccctggtgacaatgttgggttcaacgttaagaacgttgctgttaaggatcttaaacgtggttttgttgcttcaaactccaaggatgatccggccaaggaagctgccaacttcacctcacaggttatcatcatgaaccaccctggccaaatcggaaatggttatgccccagtcctcgactgccacacctctcacattgctgtcaaattttctgagctgttgaccaagattgacagacgatctggcaaggaactcgagaaggaacccaagttcttgaagaacggtgatgcatgtatggtaaagatgattcccaccaaacccatggtggttgagactttctccgaatacccaccactcggacgttttgctgtccgtgacatgcgccagaccgttgctgtcggtgtca

SEQ ID NO: 208616 - DNA, 459 bp, Gossypium hirsutum
gccacctccagtggagaccccttgtccaccaccaccacctgtgctatatccaccacccccggcacagcaaacatgccccattgacactctcaagctaggcgcatgtgttgatgtgttaggtggcttagtgcacattggtatcggcagcagcgccaaggacacatgttgcccagtgcttcaagggttgctagacttggatgctgctatctgtctttgtaccacaatcaaggccaagcttttaaacatcaatatcataataccaattggccttcaggtcctcatcgactgtggcaagactccacctccaggattccagtgtccagcataaggatagtacccctttttggacaataacatcatgttcatctcatgacaagaagttataattgtcgaaaatttcgagtttccccgtaaagatatattgaagcatgacaagatgtgctgatgtatttcttaata

SEQ ID NO: 208617 - DNA, 458 bp, Gossypium hirsutum
actcttcattttgtctaaaaaagaaaaatgccaggcctcaccattggagacacagtgcccaaccttgaagttgaaaccacccacgggacattcaagcttcatgactacttcaacaatgggtggaccatcattttctctcatccttctgatttcacgcctgtgtgtacgacggaactggggaagatggcggcttacctgccggagtttgaaaaacgaggggttaagcttctaggtttctcttgcgatgatgtgcagtcacacaaggagtggatcaaagatgttgaagcctacacgcctgggtgcaaggtggcatacccaatcgtggcagatcccaagagagggatcattaagcaacttaacatggtggacccaaatgaaaaagactcttcagggaacgagctcccatctagagctctgcatatcgtgggctctgataacaagataaagctgagcattct

SEQ ID NO: 208618 - DNA, 405 bp, Gossypium hirsutum
atttcatcgctcccactatctgatccctcaaagcctacagaaaaaaaaaggagagcaaaaaggggcagaaagaggcggcggagaacgtggcgcttttaggcgcggcttcggtggaggaaggggtgaccgtggtccaagaggcaggcgccgtggccgcaaggacgaagaggagaaatgggtacccgtcacgaaactcggccgtttagtcaaatccgggaaaatcacgtccctcgaacaaatttacctccactctctccctatcaaagagtaccaaatcatcgaccagctcgtcggcccttccttgaaagacgaagtcatgaagatcactcccgtccagaaacaaacacgtgccggccagcgcacgcgtttcaaggccttcgtcgtcgtcggagacggaaacggaca

SEQ ID NO: 208619 - DNA, 420 bp, Gossypium hirsutum
gctgattacaacatccaaaaggaatccaccctccacttggtgcttcgtcttcgtggtggtgggcagatttttgtgaagactcttaccgggaaaaccatcaccttggaagttgagagctccgacactattgacaatgtcaaggccaaaatccaggacaaggaaggtatccctccagaccaacagaggttgattttcgcgggtaagcagcttgaggatggcaggacacttgcagactacaacattcaaaaggagtcgaccctccatttggttcttcgtcttcgtggtgggatgcaaatttttgtgaagacattgacaggaaagaccatcactttggaagttgaaagctcggacactattgataatgtcaaggccaagatccaagacaaggaaggaatccccccagaccagcagaggttgatc

SEQ ID NO: 208620 - DNA, 444 bp, Gossypium hirsutum
  unsure (1)..(444): unsure at all n locations
cccacgcgtccgggtgatctggagctcttcacatctgttgctgagaagttctcaagtgcttggagttcagaccggacccataatttgattgtaaggctgcggcataatgtcattcggactgggctacgcaacataagtatctcatattctcgcatctcactggttgatgttgccaagaagcttagattggattctgttgctgatgctgagagcatagtagccaaggcaatcagagatggagctattgatgcgacattggatcatgcaagtagatgtatgctgtcaaaggagactggagacatctactctatgactgagcctcaaacggtattcaattctaggattgctttctgnctcaatatgcataacgaggcagtgcgtgcactttcggttccacccaattcccacaaggagaaagaaagtgctgagaagcagagagaaaga

SEQ ID NO: 208621 - DNA, 458 bp, Gossypium hirsutum
aaaaaatggagaaattgagagtttgcatagtggtgttagcttgcgtggtggtatgggcggcagcccaaagtgcttccaatgtgagagctacttatcatctttacaatccgcagaacataaactgggacttgactgctgcaagtgctttctgcgccacatgggatgccagtaagcccttagcatggcgtcaaaaatatggatggactgctctttgtggtcctgctggtcctcaaggtcaagctgcttgtggccgatgcttaagggtgaccaacaccgccactggaactcaggcaacggtgagaatcgtggatcaatgtagcaatggagggctggatttggatgttaatgtatttaaccaacttgacacaaatgggattgggaatgctcaaagtcacctcactgtcaactatgaatttgtaaactgtggtgactaaacccactttctaataaataaaatg

SEQ ID NO: 208622 - DNA, 461 bp, Gossypium hirsutum
gagatgaactgcttgtgacagaactgatttttaatggtacattcaatgatcttgatcatcagcaagtagtagcccttgcaagttgtttcattccagtagataaatcaagtgaacaaatacagttgaggacagagattgccaaaccattacagcaactccaagaaagtgcacgaaaaatagcagagatacaacatgaatgcaaattggatgtaaacatcgacgaatatgtagaatcaactgtgagaccatttttgatggatgtgatttattgttggtcgaagggtgcaacttttgcagaggtaatacagatgaccgatatatttgagggtagcattattaggagtgctagaaggcttgatgagtttctgaaccagcttcgcgctgccgcacaagctgttggagaagtcaatttggagagtaagttcgctgcaacaagtgaaagcctacgtctaggtatcatg

SEQ ID NO: 208623 - DNA, 459 bp, Gossypium hirsutum
cttttccctagtcagtgcttgtggctcttgctcttcacccacccctaaaccaaggccaaaccgcaaagcccaacacccccacccctactgcatccgcacgaggcaggtgccctagagatgccctcaaattaggtgtatgtgccaatgtgcttaacttagtcaatgtcaccgttggttcacctccagtgatgccatgctgttcccttctcaatggccttgtcgacctcgaagctgctgcttgcctttgtactgctatcagagctaacatcttaggcatcaaccttaacatcccagtttctcttagcttgctcctcaacgtttgttcaaggaatgttccaactggcttccaatgctaattaagtcatcactttttccttcattcttttctaactttcttggggtcgttttgcgttcggttttttaataaagtatgatgtcataacttcattgttttaattt

SEQ ID NO: 208624 - DNA, 345 bp, Gossypium hirsutum
ggtgaacagacattgctcaatggaacaaggtaagcgggggaaggacgccaaagggatccagtcccactctaaaaggaatgaactctatggctgtacaacgagggtgccagaaaccaacccgctaactgtcgattcactgatagagctggtcccgacaccagagcggatctacctgtgcctgccggcggacggactgctaacatttacctcggtggccttaccaagactacgaacaattatctctgaacttgtgccgacgaagctaatccgcctgtttacataaaacacagcattgctatggtccctgctgatgctcacgctatgtgaattgtggacagagctcta

SEQ ID NO: 208625 - DNA, 454 bp, Gossypium hirsutum
cccacgcgtccgcttccttcttctcaagaccgtttcttctcacgaatcctccagatttaagacagtcttcctgagttattagaggtttatcctaacaaatctgtgaagggttgagaaaaaataaacaactatttttaatggcatctagagtttcattaaagactaaaggtaaaggagggaaggggtctaagggctcggatgagaaatcaactacgcagtgcttgaaagagtggagcacatgggctatgaagaaagccaaagtggtaacgcactatggcttcattcctctggtgatcattatcggcatgaactctgaacccaagccccaactttatcaattgctaagccctgtctgattcagttgcttatttcttaaccacccaaatcttggtttaactatgtaatttgtttgttgcctatctgtcgaaactacatggtaatatgttaggcatat

SEQ ID NO: 208626 - DNA, 464 bp, Gossypium hirsutum
gagaaaatggctactttgggtggaattagccaggtcgatggaagcgccaatagcctggagagtgaagacctcgctcgttttgctgttgatgaacacaacaagaaagggaatacgatgctacagtttaagaaggtgacgaatgtaaaacaacaagtggtttctgggactatttattacataacattggaggcgatggatggtgacaagacgaaagtttatgaagccaaggtgtgggacaagccatggatggatttcaaggagttacaggatttcaaggttattggcgatgctcccgccggttgtacttccaccgcttaaggtgactggagattgtagaggaaaggatatcaggataccgaatgcgggttttaaataaatgtaactgtcttatgttaatttggatttagactactaaattcagtggtattgaacttaagcttatctagaacaatgaatgaataacg

SEQ ID NO: 208627 - DNA, 462 bp, Gossypium hirsutum
cagaaggaaattttgtgtaaaatcgacatctggaatatgggtttcttggtaacaaccctgagttttgctgtaattgggataattgcatcgctttgtacgagaatctgctgtaacagaggtccctctgctaatctgctccacctaacactggtcattacagcaacggtctgttgttggatgatgtgggcaattgtatatcttgcacaaatgaaaccactcattgtccccattttgagtgaaggagagtgaaattcttcgcacgagatcgtttgcgaggttatcagtaaacaagctgtagtcatattgattgtggattagcctctgaatttagttgtcatgtaatatgtctttctcatgtcgcttctgtaagtaaatccttgttcaaagcttgaactttgaatttggtattatgttagcagtactttattatttggttctcatttggtcaagttctcataaaaa

SEQ ID NO: 208628 - DNA, 296 bp, Gossypium hirsutum
  unsure (1)..(296): unsure at all n locations
cactaaaatgcctcgccaaagagaaagccgagtgtggccgaataaaatgtttgtttggtgaggttcttttccaagagacgagtttgttaatgtgcaggtgagtaatggtgcaatggtactggtttgtaacgatcgatccattgcatttttcttttagcataagccaggttgccttctcttgatgttggtcatgggcttggtggatgtaaggattgatgtaatatatgtattgaaggatggtgttgactgtgttnaaaataaaatattttatagttttttattaaacttcctacaat

SEQ ID NO: 208629 - DNA, 437 bp, Gossypium hirsutum
  unsure (1)..(437): unsure at all n locations
aaaacccgtgtttgtgaaagtagatcagctaaaaccagggacaaaaggccacaccgtaggggccaaggtattgtcctctaacatagtccttcaaaagggtcaagccgcttctcgaaatctccgccaaacccgcatcgctgagtgccttgtaagaaacgagaccggcactgtcctcttcactgctcgaaatgaccatgttgacttgatgaagcccgatgacactgtaattcttcgtaatgcgaagatcgatatgtttaacggttctatgaagctgactgtcgacaaatggagccgcatcgaggtcactgaccctgccaactttgttgttaaagaggataacaatctatcgcttgtcgagtatgagatggctcttgtgcttgaaaatgacgagattgctgagacctatgctgctggataccgaaagagntcttatggat

SEQ ID NO: 208630 - DNA, 256 bp, Gossypium hirsutum
  unsure (1)..(256): unsure at all n locations
gcagaactggcgatgcgggatgaaccggaagccgggttacggtgcccaactgcgcgctaagctanaacccacaaagggtgttggtcgattaagacagcaggacggtggtcatggaagtcttttagcagcacttgcggaggctgcattccttattggtctggaaaagaacagcgatgttgtgcatatggctagctatgcaccactttttgtgaattccaatgacagacggtggaacccagatgcaatcgtcttcaac

SEQ ID NO: 208631 - DNA, 161 bp, Gossypium hirsutum
  unsure (1)..(161): unsure at all n locations
gncaacggatatctcggctctcgcatcgatgaagaacgtagcgaaatgcgatactgcgtggtaattgcagaatcccgtgaaccatcgagtctttgaacgcaagttgcgccccaagccattaggccgagggcacgtctgcctgggtgtcacgcatcgtcgcc

SEQ ID NO: 208632 - DNA, 441 bp, Gossypium hirsutum
gcatattgctgctggagatttactgagagcagaagttgccgccgctagtgaaaacgggaaggtagcgaaggaatacatggagaaaggagaattagtccctgatgaaatagttgttatgatggtcaaggagcgtctgctgcaacctgattctcaacaaaggggttggcttttagatggctatcctaggagctcatcccaggcagctgctcttgaggattatgggatccgtcctgatgttttcattttgttggatgtttctgaagacattcttgttgagagagtggttgggcgaaggttagaccctcttacggggaagatataccacttgaaatattctcccccggaggacgatgaaattgcatccaggcttacacaacgatttgatgatactggaaaaaaaggtaagttgcggctacgcacacatcaatcaaaatgtggatg

SEQ ID NO: 208633 - DNA, 228 bp, Gossypium hirsutum
cccacgcgtccgattgtttgatgaaaaccaaaaatcgggtccagagctagagagacactttggcttatttttaccaaacaagcagccaaaatatcagctccgttttggtgggggaaggcattgggatattgcttctaaggaatataatgcaacatttcctcttaaatatgatatgtaaaaatctgcaaagcttggggaatttggggagttttggtcgctttgtttatt

SEQ ID NO: 208634 - DNA, 409 bp, Gossypium hirsutum
  unsure (1)..(409): unsure at all n locations
cggaacgaccgaggcgaccgacgcgtacgggaggccaacagggggaaccctgttcgcgagaacgccacgttctctctcggggctgacggggaccttgtcttggctgatgccgatngtcngattgcttggcaaagtaacactgccaacaaagctgtggtagggttccaattgttgcctaatggtaacatggtgttacacgattccaatggcaagttcatttggcaaagttttgatcatccaactgacacactcttggtgggtcagtcgcttagagccggaggggcgacgaagcttgtgagccgngcttctgctcaaacaatgtcacggagctatagcttgtgatgagctaacagtggtttgcagacaaggatgactctctaacactgttacttaatatcgttggcaatca

SEQ ID NO: 208635 - DNA, 399 bp, Gossypium hirsutum
gcttcacacactatccacatttcctcagtggcttacaacacacttttcctcggagaatttgtgcaacctgattgggatatgttccatagcttacacccagctgcagattaccatgctgctgctcgtgctgttggtggatgtgctatgtatgtcagtgataagcctggcaaccacaattttgagctcctaaagaagctggtccttcctgatggatcagttctccgcacccaattgcctggcaggcctaccgttgactgccttttcgctgatccggctagagacgggattagcttactcaagatttggaatgtaaacaagtgctccggtgtggtgggtgttttcaactgccaaggtgctggttggtgcaaggtcaccaagaaaacccgaattcatgatgca

SEQ ID NO: 208636 - DNA, 336 bp, Gossypium hirsutum
gcggggcaaaccatacgttttggtaatcccttattcaacacaaggccatgttattcctctcgtggaactcgcccaaaacttagccaaacaaggcatcaaaatcagctttgttaacacagtgtttaatcacaagagggtcctagatgcattcggcgagaaggtggatgaaaatggcttacttcatctactttcagtccccgatggactggaagatggggaagataggaatcagttagggaagttaactgaaagattatgccaggttatgcctactcaactcaaagagctcattcataaggttaatggatcagattatgataagaattcctggggttt

SEQ ID NO: 208637 - DNA, 410 bp, Gossypium hirsutum
tagaaaactcccacattttcatctctttcactcacaaacaagcacctccaaatccaatgggggctgcagctccacccccaccaccatccgccgcccctgaaccttccatggcaccacctgaaacaaccccgataggccaccccgtcttcaccaggatccgcctagccaccccttcagacgtccctttcatccacaaactaatccaccaaatggccgtctttgagcggctgacccacctcttctccgccaccgaatcttccctatcttccaaccttttcctctcccctcctttccattcattcacaatttttctactcgaactttcctcttcccccattcctcctctcctttccccttcaccatctttcactcccatagaaaagacattcaacttcgacatccccttaaac

SEQ ID NO: 208638 - DNA, 405 bp, Gossypium hirsutum
tatgaatcccgtgcaatcataagatactatgcagaaaaatacaaatcacaagggactgatcgactgggaaagacagtagaggaaaggggtcaagtggaaaattggctagaggttgaggcacacaatttcaacccaccaatttacgccttgaccctacatttgatgtttgcttccaagatggggttccctcctgatgaaaatttgatcaaggaaagcgaggaaaagctaggcaaagttctggatatttatgaggagaggctgtcaaagaacaagtacttggccggtgatttcttcagccttgctgatctgagccacctaccatttactcagtacttggtgggtcaaatgggaagggaatacatgataaccaacaagaagcatgtgagtgcttggtgggatgatatt

SEQ ID NO: 208639 - DNA, 344 bp, Gossypium hirsutum
gcgcccacgcgtccgcactcttggttataaaacagtgcttaagtccctcaggagctccaaaggggagactgagtatcatttcgaacaattgtccaccgctgaggaaatctgagattgagtactatgcaatgctctgtaaagtcggagttcaccattacaatggaaacaataatgatctaggaactgcttgtgggaaatacttccgtgtatcctgcttgagtattgtcgaccctggtgattctgacatcatcaagtctctaccaggtgaccactaagtcaatgaaggtctggttctctatcacagcagaatgatgatgtttctttacttcctcacgatattattt

SEQ ID NO: 208640 - DNA, 469 bp, Gossypium hirsutum
cccacgcgtccgcccacgcgtccgggcaacttgtaatgatgattgtaagtctcgagattcgagtgagagcagcaagagatcactttcagcattcgttaaggataagaggggctgttacaagagaaagaggtttgctcaaacaaagatagtggtgtctgataaaatagaagatgggcatgcatggagaaaatatggacaaaaaaatatcttacattctaaacatccaaggagttacttcaggtgcagtcacaagcatgatcaaggctgtagtgctatcaaacaagttcaaagaatggaagatgatgcccaaatgtaccacatcacatacattggtacccacacttgcagagaccagtactcatccatggctacaccacgaatcgacagtccgagtccgatattaaaactcgaatccgaggaacaagcgacgacaccaagcaatgttacggatttggattcgatgaccatg

SEQ ID NO: 208641 - DNA, 325 bp, Gossypium hirsutum
tcccacacatccacaatcacaaccccatatttcaaaattacacaattttaaaatgtcctcgggagatttaatctccaaaaaacgtaacatgtcatccaatgccatatctttatgcagttcatttttgccactttgatgccactgagaccaaagctttcagactccaactagttggtgacattagtggagataaagtccatgctcttgatgtttgccatatggatacttcttgttgtagcaccgatcatgctgcttttcgcatgcttggtattaagcaaggaaacgctttttgccatgtcttttctcagggtaatcttgtttggat

SEQ ID NO: 208642 - DNA, 425 bp, Gossypium hirsutum
cccacgcgtccgacgtgcagcatgttaatggcctctgtttcttccttctcttgtgttctcggcgtttggcatctcatgtttaatggaagaacttgataatgcaacacgtggaccattcagctggggacctgattcatctattgcaaggattgcttagatatgaccctattgacaggctgacagctcgggaagccttaaggcaccctttcttcagtagggaccaatttaggcgattgagcttggctggcattggttggcctggaatgaatgaatatctaagaaagtagacaaggattcatatatgtaaatattactaacctgtaatacttgttaacactagcaccttctgtgtgcgttaaaggactgaattgtggtgcaaacaacagaataaaacaccatttagttagattgtgactaaacccttt

SEQ ID NO: 208643 - DNA, 359 bp, Gossypium hirsutum
  unsure (1)..(359): unsure at all n locations
gctcttcatcggcatgagttacttcttttaaagggttgtatcatatggattacnggtgtcagtgtttcaagaaagagcgcattggcattctcgctgtgccatgccttgtattcaaagggaaagttaacttacatttcttgatggtgataatgttcggcatggcctaaaccgtgaccttacttttaaagcttaagatcgtgcatagaacattctaaggattggagaggtggcaaagctctttgttgatgctggcatcatctgcattgtcagtgtgatatttccctaccgaaaagaccggcatgcatgccgcgcgctgttaccagatggagatttcattgaggtgttcatggatgttccaa

SEQ ID NO: 208644 - DNA, 444 bp, Gossypium hirsutum
aacttctttgctttctttgtattagcagcttgtgtagggggaaaaaattatgaagagggtgtcctttgttgccttgtgtgtggtggcactcgcggtggtgctgttttcgggtgaaagtcgcacggcggaggcagtgacatgtaatcccgtggagcttgccccctgctcgccggcgcttacgtcgtcctcgcctccatcaagcgcttgttgcagcaagctgaaggcgcagcagccatgcctctgtggatacattaagaacccatctcttaaacagtatgtcaacagtcctaacgctaaaaaggttgcttcgacttgtggagtcccatatcctaagtgttaaatgttgcttaatggtgtatctactatctactggcagcaaataagtgattctttttgctgtcaagtactgttcttgaataaaagaataatgattaaatatttgat

SEQ ID NO: 208645 - DNA, 372 bp, Gossypium hirsutum
tcccacgcgtccggtcaaagtttctctctctctctctctctctctattgttgaacgtcataggcttttgtatcaatggctgaagtccttgaccgcaacctgcctcaccaagttcaagttcacccacagtaccgtttcgacaatacaaccggaggcggttacggtgcaaagaactatcacagtggaccatcaacaagccaagttctagccgtccttacacttctccccattggtggtacactgcttgcattagccgggttaacactggccggcaccgtcattgggctgatgctagccacaccgctgttcatcatcttcagcccagttcttgtcccagctgccattgccattgccatggcagtgactgggttct

SEQ ID NO: 208646 - DNA, 432 bp, Gossypium hirsutum
ccttcagccaattccatggctcttcaactggtttcatctgaccctgatttatctcaaagggggttcttgcacacttcagatataatggatattacaaatgatttgaaggactatgatgttgtgttcttggcggctcttgtggggatggacaaggaaacaaaagttcgtgtcatcgatcatgtggctgagtacatgacccctggggctcttttgatgctgaggagtgctcatggagctagggctttcctttatccagttgttgatccatgtgatctacgcggatttgaggtcctctccatattccatcccactgatgaagtcattaactctgtggtcattgcacgtaaaattccaatcactaaacaatgctccgttgagtaccctcttgccccaacaaaagcttccaacacgtgttttgacaatgaaatgttc

SEQ ID NO: 208647 - DNA, 373 bp, Gossypium hirsutum
gcagtcgactctgacgattccgacgatgtcttcgtctgcgagatatccaagaataggagagtttcagggaggaactggaatggcaagatttgggttgatattcgtgaattttatgtcaaggatggtaaacaattgcctggcaagaaaggtctttctctaagtctggaccagtggaatgttctacgtgatcatgcagaggcaatcgataaggcacttgctgagaactcgtaggaagtagacatatggtataccaagggaatctaagtaccttttcatatatgttggaaagttaacttgctggaagcctaggttttgttgtttatgacagatcttaactttgtttgaagttgctatacttggaagatattttatg

SEQ ID NO: 208648 - DNA, 374 bp, Gossypium hirsutum
gtcaattgccaacacaaaaggagggcgaagaggtggactttagaggtgtcctgcatcgtgagggctcggttcttatgtctgtttcccttgatcacttgaaggcaccggaacctttatataagtcacttgcagcaaagctggtcgtaggcatgccatttaaggacttggcaacagtagactcaatcatactgcgggagcttccaccagtagatgacgctgatgctcggctggctcttaaaaggttgatagacataagcatgggtgtcattacacctttatcggaacagctaacaaagccattgccaaatgctatggctctagtaaaccttaaggaattatcaactggagcttacaagcttttgcccgaaagtaca

SEQ ID NO: 208649 - DNA, 347 bp, Gossypium hirsutum
cacactctggtgtaaggtgccacatgtagaggtccgggtttgagggaccatggactggcaacgctctcatctttgacagctcttacttcaaggagcttttgtcgggagagaaggaaggccttcttcagctaccaactgacaaagttctcctgtcagatcctgttttccgtccattggttgaaaaatatgctgccgatgaggatgccttctttgctgactacaccgaagctcacctgaagctctctgagctaggatttgctgatgcataagctgatggttgcggaataaaaatgaacccaacaacattttgcctccacaaaatgaatgtattggggttttgtcgtctc

SEQ ID NO: 208650 - DNA, 463 bp, Gossypium hirsutum
ccaggatttattctttttcatcatcaatagacagcccggcgaaatctgactccatggacaggtacatgagaaacagattaagagaattattttagaccctttagatggtagccgtcaaaccaagaaacttttgaaaacctagacttgccaaggaggcagacagaaacatgctagggtagcatacgtaattttgggttcccgaggttggatttcatggtcacatatttttttcggatgggatctgtatcaatccgagtaaagtttctgacattgctaattggaaagctccgaaaaatgtttcagatgtgagaagttttctgggcttagcaggttactattgtcattttattaagaatttctctatagtttcttcaccgctgattagattgttactgaaaaatgttgagtttgtttaaatagacaagtgccaacaaaattttgatcaagttgaaaatatattgac

SEQ ID NO: 208651 - DNA, 443 bp, Gossypium hirsutum
gcgacgacacaaaaaaactggcagaaaggattgccaaactatctggtggtgttgcaggcattaagctgtgttctgcaactgagactgaactctaggatcgcaagctacgtattgaagatgccaagaatgctacctttgctgccatagaggaaggtattgtacctggtggtggtgctgcattagttcatctctcgacttgcgtccctgcaattaaggataagcttgaagactctgaagagcgcataggagccgacattgtgcagaaggctttggtagcaccggcctcgttgatagctcaaaatgcaggaatggaaggtgaggtagtggtggagaaagtaaagaacagcgattgggagatcggttacaatgcaatgacagacacgtatgagaacatgctggaagctggagtaattgacccggcaaagtgacaagatgtgcgttgc

SEQ ID NO: 208652 - DNA, 378 bp, Gossypium hirsutum
cccacgcgtccgcccacgcgtccgcccacgcgtccgctcaaaaatgccgttcaagaggtacggggagagtggaagagtagctctggttaactacggaaaggactacggcaagcttgttgtcattgtcgatgtcgttgatcaaaacagggctcttgttgatgcacctgatacggtgagaagccaaatgaactttaaaagactaactctcactgatatcaagattgatattaatagggttcctaagaagaagaccttgattgatgctatggaaaaagctgatgtgaagaacaagtgggagaacagttcatggggcaggaaagctgatcgtccagaaaagacgggcatcgcttaatgattttgataggttcaaagctcatg

SEQ ID NO: 208653 - DNA, 467 bp, Gossypium hirsutum
cccacgcgtccgctccaagccctggttcaacaccacctgcctcatcttcggttctgctctgggtacctgcacgacagctatggtgggagacatgctgggatccgacaaaccatcagcaggtaaactggcgtcgatgtactcgccttttataggatttgggttcctagccatactgcgagggctgctttcggaatcccccaacgcttccaaaaccatggccaacggaccaacgtcggctttgaaaaagaaagcctgaagttgacacatgaattataaaacatcatcttcttccttgaaatgcgatatccatgttacaacaataaggatcaaaattcaaagtacaaaaaattacaaatactactagcaatctaatagtacttgtagttggttctttgtcatgtttagaaagtttttattttaaaaggtgtgattatgagtaataattttaatgcattgcctttttttcc

SEQ ID NO: 208654 - DNA, 471 bp, Gossypium hirsutum
gctttggcctcagctcttgcaaatgctactccagaacagcaaagaacgatgcgtggggatgatctctatccacttgtcgagcagctggaacccgatgcagcagccaaagtaacagggatgcttctggagatggaccagacggaggttttacacttgctcgagtcaccagaagctctaaaagccaaagttgcagaagcaatggaagttctgaggactgtagcacagcaacagcagcaagctggtggagctgctgatcagctggcttcattgtctttaaatgataaccttgtttcatgagttggtagtagtgttggcctataatgtgctaaaaatgagttggcttggttagaaggatgatagctgggttcttttttattgattcagtactgttttggaactttgaaaatactgtcactgttatggtgttatagttgtgactgaacttggttttcactcttatttttatctttt

SEQ ID NO: 208655 - DNA, 382 bp, Gossypium hirsutum
  unsure (1)..(382): unsure at all n locations
acggtgggctttcagagtttctcggttggacggatcagcagagagctcaagctgccggagaatgctggggttaccgattactctactcnattcgcctggttggagtttttgtggttgccgatgccttgttcattggtgcacagcaagtgggtcgttatcttcaggatatacggtctcactaaagttatattgatcttcttgaaggcattcgattaaaagttaaaccatctgaaagatggcagttgaatttgtgatcatctataagagactgaagatgttttgaggatcccaattttgaaagccacagtagttagcagagtttcatggtgttgcctgtttcttacgtgcaaatccttgtgattacatatgtacttcaatcaca

SEQ ID NO: 208656 - DNA, 409 bp, Gossypium hirsutum
  unsure (1)..(409): unsure at all n locations
gcgcacttctccagtgaccaaaaaagcttcattgtctcttctatcgaaaaccccatggctgctcgtaagctggtttgtgctctagtgttgtgcatgttggtggttgagcccattgccacaaccaccataacatgcggcgatgtgacaagcaaagtggccggttgcttatcatacttgcacaacggagggaacgtgccgaaggcttgctgcgacgggatccggtccctgaacaacatggctcgaaccacccctgaccgccaaaccgtgtgtgggtgcttgcaagctgccgctaaggctgtcaaaattaaaggcaacttggctgagacccttccagccaaatgtagtgtcaacatcccttacaagatcagcacttccactaactgcanaaatgtgaagtgagatggattaa

SEQ ID NO: 208657 - DNA, 405 bp, Gossypium hirsutum
cccacgcgtccgtggcaattggacatccattgggcgcaacaggtgctcgttgtgttgctacgcttctggatgaaatgaagcgtcgtggcaaaaactgccgattcggagtggtttcgatgtgcataggcacaggaatgggggcggcagctgtcttcgaaaggggtgattgtgttgatgagctgtgcaatgcccgaaaagttgaaactcacaatctcttatctaaggatgcccgataggatacctagttttcttgttaaaaatatcctaaatcgagttggaaaatttaataaagcaatgtaataagtcaccgatcatgttacctcataaaagagtagtattcagacgttctggctattaactttcataaaattatatttcaactttataataagtgtcaactttttt

SEQ ID NO: 208658 - DNA, 355 bp, Gossypium hirsutum
cccacgcgtccgcccacgcgtccggtttcagggctagaaattgaggtcaaggacggccaggggatcaagttatctaatttatctccttcttcttttgtcttcgttgttggacatcctctcaaggcatggagtaatgggagattgaaagcggtgaatcatagagtgatgatgagcggagataaagatcgatattcaatagccgccttcgccattccaggtgagggtaccataattaaggcacccaaagagcttatagatgagcaacatcctcagctttacaaggactttaatttcatggacttctttcgttttgccttttccgaccgcgcaaagaacatcgaattcggccaacaac

SEQ ID NO: 208659 - DNA, 466 bp, Gossypium hirsutum
cccacgcgtccgcaaaaaggagttgttatggagaacaagagccactatccggttccacatagcaagcaggggctccaccatctgctgccattgtgaacaaagtattggggtcgatgaacaaaccggtttacttgctcgacataacgacgttgtcacagttgagaaaagatgctcatccttcgacttatagtggtgaccattcgggtaatgattgtagccattggtgtcttcctggtttgcctgatacatggaaccagcttctatatgcagctcttggtatgtgaaaaggtccacattgggcaacatagaatttacctctttttcttcttcatatgaattatacaatattcaaaggtgatgaaagttatcatatactacttgtaggagataattggtgggggggggggtaagatcaaatgtaaagtgattggatttaatcaaaataatcaatgctcttattaatctc

SEQ ID NO: 208660 - DNA, 476 bp, Gossypium hirsutum
  unsure (1)..(476): unsure at all n locations
attccctgggaggaggaactggatctggaatgggaacactgttgatatcgaagataaggggggaatacgcagataggatgatgctgactttctcagtcttcccatctcctaaggtctctgatacagttgtggagccttacaatgccactttgtctgttcaccaattggttgaaaatgctgatgagtgtatggttctggacaatgaggccttgtatgacatctgtttccgcacacttaagctaaccactcccagctttggtgatttgaaccatttgatatctgcaacaatgtctggagttacatgctgtttgcgattccctggtcagctcaactccgatctcaggaaacttgccgngaatctcatcccctttcctcgncttcactttttcatggtgggttttgctccactcacttctaaggggtctcaacagtaccgagctctaacagtacctgagctcacccaacaaatgtgggac

SEQ ID NO: 208661 - DNA, 488 bp, Gossypium hirsutum
  unsure (1)..(488): unsure at all n locations
cgcgtgcgggaaattacgcgcacatcattaacctattctgcatgggatctttcggcctctaaagatcgggaacgcggtgnatggcatcctgtgacttataagttttctgatgccactcctgtgctaatcaaatccataaaggatattgacaatatcaattatgaaactgaaaacagaagagaatggtgcagtagcaaagggaagccagccccttgcttcctttttgcgagaaaattcaccaggcctgcggctctccaccttcttaatttgtcagttctgggagctcgccgaggagcanaaagtgagacataacaatacagagggtaattttctgtactttggctaatgttaggtaggatttgttaggcttaacctattgtattttttgcagtaaaaaataatagagggagctgtaaatttagagagagggggaaaatgaaatccaatgcttgttgttgtataataaaaatatcattttctaaataaaa

SEQ ID NO: 208662 - DNA, 363 bp, Gossypium hirsutum
gcgcccacgcgtccgggatgctggcaacagaggtcacagcttcttggaggtattcttatgaatcggtctcgagcatccctcaaaagtcgctctacttcaatgagcaatacttgaatgtgaaaaaggctttggttgatactttctttggtcctcctgaacggggtgtatatagtgcatctgttcaaagcactcttttgcagatggcaaaggctgtacttggcaggtttggtgacatatcatcagttaaactaaaaatgccgaatatccatttcttacctgttaatatatcaagcaaggatcactgccagcattgtaaagttcaatgatgatgtatatctttcgacggacgaacctcacggatcg

SEQ ID NO: 208663 - DNA, 353 bp, Gossypium hirsutum
gagaacatctctggtagtagcttccatggctgatctcagcactgtgctcgtcactggagccgctggcagaacaggtgagatagtttacaagaagctgaaagagaggtcggatcagtttgtcgtgagaggactcgttagaactccagaaagcaaggagacaatcggtggagcagatgatgtgtttgttggggatatcagggataccacctctctggttcctgccatgcaaggaattgatgcactcataattcttactagtgctgttcctagaatgaaacctgggtttgatccgacgaaaggcggaaggcctgagttctattttgaagatggagcatatcctgagcaagttgact

SEQ ID NO: 208664 - DNA, 308 bp, Gossypium hirsutum
ccattgtcggtcagattggaaaccgctggtggtgttatgaccgttttgattccaaggagcgcctgcattcctaccaaaaaagaacaggtcttctcaacctactccgacaaccaacctggagtgttgatccaagtctacgaaggtgaaagaacaaggaccagagacaacaacttgctcggtaaatttgagctctctggcatacctcctgcttctagagttgtcccacacatcactgtctgctttgatatcgatgctaatggtatcttaaacgtctctgccgaagacaaaaccacttgacaaaaaaacaa

SEQ ID NO: 208665 - DNA, 296 bp, Gossypium hirsutum
  unsure (1)..(296): unsure at all n locations
gaanaaaaggaacgacccacgcgtgcgcccacgcgtccgtttagttctaaatatgaatacgccgccgaaggaaaagataaaaatgtttgttgtgtttattctttccaaatcatgggacaaagcnggatcaacttatgtaaagatggcgaattgccatttgaaatcagacagcaagcatgaaacagctcaagcttatgttgatgctgctcattgttataagaaaacagctacaaaggaggctatatcttgcttgcatcaagcaatgaacttgttttgtgatattggaaagctaaaca

SEQ ID NO: 208666 - DNA, 383 bp, Gossypium hirsutum
cccacgcgtccgccttgcaccatatccagttatacgcgatttcacccaatgcttacaggatgtcggggcggatgttgagattgtaaagtggaatggctctcctcatctagaacactacaagcattatcctatccaatacaaggctgccgtggccagtttccttgagaagacaactttggtctattcccgcaggatccgaaatctcagggaaatgaatggtatgcatgatgagatctccgagttaatctatggcctgcagaaagcagcagtcgactcgaaccaaagctttaggagagttgctcttggtcctagtgaccactttttcttgccaagttcagccaaatatcataatagtagagagtctggatctcttcaagatgaac

SEQ ID NO: 208667 - DNA, 425 bp, Gossypium hirsutum
  unsure (1)..(425): unsure at all n locations
ggaaaaaccggaacgacccacgcgtgcgcccacgcctncnncaaaaatgaaatttctcattttaatcaggaggagcgggctggcaaggtgtaggaaagcccagaatctgatggctggggtcctaacaaagcccaaaagctgaatcccgcaaagccaattgaacaatctacagaggccaccatgaggaaagctcgtgtttctgttcgagctcgatcggaagctcccatgatcagtgatgggtgtcaatggagaaaatatggacaaaagatggcgaaaggaaacccctgtcctcgagcttattaccgatgcaccatggcacgttggtgtcctgtccgaaaacaagttcaacgctgcgcttaaaatagaacaatattggtaacaacatacgagggcaaccacaatcacccacaattgcagcaacctta

SEQ ID NO: 208668 - DNA, 239 bp, Gossypium hirsutum
cagccgactacatggggaggagaccttcaaggtgttatcgccaaatcaagaataagccataggccggatctcgatactgccgtggtgtcccacatcctaagatcagaatttatgatgttgggatgaagaaaaaaggtgttgatgagtttcctttctgtgtccatcttgtgagttgggagaaggagaacgtctcaagtgaggcattggaagctgtccgtattgcctgcaacaagtacatg

SEQ ID NO: 208669 - DNA, 386 bp, Gossypium hirsutum
gtggattccaccccaggtgcgactcctacatcttgcaatggcagcacttcgtccgtaaccggcagcgcgacaccctcttctgctttgtcggagcgccgagcgtcgccatgaagaacgatttccgaggcttgctgttgaaccaatgtatgaacgcttccggcttatgccggtcctgtgattgcgccagtacccgatgctccaacgggacatcgtgcatcctcgaaacattcttgaattccgacttttgcttgcaacccagaggcgacagtttcacccgcaggtcaattttctactgcatggtcgccggttccatactcgtcttattgtggcaccgaacgggttatctgcagtaccaatggtttttaccgaatgatcccaaaagttac

SEQ ID NO: 208670 - DNA, 373 bp, Gossypium hirsutum
ctgactctttgtcggacgcgtggggttgaggcctgcgcacaaacagatagcatgcagaaagttgtattcacttcttccttaactgcagctatttggagagaaaacatttgttcacagacagatgtagatgagaggtgttggagtgatcaagatttctgccgcaaaatgaagttgtggtatgcccttgctaaaacactctccgagcatgctgcctgggctcttgctatggatcgaatgcttaacatggtttctgtgaatgctggactagttgttggccctgctgttgcacatcaaaatccttgttcaaccatgtcatatcttaaaggagctgctgaaactgttgaaaacggagttctagctgttgtggatgtga

SEQ ID NO: 208671 - DNA, 365 bp, Gossypium hirsutum
ctcacacataataatacacatcagttttgcctcctgcgcacacacaaatctcatgcagaaagtcgtttttacttctcgcttaactccaactatttggatagaaaacattcattcacagacagatgtatataataggccttaaattgatcaatatttctgcctcataattaaattgaaatatacccttgctaaaacactctccgagcatgctgcctgtgctctcgctatggatctaatgcttaacatggtttctgtgaatgctcaactaatatttcgccctgctctttcacatcaaaatccttgttcaaccatgtcatatcttaaaggagctactgacatgtttcaaaacggagttctacctgttg

SEQ ID NO: 208672 - DNA, 382 bp, Gossypium hirsutum
gtctactactacaggaatcggttgaagcagagaatggagggaagaagggtcattgggtggggtgccatagatgtatcatcacatctttcaccttattcattcactctcaggaaaacaggtccagaagatgtggtgttgaaggtattgcattgtggagtacatcacactgatctacaccatatgaggggtgagcttatgcccatcaactacccattggttccagggcatgaagtggtggtcgacgtcgtggaagtggattcagaagtaaacaaattcaatcttgtagacaaggttggagctgggtgcctggtaagctcttttgggaaatgctcgtcttgcatctccaataatgaacagtactgcaaccatagggtctttacat

SEQ ID NO: 208673 - DNA, 388 bp, Gossypium hirsutum
  unsure (1)..(388): unsure at all n locations
gcgatcatgtanaagtcattaagagcaagtgtttggcatctcttcaagaccttgagtctttaccgctgaatggctgccaaaagatatctgacaaangaattgaagctataaccacttgttgtcttaaattgaaggttttttctatttattggaatgtaagggccactgatgaaggtgtgaagcatctggtgaagaactgcaaatgtatagttgatttgaactttagtggctgtaagcatttatcagacaaaagtttgcaattagtagctgacaattatcccgagctggagtctttgaatctgacgaggtgtgtcaagatgacagatagtggcttgcaacaagtattttgtaaagtgctcctttttccaaagtttaaatctttacgcac

SEQ ID NO: 208674 - DNA, 390 bp, Gossypium hirsutum
acaatggatgttatccagtggacatccctgtggaatttatacaaggatgaatttgagaatgagaaggacatgcttggaggttctttgggtgacaaagctgcagaagatttgagaatgagaattattgaacataatatccttgttgtttcaaagtactactcgaggattacattgaagagacttgcagagttgttgagtctcactatccaggaagctgagaagcatctttctgaaatggttgtctccaaggcactggtggctaagattgaccgaccaatgggaatagtctgcttccaggtagcaaaggatagcaatgaaattctcaattcgtgtgcttcgaacttggataaacttcttgatcttgttgagaatagttggcaccatatacac

SEQ ID NO: 208675 - DNA, 423 bp, Gossypium hirsutum
  unsure (1)..(423): unsure at all n locations
gacagcattgacccttctcaagagacaccttttcaactaccaaggctatgtttctgctgcgggggggcttggtggtgtagatgtctctgggcctcatttgcatactatatatgcccatgggtcaactgacacattgccatttgctacaatgggttctggttccctggcacgcaatggcagtatttgaatcaaaatacagggaaggccttactagaaatgaaggaatagaacttgtcactgaggctatatgctctggtatcttcaatgacctcggaagtggaagcaatgttgatatttgtgtaataactaagggtggcaaagaatacttgaggaaccatctacaacctaatcctcgaacttacaccagctccataggctattctnttcccaagaagacagaggtcctcttgacaaaaatcatac

SEQ ID NO: 208676 - DNA, 377 bp, Gossypium hirsutum
gaagcctccgtggataaatccgtgactccacctcctcctactgaagaaaagcccgccgactgtagggataagcctcccgaacccatctaaaaggcagctgagtcgactgagaagaaaagcacggaggtgtctgttgatcgagatgctgtgcttgctagagttgcgactgagaagcgaatttcactaatcaacgcttgggaagaaagtgaaataagcatagctgagtacaaagcacagatgaagctttcttctattgcggcttgggagaataccaagaaagcagctatagaggctgagctaaaaaggactgaggaaaagttagacaagcagaaggccgagtatgtggaaaaaatgaaaaacaaggcagccttaatcca

SEQ ID NO: 208677 - DNA, 424 bp, Gossypium hirsutum
cccactcttccgatttaagaacaagcgtgtcttgatggaaagcatccacaagtccggggcggagaaggcaagagagaagacactctcacatcagtttgaggccaagcgagctaagaacaaggcgagcagggagagaaagatggccagaagggaagaacgccttgcacagggacctggtgtgaaagcagcacctgcagctgcaccgcaacaggccgagggagttaagaagtcaaagaagtgaatgaagtaatgttttgtttttctctgtaggagtttgaatgcaaaactcggttttcattttgtgttttagatctttagttttatataattatagaattttgatgaaaccactgagctgttataagaaatggaagatgtttgtggtattgtttattagtataatgtactattatgttgaatgtgc

SEQ ID NO: 208678 - DNA, 406 bp, Gossypium hirsutum
aaaaaaaaaaaaaaaacaaacaaacgttgccttagcaaactatgaggaagtgggcaagccggttctctttggttcttctttgccttctcagtctcctctcacatcatgggaaaaaagtacaagcaaatgccgaggaaggaggtgtacatcctcctaaagtcgatgaaaagatcggcgctgtgcctcatggcttacaaactgattctgatgtagttaaaagggaatcggaatccatctcttcgacatcgcttcgcaataatgcggagaagtttgagttccaagctgaactgtctcggcttatggatatcattatcaattctctttatagcaacaaggatattttcctgagggagttcatctccaatgcttctgatgcactggacaagattaggttcctttcactcac

SEQ ID NO: 208679 - DNA, 400 bp, Gossypium hirsutum
cctaatggccacaacatccatcctgctgtgtgctgggttggcagccgtcatcagcagcactgacaccgtcaaaaagccactcaatgactctatattcggagctcacggggagttcatggtggttctcaagtacgtcacaatcctatgtatcttcctcttctcgttttcgtgccacaccttatctatcaggttcataaaccaagtcaacatcctcatcaacactccccaagaccccacctccattgttacccctcactacctgtccgacttgctcgaaaaagggttcctcttgaacactgtgggcaacaggctcttctacgctgcgctttctctcctgctatggatctttggccctgtgctcgtctttgttggctccatcaccatcgtcactttgctttac

SEQ ID NO: 208680 - DNA, 382 bp, Gossypium hirsutum
aataaatcagctcttccatctcctatgaatgattctcatgatctcatcgctccatgagtatgtactaccataaatgtggccaagactctctttacccttactctgcacaccaacattgcttcataactactcaaactccgcgtatttcaggtctcactatctgatcttacccaaagtgatgatcatcactcctacacaatgatatcccttccaactcttacatcattaaggcaaaaatgctcaaaccaacttggcttgaatgaataatacataccacatactgatttcatcatttcgtctatcgcacactgtgatacatgctcacctgcacttactgacaacttacatcaaccctctgataatgcactgcatgaagttctct

SEQ ID NO: 208681 - DNA, 353 bp, Gossypium hirsutum
tatcaatcaagataagaacaagttcaataccccaaaatatcgtttggttgcaagagggaccgatatggatatagttgcacaaattatacatgctagtattgctggtgatatagttcttgcaacatcttatgctcatgaacttcaacgctatggactcgaagtgggccttaccaaatatgctgcagcttattgtgttggactcctcttggctcgccgaacactgaagcaactggagatggatgcttaatatgagacaaatgttgaggcaactggaaatgacttcactgtcgaaccaacacatacaaggaggccattacgcgcgcttgttgatgtatgtcttatcacatctacta

SEQ ID NO: 208682 - DNA, 443 bp, Gossypium hirsutum
gattaattgcattgaatacttcatggccggtgataaaccgtttctgatcagtggttctgggggttacactgctaagttatgggactatgaaaccaaatgttgtgtccaaaaactagaaggccatacacgtaatgttactgcaacaagcgtccacccacagcttcccattataattacttgttcggaagatggaactgttcgtgtctgggacaaaacaagttacaggcttgacaacacattggcatatggtcttgaaagagtctggactgttgcttacatgaaagactccagcaaggacgattgtggtcaaaattagtggctctaatggctcggattctgctgatgtttgacggcaaggaggcgtactggattgcattgtttatcatcagcttgaagatgcaaatttattacacggactggtttctatgtttagtgtgtggggc

SEQ ID NO: 208683 - DNA, 383 bp, Gossypium hirsutum
  unsure (1)..(383): unsure at all n locations
ccagaaacccctcccctctccttctacgcataggaatcaaaatcatgttgttcttttcgtgggcggagacttggtgggaagagaagtgacggtggagctgaagaacgatttggctatcagaggaacccttcattccgttgatcaatacctcaatatcaagctcgagaatactagggttgtcgatcaagacaagtatcctcacatgctttcggtaaggaactgtttcatcagaggctctgttgtgagatatgttcaactacctccagcggagtcgacattgaattgcttcatgatgccactagaagagaagctcgtggaggctgaaaaagcagcttttgttgacaaattcangtgtgctttaatgatttagattttttgcttca

SEQ ID NO: 208684 - DNA, 326 bp, Gossypium hirsutum
caccatttcaagtgatagcagccttatcagggttctatgcgatgagacacccaaggtgccggtaccgcttgccagcagtgccgattaacttcttccgccggctgcctgccaggacggatagcatgttgtaacccttcacgggatgttttaaagactatcaagtgtttatccaagtcctaagtttctcctggtgtattatggttattatcagtaagtgttttgaagagattttgatccataaataatttgtgtttgcttttataagctgactcagaattagaataaagtgaagagtagtgtcaacataaaaaaaaaaaatacataat

SEQ ID NO: 208685 - DNA, 433 bp, Gossypium hirsutum
cctaatggccacaacattcatcctgctgtgtgctgggttggcagccggcatcagcagcactggcaccgtcaaaaagccactcaacgactctatattcggagctcaccgggagttcatggtggttctcaagcacgtcacaatcctatgtatcttcctcttctccgttacgagccacaccttatctatcaggttcataaaccaagttgacatcctcatcaacactccccaagaccccacctccattgttacccctcactacctgtccgacttgctcgaaaaaaggttcctcttgaacactgtgggcaacaggctcttctacgctgcgcttcctctcctgctatggatctttggccctgtgctcgtctttgttggctccatcaccatcgtcactttgctttacaaccttgacttcgtgtttgggtttaagagaaac

SEQ ID NO: 208686 - DNA, 408 bp, Gossypium hirsutum
gttggtcatagtatcagtgctcgagcaatgatggatgagttttatgtgggtgacatcgatgcatggaccattccctctaagaggaagtacactcctccaaagcagcctcactatgaacaagacaagacctcataatttgtcataaagcttctccaattccttgttcctctgctaatcttgggattggccttcggtatccgctcctataccaaaacaccagcttcatcttaagcattgagactcccaagagataatttgagcaatcttcacaataagattatgctagtttaaatttctttggaattttcacatactgcaggttggtaaatggttggatatttttattcaaacatttgctccaatgcagttgaaaaaactcagattcgcctccgattgtgataatttgat

SEQ ID NO: 208687 - DNA, 421 bp, Gossypium hirsutum
  unsure (1)..(421): unsure at all n locations
gggaaagactgattacagggctaggattcgcttaaccaatcaagacaagaacaaattcagggggcgtaaataccgattcgttgttcgatttatcaacaaagatatcactgcacaaataatttctgctaatattactggtgatatgattcttgcctcggcttactcgcatgagcttcctcgttatggacttgaagtcggtcttacaaactatgccgctgcttattgcactggattacttttggggcgccgtgtccttaagttgcttgaaatggacgatgaatatcaaggaaatgtggaggctaccggagaggatttctcagttgagccaactgacacatggaggcctttccgagctctccttgatgtangactgatcatgacaaccactggaaacaatgtttttggtgcactaaaggggagc

SEQ ID NO: 208688 - DNA, 411 bp, Gossypium hirsutum
gtccgaaaacatttcccacctcctatcccacatcaagctcctcatccgccgcataagcggcgggatcgctgcctcggatgccggcctatactcagaatccgtccgccatttctcgaaaatcgtcgacggccgccgccttgcctctcagggcttcctcgcagagtgttacatgcaccgagcctccgcttacaaggcctctggtcgcatagccgagtccatctcggattgcaacaagaccttagcccttgaccctacttccatccaagcgctcgaaaccagggccgaactgttggaaacaatacgctgtttgcccgactgtttgcacgaccttgaacacttgaagctcctttacaattcaatcatgcgtgatagaaagcttgcaggtccaccatggaagcgtcacaatgtgag

SEQ ID NO: 208689 - DNA, 395 bp, Gossypium hirsutum
gttgttcaataagaatgatggtggttgtgatcgaactttgatcatctttgatatatggtgaaataaataaatatataaactggcaaaaaaaaaatctttacccaatctataaaaaaaaaaaaaaaaaaaaaaaaaaattaaatataaaaaaaaaaataaaaaaataaaacatacacaaaaaataaaaattacaaatactataataaaataaacaaaatccatctcagattacaacatagaacttaaccattaaccctacttccatccatgcgctcgtaactatggccgaactgttgtaaacaatactctgtatgcccgactgtttgcacgaccttgaacacttaaagctcctttacaattcaatcatgcgtgatagaaagcaaccacgtccacca

SEQ ID NO: 208690 - DNA, 290 bp, Gossypium hirsutum
gctcattcatggtgacttggtttatggttttatctgttgttgttaaaatcttataaaaagagatatgtgttgctgctcttgggttgtatcaaaaaaaaaaaaaaaaaaaaaaaacaaaaaaaaaaaaaaaaaaaaaaaaaaaaaaaaaaacaaaaaaaaaaaaaaaaaaaaaaacacaaaaaaaaaaaaaaaaaaaaaaaaaaaaaaaaatggggcccccgtcttaaaaaaccaaaccttcactacccgtaaatccaaagcaaaaacctttttatattgccaccaaaata

SEQ ID NO: 208691 - DNA, 445 bp, Gossypium hirsutum
ctgtttcaatgaggtacagagagtcaatttcaaagagtacaaggggttggaaggagagattgttctcgcgcaacacttccatggcaggtctgggttttgaaattaggagagaggttaatgatggcagcaatgcaacagtcttgcgcacgatagagcctgcagaaaccagagataatattgccagtcctactgtatcaagcagtttggaagatgggtctaatccagaatcaaataaccaccagattgtagatgccggtgtagaaactcctttgactgagaccagtgcccaagcttcatgtgctgcaagttctgcttccaaataagtaccggcaatgcatcaagcgaaagtggttttgtgtcgaacgtaaaccaagacgttgagaatttcttgcatgattccattatctacatttgtgttggagatatgtttacttcgatgttggat

SEQ ID NO: 208692 - DNA, 407 bp, Gossypium hirsutum
tgttttccgatatggcttcagctgatgttgagtaccgatgcttcgtcggagggctggctggggccaccgatgaccgggctctcgaagaagccttcagtgtgtatggcgagatcgtcgaatcgaagattatcaatgaccgtgaatctggaagatcccgaggctttgggttcgtaactttccgtgacgagaaatctatgagagacgctattgaaggaatgaacggtcagaatcttgacggaaggaacattaccgtaaacgaagcccaatcacgccgaagcggtggaggcggcggtgaaggatacggaggaggaagcggaggctacaaaagaagtggaggaggcggaggatatggtcgccgtgaaggaggctatggaggtggccgtcgtgagggtgtattcgggaatggt

SEQ ID NO: 208693 - DNA, 326 bp, Gossypium hirsutum
  unsure (1)..(326): unsure at all n locations
tccactcctacatttctctatctaatgttttatacccatacttcatctaatgccgtgcgctgggccacctatgaccgggctctccaanaagccttcagtgtgtatggctacatcgtcgaatcgaagattatcaatgaccgtgaatctggaacatcccgaggctttgggttcgtaactttccgtgacgagaaatctatgagagacgctattgaaggaatgaacggtcagaatcttgacggaaggaacattaccgtaaacgaatcccaatcactccgaatcggttgaggcggccgtgaatgatacggtggaggaagcggatgctacaa

SEQ ID NO: 208694 - DNA, 438 bp, Gossypium hirsutum
cccacgcgtccggggtactgtcttcgaaaaaagagtcacagagttatctctggaggaatttgtatgctttggaccccagagagaagcagggaaacagggaaagagtttgttgaggaaaaccaaagatgggaaaattctcaactggaatgttgaaactgatgattcattttgtacattggctgaaaccttccagaaagttgatccttctttaggtttcaatattgaattgaaatttgatgaccatattgtttaccaacaagaccatctcatccatgtcctccaagtcatcttgcacgtggtatctgagtatgctaaagataggcccataatcttctctagctttcaccctgatgctgctcaactggttaggaaattgcagaacacttaccctgttttcttcttaacaaacggcgggactcaagtttactatgatgtaag

SEQ ID NO: 208695 - DNA, 360 bp, Gossypium hirsutum
cgccagcactgaagacttcaagaaagtgtttgatatcaatgtgttgggtggtttcttgggggccaggtatgctgccagggtcatggttccggccaagaaaggttgcatactattcacatcaagtcttgcttcaaaaatcagcttcggtagcccccatgcatacaaggcatcgaagcatgccgttgcagggttgacgaagagcttggccgtggagttaggtgagcatggaattagagtcaactctatttcacctcatgcaatttcgactccaatgttccaaaaatcaattgggatacccgataagaagaagggagaggagatgattgcggcttcagcagtgttgaaaggcactgtattgga

SEQ ID NO: 208696 - DNA, 387 bp, Gossypium hirsutum
ggtatattgggtggctggtgctttatctgctctttctgtattgctggtgaaaaaggctaggcgcagctaacttgctctatatgttcttccacgagccacagaatcgttgtggtatatttcagtaaatcggcaccttcttcctgatgttaaaattctgaggtggcgttattttgtgcatgcatgggaggaatcatgtactacctagaatatgaaccagatagcatatcaccattccttaagggtcttatccgccggttcctatctagcagaataagcaaccccggcagttcatttgatcggacagcttcctacacctacttgcagactcttgatgccatgaagaagccaaaaccagaggataatccaaagcttgatacttcagcttct

SEQ ID NO: 208697 - DNA, 402 bp, Gossypium hirsutum
ctcactattaaaccttctgcttagcttaaaaaatcttgaatccgtactctcctacttccctgggtatcgtcaatggcttcggacaagaagattaagatcgggattaacggatttggaagaatcggacgtttggttgccagagttgctcttcagaggaacgatgttgaactcgtcgccgttaacgatcccttcatttccaccgattatatgacatacatgttcaaatacgacagcgttcacggtcaatggaagcaccatgatcttaaggtcaaagactctaaaaccctcctcttcggcgaaaaacccgtcactgttttcggaatcaggaaccctgaggagattccatgggctgaagccggggctgagttcgttgttgagtcaactggagtgttcactgacaaa

SEQ ID NO: 208698 - DNA, 416 bp, Gossypium hirsutum
  unsure (1)..(416): unsure at all n locations
tcgnccacgcgttcgnccacgcttccgtcactttatccatattgattttgggttcatgctctgcgagtcaccttgtggggtaaattgtgagaattcaccattcaaattaacccctgagcctcttgaagtcattgattctgatgcttagggattgccaagtgaaattttttacctcctttaaggattttgccatccaaggtttctctacctgccgaaaccttccaaaggccttaattttttttttgaaatgttgcaggatttctgtttccctttcttaaaaggcggccctcgtccttttcaaattttaaaaaaacgattcctcttaaatttcacaaaaaaacaatgtgtgccattgttgctttcccttatcagcaacttttttaaatgccatggcgaaccacgccgttttatttttt

SEQ ID NO: 208699 - DNA, 395 bp, Gossypium hirsutum
agaagcagctgtacattgactggaaggcaagaaccgggttgggttctgttttggagaaccgggttcaaatggtcaggctatttggggtcaacatatttaaaatgcctggcagtgaaaatgttggtctagctggaggatgtaatgggaaaaggactagagaaatggagcttttagaattagagtgcagcaagaaacaaagggttattgatgctttgtaacatcacctaattaatttccctttttttttcttttttttttcccccttcttttgttgcttttggggcctttgggaatgttaaaagacggtgttggaagataaaaaaaatgggagggggggacatggatgtgctgtattagcaagttttaaaaggtgaattggatatttacaagaaaaa

SEQ ID NO: 208700 - DNA, 119 bp, Gossypium hirsutum
attttccttttgtccaaaggatttttgctgctcattcatggtgacttggtttatggtgggatgtgttgttgttaaaatcttataaaaatatatatcgattgctgcttttggtttgtatt

SEQ ID NO: 208701 - DNA, 441 bp, Gossypium hirsutum
tccatcctcactccacatttcactctctttttcaactttcccttcttctctttgttttaaaggggggcttgagttttagccaaagaaaactccatggctaaacttgttgctactttcttcttggctctcattgccatctccatggttcaaactttggttatggcatcacatggacatggtggtcaccattatgataacaaacgttatggacctggaagtctaaagccttaccaatgtccatctcagtgcacaaggaggggtagccagacacagtaccataaaccatgcatgttcttttgtcataaatgttgcaggacatgcctttgtgttcctccagggtattatgggaacaaacaagtttgcccttggtactacaactggaaaaccaaggaaggagggcccaaatgcccttaaattactcaaaaaaagaccctttttttt

SEQ ID NO: 208702 - DNA, 433 bp, Gossypium hirsutum
gtacggtccgaaaacagttcccctaattatgttaaagtagatcgggaaactgacaatgacgggaaaatgaaagttgtcggagcatgttcgacccatttggacgggattcaaatgagcgaggatgattcagacaacatagaagaagccggtccatcggagttgaaggagatacagtcacccacaattaaaccccgaaaaagagtacggtttatcgtgccggagagcccgaagatagagtccgaatcaatggaagagttgcgggaacttacggaagctagggaagccggggtagcttacatattatgacacacttgtcttagagctaaacaaggatctagcttgataaaaaaactcgtaatcgatttcggatatgaatttttgcggaaaaacaggcggacgtctacactcgcattaaccgtacctcatgtctcga

SEQ ID NO: 208703 - DNA, 170 bp, Gossypium hirsutum
tcgcccacgcgtccgtgagaaccgaactgctataaccagagcttgggctgatcttaaacactttagggtgcctaatccaatgccgcgtggtgacaattgtggggtcagcataaactggcatctttattcagacttctttcgaggatggtgtgctttgatcacaatattca

SEQ ID NO: 208704 - DNA, 412 bp, Gossypium hirsutum
cggtcgtggagccttacaatgccactttgtctgttcaccaattggttgaaaatgctgatgagggtatggttcttgacaatgaggccttgtatgacatctgtttccgcacacttaagctaaccactcccagcttcggtgatttgaaccatttgatatctgcaacaatgtctggagttacatgctgcttgcggttccctggtcagctcaactccgatctcaggaaacttgccgtgaatctcatcccctttcctcgtcttcactttttcatggtgggttttgctccactcacttctaggggatctcaacagtaccgagctctaacagtacctgagctcacccagcatatgtgggacgcaaaaaacatgatgtgtgctgctgatcctcgtcacgggcgatacttgactgcatctgc

SEQ ID NO: 208705 - DNA, 401 bp, Gossypium hirsutum
cttttgtttctgtcaccccatattgcccagagtgcacaacaaaatacgcgactttgatcaagggggagctgctctattgcctagcttcttctccacatcaggggcagctcggatttactactaacttccgatgttgaagattcacctttgtaggcagataattcctagatagcttccatattgtaaccttaattttagctggtagattcaggcaccatagttttttataaaaattcccatagatggtctgtaaagcataagctctaggattgtcagtcaatttttgtaatagttgataggcacttctgaccgtaaactcacccgaccgttcgcctccccagataagaaaatcatcatgcggcgtttgtgccagagggattctgaggattctagctgcgtcg

SEQ ID NO: 208706 - DNA, 431 bp, Gossypium hirsutum
cccacgcgtccgaatggcccttcgatcattatccaccaggaaaaccctaaccttggctctggggtccaccaggttggctcagtctcgagccttgcagaccttctcgctccccgatcttccgtacgactatggggcactcgagcccgccatcagtggagagatcatgcagctccatcaccagaagcatcaccaaacttacatcactaactataacaaggctttggagcagctccatgacgctatccagaaaggtgattcttccaccgtcgttaagttgcaaagcgccatcaagttcaacggcggaggtcatatcaaccactcaattttttggaagaatcttgcccctattagtgaaggaggaggtgagcctccacatggttctttgggttgggccattgataccaactttggttcattggaatcattgattc

SEQ ID NO: 208707 - DNA, 443 bp, Gossypium hirsutum
cccacgcgtccggtctgtctttgtcatgacatgtgaatctgcagtgcaactgcgtaaagcaggcaaagttacagtgagggaatcaaatttgaagaaattaggagctacccattttaagtatggggtagttgatgaacattttgaggtaacaaaatttgctcttttggagaccataaaagaagcagtaccagatatgtggtcagatgagatgaagaatgcatggggtgaagcctatgatcgtttggtcgcagccattaaaatagaaatgaaggcatgctcacaagctgcatgatttcacaagttccctacattattgcttgttaattttgggtccaataagattgaaagttttcaatcatttaaacatgtaatgtaacatagctattgctcatcactactgtttttttcccctagtttgtttgctcctgttctttttgtcccct

SEQ ID NO: 208708 - DNA, 295 bp, Gossypium hirsutum
tggaagctgagcctccggagtggcttccagatagttctaccactgtttgcatgcagtgcagggctctctttacagcaattacgcgtggcagacatcattggcggttttggggagggattttctgtagaacatgttctaaaggaaagggcttgctacctgttaaatttagggatagaaatccccagagggtgtgtgattcttgctatgatagacttgatccattgcagggggttcttattaactccattagcaatgctgcacaagtagcaaaacatgatgtcatggattggacgtg

SEQ ID NO: 208709 - DNA, 147 bp, Gossypium hirsutum
agcgacggcacctggaaccacactgctgccgctggccttcgggcacaccttctacgcttaccagtcacctacgctcttgcagcatgcccccttcgggcaatactactttcgtaatacgcgaagcagctgagcgatagctcttcgatc

SEQ ID NO: 208710 - DNA, 444 bp, Gossypium hirsutum
ttcattttaaaaaaaatttaatgggtaattgtttacggcatcaatcatcaacacaatgggccggcgacgactggggaacaacggtggctgactacggcgaagacgacgggttttccgacattaaaacgaaagaaaagggtattgtaggagatcatcatcaaaaagatggttttattacaacatcttcgactccaactgttcatgaagttaaagtgaagataacgaagaagcagttggaggaattattaggtagggttgatgtaaaggagttatcagtacaacaggttttagcacagttgattaatgttagtaatcaatttgatgaaacaaatcaacggtcatggaggcctgcactacaaagcattcctgaggtgaattgagctggtcatgaagaaaaaaaaatgaaacccagaatttttgttctttctattgggcgtggggggg

SEQ ID NO: 208711 - DNA, 405 bp, Gossypium hirsutum
tagacgcattatccaatgctttcgtctatctctactacacgacgttctatgctaaccgggcgggtctttccaatctgtaccaggacccctcaatgttgaccttcgagggtcaaaagatccaatgctctcagagcatcgtctctaagctcaccagccttccttttcatcagtgtcagcacagcatctccaccgtcgattgtcagccctccgtcgctggcggcatgctggttttcgtcaatggtaccctccaactcacggactagcagcatgctctcaagttcatccacatgtttcatttgatgccatcaccgcatggaagctaacacctgttgaatgacatattcatgttgaactatgcatatatatgcaatccaaagatacaaatcaaacaatgttttggctctc

SEQ ID NO: 208712 - DNA, 422 bp, Gossypium hirsutum
cccacgcgtccgcgcaaattgaagaactttcgatcttttgaattatatgatcaagacacgcgggccaactcagtggatttcgaccatagtgggagttaccttgcaattgctggctcagatataagagttttccaagttggcagcgtaaaagctgaatggaattgcatcaaaactttacctgatctgtccggcacaggtaaatcaacttgtgtcaaatttggtccagatgcaaagtacttggcagtgggatcaatggatcgcaaccttcgcatatttggccttcccgaaggtgatgatgcttcaacagaatcataaaaaggaaccccttctgttcttcatatatgataagttgcgactgctcggtttcgtggttaaagaactggcagatttttaggtggggttaaatcttttagtcttgtgct

SEQ ID NO: 208713 - DNA, 434 bp, Gossypium hirsutum
  unsure (1)..(434): unsure at all n locations
gcaggcacatttgatataagaaacaactgcccttacaccgtttgggctgccgcatctccgagtcgtggcaagagacttgaccaaggtcaancatggcaaatcactgcagcctctggaaccacacaagcccgaatttgggctcgaaccaaatgcaatttcgatgcctccgggaaaggctcatgcgagacaggcgactgcggtggagtcctcgaatgcaagggatacggtaaagctcccaacacactagccgaatacgcaatcgaccaatttgagcaccaagacttcattgacatctccaacatcgatggctgtaatgttcctatggagtttagctccaactccccagggtgcactagggttatcaagtgtacggccgacattgtcggacaatgcccgaaccagttgaaggttcccggaggttgtaacgggccttg

SEQ ID NO: 208714 - DNA, 349 bp, Gossypium hirsutum
cccacgcgttcggctaaaatcaggtggccacaatgttaccgccttagacctgagtggatcgggggttgatccacagcaagtcaacactctgagatcgatctctgattacataaagcccttgagagaattcatggcatcgttacccgatgaataaaaagtggtgcttgttgttcacagtttatgcggtttggccatctctcaagcaatggaaatgtttgcggaaaaaatctctgtagcagtttttgtgacagccctcatgcctgttccaacactcaacgcttccattctcactcagaaggtattacgtgatctacatccacacatggagaaccattatacatatgatgat

SEQ ID NO: 208715 - DNA, 361 bp, Gossypium hirsutum
gccacgcctcctgagcaattataaatcgaattagatgccgatgatggccctcctgaacttcgcttttctcatggaggccataaagctaacatttcacatttctcgtggaacaaaaatgagccatgggtgatttctagtgtagctgaagacaacacacttcaagtgtggcaattggcagagagtatatatcgagacgaggatgacactcaaactgcctgagaccatccatagtccatagaagttggatttagagttttaaggatatgacctttttaagtaacatcattgtgagtttataataatgctttgtatgtggacacgcttatgagtcttttaacatgtaatttaatatttcaaacct

SEQ ID NO: 208716 - DNA, 430 bp, Gossypium hirsutum
gaccgacgcgtgcgaagaagttcaatggcaaggatgtgattcttattgccaccattaggatattaaggcctccagggaaaggtggtgcagttcataggccactcagccgcacattgactgctgtacatgaggcaatgctagaagatgttgtcttacctgctgagattgttgggaagcgcactagatatagaattgatggatcaaagataatgaaggtgtatttggaccccaaggaacgtaataacacagagtacaagcttgagacgttttctgcagtttaccggaagcttgctggaaaggatgtcgcgtttgagttcccagtgacggaggcatagatagtactttttgaagcgttgtgaaactttatttctggttaaaattttgacatttttaagagttggtaagcaaagtcatatggatttaattccct

SEQ ID NO: 208717 - DNA, 394 bp, Gossypium hirsutum
cccacgcgtccgcccacgcgtccgtgggaaacaggattatcaggaagaggagtgatgtacgggttgagcatgtacagccttcgaggtgcgctgaggaattcaagctcaggaaggtgaagaatgatcaactcaaggcagaggctaaagcaaagggtgaggtcattagcacaaaaaggcagccagaagggcctagacctggtttcatggtggatggtgctacacttgaaactgttacgcccatcccatacgatgtcgttaatgatctcaagggcggttactaaatctactctgttttttgtttgcggtattgctttggattccttttttttttttttggcaaaacatcagtggtgaactgaattaaacatttggaagagctgctttctttagtata

SEQ ID NO: 208718 - DNA, 346 bp, Gossypium hirsutum
cccacgcttcctcccacgcgttcgtgggaattaggattatcacgaagaggagtcatgttccgatggagcatgtacagccttcgacgtgcgctgaggaattcaagctcaggaaggtgaagaatgatcaactcaacgcagaggctaaagcaaagggtgaggtcattagcacaaaaaggcagccagaagggcctagacctgttttcatggtggatggtgctacacttgaaactgttacgcccatcccatacgatgtcggtaatgatctcaagggcggttactaaatctactctgttttttgtttgcggtatcgttttggtttccttctttttttttttggcaaaacatc

SEQ ID NO: 208719 - DNA, 421 bp, Gossypium hirsutum
cccacgcgtccgggacttttgtatgagagctagaacaagctcgattatgtgggggctttgggtgttgttaacttccttgaacgtcctttgcaaacactcgtgttcaagactggtatggccaagtcaattcaccatgcacgtgtgttgatcaggcaactacacataagggtctggagacaggttgtgaacatcccatccttcatggtgagggtcgactcccaaaagcatattgatttctctcttactagtccgtttggaggtggccgcccctgaagagtgatagagaaagaaccatatagcagctgccaagatggctgcttgtcgagatggtcatgaagatgatgactagtataccttacgctactatcatccaccagtaagatccctataaatgcctcagcctgtaacatacaatatcctc

SEQ ID NO: 208720 - DNA, 376 bp, Gossypium hirsutum
gcgtacgaaacctgaaaatgttcttgttatacaaaatattcatattatgctttctcacacccatccttgccttggttgtactgttagcccgactcttctcaaaacgacttctctcgaatctcaccctctaaaaaagaaccctgttcattctctacaccctgctcgcatacaaccttcgtgcattcaaccatcttgccttgtcccaacaacatgcttttctcccccactcttttctaacctgtccagcaaagacctcatgctgcaaaacgaacttgtaaccaactgagtcctttacctgaactaataccacagccaaccaatgcacgttcaatgacattcatccggacacatcattactccgctccagacatcatca

SEQ ID NO: 208721 - DNA, 311 bp, Gossypium hirsutum
cgtacgggcagtgaatgtatacagcgtatccaatctgtagcttatcattttatagatgtctcttgcagttcagtttatatgatcgctgaaatgattaacaaggatggaatacacatccttatcaacctgaatgggtatactaagggtgcaaggaatgaaatttttgccatgcaaccagcacctatacaggtttcatatatgggattccctgggactactggagcagattacattgattacttggtcactgatgagtttgtttccgtaaacctttagttactcataaatctctttaacacttggcctttaaa

SEQ ID NO: 208722 - DNA, 430 bp, Gossypium hirsutum
  unsure (1)..(430): unsure at all n locations
aaagactgtgtggcccttctactcgagaatggtgctgctgtcactctccaaaacatggacggcaagactgggatcgaagttgccaagctcaacaaccagcacgaggtactaaaattactggagaaggatgcgttcctttgaagcgtgaagtggtggggatgcgaatggtatgtgtatgtttgggtcttagcatgtttgttataggcatctgattttattacccagctattggacaaatttggttgtaatcatggctgaacggcatgatatgctgtctttgctttggcctggttgcctacgttttgcaaattttatttagtgggtttttttaagaaaaagaatcatttcctgaaatagtttctgcatgggaaataatgggagtatttggaccagagaaactttatttaagaattcttttgagtcctgangc

SEQ ID NO: 208723 - DNA, 354 bp, Gossypium hirsutum
cggatattatggatatgctcaaggatatgaagcatacggatatgcacctcctccccaagaggctaacatgtactatggtggctatcctgctgcatatgggaattaccaacaaccaggggcttatcaacaaccccagcagtgagttgcactcatttcagcatctttcaaaactggttcagttcggtccaagccacagtttggtgttggtttgatcttgacatgtatcaaggcttgaggattttcttagatgatgtagaatttgtggtggctggcattgggagagttctgttccttatttaccctttttttctatatataatatctacatatattatggttggttaacttaacctt

SEQ ID NO: 208724 - DNA, 186 bp, Gossypium hirsutum
agaccagtctgtgctactagctaccaccaagactaacaagcataacaaaccgtctaccttgcgtcacaagtgtgccatgaaaaaagactttcccaatatggccaacgctgtcaaaaaccacttgacacacaactactacaggccatacttaaccaaagcaacccttgcaaagctgagtgctttgca

SEQ ID NO: 208725 - DNA, 294 bp, Gossypium hirsutum
  unsure (1)..(294): unsure at all n locations
cccacgcgtacggnaccctctcattctcctaccatattcgacttaaccatcaacaaccaaatccgcaatattgtgatatattaaaataataactccataccttaaaaacacataactccccactctccaacacccattaaaattattccaaaatcaaatgatggccttacaaacttgtctaaccctgaccaaaccacaattaaatccttttctaccttctttatactacaaagcttgttgcaaaacataaatctctgaaaaattgattcagcattctcatcaataattccccta

SEQ ID NO: 208726 - DNA, 401 bp, Gossypium hirsutum
ccgggccgaccgacgcgtccgctcaatcatccacttcttctcttctttgaactcaaagtcccagctaatattggaatcattggtgttgtcacttatgactatgacaatacctccccagtcgcccctgccaggcttttcaaggcctttactgttgaagctccgaaagtttggcccactgctgcaccaaatgcagtcaatagcattgaggttgaagctaatcctagctctggaagtatagtaaaaatcaactttgttgaacgccttccattccaatatatgaagcaccacatcggatgacatgatgaaagtaatttttcatacagatacgatttaatcgaacgttggcctttgggggataagcttgaaaaaattaactattaaaacaagttttaagcagcttc

SEQ ID NO: 208727 - DNA, 260 bp, Gossypium hirsutum
gcgcccacgcgtccgaaaaaaatggcggaaagagcaccgatcgaatccgtacaatgcttcggccgcaagaagagggcggtggcggttacccactgcaagcgaggccgtgggcttatcaagattaacggttgtcctatcgagcttggtgagcccgaaattcttccgttcaagggcgtcgagccaattcttcttcttgggcggcaaccttttggccgccttcaccttaagaatccgtgttaaagtcgaaggccacactttta

SEQ ID NO: 208728 - DNA, 236 bp, Gossypium hirsutum
  unsure (1)..(236): unsure at all n locations
cccccaaacccatcntttcaaaaaattaatatttctctattttccccnaaaagactaaccttcctccatggatgtcccaaacctgttattcacaacgattttaaaacatccaatgttcttctttatttttactacaactcaaaactatcttatttctgtttaacaaaaactgttcctcaacgtgataaaactcatgtatctactctccccatattcacctattgttatgcttcacc

SEQ ID NO: 208729 - DNA, 337 bp, Gossypium hirsutum
catattgatcgccggcttcatcaaatgctgcttgctgatagggattacgaaggtggtggagggacaagtgaggttgactatcctccatccttcaaaccaaagatcacagttgagcgctgtgaggagaaaggatactcggttgttactgtccggtgcaaagatcgagctaagctcatgtttgacattgtctgcacgctcacggacatgcaatatgtagtttttcatgctaacatctcatccaatggtccttatgcttcacaggaatattttattcgccacatggatggttgcacacttgatactgaaggagagaaagaaagggttgttaaatgtctcg

SEQ ID NO: 208730 - DNA, 351 bp, Gossypium hirsutum
cttatgctaagactgctaggaggatgtctcttttggctgatgcacaacgcgttaaggctaggaagggaggcttgcaagaagaggaagcccatttctaaggaggaggcaaccgcaatcaagtcggcaggcaaagcatggtatcaaactatgatctcagacagtgattacaccgagttcgagaacttctcaaaatggttgggcgtatctcagtaatttagttcttccttaagaaattatggcagacaatcatttttatcagttttgttttaatgtttttgacatgttatatgttgatggccttttggaatagtttcatttatcttgaagacaaggattaaatagttttcttcc

SEQ ID NO: 208731 - DNA, 280 bp, Gossypium hirsutum
aattcactatcctccatccttcaaaccaaaaatcacattttatctctgtgaggagaaaggatactcacttcttactttcccgtacaaacatcgatctaagctcatgttttacattttctgcacgctcacggacatgcaatatgtagtttttcatgctaacatctcatccaatggtccttatgcttcacatgaatattttattcgccacatggatggtttcacactttatactgaatgagagaaagaaagggttgttaaaattctcgaaacttccattcat

SEQ ID NO: 208732 - DNA, 355 bp, Gossypium hirsutum
  unsure (1)..(355): unsure at all n locations
cctctacatcgctggtcttcagcatatagtattctcagagtggtggantccgccccgtcggggtttccaccctcattgtcggcttcgacccctacaccgacaagccagcgctgtaccagaccgatccatccggtaccttctctgcttggaaggccaatgccacgggaaggaactccaactctatgcgtgagttcctggagaagaactacaaggagacctccggcaaggagaccatcaaacttgctatccgtgcacttctataggttgttgaaagcggtgggaagaacatctaagttgcagtgatgacaaaaaaagactgtctccgttaactcgaagagtctgagattgatgagta

SEQ ID NO: 208733 - DNA, 410 bp, Gossypium hirsutum
gtttcctttctcgattttctatttagccaaacaagatgcacatcttcgttaggactctaagcggcaagacgatcactctcgaggtctacagctccgatacgatcgacaacgtgaaggccaaaatccaagataaggaaggcatccctccagaccagcagcgtctgatcttcgccggaaaacagctcgaagacggccggaccttggccgattacaacatccaaaaggagtcaactctccacctcgtcctccgtctgcgcggtgggatgcaaatcttcgtgaaaaccttgactggcaagacaatcactctcgaggtcgagagctccgacacgatcgacaacgttaaagcgaacatccaagacaaggaaggcatccccccagaccagcaacgtctcatctttgccgaaaacaac

SEQ ID NO: 208734 - DNA, 286 bp, Gossypium hirsutum
  unsure (1)..(286): unsure at all n locations
caactcttttcngactcatttcggacttattgatcacatctgatcaggggctctttgtctcattcattcaactttccgagtttcaacttccaattctcatccatccgttctactgccactaaaagaaatgttcgtactaaacaactaccttcgctctatcatctatcacctattataaaatcagaagaacattcacatttaaacctctccacttctactgcagcgaaagccttccatgtatatgtgtaaccttatcttgcatcgaactaaaacccaacccttaacc

SEQ ID NO: 208735 - DNA, 307 bp, Gossypium hirsutum
cgcgtccggatttctacaatattggttgtattgaaactttcccattctcgtcgctttaaactcccatccgtattgcttgtatggcagataccccctatccttcagaattaaccactgcactctaactacgataaattcaccatcaggctctttcccacgctcttcctggtcacaatttctaattcaactttaacaatgtccccttctacgatctcaaactacgattcctttcttctaactcatattattacccatcgaatgaagcagccaactttacctaccaagtcatcatcattaactatccttt

SEQ ID NO: 208736 - DNA, 396 bp, Gossypium hirsutum
ggtagatcttcgttcaaccacgcctaataaccgctcggatttttctcagacgtgaaaaaagggggctgtgtttcaccaagctattcagccggctatttgccaaaaaggagatgcgcatactgatggttgggcttgatgctgctggtaaaaccaccattctttacaagctgaagttgggagagattgtcactactattcccaccatcggtttcaatgttgagaccgttgaatacaagaacatcagcttcactgtttgggatgttggcggccaggacaagatccgaccattgtggagacactatttccaaaacacgcaaggacttattttcgtggttgatagcaatgatcgtgaccgtgtggttgaagctagagatgagttgcacaagatgttgaatg

SEQ ID NO: 208737 - DNA, 374 bp, Gossypium hirsutum
  unsure (1)..(374): unsure at all n locations
ggctaatangattgcgtatgcaattatttgtttgtttctgcattccatgttcagtctctgggggttagtgatccagacagtgatttactttgtctgcaaatcttaccaccatgaaaacatcgataaatcagccttgtcggatcacctggaagtatatctgggagagtatgttcctttgacggtaaaggatgttcagctagagcaatatcatgtttgattgatttgagttgaaagtacatcaattaaaataatgggtcaatgcttgtaaattgcaatagtatatcttcgaagtcatagttgtgattttgatcaacggtgttatttgtacctaatccacatatattgttgtagtatgaaagtattatttaatctct

SEQ ID NO: 208738 - DNA, 390 bp, Gossypium hirsutum
gcgtcacgcccgatgtcgctgcaccacttttaccgaataacagaaccttcaaaaagttcacattcagaggagtcgatctctatgctctcttccatatctccactgatgaactcttcaatctctttaccgcccgtccacgcccaatgttttagacaagtttaaagatgaaaccaatggctctgataaaaaaattacacaaggctaaacttgatgctccacctgattagaaacccgagccaattaggacacaccttcgcaacatgattataattcctgaaatgattgatagtattatctgtgcttacaacacaaagaccttcaatcaagtggcaatcaacccacaaatgattaaccacttttttgctgaattctcaatttcctacattcctt

SEQ ID NO: 208739 - DNA, 373 bp, Gossypium hirsutum
cggtgaatacttgaagatataaaaatatgacctcttcacatacgttaaaaaacacataaaatgggcttgatcatactcatgtcacacgtgcaattccatttaacagtctttgccccaccattacctgattgctccaagcaagttggctccatcgagctttgcaccttctaagtgcgtatcacgaacattaacatgtcgtaaataatccctttggaggtttgcacccttcaaatacgcattgcttaatttcgcacccttcaaattgactccttcaagattagctccctctaagttggcatcagttacatcagcactctgtaagtgtgcataacgaacatcatccacacagaagctacaatctatcaaaaaaaca

SEQ ID NO: 208740 - DNA, 393 bp, Gossypium hirsutum
ttgcaatcaagataatcgagtcactagagtggatttaggttattcaaacctatctggacatgtgggtaccagagctcgggaagcttgagcatttgcagtatctggagctttacaaaaataacattcaaggaaccatccctaccgagcttggcaacttgaagagccttatcagtttggacttatataacaacaacatctccggcaccattcctccttcacttgggaaacttaagtctcttgtattcttgcggcttaatgacaacaggttaactggacctatccctagggagcttgttggtatttcaagcctcaaagttgttgacgtctcaaacaatgatttgtgtggaacaattcctaccagtggtccatttgagcacattcctttgagcaact

SEQ ID NO: 208741 - DNA, 282 bp, Gossypium hirsutum
attctcggaagctcgtgaggaccttgctgctcttgagaaggattatgaagaggtcggtgctgagtcatgcgagggtgatgaggaaggtgaagatgagtactaaataagtaatgtttgagtggagggcttgcattttgctacccaatgatttgtttccttttatcgcgtgtttttgcttattctattgtgtgaacttcgactcttctaagctttgttcaagactatatggactgcaatagatttgacgaacaaaaaaaaaaactttaaaataaaatgatcaat

SEQ ID NO: 208742 - DNA, 407 bp, Gossypium hirsutum
cccacgcatccgctcctcttctttagcgtccttttcatttccgctcatgcagcgggctttggaatccgcaatgagtgctcctacaccgtctgggcagcagcctctcctggtggtggccgtcgcctagaccctcggcaaagttggaccatcgatgtgcctgctggcactgctatggctcgtatttggggtcgaaccaattgcaatttcgatgccagtggtaggggtcattgccaaaccggtgattgtggtggactccttcaatgcaaaggttggggtgtacctccaaacaccctggctgaatatgcacttaaccaatttggaaacatggatttctacgacatttccttagttgatgggtttaacatccccatggtgtttggtccaactaatggcggttgtcacaacat

SEQ ID NO: 208743 - DNA, 446 bp, Gossypium hirsutum
aattaactgagaaatcctttgaacttgtggttaaagctgcagacactcgaataatccacgagcagctgggcctgaagatttgtgaatgtgaaggattgcaagaaactgttgcctccttaaagcagcagctctctgatgcactaaaatcacaaaatgtcagtcctattgctcctaattctgaacaatttggagaaatgaaaggtctgcagatggacaacgaagctgcggcatcaaaagatagtgatgaagatttgcttacaaaagcacaggtggctgagattgaagaactgaagcagaaggttgttgaactaaccgagtccaaagaacatttagaactacggaaccagaaactagcagaggagagttcatatgccaaagggctagcctcagctgctgctgtggagcttaaggcattgtcggagggaagtactaaactaatgaatcat

SEQ ID NO: 208744 - DNA, 443 bp, Gossypium hirsutum
cggacgcgtgggcttttgcaattcagatagctaagagcaaaggagcaacagggtttgctagggcagggaatgaagaaaagttagctttctgcaagagtcttggagctgatttgtgcatcaattataagacagaggattgtgttgcgtgcattaaggaagaaactggagggaagggtgtcgatgtgattctggattgcatcggggcagcgtacctacagcgaaacctggacagtttaaattttgatggaaggctttgtatcattggcttgcaaggtggagctgtgaccgaaattaaacttaatactttatttccaaagcgcctcacagtgcatggggctgcgttgcgacctagaaatccagaaaacaaagcaatggttgttaatgaagtggagaagaatgtttggccagaaatcgtggcgggcaaggtgaagcctatcatctac

SEQ ID NO: 208745 - DNA, 417 bp, Gossypium hirsutum
acgggaaaagtgctgctgcagttggctcatctgtttgagacctgggaggaaaaggagtattcagtgatggcgggtgtagaactgaaaaagctgtttccaaacaagaagataaagaaagtaacagagatgagtttgtctgcaaatcaagaaagaggtgaaatggaaaagagaacgttagcttggaaagtagaatgcgggggcggaggatcaaagatggtaaggggaggagcagttgatcctgctaagctgctcgttgaacttgcttcaatggagatacgaactttcctgattgatgtagattacatccaactggtgggtggttgaaagacacaccaacatgtggtttttgtctgtgctaaataaatcttcatctactcaaacttaatgtaatggggttcaagctgtgtttgtatgtgc

SEQ ID NO: 208746 - DNA, 261 bp, Gossypium hirsutum
gcgcccacgcatccgcccactcgtccgtccacgcgtccgcccacgcgttcggtttttgtgtttagttttctgaaatttctgcatatttattttgatatatggattgtattggcgagatggatctactcgatcctgatatgactattgtagaaattaatgctattaacgacaacttaatttcttggaaaaaaaaaccaaaataaaaatcttcaacatcacagaaaaaaaaaagagggaaaaaaatcaattgggaggattaaa

SEQ ID NO: 208747 - DNA, 367 bp, Gossypium hirsutum
  unsure (1)..(367): unsure at all n locations
cggacgcgtggggccgaaagaacagaaaggccttcagttggccaagagattggagaaagggggtctggcggtattganccgcttacaagacgcattggttccgggcagggtttgcatggtgatcaatctagatacacatctgatgacgtgccgtcatccaaggatgtgcaacctgattctgaaaaggttcgctcctcctcaagaaacgatagttcttcaaagaggcctgtcgcaacaagaagccgactggactcctctggtgagcctaacgaaaaccggtctagcagattagtctcaagcagtagtcgcctgtcaacaactcagagaatcctccctgggtttcaatccagatcagcatcttatactc

SEQ ID NO: 208748 - DNA, 416 bp, Gossypium hirsutum
cccacgcgtccgcaagtttcagggcggagctcaacatcgaggaaatctcacgacacaacaggcatccagtaacttgttttggttactggagacaatggacttctggttcaagggaatcagtgaggacacatctgcgtactcatttaatgagacagacattcagaaatgtccatttcttaagaacattaacaaacccaccaacttttcattctcttcaatgagttttcccatgcctgtacagggagctagaggtcctttatttgaggatggtccaaattttgatatggcatttaagctttttcatgggaaggatggcattgtacctctctcagggaggtctgatgttccctgtgacagagacaaacaggagcctaccatccaatttaacccattagcaggaaaagctgcaacaatta

SEQ ID NO: 208749 - DNA, 397 bp, Gossypium hirsutum
cccacgcgtccgtgaagagtgaaatatgcacacactttgttaattgtgagcttcgatccggggttattggggatagaagtatgatgggatcagatcctgcaacaacaaactatcctggaaaaatccctagtgggcttgatcttcccagtgatgttgctgatgagaagctctcgaatgatggagaaggcaagtagttattaatccgccggaatctgagtttgatatccatagcaactataacaaaataatttggtcttatgacccttaaaacatttcaaaaagagttagatcttttatattttttttatagttgctatggtcaacatatcgatacatctattgtaacaatttagctactaatttggttgcattgatacctttaaaaactactaaacta

SEQ ID NO: 208750 - DNA, 382 bp, Gossypium hirsutum
cttactccttgtccgcacgaaaggtttaactttctgcgcactgtctcagaaagaggctctggcaaatagacatgtgtgttaagattcttactacccgcacctggacagaaagaccctatgaagcttcactgttccctgggattggctttgggcttttcctgcccagcttacatggaatgcaaacaaagcctgcttccaccggtgcccgaaccatcaatgagataccactctggaagagctagaattctaaccttgtgtcatgacctactgtccaatgtacaatctcaggtagacagtttctatggtgcgtacgcctaccaaaaggtaacggagacgttcaaaggtttcctcgtgccggacagagattggccctcgagtgcaa

SEQ ID NO: 208751 - DNA, 425 bp, Gossypium hirsutum
  unsure (1)..(425): unsure at all n locations
cccacgcgtccgcagcgattccacgatttccaccccttattctataaggatgatttaactgctaaacacaccacactcatttctcacttctgttttccttgttctcttctacattcagcgaaggggtgctctgagatcacataccaaaatggtgaaggccgttgccgtccttggcagcaatgaatgtgttagcggaactgttttcttctcccaagaaggagatggtccaactaccgtgactgggaacctttctggtcttaaacccggactccatggcttccatgttcatgcccttggggacacaactaacgggtgcatgtcaactggaccccattttaatcctgctggcaaagagcatggtgctccagaagatgagaaccgccatgctggtgatctanggaatgtcacttgtggtgatgatggct

SEQ ID NO: 208752 - DNA, 305 bp, Gossypium hirsutum
aaatcttgagcccaataccatgaatagtgttagaaccgaaccttatggacaggggctatgggcccgataactatcaacttagccaatctgcagcttgtaataatttagctaacgggcattatactgaaagagccgagcttattgattctgaccttgatgttggcagaaaggaagctcagaattgaacattgactccaaggtattaaagaatgccactctcttggagggggaactgcttcgagtataaaaaactatggtgctttctaaaatcagaaaagtaaatactgatacaatcatgctcacat

SEQ ID NO: 208753 - DNA, 421 bp, Gossypium hirsutum
cccacgcgtccgcacagatcacacgctatcacgggccttgtcgctaagtggcatgtatgtgcgacaatcggctctttcgacgaagctgatggtgaaacacccatggctcaaatcgcttctccacagatgtatccggtggacgtcgattgggaatcagatgaagaagatgaaggggatgatttggataacacgaagcttgtccccatttttgcgcacacggtatctttccaaaagagacaggcgttaacgacatatctagagcacaacagagctggaattaccgtgtacggcttcatggtggacagaactggaatccacaccatattcggcatcgaactaactttactgctttggctactcaacaagacaatagtgaacttgacatgaacaccatatatgacggacagaacttaacccgaca

SEQ ID NO: 208754 - DNA, 392 bp, Gossypium hirsutum
  unsure (1)..(392): unsure at all n locations
aaaaccgggccgaccgacgcgtacnnnnagccaaagcncatatttggtcttgtgttttgattttatacgttcttctcggggggttgttaccgtttcaagatgataacttcctttctatatataagaagatttacagaggagatttcaagtgtccgccatttttctcacctgaagctcggaggctaatatccaagcttttagacccgaacccaaaaacccgaatcgtcatctccaacatcacagaatcatcttgcttcaaaaaatcaatccccaagactaaaacaactaatgaagaaatacaattcgaagcattcaatggagagaaatcttctaaacccgagaccttaaacgcattccacataatttcattgtctgaaggcttccatttatct

SEQ ID NO: 208755 - DNA, 433 bp, Gossypium hirsutum
gtcttcgtacaaaggataaagaacgagtgtttgttcttgctgctactaaccggccgttttgccttgatgaggcagtcatccggaggcttcctcgaagattgatggtaaatttgccagatgctccaaacagagaaaagattttaagagttatattggccaaagaggatttgtcacccaatgttgatttggaaactattgcaaatatgactgatggatattctggaagtgacctgaagaacctttgcgtgactgctgcacattgtcccataagagaaattctggagaaggaaaagaaggagagagcttcagcagcagctgagaatagacctgcacccaccttgtatagcagtgctgacgttcgacctctgaagatggatgattttaaatatgcacatgagcaggtgtgtgcaagcgtgtcatcagagtctacaaa

SEQ ID NO: 208756 - DNA, 408 bp, Gossypium hirsutum
gaaacgaccgtgggacacccatggttttggataacaactactacaggaacatactggacaacaagggtttgttgattgtggatcaccaactggcgtacgacaaaaggaccagaccttatgtgaagaaaatggccaagagccaagactatttcttcaaggagttctcaagggccattactctcctctctgagaacaatcctctcactggtagcaagggtgagatcaggaagcaatgcaatcttgcaaacaagcttcactaaaatgcctcgccaaagagaaagccgagtgtggccgaataaaatgtttgtttactcagtttcttttccaagagacgagtttgttaatgtgcaggtgagtaatggtgcaatggtactggtttgtaacgatcgatccattgcatttttcttt

SEQ ID NO: 208757 - DNA, 414 bp, Gossypium hirsutum
cttcaaactaatgcagcagttggagaagacaaaacctcactttatttgctgcataaaaccgaatcgcaagcagctccctggcatgtatgaagaggatcttgtctcacagcagcttagatgtagtggagttttggaggctggtagaatgtctagatctggatatcctactcgaatgacacatcaggaatttgcagacaggtatggtttcctgctgttagaaaccaatgaatctccggatcctttaagtatttcagttgctgttctaaaacaatctaatatactccctgtaatgtatcaaattggctacaccaaactgtatcttcgaatcgggctgattggggtattggaagataggagaaaacaggtgttgcaaacagggtgtaccaaaaccattgcttgtgttctaacatttat

SEQ ID NO: 208758 - DNA, 423 bp, Gossypium hirsutum
  unsure (1)..(423): unsure at all n locations
cgtttctattttctttcaactcaaaaactcccaagtaatattagaatcgggggtgttggcacttataactatgagtctacctctccagtcgcccctgccaggcttttcaaggctttttctcttgaagctgacaaggtttggcccaaggctgctcctcaggcagtcaagagtgttgaggttgaaactaatcctggccctggaagtatcgtaaagatcaactttgctgaaggccttccattccaatatatgaagcaccagattggaggacatgacgacaagaatttgtcatacagttatagtttgatcgaaggtggacctttgggggacacgcttgagaaaatcagctatgacaacaagtttgaggcagctgcangtggaggaagcctttgcaagagctcgatgaaattttacactgttggcgac

SEQ ID NO: 208759 - DNA, 447 bp, Gossypium hirsutum
ggtcaaatgttgggaaaatacttcctcaaaaatattccacagggagctgccactacatgctgtgttgcattaaatccacaagtcaaaggtgttagcggagaatatttcttagacagcaacataggtaacccgagcgctaaggcgaaggatgcagatttggcaaaaaagctatgggacttcagctgcaccttgaccaaccccaagtagttagttggttcacaaagccttatcgagacgagctgaagatgttcgatgcttagtgctggtactcttttagctgaaactgtgataaaccgtaatattttcatagacatcccagttttatcgagaagatttgaataaaatgcaaaatatgtatagacactgaaaaaaaaaaataattaaaaatttatttaattatataatttttaaaataaaatattttaattatattttttttaaaaataa

SEQ ID NO: 208760 - DNA, 438 bp, Gossypium hirsutum
cccacgcgtccgggaagacatatggggtgactatatgcaccatggatattacgacccgggttccgatgtgtcgggttcagatcatcgtgccgctcagattcgaatgatcgaagaatcgctccgtttcgctggaatatcggatgacccagcaaacagacccaagagaatagttgatgttgggtgtgggataggaggcagttctaggtatctagcaaggaaatatggagcaaaatgccaaggcattactttgagccctgttcaagctggaagagccaatgctcttgctaatgctcaagtactagcagaccacgtttgttttgaagttgcagatgccttgaaccaaccattccctgatgaccaatttgatcttgtttggtctatggaaagcggagaacacatgcctgacaaacccaagtttggtgaaaagctggtgcgagt

SEQ ID NO: 208761 - DNA, 448 bp, Gossypium hirsutum
  unsure (1)..(448): unsure at all n locations
atggagccgaccagaatccactcaaatggcttttctctgtttcaggacattaccttagctggggatattgcaggctacgcgacaacagctgcttacaacaaggacccctgccccaataagctgcatttgggtattggtgtttatcgaacagaggagggaaaatgccatacattaaatgttgttaaacaagtggagcagacactagctaatgatctgtctgctgacaaggagtatcttcctataacaggaatgccggaatttaataaattaagtgctgagctaatgtttggctctggcagccctgccatcaaggaaagtagagtggttactggccaatgtgtttctggttgtctatcactganggttggagctgaattcttagcaaaacattaccaccgacatgtgcgttaccttcctgagccaacatatggaaatcatgctaatctga

SEQ ID NO: 208762 - DNA, 381 bp, Gossypium hirsutum
ctgagggtggcatttagctttcaacaactgctcaatcaaacactcaaagaagtgaagtgggggctgatggggaagggaatacaattctgaataccaaatcggaaagttctgtgaagactggcgctcatgtcatatattccaaatatacctgcattgaggtcaaattcaatggtgcaaatcatattctgctaaaacaagatgacattgtatgacttcttgaaaccgatgacataaaagatcttaaacctctgaacgacagatatttaattaaagtgttggaagctgacgagaaaaccactcgatgattcttgctggccgaggcaagctaacaaaaaccttccattggaaccgtgatagctgttggacctgtgtctttacatg

SEQ ID NO: 208763 - DNA, 440 bp, Gossypium hirsutum
  unsure (1)..(440): unsure at all n locations
cccacgcgtccgggagaaacttgcttatgtggcactcgacttcgagcaggagctggaaacggcgaaaagcagctcatcaattgagaaaagttatgagctacctgatggccaggtaataaccattggagcagagcgtttccgttgtcctgaggtcttatttcaaccatcgcttattggaatggaagctcctggaattcacgagaccacttataactccatcatgaaatgtgatgttgatattagaaaggacttgtacggtaacatagtgcttagtggtggatccaccatgtttcctggtattgctgatagaatgagcaaggaaatcacagctcttgcaccaagtagcatgaagattaaggtggtagcacccncagagagaaaatacagtgtctggattggtgggtctattttagcttctcttagtacattccagcaaatgt

SEQ ID NO: 208764 - DNA, 339 bp, Gossypium hirsutum
gcttttcgaggaaaatgagaggaagaagcttgcaattttcacagcacttgctttctcccaggaattatcagggttgccacctgagactgtgttccagccattgctcaaggataatcttgtggcaaaagggctagttctttcattcatgacagacttcttcaaggactatctggtggataatagccttgatgatttaatttctcttctgaagcgagggaaaattgaagatgatctcctgccggttttcccctccacaaagcgatctgctgaaaggttctctgagcattttaccaaagcagggttggtacccttggttgaatacaatgagaaaaaaatatt

SEQ ID NO: 208765 - DNA, 403 bp, Gossypium hirsutum
gcgccaaagacacttgctgccctgtactacaagggctgttggatttagacgccgccatttgggtctgtgctacgatcaaggccaaacttttgaatatcaatattataatccccatagctcttcaggtcctcatcgactgtggcaaaactccacctccagggttgcaatgtccagcacaatgatgaaaaacataaaaaccccctgttttttttctttcgaaataacaaatattttcatgtcttattatatgtttcttttaataatttatggtgttttgctggttgatgaagatcataaagacgtgtctgacgttagatcgttttaatagatgttgatgaatgcacgaacggatcaatgtagtacgatggtgtgattttagttagttcataagatcatattaatt

SEQ ID NO: 208766 - DNA, 443 bp, Gossypium hirsutum
cccacgcgtccggctcaatgatgtctgccatacacttgctaatattgctacttggagtgggggctctagccactccctcttttggcacctatgagtctcccaactatgggaagccccctactcctgtttataagcctcctaaggtgaaacccccaccttatgaacataagccacctgtctatgaacctccaaagaaagaaaaacctgaacataagccacctgtctatgaacctccaaagaaagaaaaacctgaacccaagccaccgatgtatgaaccaccaaagaaggaaaagtccgaaccaaagccaccagtttatacacctccaaagaaagagaagcctgaaccaaaaccatcagtatatgaaccaccaaagaaggaaaagcctgagcctaagccaccagtttatacaccaccaaagaaagagaagcctgaacccaaacca

SEQ ID NO: 208767 - DNA, 440 bp, Gossypium hirsutum
gaaaaaaaaaccgaccggcgcgtacgcactatatggataatatcttttttgactcctttcttaattctcccgctgacgcgtatattgtcctaattaatccgatctgtcctataaatataaattaaaacattttattggccaataccgcaaagattgtggaaaaaaacaacatctgtaatagtaaagatcatctttgcacgaaaatggacactaaccgattactgaccctttgatatgatgcttctatctgcaaatcttgatgagaaaaatcttcctcttgcccctccgcatttgagtactaatacatatacttgatacttgagggagaacgattgttgatcgacaccgatttcacatcacagttcgaactcttccgatcaactaatacttacaaatcaatcctccaaatgcttcccttcatctttcatggcaaatctcat

SEQ ID NO: 208768 - DNA, 436 bp, Gossypium hirsutum
aaagacaatccagtacgccagcaggagcttgctgcctacttcacccactgcaacctgcaatgaccacacctaagacttgccctgctgaatgcaatgactgtctgctacaaggcaaagaacctggctacggcaggtaactttgcccggcgactgctagaaacaaaccccacaaatgagaatcaagcgaagacagccaggcaagtacttcaagctgctgagaggaacatgacagatgcttctcagctgaactatgatttcagaaatccatttgtgacatgcggggcaacttatgtgcctatttaccgagggcagaaggatgtatcgtgcccatattgtactagtcgctttgtgcctagccaggaagggcaattgtgtacagtgtgtgatcttgcattggtcggggcggatgcatcaaggttgctgtgttctgctttac

SEQ ID NO: 208769 - DNA, 320 bp, Gossypium hirsutum
gaccacgcgtccggggaaagacacccgaggagattcgcaagaccttcaacatcaagaacgatttcacccccgagggagaagagggggttaggagggagaatcaatgggcattcgagtgataggaaagcctttaaatttaatgttgatattattatagtttatatgcttttctggttaggttttcaagttggggaaaaaattaagaacattggctttcttttggcttattttgttatatgcattagtgtcttctattctagaggatatttaatatgaacctctgccctcctctattatcataatataaattagaatttctt

SEQ ID NO: 208770 - DNA, 439 bp, Gossypium hirsutum
cgggccgaccgacgcgtgcgtccatatcttcactgtctcactctctccattcttcactccagtttctcctttccgggttcggtgaaatcattcttgaaatccttcatattcaacgtagccaatgcggcaaccaaatcagaaccacgttctgtgaacttgttttttctgaacatagcataaatgcaacttggcgttaccaaagagacttgaatcttcaacttgcgcgaatcaatgtctactacaatgaagccacgtttggcagattccttcctcgtgctaatctcatgcatcttgaacctcgaaccatggacagcatcacatctttccctgtcggtcagatttttagaccagataacttccttttttgtcaatctggtgcttgaaacaactgtactaatggccattacacataactgtctgactttatagatttcgtact

SEQ ID NO: 208771 - DNA, 442 bp, Gossypium hirsutum
cccacgcgtccggtgatattcaagacaaattgggtcactccctttgccaagagcttggaagagagaacatcagctatgtccacttatgtaacatgcgaatctgatgtcgaaaatgctgtaaaattagcagtttctaagcatgggaagctggatatcatgttcaataatgcagcgattatgggtgagaatgaggtaaaagtcagcgagaccagtctcaaggacttcaaaacggtgcttgatgtgaatgtgttgggtgcattcctgggtgccaagcatgccgccagggtcatggttccagccaagaaagggtgcattctcttcacagcaagtcttgcttcaaaaatttgctatggaaaattcccattcatacaaatcatcgaaggttgctgtggtagggttggcaagagcttgagcgtggagttaggtgagcatggaattaggg

SEQ ID NO: 208772 - DNA, 420 bp, Gossypium hirsutum
gacgaaattgccgtgaaggaagaatgggaaggtggagtcaattcgtggttgcggtgactagtctggcggtgggcctcctttcggcatcagccaccgctagaccctgcaagacattcttcgtcgcctcctattctttctcttttgaaaaccctaacgacccttcttcctccaccggattcgtcaccgtcttcaccgagatcggtcaattgaacgtcgtaccaccaagacccaagccctccgatgtcttgagctctctccgtgagcgcagtaaggacatccttagcgtggtcgtcgctcttctcttcggcgtcggtagcggcgctctcacggcggctaccctctacttggtctggaccctcttctcggcccggtctgattatcatcgtgcttgtttggaggatgatgagagcgaccgagaac

SEQ ID NO: 208773 - DNA, 337 bp, Gossypium hirsutum
tggatggttatgaacatacgactttatgcattaaatatgatatttaaagctacacaaatgtgcagtaattgtggtaaagctctctgaaacctactaagtatgaaggaccacgcacagattatgcacttgctgaatttgttaacactgaaagagggactaatgtgaagatagccactttggcatacaatgttgaaaagctaaatgcggataattatgatgagattgagcttgattaaaccaaagatatgtgggttgagttatatacaccttggcgtggccattgcaaaaaccttgctcctacctattaaaaagtagcaacggcatttaaatttgaaaa

SEQ ID NO: 208774 - DNA, 445 bp, Gossypium hirsutum
cagtgcaaggcattatcctcaacactgcggcctaggccattccttgcacgatgaagatgttgttcagggggtcaagaaaaaggaaaaggaggaaggagggagaggccgcttcaaatcacatacgacaggtcctgcacgaatatccgatagagagaaaaaggctccattgaagacctaaccatgacaaaagatgtcggcaggaagtaagagttgcccttttttgttgtataagtaatattatcaactagtattgtctggctgatttattctgtttcccgtttcttacaacttccctcatttttcacttcttaattatattgccattaagtagctgtattttagtacgtacttggatgcaaattttggtcatttacactataaaccactattctgaaagaaaaaacatgggcagtcttcaaagacaagaacgcctagattgtatacc

SEQ ID NO: 208775 - DNA, 304 bp, Gossypium hirsutum
cccacgcgtccgcccacgcgtccggccaaacttctagttctaaacgttcttcggaaagctcgtctggttcacgataatcacctgccaacaatgaagaaaggtcttaactattcttgttctcgcaaatttcaataaattgagtgctaaactcatttttggatatgacagctctgctattatagacaacatagtgtctactgcttaaaacttatgtggtactggatcattctgggttgaacctttctttttatcctagtattaccaccaacggactatatacattccacaatcatcatctagaaac

SEQ ID NO: 208776 - DNA, 439 bp, Gossypium hirsutum
ccaaatctttctacttcctttatgtttacccttatttcacttggatcatggggcccaaattgattaacctccattacacactctccaagtcccaaactatcaaatacaccgacccgctttccaatttaacctacactaatttgttcgaccaaatagttgactcgcatgttttctcacaaaaaagactcaactacccgcatattataatcttaatggcggaaacagcatgaccaaatccctgctaaatcaatacaaaactagccaacctttacaaaactcgttactcacaacctacactctctaaaatatttaacatttcacctttcaattatttctcctaaacaactcttataatatttacctactatcatataagctttatataaaataaactatatactattttctgacatctaatttttaactactatatcttttt

SEQ ID NO: 208777 - DNA, 333 bp, Gossypium hirsutum
ctcatatcttaagaaagttggttacaaccctgacaagatcccatttgtcccaatctctggggttgagggtgataacatgattgagaggtctaccaaccttgactggtacaagggtcccactctccttgaagctcttgaccaaatcaatgagcccaagaagccttcaaacaagccactccggctcccacttcaagatgtctacaagattggtggcattggaactgtccctgttggtcgggttgaaactggtgtccttaaacctggtatggtagtgacctttggcccctcttgtctgaccacttaaagtaaatctggtgagatgcaccatgaaac

SEQ ID NO: 208778 - DNA, 398 bp, Gossypium hirsutum
  unsure (1)..(398): unsure at all n locations
gacagccctcccaactcacccaacactagtttaacaaatactacacctcctcgtggtccttgtgaagcacttcttgatccattaaacaacctaactgctataacacagaccttaggctgatcttaaacactttacagtaccaaatccaatgccgcgtggtgacaattgatcggtcaacataaactggcatctttattcacacttctatccaggattgagaactaagatcacaatattaaactgggatgaaaccgtcttccatgattgacttgatgctgtacagntcaataacgctacccccaggtttcaaaacatatacttcttacactgaacatgcttggacttgaatggcgttcacaatactatattcatgccaggtctttcccaatcaactatat

SEQ ID NO: 208779 - DNA, 294 bp, Gossypium hirsutum
gctacctctttttccttgatcatttaaacttttatctacacaagctcgccgtcgatctcttgccagtctctaaccgacacttcttcataccaaacttctctccacttacttaaccaggatctcagtaatacactactattacaatttctgagctctctcaataaatattgtataccattaacataatatatgcttctgaacatcgacatcgacgatacttcactgaatcaaccatattacgattcaataacaacaccacagaagtctattaactaataactaatgtacaaaatt

SEQ ID NO: 208780 - DNA, 401 bp, Gossypium hirsutum
acgcacacacttgctaatattgctacttggagtggtggctctcgccactccctcttttggtaccgatgagtctcccaactatgggaagccccctactcctgtttataaacctcctaaggtgaaacccccaccttatgaacatcctgtttataaacctcctaaggtgaaacccccaccttatgaacataagccccctgtctatgaaccaccaaagaaggaaaagcctgagcctaagccaccactttatacacctccaaagaaagagaagcctgaacccaaaccaccagtatatgaacctccaaagaaagaaaagcctgaccctaacccaccatttatacaccaccaaaaaaagagaagcctgagcccaaaccaccattttatgaacccccaaagaaggaaaa

SEQ ID NO: 208781 - DNA, 346 bp, Gossypium hirsutum
ctcgaggatgggaggacgcttgcggattatagcatccaaaaggagtcaaccctgcacttgggtctgcgccttcgaggagggatgcagatattcgttaagaccttgactggtaaaaccataacactggaggtcgagagctcggacaccattgacaatgttaaagcgaagattcaggacaaggagggaattcctccagaccagcagaggttgatttttgctggaaagcagcttgaggatgggaggacactcgcggactataacatccaaaaggagtccaccctgcacttggttttgcgacttcgaggagggatgcagatatttgttaagaccttgactggtaaaacca

SEQ ID NO: 208782 - DNA, 432 bp, Gossypium hirsutum
cggggcgacgacgcgtccgcccacgcgttcggtcggtaccattgtccattgtagttatgtgcatgatggaaaagctaaaagggcgaatgaagtagtggaagcagtaaaccctgataagaatttggtcactttcagagtgatcgaatgagatctaatggaagagtataagagctttgttatcacgattcatgtttcgcccaagagcgagggtagtggcagcttaatgcactggactttggaatacgagaagctgcacgatgggattgctcatcccgagactctgctgcaattcgttcaagatgtctttaaagacattgacgcccaccttacccaagcaagctaaacagttttacatgttgctattgtaaccgttactttaagcactattcatctatttaatgaataaagtgacaacttcctttttcatgattt

SEQ ID NO: 208783 - DNA, 432 bp, Gossypium hirsutum
ctctattctctttggcttatctatcgctttgatttcgcatccttgctgtgcactcgatggcgaatggatggttgaggcctgaggtgtatccgctgtttgcggccgtaagtgttgctgtcggaatctgcgggtttcagttggtgcgcaatatctgcatcaaccctgaagtcagggtaaccaaggagaacagggctgctggggttttggacaactttgctgagggagaaaaatattctgaacatttcttgagaaaatatgtccgcaacaagacgccagaaatcatgcccagtatcaacagcttcttcactgacccaaagtgaggcttcactcttgctttatgctgaaactaaaaaataaaaaaaatagaaaaactaagtcttattcaatcaataccaagttatgccctttctttctgctgactgtgatgcaaat

SEQ ID NO: 208784 - DNA, 409 bp, Gossypium hirsutum
  unsure (1)..(409): unsure at all n locations
gattgctcttggaacatttaccagccaaccaaaaatggttctccaaaacgatatccgttgggggaatcctccagcagagcttgagaagaanaatcacaaactcaaacgtcttgtccagtctccaaattctttcttcatggatgtcaaatgccaaggctgattcaacataacaatagagtttagccactctcaaacagaggtggtatgtggtaattgtcagactgttctttgtcaaccaacaggaggaagagctagactcaccgagggatgctctttcaggaagaagggcgattgatctcatattttgctattttatgattcacaaaaacagaagaaagtaatctttggatcaaatatgggaatcatatgagtaatctttttcatgtgtttaactatgacatatttttga

SEQ ID NO: 208785 - DNA, 216 bp, Gossypium hirsutum
aattttgaatcgacccacgcgtgcgtcgtccttcttcatctaacatcctttcacctaccattcttagcactaatccacacaataccgagcgtgctgcacactctcttgctcaattcaaagcttataagttgattccaactccatatcatattacaaagaacatggtaattccttatgctctcacagctctgaggctacagaaatgacacaaatact

SEQ ID NO: 208786 - DNA, 406 bp, Gossypium hirsutum
cgaattctcaagcattggttgaaggcaggcaatccacatcctttctacaaccctataaatggttacgtaatattaccaacggcatttgaaatggaaagcctccatgagaaaggcatgcaagttacatcgctcaaagaggaatgggaaatcattacagaagatcaaggcaatcaagacgctaataaaaactcacttgttagctccatatctgtttctcaagggccaagtaagcaatcctcaaggtctgaagctcatgcaactgtcattgttcatccacaaaacgagggtaaacaacatgtcgagctaaatgccataagtgtatccattgatacttagagttgaattgtttataaactcaatgaaacctagcaaagcactcgtgtgtataaagctatctgtatattaa

SEQ ID NO: 208787 - DNA, 351 bp, Gossypium hirsutum
cggacgcgtgggtttattcatattattgcactgttgagagccagcagcagaaggctagtggagtagcaccacacttgccacaggttaaggaaagtgaatcccatcctctgattagcgtggataatggaagtgggatgttgagtgatggtgtaggtcctaaagcccctgtatggaatacgaacaaggacctgcatgcataaaatcttcaagatgttatattcatttgtcggagatgaaaaattagaaatgaaaagtgttccagcgatggaaaatggtggtgggtaaggtgactcatatgttgcacaggcagcacagcaacaatagtcgtgttatgtggatgttcataactgt

SEQ ID NO: 208788 - DNA, 377 bp, Gossypium hirsutum
gaacgacaaatgttaaagaaagaaagaaatcttgtctcttgtgacagaagagataaaagcgggtgcgtcaaacatttaccatggcgatgacatatgccactagaaatccaagtttttgttggaagaagtaccgcatgccaagggggcttttgccacttatagacatcgaagaatgtgggtacgtgaaggacacaggtttcgtgtggctcaaacaaaagaagagcatcacccacaagttcgaaaagatagggaagctggtttcctatgcaactgaagtcacggctgtcgttgagaaaggcaagatcaagaagctgactgtggtgaagaccaaagagcttttggtttggatcacactgagtgatatccaagtggatgat

SEQ ID NO: 208789 - DNA, 419 bp, Gossypium hirsutum
gacggaggcgtccggaccttatgcatgctaatggtcatatgttcttggatacgtagagaaaccttcgcaccagggaggagatattccaataacatatgaccttatgcatgctaatggtgtctttagcttgtatcaagataagatatgcagggctatacaatatggctcgaaattcttaagtgatgggcagcctggcacagcacaaaatgttgacaaatcaaccagcttggcacggaaagttttccgcctttttaaggtatctcacaatgtcaaatactaaaagtaactagttagtttttttgaaaaaggatgaactttgttcacttaatagataattctcttttgttctaccattgaatgtacagcactctgagttagtatttaatacttggaataaagatgtatgctttccttttggt

SEQ ID NO: 208790 - DNA, 299 bp, Gossypium hirsutum
aaagaagtgaaagggagttgccttcccaaagctaaacaaggtcctcaatgcagcagggcaggcaaattttcaccggatatagctataaacatcgactcgaacccctttttcatgaccagagtgaagaaggtggagctggctgacaatagaatcaccaatgatacgaacttgctgcagccaagaggtcattatagtggaataggtgttggtgcaagtgctgcggcaacaggccctgctcaacggaaggcgggaacggttcaatatggcatgacaaggatgtattaatgaaagattaaggg

SEQ ID NO: 208791 - DNA, 340 bp, Gossypium hirsutum
aagaattttatgttgaattcaatggaccaaaagatagtccttatcatggtcgtggggggagtataatgttggaacttccagatgcttatccttataaatctccatcaattggctttataaacaagatctaccacccaaatgttgatgaaatgtctggttcagtttgtttggatgtcattaatcaaacttggagccccatgtttgatttggtgaatgtgtttgaagcgttccttcctcaacttcttttatatcccaatccatcagatccattgaatggagaagctgctgcacttatgatgcgtgatcgtacatcttatgaacaaagagtttaagagtattg

SEQ ID NO: 208792 - DNA, 323 bp, Gossypium hirsutum
gtgaatacttgaagatataaaaatatgactttttcacatacgttaaaaaacacataaaagggcctgaatcatactcatgtcacacgtgcaattccatttaacagtctttgccccaccattacctgattgctccaagcaagttggctccatctagctttgcaccttctaagtgcgtattacgaagattaacatgtcgtaaataagccctttggaggtttgcacccttcaaattcgcattgcttaatttcgcacccttcaaattggctccttcaagattagctccctctaagttggcatcagtaagatcagcactctgtaagtgt

SEQ ID NO: 208793 - DNA, 336 bp, Gossypium hirsutum
gttgctggacagacctctgcacaaatatttcgagcagaatgactgcttgaattatgtcttgtgtttccgctggattctgatacagtttaaaagggaacttgaatacgagcaaacaatgcgattgtgggaagtattgtggacgcattatttgtcggagcacctccaactgtatgtgtgcgtagctatcttgaagcgctatcgagggaagataatgggagagcaaatggactttgataccctcttgaagttcatcaatgagctgagtgggcagattgagcttgatgcgatcctcatggatgcggaagctttatgtttatgtgcgggaggatatggagc

SEQ ID NO: 208794 - DNA, 404 bp, Gossypium hirsutum
  unsure (1)..(404): unsure at all n locations
ccggaancccggccgaccgacgcgtccgcccacgcgtccgggtatttctgggggtcatattaacccagcagtgacatttgggctgttgggggcgcgtaaggtctcattgatccgagccattgcatacatgctggctcagtcattgggagccatatgtggggttgggctggttaaggcattccaatcagcatactacaacaggtatggaggtggatccaacactctagcatatggttacagcacatgcactggtttgggtgcagaaattattggaacctttgtgttggtttacactgttttctctgctactgatcctaagaggaaggctagagactcccatgtccctgtattggctcccctccccattggatttgctgtattcatggttcacttggctaccatcc

SEQ ID NO: 208795 - DNA, 408 bp, Gossypium hirsutum
  unsure (1)..(408): unsure at all n locations
gcgcgcacgcgtncgagaagatgacctgacattctcaagccatggctgtcatacaccgaccccggtgtcccgaataacatgctcaccgccactgatgttgtatacccacgtagcctgtggtttgaccctttttggtggagaaattgttcagccgaaaaaaacaaaggacctaattcccaaaaaatccacaattgcccgtttgctatttttgcaattaatggtgcattgttccaacataattacaaccttacctggcccattgacaacctattttcccaccttacccattcttgtcattccaacattttttcttctttcaaccccaattgagcattttgagggggaaccctaacacccaataaaaagtttgagaaacacttattgtcatcatacatacacctttttacc

SEQ ID NO: 208796 - DNA, 439 bp, Gossypium hirsutum
  unsure (1)..(439): unsure at all n locations
cttgagttccatnnaggatggccagcgcatgcctgtaaattctcaaaanctttgtttgaaatccatggggagcgtcgaattcataccaaccaaggctacactcagtgcttttcctttctgtggggacctatgtagaagattantgacattcaatgtgcccattccgtgcgctccaagcattatgggtgcaagggttgatgcagttaccccaagcagaagaagggagaaacctgtgtcactgccatccacgatgatgaaggagcccaagccttcagcgagaaacgtggccataacttggttattacagccaattggagtgatgtaagtgtttatgattacgattgccttgttgtgccgggtgggaggtccccagagttgctggtaatgaacgacaaagcagtcactctagtgaaggatttcgctgagagaaacagggtca

SEQ ID NO: 208797 - DNA, 441 bp, Gossypium hirsutum
cgtccggcagtccctatgcttcttgggttaggtgttctgctactctgccttgcaaaggtttcatctgatctgaaggcagaagaagttataaccaatgtgggttctttggttaccagaggcggaaacagaagactgatgctagagattgattgtggaggattatgcaagaaaagatgcagtcaacactcgaggccaaacagatgcaacagggcgtgtgggacttgctgcttgaggtgcaagtgcgtgccaccggggacttcagggaacagggaggtctgcgggacctgctatactggcatgaccacccatggaaacgttgccaagtgcccttaacctttacgtcgcccaatatgtgttgcagccatcaaggggaaaaatgaaatgtttgtttgtgtaatatgtatgttgtagctcaaatgtctcacctactcctaaaattat

SEQ ID NO: 208798 - DNA, 440 bp, Gossypium hirsutum
cacccaggaacgccggctgtgttctacgatcatattttctctcatcatccatctgggattgccaatcttatctctgtcagaaacagaaacggaatccattgccggagtttagttaaaatcgtcaaggcagagagggatgtgtatgcagccattattgatgaaaaggttgcgatgaagatcggaccacgttattatgagcctcctagtggttcccaaagatggtccttggcccttgaagggagggattacaaggtatgggaaacatcttaaatgtaaaaccattgatattatttatgtttccaaatgtgtatatcctatacggaagccaaccatcaagttgaagaatgtcgaaccagtagtgtttgttggggatagcaggaagggtgtaggccctcacttataatactatttggcagtgccatggttgtaccattttttac

SEQ ID NO: 208799 - DNA, 375 bp, Gossypium hirsutum
  unsure (1)..(375): unsure at all n locations
actgccagatgntanattacttgcagtcttgcatctatcttctaagtcaaaccanntaaggcaggaatttttgactgagatagggatgatttctggattgcaacaccctaatcttgtgaagctttatggctgttgtattgaaggaaatcaatcggtgctaatttatgagtacttggaaaacaacagtcttgctcgtgccctttttggtcgtgatgaacaacgtcttaacttgcattggtctacgagaaagaaaatatgcttgggaatagcaagaggccttgcttatcttcacgaggagtcaagactcaaaattgttcacagagatataaaggcgacaaatgttctgctcgataaggatctaaatgctaagatttc

SEQ ID NO: 208800 - DNA, 402 bp, Gossypium hirsutum
gtactgccagatggtatagtacttgcagtcaagcaactatcttgtaagtcaaagcacgggagtcgggaatttgtgactgagatagagatgatttctggattgcaacaccctaatcttgtgaagctatatggctgttgtattgcaggaaatcaattgttgctaatctatgagtacttggaaaacaacagtcttgctcgtgccctttttgttcgtgatgaacaacgcgttaacttggattggtctacgagaaagaaaatatgcttgggaatagcaagaggccttgcttatcttcacgaggagtcaagactcaaaattgttcacagagatataaaggcgacaaatgtgctgctcgataaggatctaaatgctaagatttccgacttcggattacccaaccttgat

SEQ ID NO: 208801 - DNA, 364 bp, Gossypium hirsutum
gcgtccgcccacgccttcatgtctaccacacacttgctaatattgctacttggagtggtggctctcggcacgccctcttttggtacctataaatctcccaactattggaagccccctactcctgtttataaacctcctaaggtgaagcccccaccttatgaacataagccccctgtttatgaaccaccaaagaaggagaagcctgagcctatggctgccgccttccttggtgctagggttctgccctgttttcaaaccttgggccacttgggttaattgtgtattgggccactacatttgggctatagggactgttttgggcttttaataggacattaaataaatggacttttcttggactgtt

SEQ ID NO: 208802 - DNA, 425 bp, Gossypium hirsutum
  unsure (1)..(425): unsure at all n locations
cccacgcgtccgttcttgtgggggttcccaacaaagacgatgcattcaaaactcatccagggaagggactgaatgaaaggactctcaaaggtactttctttggcaactacaaacctcgaactgatattcctgctgtcgttgagagatacatgaacaaggaacttgaacttgacaagttcatcactcactcagttcccttctctgagattaacaaggcatttgagtacatgcttgctgacgaggacctgaggtgcatgattcgcatggatgcataaggattggctggccatggatgaagggctttttgtcaagtatatgtgcattttaagggaataaataatgtaatgtaatgctacatcgttttgctgcatttaatggcaaatttttatcttatcatacatttctttgnagaaaaaaataaatca

SEQ ID NO: 208803 - DNA, 431 bp, Gossypium hirsutum
tgaagatgtgaatcgccatgctggtgatctaggaaatgtcactgttggtgctgatggctgggcgagtttctctattgtcgacaaacagattcctctctccgggccacactccattattggaagagcggtcgttgtccatgctgatccggatgaccttggcaagggggggcacgagcttagcaaaagcaccggaaatgctggtggtagagtagcttgcggtattattggtctgcaagggtgaaattttggtcctggtgagcggaataatacattgagtggagatgcaatggcctaggagcaaactctgtatgtgaactaggaagtttgtgaataaaagtaaaagaacccttgttttgttttggttttcagacttaaaggagtgtggtctcttaacggatgctttagccatttatagtaagctgtcttttgct

SEQ ID NO: 208804 - DNA, 315 bp, Gossypium hirsutum
gtcgacgacgcgtgcgcccacgcgttcgcggacgcgtgggacgaaacatttgctcgattgattaaggagaaagaacagagtggttctttacttaggagtgcactgtccaggaagatggtatctgaaaataagtccaaaactaacgagttgtttcaaactgctgagaatggtttgagagaggctggaattgacttcaaatttagtaatcttattggcgatggaaataaagctgaagatccgggctcataccaggatgaaatatacactcttgctggtgctttggagaatattgacaaaacatctcaacttgaaata

SEQ ID NO: 208805 - DNA, 385 bp, Gossypium hirsutum
cccacgcgtccgcccacgcgtccgggatctctccatgaagcacgagtatctcccagaagatgttcagaaaatgcagacaccatttacgagctatcttcaagatatgcttgctcttgtgaagaaggagagagcagagcgagaagcattgggagctttgcctctgtatcagcgaaccattccttaagggttttcatgccgtatctcatagtcattgctgttgaaatttgcgttcgattatctgtatgtgcgtatggtatttcgatagcggcagtggactgaatttttacaattcctggtttggttggtttacacagtcatctgtgtcagtttttgaactgaatcacttatttaggtttaagtctgttggcagtgtcccaataataaa

SEQ ID NO: 208806 - DNA, 366 bp, Gossypium hirsutum
gacccacgcgtacggcacagaaattgcttgaactacacttggcttttggttttataaaatacttcatttgcatcagaggtaagctgcaaggcagccatgtttctttgattcaagaagggaaggacctggttaactatgcattgattaatgccgtggcgattcgtaaaatactgaaaaaatacgataaggttcatttctccaaacaagggcaagctttcaagtcacaagcacaaagtatgcacattgaaatccttcaatcgccgtggctatgcgagcttatggctttccatattaatttgagggaaaccaaggtgaaatcagggatgacccttgcatcgtttgaagaatgaacctaacatttaatga

SEQ ID NO: 208807 - DNA, 405 bp, Gossypium hirsutum
  unsure (1)..(405): unsure at all n locations
cccacgcgtccggcggattatgagaggactatattcgaaagaataagaagtctggaaagtgcgtcaatattacaatcttccaccacaaacgcggccgggggagtatgaaaccattgtaagagcgcattttgatcaagcgctaagtgtcgatcatctccggtccgctatggacatggagtatcgagagatacttattttagagaaaaaggcgctcttacaagaaaggcttttttctaatttaatctcggaggataatctagagcgtattatggaactctctccatataataacatacgcaaggaggcgtatgaatttgtggagggggaagtagacactttagatcttcgatccgaagaacaaagaagagcgatggatgaacgactntcctcttttttgaggacaat

SEQ ID NO: 208808 - DNA, 447 bp, Gossypium hirsutum
gcggcacagaaattgcttgaactacacttggcttttggttttagaaaatacttcatttggttcggaggtaagcggcaaggcagccatgttgctttgattcaagaagggaaggacctggttaactatgcattgattaatgccgtggcgattcgtaaaatactgaaaaaatacgataaggttcatttctccaaacaagggcaagctttcaagtcacaagcacaaagtatgcacattgaaatccttcaatcgccgtggctatgcgagcttatggctttccatattaatttgagggaaaccaaggtgaaatcagggatgacccttgcatcgtttgaaggatgttacctcacatttaatgatgggaaaccattcctttcttgtgaactctttgattctgtcaagcttgatattgacttgacttgttctatatgcttggacacagtatttgat

SEQ ID NO: 208809 - DNA, 380 bp, Gossypium hirsutum; identical to SEQ ID NO: 193844

SEQ ID NO: 208810 - DNA, 387 bp, Gossypium hirsutum
gcggcacagaaattccttgcactacactcgacttttcgtttcttataatacatcatctgcttcagaggtaagcgacgaattcaaccatgtttctttgattcaacaatggaaagacctggttaactatgcattgattaatgccatggctattcgccaaatactgaaaaaataccataaggttcatttcttcaaacaagggcatgctttcaagtcacaagcacaaagtctgcacattgaaatccttcaatctccgtggctatccgagcttatggctttccatattaatttgacggaaaccaaagagaaatcaacgttgacccttgcatcctttgaaggatgttacctcacatttaatgatgggaaaccattccttttttgagaactctt

SEQ ID NO: 208811 - DNA, 388 bp, Gossypium hirsutum
  unsure (1)..(388): unsure at all n locations
accaacannaaattaaacatcattctgagtttatccttaggaaaaataacaggggcatgagcttttactttgaaaactctaccttcacacctaccatttcatcaactacgtcttttatttcttcctttagcatagatggtaatgtagctaacttacatagtggtgttgcttccttccatttcactttaaggtctccttcttttcatcaaagtccccgacacaagaataagttctctcataagcgttaaaattggaatgtcaaatatggaaatactcgtaaattccatttctccaaaaagaggaaacatatagtgaatacatcaatcaacgttcctccaattaataacaagctatctcatattcctccttattattattcattgatgaa

SEQ ID NO: 208812 - DNA, 189 bp, Gossypium hirsutum
ccaagccggcggaatgggaaacccattcaccactttcttagcacctcttcttttaatcaatacacttgttggcgatgtcggcgcacttgccaagatcaatcctgaggctccatttgataaagtttgtgttctaatctgcggaatgcccacaggttttggcgcctctgtgaatgtatctaaacccaaaag

SEQ ID NO: 208813 - DNA, 407 bp, Gossypium hirsutum
accatggcggtcgtgaaattgctcggaacttggtttagtccgtacggtcacagagtgatttgggctctaaaactcaaaggcatactgtacgaatatattgaagaagatgtccgcaacaagagtccttcgcttcttcaatataatccaattcataagcaagtcccggtgctcgttcatggtggaaaaccgatctgtgaatccaccgttatccttcaatatatcgatgaaatttggccgcagaatcctttgctgccggctgatccctatgacagagctgttgctctgttttggatcaaatttgcagatgacaagggtcttttaatgtcaaagctttatcgaggcaatggcgaagaacaacaggcggcagtgaaggagtggttggaaatgttggaagtcatggaagaaca

SEQ ID NO: 208814 - DNA, 372 bp, Gossypium hirsutum
tggacattcagtaccactggagctcttgaggcagcttaccatcaggcatttgggaaagggggctccctatctgagcagcagcttgtggattgtgctggagcttttaacaacttcggttgcaacggtgggttgccatcccaagcctttgagtacatcaaatataacggcggccttgatacagaggagtcgtacccttacactgcaacaaatggtctatgcaaattctcttctgaaagtgttggtgttaaagtccttgactctgtcaacattaccttgggtgctgaagatgaattaaagcatgcagttgccatggtccggcctgatagtgtggcatttgaaagtgtcactagttaccgttttacaaaagtgggt

SEQ ID NO: 208815 - DNA, 402 bp, Gossypium hirsutum
gcgacgagatagcttcattcccatcaaggtttcagccaaggaatggggtgaatacaagggctacggtgatactttgaatgaagacggaacagtgcatgtgcttaacgagactttcactgatggcaaaagagggtttatagaaggtactgcttacgaggcggatccccagagtgatgaggcaaagctgaaggtgaaattctatgttcctcctttcttgcccatctttcctatcgttggagattactgggttttgtaacttgatgatgattatcagtatgctctcattggtcagcctagcaggaattatctttgggtattgtgcaggcaaacgcatatggatgatgaaatctacaatcagctggtgcagaaggctaaagatgagggctatgatgtcagtaaatt

SEQ ID NO: 208816 - DNA, 329 bp, Gossypium hirsutum
gaagacccaggccgaccgagacgttcagtaccaatgtatctcttgaggcaacttacgatcaggcattagggaaaggcagggtcctagctgaacagcaacttgtggattgtgctctaacttttaacaacttcggttgcaacggtgggttgccatcccaagcctttgagtacatcaaatataacggcggtcttgatacataggagtcctacccttacactgcaacaaatggtctatgcaaattctattctgaaagtgtaggtgttaaagaccttgactatgtcaacattaccttgagtgctgaagatgaattaaagcatgcatttgccatg

SEQ ID NO: 208817 - DNA, 457 bp, Gossypium hirsutum
  unsure (1)..(457): unsure at all n locations
cttggcaccttccgaagaattatactacatattcagtgttcatcccagaggatgatattcggaaacggggggttagtatagaggagaggcttagtcaaatttctcctgagcaagtgaagatcatgagagaggcagtcataaatctcattccaaggttaatatatgctgatcctcgctctaaattggagactcttcgagatgctttcgatgttgctgtagatgcggtgatcaataaagtcactaagttgaggaggaacatcatccaaggtcgtaccgaatatgataactttgtggaggagaacagttggaagtacgacttattagacgaaggacagcgcgaggtcggagctcacgaatgggatcctttcttctcanaaccaaaggacgagcagagagatcaatctgccgaagctgcgaaaaattcttggaagacgagcagagagatcaatcataaatg

SEQ ID NO: 208818 - DNA, 299 bp, Gossypium hirsutum
agaacaggccgacggacgcgtccttccggataattatactacatattcactgtttatcccccacgacgatatttcgggaacctttgcctactttaaaggacaggcttactcaaattcctcccgaccaagccaagatcattagaaaagcacccatacacctcattccaaggttaatatatgctcatcctcgctctaaattcgagactcttagacatactttcaatattcctgtatatgcccagatcaataaattctcataaatcaggacgaacattatacaaactcctacccaatataat

SEQ ID NO: 208819 - DNA, 310 bp, Gossypium hirsutum
gaatctttgagtccaaacaggggggggagcacttttaggggggtgatgcacatcaaagcaaacatgggatcttttgcggctgctctaaaaaagaggaatgtcttggtgatgaatgtcatccctgaggatggaccaaacacacttaactttatatattacagaggcctcattggcactactcataactggtgtgaaaccttttccacataccctccaacgtatgatttactccatgcttggactgtcttttctgatattgataaaaaaagcttcactgctgaaaatttgctactcgagatggatcgcattc

SEQ ID NO: 208820 - DNA, 316 bp, Gossypium hirsutum
aaaggtgcagctggaatccttgtgacatttgttagctgtttaggctcttggactatttcctgggcattgagcttgctcatgagatggagctcaacatgaacattcttcatatttgctaccatatgtggcttaactgtatctatctgtagctaagctgctaccggagaccataggactgacgctagaataaatacaagcatccatgaatccagcttccttggaaccatgattaccatgtgctccttaacaatcaatatatctgacattgatcaattcatgtacaatatttctagtcctaacttcagtgccatgttag

SEQ ID NO: 208821 - DNA, 287 bp, Gossypium hirsutum
cttggtccctttcgaagaattataccacattttcactgcttatgcccgaggatgatattcgggaacggtagcttactcttaaggacaggcttaaccaaatttctcctgagcaagtgaagatcatgagacaggcactcataaatctcatttcaaggttaatatatgctcattctcgctctcaataggagactcttcctcatgctttccatattgctggcgatgccgacatcaatcatgtcactaacctcacgacgaacatcattcatcgtcgaaccgaatataataac

SEQ ID NO: 208822 - DNA, 416 bp, Gossypium hirsutum
  unsure (1)..(416): unsure at all n locations
cccacgcgtccgaaacaaaccactcccatattaaacattgttggtgaaacaatgacgtcttgagctctgaggggtaagcttgaggcagatgtagagattaaggcttctcctgagcagttccatgaaatgtttgcccacaaaccgcaccatgtgcaccatacttgctatgacaagattcaaggatgcgatttacatgaaggtgaatgggggaaagtcggtaccattgtccattggagttatgtgcatgatggaaaggctaaaaaggcaaaggaagtagtggaagcagtagaccctgataagaatttggtcactttcagagtgatcgaangacatctaatggaagagtataagagctttgtaatcacgattcaagtttcgcccaagagcgagggtagtggcagcgtattgcactggac

SEQ ID NO: 208823 - DNA, 426 bp, Gossypium hirsutum
  unsure (1)..(426): unsure at all n locations
cccacgcgtccgcccacgcgtccggcactgaccatttatattgccttttggatttctttttgtccaacacgttaccatgattatcaatgaaactttacggctctatcctcctttaaatcgcgtgataagagaagtaggaagagaagtccaattaggaaaacttgtcctgcctactcatttagaggtcgacatgcgaatcatagcacttcaccatgatcctgacttatggggagatgatgttaatcttttcaaaccagagaggtttgctgaagggattgcaaaagctactaagtacaatgcagctgcatttatgccttttggattgggatctccatcttgcgttggcatgagctttgcaatcactgaagcgaanactgcacttttcatgattctgcaacgctacactgtcacccgtctccctaccta

SEQ ID NO: 208824 - DNA, 401 bp, Gossypium hirsutum
  unsure (1)..(401): unsure at all n locations
cccacgcgtccgcaaaggttaaagaaagaaagaaaacatgtctcttgtgacagaagagatagaggcgagggcatcagagatttaccatggagatgagatatgccaagagaaatccaagtttttgttggaggaagtaggcatgccaagggggcttttgccacttagagacatcgaagaatgtgggtacgtgaaggacacaggtttcgtgtggctcaaacaaaagaagagcatcacccacaagttcgaaaagatagggaagctggtttcctatgcaactgaagtcacggctgtcgttgagaaaggcaagatcaagaagctgactggggtgaagaccanaggagctttggtttggatcacactgagtgatatccaagtggatgatccctccactgggaagatca

SEQ ID NO: 208825 - DNA, 313 bp, Gossypium hirsutum
ttttgaacaaggacaagggctgtgatgaccattggattttctgggtgggtccgttcattttggcagcactagcagcactttaccaccttcttgtcatcagagccattcctttcaaatcaaaatgatctacatcaatggtcatgatcatatgatttcaagaaagtgaaagttccactcatgcaccctttcagtttgtttttccatttttttttgtttgcatgccttttgtatttggatgtaagaatctgtaatatattgctccaaatttaagtaaagtccaatataaatgtgctctctttcgaagggggagggg

SEQ ID NO: 208826 - DNA, 348 bp, Gossypium hirsutum
cgagcagactgcaattgacaatttcatggttcaacaactggatggaacccaaaatgagtggggttggtggagaacaaaagctcggtgcaaatgccattcttgccgtgtcccttgctgtttgcaaagctggagctgaagtcaagaaacttcccctttacaagcacattgctaaccttgccggtaacagcaagttggttcttcctgtccctgctttcaatgtcatcaatggtggttcacatgcaggaaacaaacttgctatgcaggagttcatgattcttcctgtaggagcatcatcctttaaggaggccatgaaaatgggtgttgaagtctatcaccatttgaagtctg

SEQ ID NO: 208827 - DNA, 390 bp, Gossypium hirsutum
gatctttttatgaattacgaatatctcccaaaaaacggtcaatggtgcagacaccatttactacctatcttcaagatatgctttctcttgtgaaaaaagagacagcacagcgagaaacattgagagctttgcctctgtatcagcgaaccattccttaagggttttcatgccgtatctcatagtcattgctgctgaaatttgcattccattatctgtatgtacgtatggaatttcgatagcagcagcggactgaaattttacaatttctgactttgttcctttacacagacattttttttcaatttttgaacttgaatcacttattttagatttaaagtccttttggccaaggtccccaatttattaaacaaaaactttttaacccccctt

SEQ ID NO: 208828 - DNA, 382 bp, Gossypium hirsutum
gagaagaattgtttgagttcaagttagatgaagaacaagccattgaaggtcttgatagagctgtggtgaatatgaaaaaaggtgaagtagcactgctgactattgcacctgagtatgcatttgggtcatccgagtcaaagcaggagttggctgtggtaccgctaaactctactgtttactatgaagttgagtgggtatcatttgtcaaggaaaaagaatcatgggatctgaacacccaagaaaaaaattgaagctgctggtaaaaagaaggaagaaggaaatgtattattcaaggctggcaaatatgtgagaagctttaagaaatatgagaaggctgttacatctatcgattatgatacttcctttaatgaagaggagaaaa

SEQ ID NO: 208829 - DNA, 375 bp, Gossypium hirsutum
  unsure (1)..(375): unsure at all n locations
cccacgcgttcggttcaaagtgcatctgggtgatactcctcacaacttgactgaaaatgattttgaaagcttagctcataggacggatgggttttcagggtcagacatatctgtttgtgttaaggatgttctttttgaacctgttcgtaaaacccaagatgccatgtttttcttcaagacacctgatgatatgtggatgccatgtggaccaaagcaaccaggtgctgtccaaattactatgcaggaattggctgccaaaggacttgcgtcacagatcctttcacctcctatttcaagatcagattttgacaaagtgcttgcaagacagangccaacagtgagcaaagctgatcttgatgttcatgaaagattaca

SEQ ID NO: 208830 - DNA, 419 bp, Gossypium hirsutum
accacgcgtccggatatgtttaaaatattggaatctttgctaaatttgttattatctgcaggtttttaggctttgcaccagcttgtaagataacatacggtttgatctggaaatgtcattttcaatggaagaagtggaaattaagcattctggagctaaagagcttagctatcagcaacaaaatgaaagctacgaagtatttgaagaagaggtgaggggatcattctcaccacagtcaggtggaaaccgtgtggataaacaagaatcaaatgatgcagaagcaactgaattgctggacaaggggtttatggagtatggttgcccacattatcgaagaaggtgccggattagagctccctcgtgtggtgagatatttgattgtcgtcactgtcataatgaggcaaagaacaatatcaatg

SEQ ID NO: 208831 - DNA, 403 bp, Gossypium hirsutum
cccacgcgtccgcagttgtctactgaacacaatgctaatatcgaggctattatacatgaactcaaggaattacacccgactgatccgcatattgttgttctcaagcatggagtatggagagtaaagggcattattcaggtttctaggtcgataggtgatgtttatatgaaacacgcacagtataacagtgaaccgattaatgcaagattcaggcttcctgaaccgatgaatatgccgatattaagtgccaatacaactattatttcccatgctctccacccaaatgattctatccttatattagcttgtgacggtctatgggaacacttgagcaacgaaaaagctgtggctattgaccatagtcatgcacatgcgggcagtgccaaaaggctagtcaaggctg

SEQ ID NO: 208832 - DNA, 430 bp, Gossypium hirsutum
gggagtgggtgatacagatccgaccttgaacaccacatacttggaagaactacgccaaatatgcccacagggtggaaatagtagtgtgttgacaaatcttgatcccacaacacctgatggtttcgacaataactacttcacgaatctacaagttaatcgaggcttgcttcgaagtgatcagaatttattttcgactgagggtgctgatacaattgaaattgtgaataggtttagtagtaatcaaacagctttctttgaaagctttgtggaatctatgatcagaatgggaaatataagccctttaacaggtacggaaggagaaattagatcaaattgccgcgccgtgaattcagcaactatcacatccaactcagatgctgctctcgtcagctcaatataatatttgctgaactgaaggctaagaaaaatg

SEQ ID NO: 208833 - DNA, 338 bp, Gossypium hirsutum
atttaacttaacagaagtactgctcaaaggaaaaattgttcatacagggaagaagtgcaggtggattgcttattggtgcacttcctaacatgaggcctgatttgtggaaggttgctgtctctggaatgcctctttgtgatcttctgacttcaatgctcgaccctactatccctcttacaacttcagagtgggaggaatggcgtgaccctctaaaggaagagatgtacttctatattaactcatcttcccctgctggtgatgtgaaggctcaaaattatccgtatattctcgttacagctggcttacatgatccgcgtgttatgtactcagaacctgca

SEQ ID NO: 208834 - DNA, 331 bp, Gossypium hirsutum
tgaataactatggcagagcaagtgctctaatccagcatgaatggcgcccaaaatcgctcatcacaatatctggagaggtggacaccggagcaattgaaaaaagtgctaaagttgggctggccttggcactcaagccctatgcaaaggcaaaactgtttttgttgtgtcatatggaaggtgggccttaattttgattggttgaggacttggagaaaaatagtgtactttcatggattataaaaataatgttattggcaaaccgaaattagcaatttgctttgttgaacaagtgttgcttacatctaattagttcaacttgtttacttctttc

SEQ ID NO: 208835 - DNA, 277 bp, Gossypium hirsutum
acgaatgtatagcaatgtatacaaaatctttaatagaacagcccatgttccccttttcttgtaaatagaattataattatccgtattctctgtaattatcgcatcttggaagcatgaccgggtacccgggaccgtgcaacgggcgtcttggaaccagatggccgacctagaaggttgctgatgaattcacccgccaacatgagctgtgccagatccacattcgtcttgacaccaaggccgtacagcatttacaccacatctttcgtgacaacatttc

SEQ ID NO: 208836 - DNA, 325 bp, Gossypium hirsutum
ggacaaagcctgagatagtgagtatgcattttgaggtactggctaaggttgatggcgagactgttataccggagagaatcatgcaggttaaccctgttgctgtggaggatgcaattgcaccacgtgtgctagcaaggaacatgaccatgtcttccacacctgttgtttacactccttcaaatcctttcaccttgtaaattgttagagggaaaaggatcaagagtctaaatagttatacagaacggtaaaggtgagatgaatcgattattctattccgtgtgccctcattaacatatttaatataaaggtaaagatgaatttatat

SEQ ID NO: 208837 - DNA, 445 bp, Gossypium hirsutum
cgaaacaatgtcagtcaggaggcatcggataaaggaggaggtaccaatgagacaccaaaatctctaaatcgtgatagcaagagcaatacagcagactcatctattgctggtgcttctcgtaattcatctctcgccagccaaagagatgtggaccagaatgtaatgggaacattgaagaatctggggcagtctatgcttgaacacattcaggttcttgagtctgttttccagcaagatcgagttcaagtgggatcagtggacaacttgggtaaaagcaatttacttggcaaaggacaagttacagcaatgacagctctgaaagagcttcggaagatcagtaaccttttgtcagagatgtgagatttcgtgttctacttataaaatctgtatatacattttgtagttacattggttttttaaatgcaaatgataaaatgatttttgt

SEQ ID NO: 208838 - DNA, 433 bp, Gossypium hirsutum
tgccacgcgttctgccacgcgtgcgcccacgcgtgcgaccacgcgtacgggtgggtggcatcacattcttccttttgtgcatccttggattaactttagctctttatcgagtgaagaagaaccagcttaaggaggaaatgagagagaaatatgttgaaagcctaccaacttcaggcagcagtttctggaaactctctagtgtccctgagcctttgagcatcaacattgccacttttgagaagcctctacgaaagctgaccttcggccatctgcttgaagcaactaatggtttcagtgcggaaagtttgatagggtctggagggtttggcgaggtctacaaagcacagctgagagatggctgcgtagttgcaatcaagaagctgatacatatcacagggcagggagacagaaagtttatggcagaaatggaaac

SEQ ID NO: 208839 - DNA, 396 bp, Gossypium hirsutum
gttcgctggcatgtggccaagatgacgaagaagaagcatgagccggggaatcagatggacgccaccaatgaccaccgcttcaacattaagaacattatgaaagatatccagtttcttggatcctcccacatgacatggaaggagaggaaagagatggagaataggaaggtggtttctttgggtggaaagccccctaagaggcagagattacctctgagtgttgctaaggcggtcatgaagaatcaaaagaaaagagaagagaaaatgcttcaagagaatatgattcttggtcgatttagaagaaagcttggtggtggtagtggcacttaaggatccacaaacaagcggatgcctgaggacagggttttgaagtcaagtgaacgtcattttaaaaat

SEQ ID NO: 208840 - DNA, 405 bp, Gossypium hirsutum
cggacgcgtgggcggactcgtgggcggacgcgtgggtccagaaaggttcattgatagcaatatagaccttcatggacatgattttgaactcatcccatttggtgcaggccgtagattatgcccagggaagaaattaggattaatcacagttaaacttattctagctcaattagtgcattgtttcaattgggagctacctagtggaatatcgccgaatgaactggacatgactgagaactttggtgtctcgttgccaaggaagattaatctatgtgtcaagcccacttatcgcatgtaaaaatgcaaattttatgattttttttgtgttttaaaataacaggatgtatacttataataaagggcattttaaaatggcatgtatttctttttgaaaaaatattaatt

SEQ ID NO: 208841 - DNA, 218 bp, Gossypium hirsutum
tgactacgtactggaaagcttattgaagatgtgatcaccgatcatgccctgtgtacatgttcatgactgtctttgctagcattgctgtgactagcatgctcgaaatgcacaggggaggcgttggaatacatgtttggtggagaaacaagcaactctgggtgattggtggtgtctcgtcacacctcgtggctctacttgcatggtctgctgaatgtttt

SEQ ID NO: 208842 - DNA, 441 bp, Gossypium hirsutum
ctttcaattcgttgtgcctttggggggtcaaagaaacaatacagaggaagatggtgtcagcgacgattgatctgttgaagaaagagcttcctgttgaagaaggctctttggttctttcgaaagatgttaagactggtcttgttcttgttgatgttgttaatggcttctgcagcgttggagctggaaatctggtaatttttccccataaaatgcactcaatttattatattttggatgaacagtaatctgggttttgtcttttgtttgttttgatgtttcgtgttcatacaggctccagtgaaacctgataaacaaatatcttatatggttaaagaatctgcgagactagccaagctattttgtggggaaaaatggcctgcttttgctttccttgattaccatcatgctgatattcctgaaccttcctacccacctcattgc

SEQ ID NO: 208843 - DNA, 209 bp, Gossypium hirsutum
gtccaaccaagtcccacaactccactacggatcgggttggagatggccccacctgatcctcggctcaggaagtacgtcaggtattatagagactttgctatggaactcaacatggctcttggtgtcgaccctagtgtggtcatctgcatgctccctgttggtgacggaactaccctgtgtcggctgactcaataaaacacaccgcacgc

SEQ ID NO: 208844 - DNA, 437 bp, Gossypium hirsutum
gctagaatgggtagtgcttggctacgccgcgggtgcagaagccatcatggttctcctcctcacgctacctggcctcgacggtctccgtaagggcttgatcgccgtcactcgtggcctcctcaaacccttcttgtcggtggtcccgttttgcctcttccttctgatggatatttactggaaatacgagacacggcctagctgtgagggcgattcttgtactccttccgagcatctccgtcaccagaaatccattatgaagagccaacgcaacgcgcttctcatagccgccgctctacttttctattggcttctttactctgttactggccttgttgttaaggtcgagcagttgaatcagcgccttgagaggcttaaaaatcgggattgagtgagataagtgcttttttttttttacaacgcttgtgtttgggctacac

SEQ ID NO: 208845 - DNA, 348 bp, Gossypium hirsutum
cattgctgtaattctgggaactgtcaacctaccgacttatcgaggtttttcaaggagaggtgccccgatgcttatagttacccaaaggatgacccaacacgcttgtttacatgccccacagggactaattacaagggtattttctgcccatgaagagtatttgggatggttttaagtcctttctatacacaaattagtaggggtatatcaataaatggaataaactcgaatgctctttgagcacatttcttgatgtgcatatgatctgattctggataatagagttctgcatgaatgaaaatttggagtctctatgggttttaaaaaaacttgttgtaaaattggagc

SEQ ID NO: 208846 - DNA, 427 bp, Gossypium hirsutum
tgtgaatggatggggtgaagttaccagaggcttgccattaaagacccctccattttaagacagaaccatactgaaaccccgaaacccacctatgatagagttcgagcaccatgaatttgatgagattgaagatatatcaaacacaaacaagttgtatgaagaagaagaaatggtttacaagaccttcctgtttgatccagataagcttggacaactcaaggaacaagcccttgaagatggggttttatccaaatgcaccacattcgaagtccttgcatggtttgtgtggagagctccatgcaaagcattaaacttggttcctcagcaaaaaactaaactcctctttgctgctgatgggagaaaaagattcataccaccattacctgaaagttttgcaggtaatgggattgttttaacatattcaatc

SEQ ID NO: 208847 - DNA, 199 bp, Gossypium hirsutum
cccacacgtacggcaatacaatggttggatgtcaaccagctagccccggccgatgaattacaggatcatattaaagagctcgagagcatctacgatcgtattattgccccaatgtaccaatgtgcaggggctgatatcaatcacagcctggatgaatatacaccaccaaccggttgacaagacccccgacctaaaatca

SEQ ID NO: 208848 - DNA, 383 bp, Gossypium hirsutum
accacgcgtgcgcccacgcgtccggttgcgttacaagaagcagaaggcactgttcgccgctgctgacggtatgtacaccggacagttcgtgtactgtggtaagaaggccacccttatggtcggaaacgtgttgcctcttacatctatccccgaaagagctgtcatttgcaacgtggaacaccacgttggtgatcgtggggttatcgctagggcttctggtgattatgccattggtattagtcacaaccttgataacgacactaccagaatcaagctaccatccggttcaaagaagattgttccaagtcgttgccgcgccatgattgggcacgttgctggtggttgtaggactgacaagcctcttataaaatctggtaatgctt

SEQ ID NO: 208849 - DNA, 377 bp, Gossypium hirsutum
agccaccaaagccaccggtttacacgccacctaagatagagaagcccgtacctaaaccaccagtacatgagtctcccaagaaaccaccgtatggtcactatccaggacaccctccattggggaagcctcaatagagagatcccatcggcttgcaatcccaagaaccgagctattatgactagctaaatagataaattagtatccatgcaataagagctgcttaatactcatgttctgtcttctagtatgtaatggattaatgttttcttttactagcgagagtgcttatggcagtactcattggaatgcctattttatggcttcttatttctcaatgagcaatatcctgatttctacacagattttaaaaattaata

SEQ ID NO: 208850 - DNA, 200 bp, Gossypium hirsutum
cccacgcgtccgcaaaacctgataattacaatatatagattgatgaagctcgaatcccatgggacatgaccgagagaaacaggcactctcggatacatggctccggggggccgttgtgggagtccatatcttcggacacgcgactgctacagcttaagtatatgcttatgggaaatatactgatgtgacaggccgtatgc

SEQ ID NO: 208851 - DNA, 342 bp, Gossypium hirsutum
gaaaccggggtacggagaccaactgcgcgctaacctaaaacccacaaaggggggggggcgcggaaaacaccaagacggggggcatgggaaaagaaaaccgcgcacgagcgggggacaacagagcggccgaagcaaccagcgaagaaaatggagggcgctcaagcgcgcgacccagacccggacgtcggggcaagggccaggccacgaagacaaggagggcgcgacggaacccaaaaaccaggggagcgagccaaggcggagcggaccctggggcaaatgaaggggggagagggaaagacacggaggggaacgtcgaaagccaaaaaggggaaagggcaaaag

SEQ ID NO: 208852 - DNA, 326 bp, Gossypium hirsutum
cccacgcgtccgcttgccagcaagacaatatggtctgatgatttggtggtagtctcaccagatgttggtggtgttgctagagcacgtgcttttgcaaaaaaattatctgatgcacctcttgctattgttgataaaaggcgtcatgggcataatgttgcagaggtcatgaatttgataggtgatgtgaaaggaaaggttgcagttatggtggatgacatgattgacactgctggaacaatcgcaaaaggtgcagctcttttgcatcaagagggggctcgggaagtgtatgcgtgtagtacacatgctgtttttagtcctcctgcaat

SEQ ID NO: 208853 - DNA, 370 bp, Gossypium hirsutum
gcggtgccaacgacagatctgaacaagaatacggagtggttcacgtacccaggggtttggaccacttatatcttgatggttttcatttcatggctcctcgttttatctctctttggcacctctgctggaaccgcttggacaattgttcatctcgcgcatttctttgtcacatatcacttctttcactggaagaagggaacaccgtttgctgatgaccaatgtatctacaacggtttgacttggtgggagcaaatagacaatggcaagcaactgacacggaacaggaagtttttgactgttgtacctgttgtgctgtaccttatcgcctcacatacaacagattatcaaaacccaatgctcttcttcaata

SEQ ID NO: 208854 - DNA, 310 bp, Gossypium hirsutum
cggagacgtccgggggggccaagggaagagttgtccgttatcgataacgggctgcccacggtgggaacggattaggccaaggtcatggttcaaccgggcagacagagcacccgatacttgggactgggacagtgcgcccccaagggtcgccggaaattcggaagaccgatcggcgtacacgcacctgcggacgcataaccgtatgaggtggccaaggagaacagcctctggtcaatggaacaatggaggcaacggaagacagttaaagggattcagcacctggggaaaaggattgcctatgatggctggg

SEQ ID NO: 208855 - DNA, 414 bp, Gossypium hirsutum
gcgaatacactgaagttacaagtgagtatgcaaggcaactgcgaggcctagcgagcaaaatactttcagcactatcaatttgcttgggattagaagaaggaaggctagagaaggacgtcggtggcgtggaagagcttcttcttcaattgaaaatcaattactaccccaagtgtgcacaaccagaactcgctctcggtgtcgaagctcacaccgatataagtgcactcactttcattctccacaacatggttcctggcctcgaactcttttaccaaggcaagtgggtgaccgctaaatgtgttcccaactccatcatcatgcacattggagacaccatcgcgatcctcagcagtggatagttcaagagcattctccacaggggtctggttaataaagcagaagttaggatctcat

SEQ ID NO: 208856 - DNA, 419 bp, Gossypium hirsutum
gccggaatttgggggaagcgctccggagaatccgagaaggagccgcgatgatccgaaccaaaggagaagcggggaccgggaatgttatcgaagctgttaggcatgtcacatccgtgatgggggatattagggtccttatgaacatggatgatgatgaggttttcagcttcgctaagaaaatccagtctccctacgatttggttatgcaaacgaagcagctggggacgttgccagtggttcaattcgccgccggaggcgtggccacaccggcggatgcggcgttgatgatgcagatgggttgtgacggagtgtttgtcggatctggggttttcaagagtggtgacccggctaagcgtgcccgagctattgttcacgccgtcactcactacagtgaccccaacatgcttgcggaagttaac

SEQ ID NO: 208857 - DNA, 371 bp, Gossypium hirsutum
gagggattggggaggcaacagtgatgctttttgcaaggcatggtgctaaggtagtgatcgcagatgtggaagacacgcttggaactgcgttggctaattctttgtctccttgtgtcacttttgttcattgtgatgttagcctggaagaagacattgagaatttagtaagttcaacagtttcccgatatgggcggcttgatatcctttttaacaatgctggggtgcttgggaatcagagaaagcataaaagcattgttgatttcgacgtggatgagttcgataatataatgagagtgaacgtgaggggaatggcgctgggaatcaagcatgctgcacgtgcaatgattccccgaggtggtgggtgcatcatt

SEQ ID NO: 208858 - DNA, 344 bp, Gossypium hirsutum
tctaggcatcactgggctctatgtttgacacgagaccttgttgacatccactcatttcactgctaatgcatctgaaacgtgtatgtgaacattggaactgtggaattgcctaatatgccactcgaattgcctgttttatctttagtcatgggacggaagcttattggaggaagagatgttggagggatgaaagaaactcatgagatgctagacatctgtgacaagcacaatatcactgcagatatcgagctgattcagattgacgaaatcaatacagccatgggagggcttgctgaaattgatgtcaaataccgatgcgggactgacgtgtcaaataacatgac

SEQ ID NO: 208859 - DNA, 400 bp, Gossypium hirsutum
tattggtaccatggactatatcattgacacagtgtctgcggtccatcccctacttccactgcttagtctgctgaaggtgaatggaaaattggtcactgtgggattgcctaataagccactcgaattgcctgtttttcctttagtcatgggacggaagcttattggaggaagtgatgttggagggatgaaagaaactcatgagatgctagacttctgtgccaagcacaatatcactgcagatatcgagctgattcggatagaggaaatcaatacggccatggaaaggcttgctaaatctgatgtcagataccgatttgtgattgatgtggcaaattccttgtcacagtacggttcattgtgaaagaactagtcccagtaggttaaagattatgatcttaat

SEQ ID NO: 208860 - DNA, 293 bp, Gossypium hirsutum
tctgtgaacaactagaaaatggccggaccctggctgattacaacatccaaaaggagtacaccctccatttggtgctgcgacttcgaggaggaatgcaaatctttgttaagaccttgaccggaaagacaattactttggaggttgagagttcacataccattgacaatggcaaggctgatatccaggacaaggagggtattgcgacagaccaccagagggtgatccttgctggtaaggaattaaaagatggccgtaccctggctgactacaacatccaaaaggaatggaccctt

SEQ ID NO: 208861 - DNA, 372 bp, Gossypium hirsutum
gagggattgtggaggcaacagtgaggctttttgcatggcatggtgctaacgtagtgatcgcagatgtggaagacacgcttggaactgcgttggctaattctttgtttacttgtgtcacttttgttcattgtgatgttagcctggaagaagacattgcgaatttattaagctcaacagtttcccgatatgggcggcttgatatcctttttaacaatgctggggtgcttgggaatcagacatagcataaaagcatctgtgatttccacgtggatgagttcgatcatataatgagagtgaacgtgaggtgaatggcgctgggaatcaagcatgctgtacgtgcaatgattacccgaggtggtgggttcattattt

SEQ ID NO: 208862 - DNA, 363 bp, Gossypium hirsutum
accagagacaacaacttgctcggtaaatttgagctctctggcatccctcctgctcctagaggtgtcccacagatcactgtctgctttgatatcgatgctaatggtatcttaaacgtctctgccgaagacaaaaccactggacaaaagaacaaaatcaccatcacaaacgacaagggccgactcttcaaagaagaaattgaaaagatggttcaagaagcagagaaatacaaatccgaagatgaagaacataaaaagaaggtcgaggcaaagaatgcattggaaaactatgcatacaatatgaggaacacagttaaggacgaaaagattggtgccaaactcccagcaactgataaaaagaagatc

SEQ ID NO: 208863 - DNA, 249 bp, Gossypium hirsutum
ccggaatgacggagcgacccacgcgtacggaaagaatccccccggaccaacaacgcctcataatagccgggaagcaacacagggatggccggaccctagccgaatacaacaaccaaaaggaatggactcgccacctggacagacgcctcaagggcggcaccaagaagaggaagaagaagaccgacaccaagccaaagaagatcaagcacaagaaaaagaaagacaagctggccgggctgcaaaaataca

SEQ ID NO: 208864 - DNA, 403 bp, Gossypium hirsutum
ggcgtattcctttatcgacaattgacagcctctatccttttggcccacacttgcattactgcattcgtatagacacgctttgcggatcattgtcttgcctgtttactgccggcaccccccccatttgccttatttggcctttatcatctatgatacgtccctctttcaaggcatcacttgcaattggatcaacaaacgcttcttattttcctcatgaatccatcatgggaggaggaaatagccaataatccaagatggcccgtgagaagaacttggaaaagcaaaaagctgctgccaatggaagccagcttgagtctaacaagaacgccatgtccatccagtgcacggtgtgtatgcaaacattcatgtgcaccacaacggacgtgaaatgtcgagagcacgc

SEQ ID NO: 208865 - DNA, 411 bp, Gossypium hirsutum
agcaaatctactgatctcccaaccatggcgttcgtgaaactgttcggagcttggcttagttcgtacgtattcagagtaagttgggctctgaaactcaaaggcatacttgacgaatacatcgaagaagatctctgcaacaagagtcctttgctgcttcaatataatccaattcataagaaagtaccggtcctagatcatgacggaaaacccatgtgcgaatccagcgtcattcttcgatatatcgatgaaatttggccgaaaagtccattgctgtcggctgatccctatgacagagccgttgctctgctttggatcacatttgctgatgacaagagtcctataatagcaaagctttatcgaacacgaatgtgaagaacaacatgtggtagtgaacgagtgcgtgtgaatgct

SEQ ID NO: 208866 - DNA, 384 bp, Gossypium hirsutum
acgcgttcgaagttcagtatgattgcagctgggacaggataatgaaactgggaattctagagattcctttagaccacttgatcagattcagtggaatttcagtctcacagatctgactgcagacttgtcaaacttgggagatctaggtgcccttgggaattaccctggttctccttttcttccctctgattcagaaattttgcttgattcttcggagcaagagaatatagtggaggaattttttgttgattctgtccccgaacagccgtgcttctcgtctgatgaagataaatcctagataaaggttagtaacgttccttcttgaaattgttaggaataagaacaagatttgacatctatttagtatgcatttttaaattttga

SEQ ID NO: 208867 - DNA, 360 bp, Gossypium hirsutum
tgctgccccaaggataagtcaattaagaggtttcttgtgaggaacattgtggaacaagctgctgttagagatgtccaagaagcctgcgtttatgacacttatactttgcctaagctgtatgttaagatgcaatactgtgtctcgtgtgcgatccactcccacgttgtgagagtccgatcccgcaccgataggaggaaacgtgatccacccgcccgcttcatcagacgcagggatgatatgccaaagcctggtcagcctggtcaagcaccacgtccaggtgttgcagttcctgctcgtgcttaaggcctgtgaaaagcttttagaatacattttctatattcctaatttggttttaaaatg

SEQ ID NO: 208868 - DNA, 430 bp, Gossypium hirsutum
tcgccgaccccgtgcatctgataaatccctaaccccttccctcctttttttcccccaaatcgaagatccatcttcacctccgccgatccaccatttcacctccggtcctccacgactccacctgtgctctaacagtgcttctagccttgtacgtcttctacctttgaatttcaaagctcatcagatggtaatgttcagtgctacatggcctgcagcggttcatcggttagctcaggagtacatggaccctaatcctgttaaggttgtgattggctcagaagatttagctgccaaccatgatgttatgcagatagttgacgttttagatgatcgtgcacattatgagcgattgactgcatttaaaatttctcttcattggctaaatagaatgggcagcatttaaaatttgtactctggatgtgtgtgttct

SEQ ID NO: 208869 - DNA, 332 bp, Gossypium hirsutum
gccagctccatttgtgttgcacactgactgtcctcactattggcgctatcatctagaaggggagacggaagaggagttctcaacacgattagccaacaatttagagaacctcattctgaaagagggtccagagacgattgctgcatttattgccgagcctgttatgggagcaggaggtgttatacctcctcctgctacttattttgagaagatacaagctgttgtgaaaaagtatgacatactttttatcgccgatgaggttaactgtgcatttggaaggctttggacgatgtttggatgtgacaagtacaatattaaaccagatcttattt

SEQ ID NO: 208870 - DNA, 413 bp, Gossypium hirsutum
cgcgtccgagcagatgctgctgaattctgcaagtctctctcggcattaactgctcatgaaggagctactgttgtttcaacaattaatcgctctatgagatcatatgcaactgccattgttgcagcagagtacctgctacaatggctacctaaaggtactcatcaatggtcgagtttcctgaccccagaagaactcaccaagattttaaaatgtgcaggggttgatgtaagcaaaccaagcaatcccgttgatatctgaaactgaactaaccactgtgcgttatgactaacctctgcgctgctgaattgttgggtgaataggtgaaagagatggcgggatttgtgtacaaccctttaacagggagttggtcactattggatgatattagtgtaaattttattgcttatggtact

SEQ ID NO: 208871 - DNA, 268 bp, Gossypium hirsutum
ttcgggaaagaattttggaggtggggttgcctcttgagccatatgagtggtatcttgacctgcggcgatacggaactgttaaacattgtggattcgggctaggctttgaacgaatgattctctttgccactggcatcgagaacattagagatgttattcccttcccaagatatccgggaagagctgatctctgattggatttttctaagatgacgtgagaaaatggtcttggttttcaagttaatactcatgggttttagtaaatttt

SEQ ID NO: 208872 - DNA, 279 bp, Gossypium hirsutum
gtgctaccttccttctgtaatggccactgctacaatgttgcacgttgtggattgcgtagaacctaatcttagagttgaatacgaaaaccagctattaggcatcctgggaattgataaggagaaggtagatgaatgctgtaagctgataacagatctggtaacaacaatagttcaagggaacctatcaaagaaacgtaggtttagtagctccattccacgcagcccgaatggcgtaatggatgtgtggtttagttccgacagctcgaacgattcgtgggc

SEQ ID NO: 208873 - DNA, 107 bp, Gossypium hirsutum
tatgtattaatgttttcttttactagcgagagtgcttatggcagtactcattggaatgcctattttatgtcttcttatttctcaatgagcaatatcctgatttcaac

SEQ ID NO: 208874 - DNA, 377 bp, Gossypium hirsutum
cgtccggaggccgcggctttcacttcccttctctcacctcttacagaagccagaagtcagtttagtagcaatggcgtatgctgcgatgaagcctaccaagccgggtttggaggagccccaagagcagattcacaagatccggatcactctctcctctaagaatgtgaaaaacctagaaaaagtttgtgctgatttggttcgcggtgcaaaggataagagactgagggttaagggaccagtaagaatgcccaccaaggttcttcacatcacgaccaggaagtctccctgtggtgaaggaacaaacacatgggatcggtttgagctccgtgttcacaagcgagttattgacctattcagttcccctgacggggtgaagc

SEQ ID NO: 208875 - DNA, 298 bp, Gossypium hirsutum
ggaacagatttcaagtatcaatatgcacacacatggttccggcaaatggacaagttcattcattatgttaatcaagatggacgtgtgaatgccctatattctaccccatcgatatatactgatgcaaaatatgctacaaatgaagcttggccactgaagactgatgactactttccatatgcagaccgtataaatgcctactggactggatattttacaagccggcctgcactcaaaggttatgttaggacaatgagtggctactatttggtaagatgtatattgtacaagcccaatc

SEQ ID NO: 208876 - DNA, 364 bp, Gossypium hirsutum
ctcactcaacattcccatttccaatctccagctcccaaggtaaatatgccgatcagaaacatagcggttggccggcccgaagaggctactcaccccgatgctctcaaggctgctttggctgagttcatctcaaccttgatcttcgttttcgctggatcgggctcaggaatggcctttaacaagttgactgacaacggagcaaccaccccggctggtctcgtagccgccgctctagctcatggcttcggtcttttcgtcgctgtctccgttggcgccaacatctcaggtggccacgtcaaccctgccgtcaccttccgtgcttttgttggcgggaacatcactctcttgcgcggcattctttact

SEQ ID NO: 208877 - DNA, 425 bp, Gossypium hirsutum
gacaatgtgaaggcaaagatccaagacaaggagggtatccccccagaccagcaaaggctcatctttgctggcaagcagctcgaagatggtaggacattggccgactacaatatccaaaaggagtctacccttcacttggtgttgcgtgcgtggtgggatgcacatctttgttaagactcttactggaaagactatcactctagaggttgaaagttcagacaccattgacaatgttaaggcaaagattcaagacaaggaagggatcccaccagaccagcaaaggctcatatttgctggcaagcaacttgaagatggcaggacattggctgattataatatccaaaaggagtctactctgcatcttgtccttcgccttcgcggaggtttctaaataaggattgcttgccgttgttgtggcctttttt

SEQ ID NO: 208878 - DNA, 352 bp, Gossypium hirsutum
  unsure (1)..(352): unsure at all n locations
ggaggccacaaggtagaggactaccgcaacacttttgcaaaccttgcactgcctctgttctccatggctgagccagttctacccaaagtcatcaaacacggtgacatgagctggaccggttgggaccgatggatcctgagagacaacccaactttgagagaactcatccaatggctgaaggataagggcttgaatgcctacagcatatcaatcaggcagggagattaagttcttctaccatggggtggccacgtccttgaaagtctttgtataatgtatagtatattagtctgtcacaatttgtattgaatattgcgtctatttaataacagaagtnaccttttctttattc

SEQ ID NO: 208879 - DNA, 320 bp, Gossypium hirsutum
agaaaacagaaatggctcgctctttctcaaacgctaagcttttctctactttcgttgtcgatggaatctctaacgttatctccagacgaggatatgcggcggcgtcacaaggaattgtgtcgagtggaataagaggaggagcaggaaggagcgctgctgcggtagtcaagaaaacaggggaagagatgtctggcggagctaaagagaaggtttcatgggttcccgacccggttaccggatgctacagacccgaaaactgtgccaacgagatcgacgtggcggagctcaaaaccaccctctttgagaagtagttaattaac

SEQ ID NO: 208880 - DNA, 291 bp, Gossypium hirsutum
cctatactaaagtcaattacattactctactttcacttgttctagctttatcgcttgtatgtgatactttttcccttctcgtcctcctgggcctccttgccgcttggctcttcttatacttgttccgaccgtcggatcaacctctcgcaatcttcggccgtacattctccgatcgtgagacgcttggcatcttggcggtgctgacggtattcatcgtgttcttaaccagcattggctcgctcttgatctccgccatcttgtttggagttgccattgtttgtatacaccgtg

SEQ ID NO: 208881 - DNA, 378 bp, Gossypium hirsutum
ggaacaattcctaccagtggtccatttgagcacattcctttgagcaacttcgaggaaaaccctcgtctcgaaggcccggagttgttggggcttgcaagttacgatacaaactgctcgtgaagaaaccgattgatgctacaaaagtttcgaatttaaatatgtagtcacaagattttaagtgtattatcagagtataatggggtaattgtggaaatgcaatctcgtataagtatctgtaaatcagaatttattagcatatgtaacaaaaactatcatgctcttcctatgatgttttcagacaaactagtatttgatgtaatggtagcgacaaggttacttcttgtgtgcaaaaaaaaaaaaaaaaaatttttatttttt

SEQ ID NO: 208882 - DNA, 307 bp, Gossypium hirsutum
cttctacttaaggttccaccaacattgacatttgtgatggatggtgaaatgcctacttatctgcttgcaaaggatttgattttgcacatcattggtgaaatatctgtagccggtgcaacatataaagccatggagtttgtcggcacaacggttgaaagtctaaatatggaagaacggatgacgttatgcaacatggttgttgaagctgggggaaagaatggagtcgttcccgctgatagtactacatttaagtaccttgagggtaaaacatccctgccatatgaaccagtttacagtgatgcacaag

SEQ ID NO: 208883 - DNA, 374 bp, Gossypium hirsutum
gcggcgatgagatgcagatcttggtccaaaccctcacggggaaaaccattaccctcgaggtcgagtattgcgacaccatggactatgtgaaagccacgatgcaagacaaggaaggcattcctacaaatcaacaacgccttatcttcgcccggaagcatgattgaagacggccgcaccttatccgactactatatccagaaggaatgcactcttcacctggtgcttcggctacacagcggtgccaagaagaggaagaagaagacctacacgaagcccaagaagatcaagcacattaagaagaaggtcaagctcgccgctctgcaattgtacaaggtggacgagtctggtaaggttcataggctgagaaaagagtg

SEQ ID NO: 208884 - DNA, 362 bp, Gossypium hirsutum
attggttgcgaggagcattgtcgacgatggatcgagatttcggggtgttgaacaaagtgttccataacatcaccgatacgcatgttgctcatcacctcttctcaacgatgccacattatcatgcaatggaggccactaagcaatcaaaccaatactcggcaagtattatcctttcgacgggacaccgatttacaaggcaatgtggagggaggcaaaagagtgcctttacgttgagcctgacgttggtggtggtggtggtggtagcaaaggtgttttttggtatcgtaacaagttctaaagaccgaccaactgcctgatagctggccggcgaaatcaacgtaaaacgtacttattagactagt

SEQ ID NO: 208885 - DNA, 403 bp, Gossypium hirsutum
cggacgcgtgggtttcgtgtttgtctattgaattctttccttcactttctcgagaaaaaaaaaatgtcttcagggtgcaattgcggatctagctgcagctgcggatctggctgcaattgcagtgagaactgctcaatgaaccttaaccttggatactcggagaagacaaccagcactcagaccatcatctccggagttgcgccagtgaaaatgacctttgagggaccacgagatgggcactactgaatcatgacatggatgcacctgtggatcaagctgcaaatgtaatccatgcacctgttgaaaagcttgatgaaagccatagattattaaaaaagaaagcagcataataacaagcctctgtaatgatttattttcaaagatggatgccttgcaaggctat

SEQ ID NO: 208886 - DNA, 312 bp, Gossypium hirsutum
tcgcccacacgtgcggatcattgcaattgttggtcttcaacgaggaattcctagtaagcgcgagtcatcagctcgcgttgactacgttcctgccctttgttcacaccgcccgccgcttctaccgattgaatggtccggcgaagtgttcggatcgcggcgacgtggtcagatcgctgcccgcgacataactagaagttcactgaaccttatcatttagaggaaggagaagtctttacaaagcttccgtaggaaacctggggaggatcattgtcgaaaccttcaaaaataaaaaaaaaaaaggggggccggttt

SEQ ID NO: 208887 - DNA, 421 bp, Gossypium hirsutum
gagaaacgagtttgtcatacgcctgcaaccttctgaagccatgtacatgaagctaaccgtgaagcagcctggtctcgagatgtcaacagtgcaaagtgaactagatttgtcatacaggcaacgctatcaaggtgttacgatcccagaggcttatgaacgtcttatactcgacacgataagaggtgatcagcagcattttgttcgccgggacgagttaaaggcggcatgggagatattcacgcctcttctacacagaatcgacaacggtgaaatgaagccaattccataccgaacaggcagccggggtcctgcagaagcagatgagctctcggctaaagccggttatgttcaaacacatggttatatttggattcctcccaccttatagaaacattatatatatctatatatatatatatag

SEQ ID NO: 208888 - DNA, 327 bp, Gossypium hirsutum
tcgggctagtgcaacagcaacattcgtaatgatgttctcttcatccttattcgctgttgagttgtatttgcttaagaggttcccaatgccctatgctttgtacatgatgggagtatctattttggctggattctggggacagtatttcgtgagaaaactaataacaatccttaggagagcttcacttatagggttcatcctatcaggcgtcatctttgcaagcgctctcaccatgggagtcataggcattgagagaagcattcgaatgattcacaaccatgagttcatggggtttttagatatttgcagccgccaaagaacgttgac

SEQ ID NO: 208889 - DNA, 336 bp, Gossypium hirsutum
aaaccgcttcagctgtgtagtggtatgaagaccaaagttgataacatgcatatcgagaatgataacatcatcgcgaacatcattaaggaacatagagagagaagggcccgagaaaagagcggtcacgccgaagctgaacaagaagatctcggtgcagtgctcttaaagattcatgaggagaatgagctctacttggctgacaagaacatgaaatcaatcatcgtggacgcttttggtgcaggaagcgaaacatcatacacaaccgaagagcgggcactcttcgaaatgataaataattcatgggtgatgaacgacgcccaagctgaacttaggcga

SEQ ID NO: 208890 - DNA, 342 bp, Gossypium hirsutum
gctgatttgttgggctcagtgcgcgttgttgttggaccgtcgaggaccaaatgctgctctctcatttcgggtttggctgatctcgatgctgctgtttgcctttgcactgctattaaagctaatgtgttgggggttaacctaaacgttcctgtttcattgtctttgctcctcaattcctgcgaaaagcaaatgcctgctggttacaaatgtgcttaagctcatttccactgtttcctcagcaatgtttggggttttcttttacgtgttctttttttttttgggcttgtttaattggtattttatatgtcaagggtagataaatggtaaggttcttttacctta

SEQ ID NO: 208891 - DNA, 300 bp, Gossypium hirsutum
ctctgattcgtgttcgcagattttataagctgaagaatataccgcaaagcaaagacaaaaagcgaaaataaataaatgagagcggtcatttttcatcaacaattttcgaggaaaagaagaagcgaatcaatcagaatggagacaggggggagaggcgaaagaaagattgtcgagcctgcaagcagcaagcaacaacggctgaaaagccgttgcgcgctagctaataaaaaaaaaactttttataattattttttcgtttgataggtagtttgtttttgtattatttaattggtttaattt

SEQ ID NO: 208892 - DNA, 381 bp, Gossypium hirsutum
cccacgcgtccgactggacatactcttcggctttacagtttccttctacattagagaaggggctcgcaaaaatgatgtcattaaaaagcaaatttggtggcttattgagtcagatgacccgtctttttgggatggatgatgaattcggggaggatgcaattttggggaggcttgaaggcatgaaagatgtgatcgaacaagttaataagcagtttaaagacccggacatgacaaccttcatctgcgtttgcattccggagttcctctctctatacgaaacagagagactggtgcaggaactcgccaagtttgagatagatacacacaatatcatcatcaaccaagtaattttcgatgatgaagatgtcgagtccaagttat

SEQ ID NO: 208893 - DNA, 273 bp, Gossypium hirsutum
aggatatgaactgtccggaactcatgttcatctattgggactaacatcaaatgctcccatggatgtcatttgggacatcatgcgctgctgggttaaaaatcatccagtgtaagctcaaccgtatgaacagtctggaagagtgatacttgccaaagaaccagttcttcaagcaaattttgctcgagctgatgcattccttatcacggcacaagctaagaaggatgctcgctttctaccgaatcctgaaaggcactgggggccaaagcttatggc

SEQ ID NO: 208894 - DNA, 352 bp, Gossypium hirsutum
tcggccacgcgtccgcggacgcgtgggttaaggtcttggcaccacttcctattggatttgctgtggtcatgggtcacttggcaactattccaatcaccggcaccggtatcaaccctgctcgtagctttggggccgctgttatctacaaccaggacaagccatgggatgatcattggatcttctgggttggaccatttattggtgcagccattgctgcaatctatcaccagtttatcctgagggcagctgctgttaaagctcttggatccttcaagagcagctctgccatgtaattaaagcaaaataatctccagccacaagtttaaacaaaaaaaaaaaaacgggggggggg

SEQ ID NO: 208895 - DNA, 265 bp, Gossypium hirsutum
tctgaattagactactttattgttggccacatgatcgagttcctttgcaagaaaggaaagcagattggcatgctggcttaaacaacagagttggattcaaggatctgatagccaatggcattgaagcggggactatccagtgtgggcgtccaaaggaatagaagttctggatatcgcttgcgtatcgagatacttcttttcttctcaaatctgatgctcattgctttgagttcattacaaatctggggcttgcaggttcacactc

SEQ ID NO: 208896 - DNA, 418 bp, Gossypium hirsutum
agggctaaggcaagagggagtgaaaatggttgagaaaacaagaggaagaaaggaagaggtggtgaccagggagtacaccatcaaccttcacaagcgcctccatggctgcacattcaagaagaaggctcccaaggctataaaggagatcaggaagtttgcagaaaaagcaatggggacaaaggatgtgagagtcgatgtcaagctgaacaaacacatctggagccgagggatccgaagtgttcctagaaggattagggtccgcattgctcgcaagagaaatgatgatgaagatgcaaaggaagagctctactctctagtaactgttgctgaaatcccagctgaaggattgaagggtttgggcactaacgtcattgacgatgatgatgagtaaattattgatgtttagttctattaaaaa

SEQ ID NO: 208897 - DNA, 437 bp, Gossypium hirsutum
cgcggtggtgctgttttcgggttataagtcgtacggcggaggcagtgacatgtaagcccgtggagcttgccccctgctcgccggcgcttacgtcgtcctcgcctacatcaagcgcttgttgcagcaagctgaaggcgcagcagccatgcctctgtggatacattaagaacccatctcttaaacagtatgtcaacagtcctaacgctaaaaaggttgcttcgacttgtggagtcccatatcctaagtgttaaatggtgcttaatggtgtatctactatttactggcagcaaataagtgattctttttgctgtcaaggactgttctgaataaaaaaataatgattaaatattagaataaaataaaggaatatgttacttatggtggaagaaaatgataattaagatgggttacagtttctccattgtgaaaatattgct

SEQ ID NO: 208898 - DNA, 389 bp, Gossypium hirsutum
ctcacacgtacttctactctttgaactacaagtctgaattaacattaaaatcatgggtgtatgcagatatgaccatgaaactaccttcccagtcgccccagcttggcttttcaaggcttatactgttgaagcctcaaaggtttggcaccgcggctgctcctaatgcacccaagagtattgagggtgaagctaattctactttcggatgtatcgtaaaaatcaactttgttgaaggcttttcattccaatatatgaagcaccaaattggaagacatgatgaagataatacttcatacagttacagtttaattgcacgtgggcctttgtgggataaactcgaaaagattagctgttacaacatgtttgacgcaactgcaagtggaggaagt

SEQ ID NO: 208899 - DNA, 453 bp, Gossypium hirsutum
tcgtaaaatgagcaccaaggaagtgttgaacatatgctaaacgttcaaaacaagaactcatcctactttgttgaatggattcccaacaacgtgaaatcaaccgtgtgtgacatcccaccaaccggtctcaagatggcatcgacattcatcgggaactcaacgtcaatacaagagatgtgtaggcgcgtgagcgaacaatttacagctatgtttcgaaggaaggctttcttgcattggtatacaggggaaggcatggatgaaatggaatttaccgaagcagatagtaatatgaatgatttggtatcagagtatcaatagtatcaatgatgcatcagttgatgaataataagagtatgaataagaatgagctgtatttgaatgagaaaatttatatttgaactcatgaaatataatttccaggttctggtttttttatataattttgctaaagaa

SEQ ID NO: 208900 - DNA, 389 bp, Gossypium hirsutum
ccgccatcttcaataatttcttccgtcgatttttgttagagattagctttttaatttttcattatgggaaagatcaagatcggaatcaatggatttggaaggatcgggcgtttggttgcgagagttgctctccaaagcgatgatattgagctcgttgctgttaacgatcctttcatcaccactgaatacatgacctacatgtttaagtacgacagtgttcacggtcaatggaagcatcatgagcttaaggtgaaggactcaaagacccttctctttggtgaaaagcctgtcacagttttcggtatcagaaaccctgaggaaatcccatgggctgaggctggagctgagtatgttgttgagtctactggtgttttactgacaaggacaag

SEQ ID NO: 208901 - DNA, 381 bp, Gossypium hirsutum
cccacgcgttcgctgatggatctcactgaataaaggtagagaggaatggtcaaggtacttagtggtggctataagattaaatatcactcatgatggccgtgaaagtgatccaatagagatcgatagtagtccgtctagtccgtggcttgacatggtctgggaataacaaaagattggttacctcagcatacacaaggacttttgctgagatgaaactagccaatatttgatggatgcatgaccaaagtttgggatcaaatgcactcttcctgatacaacagcacgtttattagaaaaacttggtggatattttctagaagaggactctgtggactctactctcatcatgaacccattctgtaataaagagggctttttgct

SEQ ID NO: 208902 - DNA, 443 bp, Gossypium hirsutum
ctttgcagcacggatctactgttttgattgttgtgcatgtgataactgtttgaacaagccagattatgaggatattgttcttgatattccacatcaaattgaattgcgcacaaaagcggatgcaaatgcaggtggtcaaaatgcctaaaattgtattgcgagtgctatcgcgtttaggatgccactatgaggattgtgacaattcttttggcaagaagtcatattgacggagaagaaagatgagtgccgaaaaagaattctctgtctctcaacgtcgcttggcctgcactagatgcttaaacgctctctggttgtgctattctccggtcattaattgcaacagtattacagagaaggaagtgtgcattattgctattgaaaatggagtgctttttgtgattgttggattttaaaaccaagcccttttttatactccaggaaat

SEQ ID NO: 208903 - DNA, 330 bp, Gossypium hirsutum
agcagcctctcctggtggtggctttcgcctataccctcggcaaagttggaccatcgatgtgcctgctggcactgctatggctcgtatttggggtcgaaccaattgcaatttcgatgccagtggtaggggtcattgccaaaccggtgattgtggtggactccttcaatgcaaaggttggggtgtacctccaaacaccctggctgaatatgcacttaaccaatttggaaacatggatttctacgacatttccttaattgatgggtttaacatccccatggtgtttggtccaactaatggcgggtgtcacaacattctggtgcactgcagaca

SEQ ID NO: 208904 - DNA, 323 bp, Gossypium hirsutum
  unsure (1)..(323): unsure at all n locations
cccacgcgnccgtgaacactcttttatcatcttgaagaagattcttgatacataggatgggggtcaaggactaaaaacattggtcgatgttggcggtggtaccggtgccacgcttagcatgatcgtttttaagtaccccaccataaaaggcattaacttcgatttgtctcatgtcattgaggatgctcctagctgtcctggtgtggagcatgttggtggagacatgtctgttagtgtaccaaaaggagatgccattttcatgaagtggatttgtcatgatgggagcgacgaacactgcgccaagtttttgaagaactgttatg

SEQ ID NO: 208905 - DNA, 434 bp, Gossypium hirsutum
cccacgcgtacgcccacgcgtgcgtccacgcgttcggtcggatggtaaattgacatcacttgatcagtacatctcaaggatgaaatccggacagaaagatatattctacattacaggaaccagcatggaacaattagaaaaatctccattcttggagaggcttaagaagaaaaattatgaggtaattttcttcactgatcctgatgatgagtacctgatgcaataccttatggattatgacggaaagcagctccaaaatgtatccaaggagggcctgaacatctggaaagaaaagaacaaagaactcaaggagtcatttaaggaactaactaaatggtggaagaatgcacttgctagtgataatgttgatgaagtgaagataaacaaccgtttggacaacactccttgtgtgggtgatacactaaaatacggat

SEQ ID NO: 208906 - DNA, 426 bp, Gossypium hirsutum
caagaaactgctctctctgtcttaacgctataatcattgaagaaaaatgggtttgaaggaggaattcgaggagtatgcggagaaagctaagacccttccccagaacactaccaacgacgacaagctcattctctatggactctacaagcaagctactgttggaccagtgaacaccagccgtcctggaatgttcaacatgaaggaaaagtacaagtgggatgcatggaaggctgttgaagggaaatcgaaggaggaagcaatgaacgattatattactaattgtaaaacagctgcaagaggctgctgctgcattttcttgacgtgggtgtgagaatagaaaatggtgctattttaagccctttgatacctatggtgttgaaaagggctaaaacttataaaaagcaatgtactattttttatttggta

SEQ ID NO: 208907 - DNA, 391 bp, Gossypium hirsutum
caaggaggggttacattagttgcatgttgtttatctgccgcagaacaagccagcgttcccatcactggtcactttgaccatggtacttcaaagcaagaactattggaatctcttgagctgggctttgattcagtaatgggggatggttcacatcttccctttaaagataatatctcatacacgaagcacatatcaaacttggcccacttgagggatatgctcgtggaggcagaacttgtaagattgtcaggaacggaagatgatttgactgttaaagattatgaagcagagctgactgatattaattatgctgatgaattcatatttgagactggcgtagatgcctttgcagtatgcattgtgaatgtacattgaaaatacccagcaagtg

SEQ ID NO: 208908 - DNA, 445 bp, Gossypium hirsutum
cgaggctgtgccgggttttgagctagcaattcagacgtacgccattcatgtcctgtccctgacttaccaaaagattccaagacctgtacttgctgaggctattaacatcgaaggtctatccttggacaaattccttgaacaccaggcggccaacagcggttggattcttgagaagggtcatggcaggggtcaactaatagtcctacctcgaaacgaatttaacgatcctgagctgaagaaaatcgctgctgatagagttccattggagcacatcacccgcattttccccattcttggttaagcctctagctgggatgaacacctttttggagttatttgtgccatgtttttgttgacattgcgaccattctctttggttttttgccttggatatatatatataactgaaaaaaagctatttaaggattaacttgtcaagctaccc

SEQ ID NO: 208909 - DNA, 437 bp, Gossypium hirsutum
ctctccaattcaatgggtttatttcttcagaaaacaaatataatccgagattatctcgaggatatcaatgagataccaaagtcacgtatgttttggcctcgtcaaatttggggtaaatatgtcaacaaacttgaggacttgaaatacgaggaaaactcagtcaaggcagtgcagtgcttgaatgacatggtcactaatgctttaatacatgtggatgattgcctaaaatacatgtttgctttacgtgatcctgcaatctttcgattttgtgctatccctcaggtcatggctatcggaacactagccttatgctacaacaacatcgaagtcttcagaggcgtagtgaaaatgaggcgtggtctcactgcgaaagtcattgaccgaaccaacacgatggctgatgtctatggtgctttctatgatttttcttgtatgtt

SEQ ID NO: 208910 - DNA, 265 bp, Gossypium hirsutum
ggcgcggacacgaggaaacagcaacattctgcggacaagaagcactcgcccgcgccggggatcggggcacagggagaagcaaaccgcctttcgaaggccacgtgaagccgcgacgtggagccagccaaccacccaacggccaacacaaaaccacaggaggcgaagatagcacaaggcggacccgggattagaggaacaaaaagaccaagaatattagaccagcccacgcaaaacacatatcacaagcgaaggccgagccgcaaag

SEQ ID NO: 208911 - DNA, 436 bp, Gossypium hirsutum
gcttctataaacaaagagaaactttgtgtgaaacaatggcgtcctcggatcttaggggcaagctcgagactgatgtcgagatcgatatttctcccgaaaagttccaccatatgtggtgccacaggccgcaccatgtccaccacactagctctgaaaaagtacaaggatgcgatttacatgaaggtgaatttggaactcccggcgtcgttatctgctggagatatgtgcatgatggaaaggctaaaactgcaaagcaggtcgttgaagttatggaccatgagaaaaaggcaataactttcaaaatgcctgaaggagatctgatggaggaatacaaaaagcttcgggattacaaaccaaacttcccccaagagcgacgggtaaggcagcataatgcactggactctggaatatgaaaagctggacgaggggattggac

SEQ ID NO: 208912 - DNA, 331 bp, Gossypium hirsutum
cccacgcgtccgcccacgcgtccgcccacgcgtccggaaaggtggtgatggctcctttcaagtggacaacagttctaggagcctatatttccattaaaatatacttagcgcttgatgtgctacaagggcccagaatttaacttatgtgttgacggtaaggcgcattcattatatcagtgtagctgctccttttactggctctaaagaaaagtacctgtgacattatctgctcggttatgagggaaagcagttccaaaatgtatccaaggagggcctgaaaatcgggaaagataagaacaaagaacggcgggcgttatttaaggaactaact

SEQ ID NO: 208913 - DNA, 448 bp, Gossypium hirsutum
ggcagaaatccgaggacgtagcgcagaaaatcctctactccatcgagtgcgaaatgaggcggtgcccttacacgttaggcttgggagagccaaacctctccggcaaaccaaacctcgactacgacgccgtttgcaagccgaacgaactccacgcgctcaagtccagcccgtacgatcacatcgaaaaccacgagaactctacgctttacaccaccaatcacatcctcgaatcatggatccagacggcgaaacagctgttgaaacgcatcgcttcggggatcgacgccggtagtttcgaagccgccgccggcgactgttacatattggaaaagatctggaagcttctggaagaaatcgaagatctccatctcctaatggatcccaacgatttccttcacctcaaaagccagttgcagataaaatccggtaacgaaaacggagcgttttg

SEQ ID NO: 208914 - DNA, 417 bp, Gossypium hirsutum
ttctcattcaatcaagtaacatcaactgtgaatataatcataagatcaagatggtgggtcaatggacggcgactaaaccaagccggagcgatgaagctttggactcggatcaacaacaacgaatcaccaatcatgtgagagctcagttctattcgagggtcccaaaacgacccaccaaacccaaccggagtgaaccatatttgacatcctccaatcccccttcagatgtggaccaaaacatacccgagcttgacaagtgacggtccctttaatttcaatctcaggtgaagatcttagaggggggagctacagtggaacaagaggagtttgtggagacacaaaattacagggagatgaattccatttacaaactgtattccacgacaggaagtggatttataatattgatgatatgaa

SEQ ID NO: 208915 - DNA, 420 bp, Gossypium hirsutum
cgaggctgtgccgggttatgagtttgcaattcagacgtacgccattcatgtccgggccctgacttaccaaaagattccaagacctgtacttgctgaggctattaacatcgaagggctatccttggacaaattccttgaacaccaggcggccaacagcggttggattcttgagaagggtcatggcaggggtcaactaatagtcctacctcgaaacgaatttaacgatcctgagctgaagaaaatcgctgctgatagtgtttcattggagcacatcacccgcattttccccattcttggttaagcctttagctgggatgatacacttttttggagttatttgtgccatgttttctgtgacattgcgaccaattttctttgtttttttcggcttggattgtattttttatactgagaaacaag

SEQ ID NO: 208916 - DNA, 450 bp, Gossypium hirsutum
tgaggatagaacatgttcggtgcctcgcccttgtctccttcgccggagactcaaaatgataggaatcctatcgataaagaagaggcataggcatcgcctctcgatccaatccgtcttccctggcctccccaacacactcttgatacgaaataaacctcccgccatagagaagagatctaaagtctgggtcccctcgatcacccttcccttgaacctgaactggtcgagagagatgaacccgcaccacattttttaaccttcgaaccgaaacccccaactagagatgtaattccataacctaaacaactcagttgagagctccgtgactggttcaagggaaggtccaccaataattgataggccagagggatgggctcattcgactaatcagagagccctggccctacctaacacagagatgtccctgaaataggggaatagttgatcgga

SEQ ID NO: 208917 - DNA, 458 bp, Gossypium hirsutum
cccacgcgtccgggaaaacagagagcaagatataaatgaagaccatactctcatcagagaccatggatatccccgatggggtcaacatcaaagtgaaggctaaaatgatcgaggttgaaggtcccaggggtaagcttacacgtaacttcaagcacctcaacctcgatttccacctcaccaaggacgaggagacgggcaagcgtaagctcaggatcgaggcctggttcggtactaggaagaccagcgccgccatccgtaccgccctcagccacatcgagaatctcatcaccggtgtcaccaaaggttaccggtacaagatgaagttcgtctacgctcactttccgatcaacgcctcaatcactggcggcaacaagtccatcgagatccgtaactttcttggcgagaaagaggtgcgtaaggtggatatgttggaaggggttttcattactcgatccgag

SEQ ID NO: 208918 - DNA, 434 bp, Gossypium hirsutum
  unsure (1)..(434): unsure at all n locations
caggaggccagcatcgaacatggatccatacgttgtcacatccatgattgcagaaaccaccatcctgtggaaaccatgaggggaagcccatgtttgggatgctgtttccatggtagaaagaaaggaaagagccaaagtgtttgttttgtcccctccagtgggatacactcatttcattgcacttagtaattaggtcatggttgcccttgcttggatttgaggtagaaagggttgtttctactgctttcttgcaattacggntaatcttgtgttaaataaatgagaatgcttttattattattaataataatgaagggctagattttgagtttcaaaaccnannanntaattttaaatttttattattaatatttaattttttttttttttttaatatttacttattttattttttttaactcttatttaatatt

SEQ ID NO: 208919 - DNA, 385 bp, Gossypium hirsutum
aatccaactagtttccatcaaatcttttagctttttcaagaaaaaaattaaaacgcagtttttttttttcttttttctgaatcacccatcaccatgaatggtgaaaaaaacagttcaaacaatagggtacttaaattgaagtacgttaaacttggttaccattatctcataactcaccttttaaagctttgtttagtccctttaatggctgctatcatcgttcaagcatcgaggttaagccttaatgacatccaccaaacatggcttcaccttgaacataaacttgtctatgtcgtcgtgttgtcggctttcgttttggtcgggtcgaccgcttactttatgacccgaaaaagattcgcttatttgggggattatgcctgttatt

SEQ ID NO: 208920 - DNA, 419 bp, Gossypium hirsutum
atttgaatgatctaataatggacatagagtatgtttctgctggaacacttaccaagacttcaattatgttaggatgtggagaaacgcctgatcaagttgtgaaaacaatggagatggttcgagcagctggtattgatgtaatgacattcggtcggtacatgagaccataaaagcgtaccatgcacgggtcagaatatatttcacctggagcttatgaaaaatatcgagcccttggcatggaaatgggatttcgatatgtggcatctggacccatggacagatcatgctacaaggcaggagaattctacattaaatctatgatagaatccgatcgttctgctgattctttatagatcctttttatttcattgcctatggtagtctttttccttaaaaaataaataaacttggttttgata

SEQ ID NO: 208921 - DNA, 263 bp, Gossypium hirsutum
gactagctgcgcatatggagacgctgcgggttctttaccgccgagccctgaacgacacaatcaactgggtcggccattagcacctcttatatcaagatgcttctgaccttcttgagagacgcgtagccgacctgcatgggcaagatcgtggtacacacgacaaaatgcttgatgcacgtgctgcaacttatactaagtggccgcatccccatccttatatcgttccttgcgctcctgctggatccaaggttactccaaaccct

SEQ ID NO: 208922 - DNA, 407 bp, Gossypium hirsutum
cccacgcgtccgataaagccaactgccatatacattcctctcgaagaaattttaaagccagctaactatgagcttgtaaccaaagaaattttcgggccatttcagattataaccgattataagaaggatcaattaccaatggtattggatgctttggaacgaatgcatgctcatctaaccgctgctggtgtctcaaatgatcccatcttcttgcaagatgtgatcggaaaaacggtgaatgggacaacctatgctggattgagagcaaggactactggagctccacaaaaccattggtttggaccggctggagatcctaaaagagcagggatcggtacaccagaagccataaagcttggttggtcatgtcacagggaaatcatatatgatttcgggccggtgccaag

SEQ ID NO: 208923 - DNA, 405 bp, Gossypium hirsutum
tttccacgactcttctgtcacccgttcaagctgcgtcactgtcttgttcaacacagttaaatagaaggggaaaatatttatagaaaattccacctctgaacagatcttctccctctcgtcaaacaacggacagtcatttaaggctttaaattggagctaatattgaatggagggaattagaggcgatggtgcatcatcagcttcgcctttgtctcaatgggggcacgacggttggaggatttatcagtattatctcgataagactactcctcatacagcttataggtggattggaacccttgttataacggctatctattgtttgcgggtttatcatgttcaaggcttttacgtaattgcatatggccctgggatctacctgttgaatttgctaataggattttt

SEQ ID NO: 208924 - DNA, 422 bp, Gossypium hirsutum
gaagaacgctagcccaaccatctttgaaactatgctctgtccaatatgaatatggagaaacaatatttggattggatactagtcccgatggggattcttttaatggtgtcctaccatctatggcttctttatcgaatcttaaaacatcccaccaagactgtcatcggcgtcaacgccatcaaccgccgtttttgggttcaagctatgatggaggacgggtcaaaaggagtattggcagtgcagtcgctgcgaaacaatataatggcgtcgaccttattagcatcgacggctatcatgttgagttccctcatcgccatcttgatgacgagtgggagcagcaatagatcgtcctggttcttattctgagatagaagcgacgttgcattttcgatcaagtactttgccatattgcgttgtttcat

SEQ ID NO: 208925 - DNA, 392 bp, Gossypium hirsutum
  unsure (1)..(392): unsure at all n locations
cggacgcgtggggtctttattgaggaggctttgcacctgaaataggactaatgaaaatccagaagaatgggtctgggctttcaaaaagatgaaaatgcaaagggtaaagagaaagtcttttgaacaaccaacctgacataaggattctagctcgcccacttagagcagatggagattatcggacggggaaaagcggcactcgacatctattaaacaacaccaagaacaaagccataccatgccctcgggagaaagacgtgatgattgccatgaatgctgccttcgaggacgtgttgtacaagaaggtctttgccgattcctatcaacatggtgcacccctcagtagaggggcgtgaaaaggctttttttanattttatcgtgttaatttttt

SEQ ID NO: 208926 - DNA, 386 bp, Gossypium hirsutum
atcaggaagcaatgcaatcttgcaaacaagcttcactaaaatgcctcgccaaagagaaagccgagagtggccgaataaaatggttgtttacttgtttcttttccaagagacaagtttgttaatgtgcagtgagtaatggtgcaatggtactagtttgatacgatcgacccattgcatttttttttagcataagccaggttgccttctcttgatgttggtcatgggcgtagtggatgtagggatggatgtaatgtatgtatgtaaggatggtgttgactgtgtatgatgcatgaatttcaaagatttaaaagttatgatgattcatgcataatcccttccttttccattacgatgcaatactatgagcaatattattgtatttggat

SEQ ID NO: 208927 - DNA, 448 bp, Gossypium hirsutum
ctacgttctcgaacaagggatttgttcgccagaccctttagaaagaagggttacattcccttgtctacttacctcaggacctacaagatcggcgactacgtcgacgtcaaggtaaacggtgccgttcacaagggtatgccccacaagttctaccatggtcgtactggtcgagtttggaatgtcacaaaacgtgccatcggtgtcgaagtcaacaagcaggtgggaaacaggattatcaggaagaggattcatgtacgtgttgagcatgtacagccttcgaggtgcgctgaggaattcaagctcaggaaggtgaagaatgatcaactcaaggcagaggctaaagcatagggtgaggtcattagcacaaagaggcagccagaagggcctagacctggtttcatggtggatggtgctacacttgaaactgttacgcccatcccatacgatg

SEQ ID NO: 208928 - DNA, 434 bp, Gossypium hirsutum
cccacgcgtccgctttgatcaaattggtccagccctgttattttctgacagtcaagcaacacttcagatcgcggcgaatccagtattccatgagcgaactaaacacattgagatagattgccattttgttagagaaaaaaatacgagaaaggctaattcgaacgcaacatgtgcaaacgacgagtagctcgcagatgtgatgacaaaggcacttggagtccaacaacatgcgtatttggtgaccaagttggaggataaagatctttaccaccctccaacttgagggggagtgttgaaaggctgattgggggttattggttagtttgtaattctaactaaatatcaatacttagttaagtatttagggactaaagtgttgatgtataaatagttgagggtgtaacttaaggattgatccttttttatctcttaat

SEQ ID NO: 208929 - DNA, 440 bp, Gossypium hirsutum
  unsure (1)..(440): unsure at all n locations
cagagctgacttctgggttttacaatcctgcacatcgtgatggctatgctccgattgcagcaattgcattaaacttcacatgtgttgaattgcgcaccttaaatcagcacgagggcttcccagaggcaatggcagacccagagggcttagtttggcaggtgctgaatgccgcgtgggatgtttccataccggttgctagtgagaatgctcttccatgctatgacagagaaggctacaataagatactagaaaatgccaagccccggaacgacccagatggccgccatttatcggcttttacctacctcaggctcaacccagcactgatagagagacgcaactttgtagagtttgaaagatttgtcaaggggatgcatggggaagcaatatcagatctcccattgaactgaaagacctgctaccacccaangggaaggatg

SEQ ID NO: 208930 - DNA, 458 bp, Gossypium hirsutum
ctttccttccacttgttttcattggttttctacgagcacaaaaaatcgcctatgaatggatctttcttatagtcattctattaataagtttcattattttatattgggaaataaataaaaaaaagaattggattcttttgttgctaatctattttttgttagtgattttggcttttatcttacgctctttcctatccgagatgatttcgactttgctaggagtttctttggttttttgcttttcttcggactcgagtgagggtggaaacagtcttcccgctttagaatcctcttcgagttccgaatctctaaatacgttccggcagatttatgccgcggattatgagaggactatattcgaaagaataagaagtctggaaagtgctcaatattacaatctttcaccacaaacgccggccggggagtatgaaaccatcgtaagagcgcattttgatcaa

SEQ ID NO: 208931 - DNA, 256 bp, Gossypium hirsutum
gaaactcccacacctattccatcatttggaaaccccaacacattattttcttggtggataacatccccattagagtcttcaaaaatgctgaatccattggtgtaccgttccccaagagccaacccatgaggatttactctagtttatggaatgctgatgattgggccacaaggggtgggttagtgaaaactgattgggcaaaagcacctttcacagcttattacaggaacttcattgccaatgcttgtgtctggtc

SEQ ID NO: 208932 - DNA, 380 bp, Gossypium hirsutum
accgcacacgggcgttctttcgatgtcccagcgtcaacgaaagctttgacgctaccatagtcgttgaggacttcggttactgtaagccatgtggtgaaggaaagccagagagcccaagggggacaatgctaaccgaggacctgatgcaagagagggcgagcatgtaaagggggtggctcacatcttcgctacatttaatgacattgattcatgtgactgatttgtgtggaagggaaacaatggatcgcattactggtggcatgaaggtgaaagctgatagggatgaggctttcccttatgcaagcatgcttgcagaccatgatgtttctcatcgctgcaaggagacggctattactgccctttatataaagcatagagct

SEQ ID NO: 208933 - DNA, 415 bp, Gossypium hirsutum
cgttcgcccacgcgtccgcccacgcgtctggaaagatgtgatgaaaaggtgtgttgctgcagaaccgaagcatggtgagaaatggcaagctatttcaaaggctgtagagaactctcaccagcctactgaagccattttaaagaaagtagtggttgtgttgggcaaggaagagagtgctgcggaaaataacagtaaacactaattacttttaactaatagttactcgtgtacttgggggtagtgccagctgaatcaattctgaagcatgttttctttggtttttggacaattatggtgagactttatcttcaactatgatgtttttagcatatagcgtctacttgttttgttgcctcgttttgcttaccattgtttccagagaaataacaataagacaagctttggagtttggttt

SEQ ID NO: 208934 - DNA, 351 bp, Gossypium hirsutum
gctttttgtggtcctgctggtcctcaaggtcaagctgcttgtggccgatgcttaagggtgaccaacaccgccactggaactcaggcaacggtgagaatcgtggatcaatgtagcaatggagggctggatttggatgttaatgtatttaaccaacttgacacaaatgggattgggaatgctcaaggtcacctcactgtcaactatgaatttgtaaactgtggtgactaaacccactttctagtaattaaaatgagtttcaaccaaataaatgctttgtatcactactaaataaatccattctcgaataaaacttagcagcacttgttgcttgcaagttgctaaatttacttt

SEQ ID NO: 208935 - DNA, 406 bp, Gossypium hirsutum
cggacgcgtgggcggcggcattgagcactgcgttgttcaacaatgggttcagctgcggtgcttgctttgagatcaagtgtgctagtgatccacagcggtgccattcagggagcccatgcatattcatgactgcaaccaacttttgcccaccaaactacgctctttcaagcgacaatggcggctggtgtaacccttctcgtactgactttgacctcgccatgcccatgttccttaagattgctgattaccgtgccggaattggacccgtttcctcccgccggattgccactatgtttccttacaacttttttttttcctttttttttataataaaatgggaaagaaggctaccggttaaattaatttaatggtaagtaccttaaattgttacaaacttaatttaaaa

SEQ ID NO: 208936 - DNA, 159 bp, Gossypium hirsutum
gcaacttttggaccttttgtgtgagaatctggggttggagcctggttacctgaaaaaagtgttttatgggtccaaagggccaacctttggtaccaaggtcagcatctatcctccatgccccaaacctgacttaattataggactcagggctacactgtt

SEQ ID NO: 208937 - DNA, 387 bp, Gossypium hirsutum
atgggtattacgtcagagaacgttgctcatcgctttggtgtgacaaggcaggagcaggatcaggctgcggttgaatctcacaggaaagcagctgctgctacagcttctggtaaattcaaagatgaaatagtccctgtggccaccaagattgttgatccaaagactggtgatgagaaacctgtcacaatctctgttgatgatgggatccgagctaacacatcagtgtcagatctgggaaaattgaaacctgttttcaaaaaaaatgggaccactcctgttggaaattttagtaaagtaagtgatggtcctgaagctgttttcttattaaaaagaagggttgcaatccccaaagaacggccaatctttgtggttttaagaacttttgtt

SEQ ID NO: 208938 - DNA, 271 bp, Gossypium hirsutum
acaacctaaatccagtctggaacgaaagcctaatgttgtcaattccagatagcattcctcctttgaaagtgattgtgtatgataaagatactttttcacatgacgattttatgggggaagcagagattgacattcaaccgcttgttgctgcggcaaaagcccatgagcgttcagagattcaggaatcaatgcagctagggaaatgggttgcgagcaaagacaacaccctagaaaaagaccgtataattaccgtgacagatgggaaagtaaa

SEQ ID NO: 208939 - DNA, 206 bp, Gossypium hirsutum
aagcgaaaccctagccactctctgctcaactcgccaatgggggcttataagtgcgtctcggagctatggacggaagaagcacgcggatgtgatgaggtttttacagagggtgaggtgctggtaataccgccagcatacatcaattgttggggaaaaccatgctactcgcactgacaaggcacgccgcttgatttataatgccaaac

SEQ ID NO: 208940 - DNA, 335 bp, Gossypium hirsutum
gaaaatgacattgtatatgatgggctatgaggatgtttcatcagctccgagtgacccagttgagaaaactatttggacatttggaagaccagctactatggaattaacacatttctggggtactgaaaacgaccctgagttcaaaggataccacgatgggaattcagaacctactggcttcgggcacattggcatcaccgtggatgacatgtattaaggcatgtgagagatttgagagtcttggagtagagtttgtcaaaaaaccaggcgatggttttcctttattaaaggatcccaatggttcctgaatggaaatctttgttttgaatggaatt

SEQ ID NO: 208941 - DNA, 318 bp, Gossypium hirsutum
cggacgcgtgggaaattgcaagattttatgacgcaggaatgggtacaatcatatttgcaccagtagcagtgttgtcatggttcccattcatctcaaccttccagtctcgccttctctttaaccaagcctttagccgtgggctggagatttctctcatccttgccggaaacaaagctaatgtcgagacatgatttctactttctggctgcggttaggtttgcttgaactagttattgcttttattttttggcctcgatttattaatttatgaatttaactacaatccttttatagtatatattatttttgatggagtac

SEQ ID NO: 208942 - DNA, 357 bp, Gossypium hirsutum
aggaaatcgccctttggttccctgaatgccctgttaactggcagagcagccttcacccttggatctacgagtagagatcatttggtcgaagctattggccgtcatggctctgtcctggttgtttgttgttgttgttgttgccagtcttttgatatttatattactattatagtttaaagtggtgaaagctttgtagcattttgggtgtataggttaagttggagttgtttttgaaagcttccattacaatgccacagttgaggtgaacagcggtttgaataatcaaagctatttgagtgtttgtcatataacaagagataaatattaatattatattttttatttaatttttttttt

SEQ ID NO: 208943 - DNA, 281 bp, Gossypium hirsutum
aggagatcgagaatgggatgctgtgggaagtcgagggaaagtgggtcgtgcatggtgctcttgacgtggacattggagccaatccttcagccggagatgctgatgaggatgaatgagtggatgaccaatctgagagggttgatgacattgttgacacttttaggctcgaagagctaccgtctttggacaagacgctataagtcgtgttgatgaagaagctcatcaagaacttgacaacgaaactggatgctgtatagcaagagttcttgactaaaaacatt

SEQ ID NO: 208944 - DNA, 404 bp, Gossypium hirsutum
acccacgcgtccgcccacgcgtccgcccacgcgtccggatgggttcatgcaatggaatggtctggtcagaaggagtttgtagcatctcctgaggttcctttcatagtagatggtgcagaagccggagtcttgaaaactcatggagctcttggtttccttaaggttcatgatgcgggtcatatggttcctatggaccagcccaaggcagcattggagatgctgaaaaggtggaccaagggtacactatctgacgccagtgattcagagaaactggttgccgagatgtgagttccattacttcagtgctagaaataaatcttgttggcctttataatgggaataagcatagtgtaaaatatctggactttttgcgtagtttctttgagtccctgaaaaaatttcat

SEQ ID NO: 208945 - DNA, 196 bp, Gossypium hirsutum
cccacgcgtccgcgaaggggagacgagttggattgaaagactaacagatggtccgtggacggacacaatgtgtaattggtcaccagatggtgatttgattgcattttcttcggatcgacataatccagggtcaggtagtttcgagttatatatgattcacccgaacggtaccgggttaagaaggttgcttaggagc

SEQ ID NO: 208946 - DNA, 297 bp, Gossypium hirsutum
tttgggttgagggtgggtcccgcgtacgtccacgcgttcgtggtgtatttgttaaattgtgccaaccaaatgctgcaatccgggatgctgatgcatctttaaagatcaatcctgactcagcaaaaggatataaagttcgagggatggcaagggccatgcttggtcaatgggaagaagcagcaagtgatctgcatgtatcgtctaagttagattatgatgaggtgattggttccgtactcaaaaaggtggaacctaatgcacacaaaattgaagagcatcgcacgaaatattaacgcc

SEQ ID NO: 208947 - DNA, 307 bp, Gossypium hirsutum
tgtcagaccgacgcgtccggcgcacgggaacatactgattggatggggatatgaagaatcatatatgggtcgaccctacaaaagactaccataactatgctgtaaaagggaaccctagtgaaatcatatttttcgtagatgatgtgccgatcagaacgtacccaaggaagagcgacgccacattcccaacgagaccaatgtgggtgtacggatcaatatgggatgcgtcatcttgggctaccgagaatgagaagtacaaggtttattataactaccaaccctttgtaggccgtttcacgaatttcaa

SEQ ID NO: 208948 - DNA, 198 bp, Gossypium hirsutum
accggatgatcaatcctgtaggatcaatccttggaatgccggacgaaaacatttttgacaagcaggtgctctttggaagaagcggggaggtttcgggatttgattctaatgaccccgcttcgaggagtggaggaaaagctgttgctgttcaacaaataacaaacgttcaggggctcgcgggattcgtcatgattggtg

SEQ ID NO: 208949 - DNA, 318 bp, Gossypium hirsutum
cgaatgggaataagagggtcagccaaacagcgggcagctccactttgtacattttctgaggcagaccaatcaggtttagaaaagggaggggaacttctcaccgaagcgaaggaggcagtacgaatgaaggaggcgggaagctaccgcttctagaatgcaagcttatccttgactttttttagagaaaaaaaaaaaggtttttggatgaacgaattggagtgacaaatggttacggttgcggaaaccggagaaagtcgggaaccgtcggttcacttttgaatcaaatagcgacgagccgaggactacgactacaggggg

SEQ ID NO: 208950 - DNA, 408 bp, Gossypium hirsutum
  unsure (1)..(408): unsure at all n locations
gccagattagacagatacgccgaaagatgagggaaataatgactgcccaggcaacatcttgtgatttgaaggaactggttcaaaagttcatccctgagatgattggaaaagaaatcgagaaggcaacatctagcatctatcctttgcagaatgtgtttattcgtaaggtcaaaatcttgaaggctcccaagtttgatcttgggaagttgatggaggttcatggtgactactcagaggatgttggtgtgaaactagagaggcctgctgatgagacaatggctgangctcctgcagaggttgttggagcttgaacgaagaacaatagtccatgaatgtcttgttttttatgcttctaggagtttttgctgatcattttaattttgttgaaaaaactttgtagagaatttc

SEQ ID NO: 208951 - DNA, 257 bp, Gossypium hirsutum
cccacgcgtccgggaacgtctactgaaaaaggctcaggctgaggctaaaggcaaagcccctgagtctaagaaaccaattgttgtgaaatacggacttaaccatgttacctaccttattgaacagaacaaggcacaattggttgtcatcgcccacgatgtggatcccatagagcttgtagtctggcttcctgctttgtgcagaaagatggaggtcccctactgcattgtcaaggggaaagcacgattgggatcgattg

SEQ ID NO: 208952 - DNA, 315 bp, Gossypium hirsutum
acccacgcgtccggccacacgttcgcccacgcgtccggtttaaggctaatgcattgccaacttgtggttatgccagtgcttgctattacatctttcgtcggcatgggagatattgtcacaccagaaacctttaaatgggcagccaatgaccctaagatcattcaagcttctacaattatttgtaggtctatggatgatgttgctgaacacaagttcatacataggatagaagacgattgctcagcaattgagtgtctcatggaagaatatggtgtaacagcacaagaggcatatgatgtattcaacaagcatgtt

SEQ ID NO: 208953 - DNA, 345 bp, Gossypium hirsutum
agcatgcaagatttttactcgccaatgcacttcttcaactttggatgagtttttgacactggatgcttataattacattggcgattcatcatccaaaggatgtttcttctaagctttgatgaagcttccatgaaatcttagaactatggggtttgagtgaaaaaaaaaatagtgccattgctaaataagcaaataatcataatcgtcattttaattgggggttttaaagggaaatggttcataaaggatttggaaataaggtttaattcaagggtgggttttaatggattaattcaaaggttttaattcaggcaattaggttattaaattggtggccgttgggtt

SEQ ID NO: 208954 - DNA, 272 bp, Gossypium hirsutum
gacccacgcgtccgcccacgcgtccggggacgtgtactgaaaaaggctcaggctgaggcttaaggccaagcccctggagtctagacaaaccagattggttcgtagaatactgacttaaccatgttacctaccttgttgaacagaacagggcgcacttggatgtcatcgaccaccacgtggaccccatagagcttgcatgctgactgactgcttcttgcaagagatgtgaggttccctactgaattgtcaaaggaaagcactattgggatcgt

SEQ ID NO: 208955 - DNA, 169 bp, Gossypium hirsutum
  unsure (1)..(169): unsure at all n locations
gttctattcgngaggaagccggggaggctttgactgctaacttgaaaggaaggccggcgtttgaagccgatgaccattcagctttgatttacttgttgctttctcaaaaggaaatgtggatggataaagagtttctcgagaatcaaaattatttgcatggatattgggc

SEQ ID NO: 208956 - DNA, 321 bp, Gossypium hirsutum
gagtcaaacccgttgaccagagagggtaggaaatggcaaatcaaggtgccaagaagcgcatagaagagaacacccgccacatggccaatcttcgccgcctcatcattgcttgtaatgttgtatacgtcttggttaggatgctgatcttccattcctcattcacatggaaacattgggttggtctacttttgacctctgtggcttactttataccctatcaacaactttcacagatggcaaaacctgcttattctgatgatggagaacttcttgacggtggatttgatatgagtactggtggaatatgtggctatttacatg

SEQ ID NO: 208957 - DNA, 384 bp, Gossypium hirsutum
aaatgtttgcccacaaaccgcaccacgtgcaccatacttgctatgacaagattcaaggatgcgatttacatgaaggtgaatgggggaaagtcggtaccattgtccattggagttatgtgcatgatggaaaagctaaaaaggcaaaggaagtagtggaagcagtagaccctgataagaatttggtcactttcagagtgatcgaaggagatctaatggaagagtataagagctttgtaatcacgattcaagtttcgcccaagagcgagggtagtggcagcttagtgcactggactttggaatacgagaagctgcacgatgggattgcgcattccgagactctgctgcaattcgttcaagatgtctttaaagacattgacgcccacc

SEQ ID NO: 208958 - DNA, 335 bp, Gossypium hirsutum
  unsure (1)..(335): unsure at all n locations
cccacgcgtccgcccacgcgtccgcaatgtcattagcacccaatgacgttcatcaaaaccaaatccaatttgccctggaaagaggaattcctgcatatcttggtgttctagggacaaaaaggctcccttacccgagcagatcatttgaacttgctcactgttctcgttgtaggattgattggcttcaaagggatgggattcttcttcttgagctagaccggttacttagacctggaggctattttgcctactcgtcttcagaggcttatgcacaagatgaagaggatctcncgatatggaaagagatgagtgccctagtggaacgtatgtgttgg

SEQ ID NO: 208959 - DNA, 310 bp, Gossypium hirsutum
cgcttgttcaaacacgcaaaatctaataccgttatgctcactggccttagtggaagtggtaaaactgttcttttctatcagcttcgtgatggttctgtgcatcagggtaccattacatctatggagccaaatgagagcactatcgtgctaaattctgatagtaataagcgtaaaagcaagcctgtccatattgttgatgtacccgggcattctcgtctgcgtcccaaactggatgagttcttacctcgagcagctggcaattgtgttgttgttgattctttggagttcttgccaaactgccatttagctt

SEQ ID NO: 208960 - DNA, 170 bp, Gossypium hirsutum
cggacgcgtgggttgggattttaaagatgggtgagaataggatgaccggcaaggtgaagtggttcgatgaccaaaagggttatggcttcatatcccctgacgacggcggcgacgatttgtttgttcaccagtcttccatccgttccgagggtttccgtaaccttgctgat

SEQ ID NO: 208961 - DNA, 406 bp, Gossypium hirsutum
acccacgcgtccgcccacgcgtccgctataatgtggcagatggaaggcttgcacagcatattgaaaaaggaaatgaggatggcttatttatcagcagtgtagcttcctgtcaaaatctatgggcccttataatggatgctgggactgggttctctgcacaagtgtatgaactctcaccatatttccttcataaggaatggataatggagcagtgggagaagaactattatatcagtgcaatatcaggggctacaaatgggggctccttatttgtaatgtaaaaaggtacttcgtttttgcagcagtcatataaagggagggagtcctttcctttaaagtgaattaccaaaaaatgggagaaggttttcattttaacttaaagggcaacttttggaacaaaatgggg

SEQ ID NO: 208962 - DNA, 413 bp, Gossypium hirsutum
gggcaaccagtgagctacttaaccatttcccagatctcttccattctcttcttcagcgttcttttcatttccgcccatgcagcgcgctttgaaatccgcaatgagtgcccctacactgtttgggcggcagcctctcctggtggtggtcgtcgcctagacccttggcaaagttggaccatcgatgtgcctgctggcactgctatggctcgtatttgggggtcgaaccaaatatggaattttcaatggccaggggaaggggcaattgccaaaccgggaatgggggggaacttccttaaatgcaaaggttggggggaccttccaaaaaccttggttgaaaatcacctaaaccaattggaaaccatggattttaccaacatttcttaagtgaaggggttaacaatcccaagggggtt

SEQ ID NO: 208963 - DNA, 354 bp, Gossypium hirsutum
actagctaatattgctactagcagaggtggctctcgccactccctctttaggtacctacgagtctcccaactatgggaagccccctgctcctgttcataatcctgctaagctgaaaccgccaccatatgaacataaacctgcggtctatgaaccaccaacaaaagagaagcctgaacctaagccaccaatttatacaccttcaaagaaagagaaacctgaaccgaaaccaccaataaatgaacctccaaagaatgaaaagcctgagcctaaaccaccggtttatacaccaccaaagaaagaaaagcatgaacacatgccaacggtgtatgaaccaccaaagaaagaaaaacctg

SEQ ID NO: 208964 - DNA, 378 bp, Gossypium hirsutum
gttttcttattttttaactatattctgattctattaattagacttttttctatactgaatagggacgtgatgttccgattgatcatcgggtgattgaggttcatgagcagcgagatagcaaagaagctgatatactcactaaaggagacgctaatcctcacgatgacagaatgttgtacacatctagtaatcgttggatgcaacgaaaatacatcatgggcagagctgttgggtaaataaaacacctatttatttctaaaagggttaacaggtttaagaagggaaaacatttgtaaaacactttaattagaaatttctggcttaaccattggggctggatgctttaagttttaaagttaataaacctcatttggggtt

SEQ ID NO: 208965 - DNA, 437 bp, Gossypium hirsutum
  unsure (1)..(437): unsure at all n locations
gacccacgcgttcgcccacgcgtccgcggacgcgtgggtgcggacattgccagaaattagcaccaatcttggaggaagttgctatccactatgaaaaagatgctagtgttttgattgcaaaacttgatgcaactgcaaatgatatcgtggatccaaactttgatgttagaggctacccaactgtttactttagatcagcggacggaaacataagtgcatacgaaggtgagaggacaaaggaagacatcattgacttcattgagaagaacagggaaaaaactgctcatcaagaggcattaaaagatgagctctgaagaggggacttgaaaagagaagaggcataaatagtgcattgtacgttaaatacgagaattgctatngactaagcggatgactgatctcccgtttttccttagctttacaattaaaaaagacct

SEQ ID NO: 208966 - DNA, 244 bp, Gossypium hirsutum
accacgcgtccgcctaacgggccaaacttatggttggtcagaccctgggccatacctacggcgactacgggatctgcccttacggtccatacttccatgaaatacacaaaataacagcctctgaacatatgtcaaaccagacgcttgagcttttgaaacacatcagatcctttgacatggaaagctcggtgaatgagctgtacgagctatgggcgaagaataaagtttcgacaaccccagtttt

SEQ ID NO: 208967 - DNA, 205 bp, Gossypium hirsutum
gctaactctgtgaatcatggctacaccaagggagatgggcttggtgctgaaattgttggcacctttgtgcttgtttacactgtgttctcagccactgatgccaagcgcagtgccagagactctcacgtccctattctggcaccattgccaattggtttcgcagtgttcttggtgcacttagccaccatcccaatcacaggaaccg

SEQ ID NO: 208968 - DNA, 250 bp, Gossypium hirsutum
aagcccctttccccacagcaaaaaatgaagtacaacccacgagtctcctcctctcgccgcaagagccgcaaggcccatttcacggcaccctcgtcggtccgccgtgtgttgatgagcgccccactctcatccgatttgaggtccaagtacaacgtccggtccatgccggtgcgcaaggacgacgaggtccaactggttcgtgggacttacaaaggccgggaagggaaagttgttcaagtttaccgtcgca

SEQ ID NO: 208969 - DNA, 421 bp, Gossypium hirsutum
tccacgcgtccgaacaaaacaagctgctgggtaccattccggatattttcaaatcgttcaccgaccttagaattcttagactttcccataatgaattttcggggaaaatcccagaatcaatattgtctttggcaccgaaaatggcgtaccttgagttgggccataatcttctggtcagggcaaataccgagttttctcggaaagtcaaaagcattggacactttaaatctttcatggaattcattcacaggggtagtacctaaaacattttcaaacttaaccaaaattttaaacttgaacctttctaacaattttttaaacaacccattctcccaattgaatttgaaaggctttgaacaactgatttaatctattaacaattttcaatttaaatgaaatcccaaatggggtcactttattt

SEQ ID NO: 208970 - DNA, 301 bp, Gossypium hirsutum
cccacgcgtccggattgtctcagatccaatttctcctcctcctcattttccttctctttcgcttctcaattccttcttcccaccagaggttttgcttctgagtcactcaccccaaaaagtgaccacagtgtgattcctgatgttccagcaacagtggctgctattaagaaccccagttctaaaatagtttatgatgaatacaaccatgaacgttttcctcctggtgaccccagcaagcgggcatttgcctattttgtcctgacaggtggtaggtttgtatacgcatctgttatccgtctgc

SEQ ID NO: 208971 - DNA, 278 bp, Gossypium hirsutum
acatcatacctgttcaagaggtcatagccgagatgaccggtggtggacatcaccgccatgtttgatgttccgtgagcacacaccccacgacttctgcattccaatgtatacactatggttgggagacgtatcactgcttgtgggggtgaccaacaaagacgatgcattcaaatctcatccagtgtatctactgtatgaaacgactctcactggttctttctttggacactacgaacctccaactgatattcctgatgcccttgatagaaacatgaaca

SEQ ID NO: 208972 - DNA, 372 bp, Gossypium hirsutum
tcggtacttcaagagagcgcacgatatcaaagcggtgggaggtttcttgggggccaagcatgctgccagggtcatggttccggccaagaaaggttgcataccattcacttcatgtctggctacaaaaatcagcttctgtggcccccatgcatacaaggcatctgagcatgcgcgtgcagggatgacgaaaagcacagccgtcgaaataggctgtgcatcgcaatttagagaacaacatactattattcactcttcattgcaaatttctgacctccaatgtttacagagaatcaaattgggatacctcgataagaagaatgtgagaggagatgaatgctgcttctgcagtgttgaaaggcacttgattggagc

SEQ ID NO: 208973 - DNA, 270 bp, Gossypium hirsutum
gacccacgcgttcgcccacgcgtccgcccacgcgtccggttggattttttttgcaaaaaaaaatcaaattctactgatggttataggaattgatatgtggattttagtgcttgacagacgtgaaaaatggggttgtctttcacaaagctattcagccggcttttcgccaagaaggagatgcgtatactgatggttgggcttgatgctgctggtaaaaccaccattctttacaagcttaagttgggagagattgtcactaccattcctacc

SEQ ID NO: 208974 - DNA, 324 bp, Gossypium hirsutum
ccacgcgtccgctaatttgatgaagctccgctccgattacattgatgcctttgttgagaaacacggtgtcaagttgggatttatgtcaggatttgttaaagccactgttagtgcacttcagcatcagcctattgtaaatgctgtaattgacggggatgatattatttatcgagattatatagatatcagcattgctgttggaacttctaaggggcttgttgttccagttgttcgtgatgctgataagataaattttgcttgagatagaaaagacaatcaacaatcttgcaaaaaaggaaaggatggaaccatttaaattgataa

SEQ ID NO: 208975 - DNA, 219 bp, Gossypium hirsutum
gtcgggactgtaaaaagggctgtgggaaatcttctgctccattcccaaaagggtgtttcttcacatcctctggagggttaaggagcttcgagcatccccagaacgagttgaaggcagtgccaagggtggatggttcaggtcaggcctgtggtgctacgtactgtgtggatacagagacggagaaggattcaaccgaaatgaaaaaagtcgacagtgctt

SEQ ID NO: 208976 - DNA, 290 bp, Gossypium hirsutum
gtcattctcaccctgagcttatggttggcagtggctcagatagagttcaagtaaagactctgcgcagacatcttgaggaagcatctcagatggttcagatgctgaaggcagaaaaagctaagattgaatcagaggcattaatgtaccaacaattggcaaggcagctggatgctgatctcaagagtctctcagatgcctacaatactcttgaacagaccaatatgcagctagaaaaagaggcgaaaactttgaagagcggtgggacatcaacatctcctgttatcgaggca

SEQ ID NO: 208977 - DNA, 415 bp, Gossypium hirsutum
gtccgcttggccggtgatttcttcagccttgctgatctgagccacctaccatttactcagtacttggtgggtcaaatgggaagggaatacatgataaccaccaggaagcatgtgagtgcttggtgggatgatattagtagcagaccgtcctggcagaaggttctccagctctatgctcctcctttctaagacttgaaaatgatgcaatctggggatgggatctttgcaatgatgtctgctttgtggcttagcagcttggtttggcttggggtctgggctttgtttgaagaagccacctaactatcctatgttagctatagttcaataaaaatgttgatgccgggtagggggcccgggttacagatattcttggggttggccatggttggtggtaagaattaagattgaaaaattc

SEQ ID NO: 208978 - DNA, 235 bp, Gossypium hirsutum
tcgctctgttcaatcttatacgggtacctgatatatccggcatcatgacaacattaaggcgacgtgcagaaagaaaggtggggaagttccgaatgaacataacaaagagaggtgctgtgcctgagacaaccacaaagaaggggacggattatcccgagggtcctgtgcttcttgggttcttcatatacgacgtgattggagcatattctctttcagaatatcaaggacagcgacc

SEQ ID NO: 208979 - DNA, 424 bp, Gossypium hirsutum
gctcaatgatgtctaccacacacttgctaatatttctacttggagtggccgctctagccactccctcttttggtacctatgagtctcccaactatgggaagccccctactcctgtttataagcctcctaaggtgaaacccccaccttatgaacataagccacctgtctatgaacctccaaagaaggaaaaacctgaacctaaaccaccagtttatacaccaccaaagaaagagaagccagaacccaagccaccagtatatgaatcaccaaaaaaggaaaagcccgaaccaaagccaccagtttatacacctccaaagaaagagaagcttgaacacaaaccaccagtttatgaaccaccaaagaaggaaaagcctgagcctaagccaccagtttataccccaccaaagaaagagaagcctgaacc

SEQ ID NO: 208980 - DNA, 371 bp, Gossypium hirsutum
ggaagctgtacaaacagactctgatcgaatagcaacttctgtcaattataatgatgcgcaagacatactgtcactgaaggactcaattactgctgtatgtaatgctacacaagctgctgatcgaatacatcaaatgttcaggatgcaatccttccagtggaaacagttgatagagtccagtgatgctgtgtctgatgaacatgttatttcacttctaactactaagacacgcaggccatttcaaagtgatggggtagctcatgctgctgcaacacaaatccagaaaaaatttcgtggttggaagaaaagaaaagaattcttattgatccggcaaagaattgtcaaaattcaagcccattgtaagaggacac

SEQ ID NO: 208981 - DNA, 406 bp, Gossypium hirsutum
tgcttatacggattctcacctgagcaggaaagtatgcaaggcattggaagaggatgcttttaggccagtcttgcaccactatgacggtcccaagttccgtctcgagctctcagttcctgagactttggatctaatggacctttgtgaacaatcaggctccccataaacaaaatgctagccgagtgcaaacgtagtagcagtagggtttgtgatgcacgtttacggatatttttccatatagcgcaagctgtggcgggtgttaaatccagatggggaaaaagtatgaaatggcattagccacatatgaataaatgccttcatgtcatgtgaaagatgcattgtaaaacttttgcattaatatgctatgaataaaaatcctatcaaagatatatttgcaagatggcaa

SEQ ID NO: 208982 - DNA, 398 bp, Gossypium hirsutum
ctccgtgaaggggatcaagggcctcctcaaccgattgccatcggcttgcgttggagacatggtgatggctactggcaagaaaggaaagcctgatctaaggaagaaggtcttgcctgccgtcatcgtgaggcaacgtaagccttggcgcccaaaggatggtgtttacatgtactttgaagataatgctggtgtcattgcgaatccgaagggagaaatgaaaggttctgccattactggtccaattgggaaggagtgtgctgatctgtgggcaataattgcaagtgcagccaatgccattgcttagggatttgaatttttctagaggtttttgctcccttgagtcatggcctttttgctggatcaagattttgaaatgttttttttagggattccttgaa

SEQ ID NO: 208983 - DNA, 304 bp, Gossypium hirsutum
cccacgcgttcgcccacgcgtctttcagaaacgaccggcagagaaataaaaatgggaggctgggcaatcgcagtgcatggtggtgctggtgtagacccaaatctccctaatgaaaggcaagaggaagctaaaagactcctcaatcgttgccttgatattggaatctctgctcttcgttctaacctctccgccattgacgtcgttgaacttgtcgtgagggaattggaaacggatcctttgtttaattccgggcgtggatcggcacttacggagaaagggacggtggaaatggaaactagtatta

SEQ ID NO: 208984 - DNA, 409 bp, Gossypium hirsutum
ataacagttactctttgtttactagctgtgcttgaaattaagtggtctggcattgagttagaagagtggtggagaaacgagcagttttggttgatcggggggacaagtgctcatcttgctgccgtgcttcagggtctgttgaaagtgattgctgggattgagatttctttcaccttgacatcaaaatcagcaggagatgacttggatgatgagtttgctgatctctacgtagtcaaatggacatccttaatgataccaccgatcacgatcatgatggtcaacttaatagcaatagcagtcgggttcagccgaacaatttacagtgttatccctcagtggagtcgtctactatgtggagttttcttagcttctggttctggctcatctctatccttttgctaaaggcttg

SEQ ID NO: 208985 - DNA, 385 bp, Gossypium hirsutum
gtacacgcttaaatgtagctcgaccaccatgattctatgtccgatgctgatgcccgggcgtccgaataccttttctggctaggccgtgtctcatcctgcctgaacagctatatcgtgggtaagagacgtgcctgaaaggtttgtgtatgcttctcctccgatacgggcgagcacggacgtgcttagtgtcacttcgtggggagcgatatcttaactggaagtaaggcggagatattgttccctcctcccataactgtgatgttccgcatgtcaatcgtactgactaccaattgattgacatttctgaggatggatttgtgagtttgctgactgaaagtggtgacgctgaggacgatctgaggctccccactgatgagaacttgtt

SEQ ID NO: 208986 - DNA, 406 bp, Gossypium hirsutum
ttgagatgctaagaaggggagagaagctaccttctggcactcaaaatccaaaacgaatcaagagcggaccagaaggtggaaataccactttgctaaccgatcccaaacctcctccatgccgtgatcttgatgcctgctaatgttaacatgccaccgcagtctcaaataatgtgaagcttgggtttgccaaggcttttttggatgtatgttcttgttgaatttgtgaagctcaaccaatcatatattttgaattttccatgcaatttcaacttggtataagttatgagatgactaaatttgcattgtaccaaataattgatgttaatgtttttgccataatcttctatgaaagcaggccataattgttgtgggtaaaaaaaaaaattaaataaaaaactcaaatatt

SEQ ID NO: 208987 - DNA, 366 bp, Gossypium hirsutum
cacagcattcgccgcacggcatctttctcatcaggcggggaagaatgtctcacaggaagtttgaacacccaaggcatggctcccttggatttcttccgaggaagcgagcttctcgtcacagagggaaagtgaaggcatttcctaaggatgacccaagcaaaccttgcaagctcactgcctttttgggctacaaggcaggcatgacacacattgtccgagaggtcgaaaaacctggatctaagcttcacaagaaagagacatgtgaagctgttacgatcgttgaaacccctcctatggtgattggtggggttgttggttatgtcaagacaccacgtggtcttcgcagcttgaacaccgtttgggctc

SEQ ID NO: 208988 - DNA, 387 bp, Gossypium hirsutum
ggtgaagcttttaatccttttggcaacctcactcttgatttactcgctcatagttttactcaaagtcctgtatgactactggtgggtgcctctccgtatacaacacttcttgaattcacaaggacttaaagggcctccttacaagttcatccatggatgcaacaaacaaattaacaaaatgagaagtgaagcattaagcaaacctatggggctgacacatgacatacttcccagagttttccctcattattactcctggatcaacttatacgttgattaggaaagaactatctttcttgggacggtgttcaagctcaggtggtgactactgacccagaactaataaaagaggttcttaaaaatagtgaacaaactttttggaaaaag

SEQ ID NO: 208989 - DNA, 343 bp, Gossypium hirsutum
ggacaactcatgggcaaaaaaggttatgtgtttacaagcattgaaggggaagaaaggggcaagattgggagacaccatacttgcatctgtaaaggaagccatgcctaatggaaaggtgaagaaaggaaaggtggtatatggtgtggttgtgcgtgctgccatgcagcggggtcgttgtgacgggagtgaggtcaagttcgatgacaatgcagttgttcttgttgacaagcaaggccaaccaatatggaccagagtttttgggccacttccgcatgagctgaggcagaaaaagcatgtcaagatcctcactttggcatggcacattgcctgatgcatggatcca

SEQ ID NO: 208990 - DNA, 288 bp, Gossypium hirsutum
gacctggctttcacgtaggagggtaggagatcgtgggttggactgccatgctgttttcatgaagacaggttgtgtacatcgtgctgacaacatctggtgggataatggtccatgaataagcctgaagaaagaaagactgtggaaaagtacttgcgttcttctattgaagggatttgtttagaattaaaacttaacgaattatgttctatcactttaaacatctgacgtaacctatgcctattttgttaattgcggcagttatcctatatgtaagtcgcttatagatgt

SEQ ID NO: 208991 - DNA, 329 bp, Gossypium hirsutum
tcgcccacgcgtccgcatgaagggaggtaaatccaagtcagatactaagagctccaggctcgccgtgaacaagaaatctagcgccaaagctggaaagaaatcggggaaggcggctaaggatccaaacaagccaaagaggcctgctagtgccttcttcgttttcatggaggagttccgtgagcaatacaagaaggaacacccaaaaaacaaatctgtcgctgctgtgggcaaagctggtggagaaaaatggaagaaccttgtctgatgctgaaaaagcaccttatatagcaaaggcagagaagcgaaaggtcgagtttgaaaagaacatg

SEQ ID NO: 208992 - DNA, 434 bp, Gossypium hirsutum
cgaaggacaggcttgccctgcataggctacgtgaggcggctgaaaaggctaagagtgagctttcatctacatcccaaactgaaatcaaccttccattcataactgctgatgcttcaggtgcaaaacatttaaatataacgctaaccacatccaagtttgagggtctagtcagcagcctgattgagaggactagaattccgcgtaagaattgtttgaaggatgccggaatatccctcaatgatgtggatgaagtattgcttgttggaggaatgactcgtgtccccaaggtgcaagaaattgtatcaaaaatatttggcaagtctccaagcaaaggggttaattcctgatgaggcaggtgctatgggagctgctattcaaggtggtattcttcgaggtgatgtaaagagctgcttctcgtggatgaaactcctctg

SEQ ID NO: 208993 - DNA, 417 bp, Gossypium hirsutum
  unsure (1)..(417): unsure at all n locations
tgcaagtcgataatgaagattttggaagacctgttgcatattattttggtgtcagtggagacggtcccaaactccttgcatacactggaaatgacgatgctaggaagttcgtctttgatggagaagtgacgttggataaaattaaggcttttggggaagattttttagaagacaggcttaaacctttctacaagtcggatccaattcctgaaacaaacgatggggatgtgaaagtagtggttggcaataactttgatgaaatcgtattagatgagtcaaaggatgtccttcttgagatctatgcaccttggtgtggccattgccaagcacttgagctgacatacaacaagcttgccaaacatcttcgcggcattgactctttggtattgctaaatggatggacaacanatgaacatc

SEQ ID NO: 208994 - DNA, 384 bp, Gossypium hirsutum
tcgcccacgcgtccgcctggaaccactctgttgtcgctgcccttcgggcacaccttcggcgcttaccagtcacctacgctcttgcagcatgcccccttcgggcaatactactttcgtaatacgcgaagcagctgagcgatagctcttcgatcgctatattctcgcgatggcgaaggatcgaagatcttcgcgagacggcccatgaatcaatctcgagaatcgagcatggggcttgaagaccctaccgcattccggccccggggccttcaattgggcctttctctcttctcttttaccagggagtggggagcttccctgctagggaggtacctcttggattcggagtttgttccaacatctgccacacgtgagattctgatcgtc

SEQ ID NO: 208995 - DNA, 332 bp, Gossypium hirsutum
agaattaacaggtcgacccacacgttcaaaaaacccggaaatggcggacgacgatcatcatttcgaatccaaagctgatgccggcgcatgcaaaacctatactcagcaagccggtactatccgtaagaacggctatatcgtcattaaaggccgtccctgcaaagttgtggaagtatccacctccaagacggggaagcacgggcatgctaagagacacattcgggggatcaatatcttcacaggcaagaagatggaagatattgttccctcctcccataactgagatgttccgcatggcaatcgtactgactaccaattgattgacatttctg

SEQ ID NO: 208996 - DNA, 425 bp, Gossypium hirsutum
caaaggcgtgctgcatatggcaattactccaatgctgcactgcagtatcctgtccgggcttgtggagacctgtctatggttccatcaacagcttcagctatttgcgttcaagcccctgctgagaaaggatttgccagctttgccattgatttcctcatgggtggagtttctgctgctgtatcaaaaacagctgctgcaccaattgagcgtgttaagcttttgattcagaaccaagatgaaatgatcaaaagtggaaggctctctgaaccttacaagggtattggtgattgtttcaagcgaacaatcaaggatgaaggatttggttctttgtggagaggaaacactggcaatgttattcgttatttcccactcatgccttgaactttgccttcaaggattacttaaagaggcttttcaacttcaag

SEQ ID NO: 208997 - DNA, 416 bp, Gossypium hirsutum
aatttgtagcagaaattgtgagtattggtcgtctgcgacaccggaatttagtccaactcttgggatattgccggcgcaaagatgagctgcttttggtctatgactacatgcctaatggaagtcttgataagtatttgcatgaccagccaaaagtcaccctaaattggagacaaagattcagagtcatcaaaagtgtagcatcaagattgttctatttacatggagaatgggatcaagttgtggttcatagagatgttaaagccagcaatgttttactggatggcgaattaaatggaagattgggagattttgggcttgctagattatatgaccatggaacggatccccaaacaactcacgttgtgggaactcttggttatttggcttccgagcatactcgaaccgggaaagccacg

SEQ ID NO: 208998 - DNA, 303 bp, Gossypium hirsutum
gaaatttccaagatcttcttcattatcctcttatcccattcgatcaaaagaacggaaatctttatcatccaccatgggaggaggaaatgcccaaaaatccaagatggctcgcgagaagaacttggaaaagcaaaaggctgccgcttaaggaagccagcttgattctaacaagaaggccatgaccattcagtgcaaggtgtgcatgcaaacattcatctgtactacaacagtaagtgaaatgccgggggcatgccctggcgaaacattcttaaattcgtcctatacacatgttttcttcacctt

SEQ ID NO: 208999 - DNA, 399 bp, Gossypium hirsutum
ataccctcccaaagcacttgcattgctggctgctgtggctgcattgtgtgttcaatatgaagctgattttcgacctaatatgagcattgtagtgaaagctcttcagcctcttttgaatccaactcgtccagcaacaacatcccgtgcctacggtgaaaggtgacatcgtgatgatgagccaaatagtggctggaaactgaatcaagaccagttgaagttgaaaaacctgcctgtcattattatttgttttgtaaataggtagctttgcttgtattccacccttaaaccccacaagttgaattattagagctgccagataaagagtagctgtagaatgtaaagaatattcatataattcatttgcgcagtctgtctgttttttacattgggtttttttca

SEQ ID NO: 209000 - DNA, 443 bp, Gossypium hirsutum
ctaaagccaagaaagcaagccattaaggttttgagaaaagatcaaaatggattcaaaaagatcagcttccacagccctccttttagccctcaacattctcttcttttccctagtcagtgctaattgtggatcttgttcttcttctggctctaacccaaggccaactcccacccctactccatctgcacgaggtaggtgccctagggatgccctcaaattaggtgtatgtgccaatgtgcttaacttagtcaatgtcaccgttggttcacccccggtgatgccatgttgttcccttctcaacggtcttgtggacctcgaagccgctgcttgcctttgcaccgctatcagagctaacatcttatgcatcaaccttaacatcccagtttcccttagcttgcttttcaacgtttgctcaaggaatgttcctactggtttccaatgct

SEQ ID NO: 209001 - DNA, 351 bp, Gossypium hirsutum
gcgcccacgcgggcggccacgcgatctggacgacttcattttcttcttcaatggcaggggcagaaatctcgcgacggaggcatcatgtattcttgagctttagaggtgaagatacgcgcaaaagttttacggatcatctttacacagctctggtgcacttaggaattcaaacatttagagatgataaggaaatcgagagagggaataacataaaagatgaaaactggaaaagcaatactacaccactgcaaaaattctatcgttggcgtctcaaagaattatggcgcatccacatggtggcttaacgaacttataatgatattggagcacaggaaatcctctaaacacatt

SEQ ID NO: 209002 - DNA, 425 bp, Gossypium hirsutum
cccacgcgtccgctgtggttgcatctcttactggctacagtttctgggcatcgaagaagggcaaggacttcagctatctcggaccgattttgttcaccagccttattatcctcatcttaactggtctaatccagatgttcttcccgctcggcccaacatctactgctgtatatggtggaattagtgcgttgattttctgtgggtacatagtatatgacaccgacaacctgatcaaacgcttcacatatgatgattacatattggcctccgccactctttatttggacatcctgaatttgttcatttccattttacgggttctgagatccggggataactagttatacaatatttctcacaaggccagtcggaaagatttcaaggtatggcgaacgaagtattgtctgatgaataggaaaaatatt

SEQ ID NO: 209003 - DNA, 385 bp, Gossypium hirsutum
acccacgcgttcggttaggaaccacgaaaccaaggctttggcttttcttgcaaccttagctggtgttgcaaccaacgaccatcatgggccttggtggcagctctctcaatggaaccaagctcttggtgaagtcaactcgccagagtttcaaacccaaaaactacagggctggtgctgtggtagcaaagtatggtgataagagtatatactttgatttggaggatattggcaacacaactgggcaatgggacttgtatggatccgattgcaccttcaccgtacaacccacttcatatcatgttctttgagacatttgcagcttcatttaccaagagaggattgttgcttatgttcctgatctttggaagcggtttcctttgtcttt

SEQ ID NO: 209004 - DNA, 283 bp, Gossypium hirsutum
cgtacgcgcccggtcgtactcataaccgcatcaggtcttcaaggtgttcagcctctggtcaatggaacaatgtaggcgagggaagtcggcaaaatggatccgttacctcgggaaaaggattggctctgagggctgggcacgggggtcccagtcccgaacccgtcggctgccggcgcactgctcgagctgctcccgcggcgagagcgggtcgccgcgtgccggccgtgggacggactgggaacggctccctctggggccttccccgggcgacgaacagtcgact

SEQ ID NO: 209005 - DNA, 445 bp, Gossypium hirsutum
aaaatcagtgcgccgatcatcgtccttcttctcatccagtgtttcagggaataaaagaaatccataacagaagcggcactgcagaaaagtgtttcataaaaaaaccctatcaaaagcttcgatgcaggcgtaaaacccttgttcccaccccctgttttcattgataaagaaaatggaggaaccaaagattggggattgcgaagagtgcaaaaagaaggcgtcaaaatacaagtgcccaggatgctgactccgcacctgcagactcccttgcgttaatgctcacaagcaacgcactggctgcactggcaaacgcaacatcacttcctttgttcccctctctcggttcgatgataatcttctctgcggcttcacttccacttccttttactatttatttacttaatgtttgtgtacgagcccattcatctttactgaacctaaattg

SEQ ID NO: 209006 - DNA, 437 bp, Gossypium hirsutum
tccacgcgttcggtcattgccaaaccggtgattgtggtggactccttcaatgcaaaggttggggtgtacctccaaacaccctggctgaatatgcacttaaccaatttggaaacatggatttctacgacatttccttagttgatgggtttaacatccccatggtgtttggtccaactaatggcggttgtcacaacattcggtgcactgcagacatcaacggacaatgcccgaatgagttaagagctcctggtgggtgcaataacccatgcacggtgtttaagaccaatgaatattgttgcactcaagggtacgggacctgtggtccgacccgttattcaaggtttttcaaggaccggtgccgtgattcatacagttatcctcaagatgatccttcgagcacctttacttgccctgctggttccaattacagggtcgtg

SEQ ID NO: 209007 - DNA, 386 bp, Gossypium hirsutum
gttctttgattgctgattacgttctcaaatatccctcttttttcccattctttatatcctgtggctccaaaggttgctgagtagaaacccgttccataaaaaccacctgaaaaagtcttctctgcagtaaatgccacaggcggtgtaaaaaacctctaaatatggctgggcacatttgatgacaagaatgttaacatgagcgtcgtgacttacaagatctacatcttcaacgtattgaaacaggttcattctgatatggggatctccatcaaagcgatgtggatattgaacagattcatgaactatatctttcagaaattggctcatgaagcatcgatattggctttgtataataagaagccgacgattacatctagggtgatcca

SEQ ID NO: 209008 - DNA, 396 bp, Gossypium hirsutum
ccgatgttcaagctggtttcacagctttatgaagtggtgcctcctattcttactgagttaggcaaggttaaaaacccttggcccaatgttgatgcacacagtggagtgctgctgaaccattttggtttaactgaagcttgatactataccgttctttttggtgtatcaaggagtattggaatttgctctcaactaatatgggaccgagcactatgattgcccctcgaaaggccaaaaagtgttacaatggattggcttgaaaattattgcaagaaagctaaagcagcttaaaatcggtggatgaattaattaagcataataatttctcacaaggattggtcttgtgatgagggtagcagctacctacattggcaaacggaagctgtttcgcttttt

SEQ ID NO: 209009 - DNA, 297 bp, Gossypium hirsutum
gtcccaccacgtcctgcatgccatcccatacagaacttttaactactcgatggtaccgttctccagaagtcttgttgcaatcttcctcttacactcctgctattgatatgtgggctgttggtgctatattaacggagctttttacttcatcttctatttttcctggtgaaagtgaaatagatcaactgtacaagatatgctgtgttttgggtgcgcctgattggacttccttttctgaagcaactaacatctttcgtttaatcaatattagttattctgagaatttacctaccaacc

SEQ ID NO: 209010 - DNA, 294 bp, Gossypium hirsutum
atagtggtgaccgactatggcgaaggcgacaacaccgatttcatccttagtccccgcgcatatgcaaggatggcgcgaccagacaccgcggcacatctgtttgcttacggcgttgttgatgtagagtaccaaagaatcccctgccaatacggtggttacaagacccaggttaaggttcatgagcatagcaaatacccaaattacttggccattgtagtgttataccaagctggttaaagtgaaatcctatccgtcgatatttggcaggaagattggtaagaatggataggaatg

SEQ ID NO: 209011 - DNA, 379 bp, Gossypium hirsutum
cccacgcgttcgcaccattccgcaaagagctgctaactccgtggatgacagctacactgattgatttctatataaatgttgttgctctgtcggtttgggttgcctacaaagaatcaaattggactacggcatttttctggattgtcctacttataagttttggcagcatttccacatgtgcctacattgtcaaagaactctttaagctcgcttggcaagatcctctctaccttattttgataagaaaaggcaacagggcagaacatatgtatgagaacatataatgttgaatagtggtacaaagaaagtgatattgagaaaaattcgtgctgggttagtatgatttttaagcaacccacaaaggatgggaacttgtttt

SEQ ID NO: 209012 - DNA, 431 bp, Gossypium hirsutum
ggacaatgaagggcattcaagctttggataatgcttattccaatcaaataatagcacaacatttgaaggttctctatgtagttggaaaagacaataatattcagaaattagtatcagctgtcaaattcaagggatattccatctcaatcagctcctacttgaatagcatggaatctggaaacagcctagactgtggtggcagaatgagacccacagtctccattatcgatactgaaaacatcagttgtacagatttgggagagtatggtgttgtaataattccagactttgttctatcaattgatgattatcttcaaattctcacgaggatggcacggcacacagtcaatggtgtattgcatagttttttaactaaagatgattcgcagcatgctggcccgttgatcgaaatccttgaacaatgtgggcag

SEQ ID NO: 209013 - DNA, 236 bp, Gossypium hirsutum
  unsure (1)..(236): unsure at all n locations
cgaacttttcaatgaccaaaaaaagccncaattgtctctttctattcgaaaccccattgctggtcttaagctaagttgtgctctagtgttgtgcatgttggtggttgaacccattgccacaaccaccataacatgcggcgatgtgacaagcaaagtggccggttgcttatcatacttgcaaaaacggaggaacgtgccgaaagcttgctgcgacgggatccggtccctgaacaaca

SEQ ID NO: 209014 - DNA, 272 bp, Gossypium hirsutum
attaggcggtggctcatgctgtttgattttgggattaccattcttttattttggctgcttccatttatgagcctttgggttttgggactactggtggtaagcgtatgcaaatgaaggaagtcgcggcttttcttgcacatgtcggcgccaagacatcttgtggagatggtgtcatagacggaggaccgttggcatggggtctttgcttcaagagagaaatgagtcctagccaggattactgtgattgattactacaaatacatgtattcatg

SEQ ID NO: 209015 - DNA, 353 bp, Gossypium hirsutum
ttcgatttgatgaaccgctgccggtggtgaccggtgagtcgattttaggacgaattgaacaaacgaaagcaggtgcagaaatgccggaggaggatttggtggatataaagttcaagatttatgatggctcggatatcggaccgtttcgatactccgccacatcgacggtggatatgcttaagcaaagaattgtctctgattggcccaaaggtaagacaattgttccaaaatcagtgaatgaagtcaagctgataagttctggtaaaattttggagaacaacaagactgttggcctgtgtaaagtaccctttggtgaagttccggggtgggctataataatgcatgttgtagta

SEQ ID NO: 209016 - DNA, 251 bp, Gossypium hirsutum
tccacgcgtccggatggcatcaacaagaaaatagaggaggccattctaaaggctgataggatgggggtcaaggtcattagccttgcagcattaaataagaatgaagctctaaatggaggaggaacattgtttgttaacaagcacccacaacttaaagttagagtttgccatggcaacacattgagtgctgcagttattgtaaaagaaattcccaaagatgtcaaaaaaagtgttcttaacaaggcttcact

SEQ ID NO: 209017 - DNA, 171 bp, Gossypium hirsutum
agagttcagttagagaagcgacgacaatcacaaatgggttaggttcacggatcgttggcacgtgccgggaaagtgagagggcaaactccaaaggtagccaagctagacaagaagaagaagcccagaggtcgtgcctattagcggatgcaatacaatcgccgtttcgtcact

SEQ ID NO: 209018 - DNA, 393 bp, Gossypium hirsutum
  unsure (1)..(393): unsure at all n locations
attaaaccttctgcttagcttaaaaaatcttgaatccgtactctcctacttccctcgttatcgtcaatggcttcggacaagaagattaagatcgggattaacggatttggaagaatcggacgtttggttgccagagttgctcttcagaggaacgatgttgaactcgtcgccgttaacgatcccttcatttccaccgattatatgacatacatgttcaaatacgacagcgttcacggtcaatggaagcaccatgatcttaaggtcaaagactctaaaaccctcctcttcggcgaaaaacccgtcactgttttcggaatcaggaaccctgaggagattccatgggctgaagccggngctgagttcgttgttgagtcaactggagtgttcactgac

SEQ ID NO: 209019 - DNA, 438 bp, Gossypium hirsutum
caggatatttgagattgcaccatcagccaagaaactattctcattcttgagagactcaaatgttccattggagcaaaacacaaagctgaagccccatgccatgtctgtctttgtcatgacatgtgaatctgcagttcaactgcgtaaagcaggcaaagttacagtgagggaatcaaatttgaagaaattaggagctacccattttaagtatggggtagttgatgaacattttgaggtaacaaaatttgctcttttggagaccataaaagaagcagtaccagatatgtggtcagatgagatgaagaatgcatggggtgaagcctatgatcgtttggttgcagccattaaaatagaaatgaaggcatgctcactagctgcatgatttcacaagttccctacattattgcttgctaattttgggtccaataagattgaaag

SEQ ID NO: 209020 - DNA, 340 bp, Gossypium hirsutum
cgcaccttagctgattacaatatccaaaaagagtccaccctccacctggtacttcgtcttcgaggtggcatgcaaatctttgtcaaaactctcactggaaagacaattaccttggaggtcgagagttcggataccattgacaatgtgaaagccaagattcaggacaaagaaggaatcccaccagaccaacaaagattgatttttgctggaaaacaacttgaagatggaagaactcttgccgattataatatccagaaggagtctactctccatttggttctccgccttcggggtggtatgcacatcttttgtaagactcttaccggaaagaccatcactt

SEQ ID NO: 209021 - DNA, 358 bp, Gossypium hirsutum
cccacgcgtccgtttgagaatcatgaaggagaaaagccaaggcaatttcacacctccgcttgttattgtcattgctgacgaaagctgcaacccggaaacacttaagtatgctttggggcaaggagccattgagtatgagaagttcttagaaagtggtgaccctgactttgcttggaagcctcctcaagatgagtggcaaagcattgctttaggctatacttccggtacgacagccagcccaaaaggggtggtattacatcaccgaggggcatatctaatggctttgagtaatcctattatatgggaaatgaatgaaggagctgtatatttatggactctgcccatgttccattgtaat

SEQ ID NO: 209022 - DNA, 266 bp, Gossypium hirsutum
aagaaataaaggaagaagaagcaatggccactcttacagtgcccacgacagttccttcggtgtctgaagattgtgaacagctaagaaaagccttttcaggatggggaactaatgagggcttaatcatagatatattgggtcacagaaatgccgagcaacgaaacttgattcgaaaaacctacgctgaaacctatggagaggatctcctcaaggcactagacaaggagctcttgaatgactttgagaggctgggtttgctttgggct

SEQ ID NO: 209023 - DNA, 257 bp, Gossypium hirsutum
gcttcttcttcttccatggagatggggaatgaagtacttctgcgacacacttttggatgcagatggagaatgcgatattcttgggtggcagtacatctctgggagcttaccggatggtcacgagctaaaacgattagacagcccacagattgaagggtccaaatttgaccctgaaggtgaatatgtgaggcaaaggctgccagagctagcgaagatgccgactgagagaatccatcatgcttgagatgcacctcata

SEQ ID NO: 209024 - DNA, 391 bp, Gossypium hirsutum
acgcgaactgaaacacgaaccagtgaagactatctactgtgagcagcgatatcataatcgagccgagaccgatccagaagtgaagaaacagaccggagctgattaccaagaggagcaggatgcaaggcttccaaaatgagacagtatcggcataaatatgcctctaactgagaagacaagaaggatgaatgacaaagatgagagcgcgaagatgaaaaacggagtccgtattggaaacaaagctcgaggagcaactatggatactcaagcagccgctgatgcttgctcaaatgaacacattgcaagttacacaagacatattgggtatacgcaaccagatacgaaagaccatggatggcagaacatgaaaaatcaagctatgactggtcat

SEQ ID NO: 209025 - DNA, 292 bp, Gossypium hirsutum
ggtgttgtcacttatgactatgagaataccttcccagtcgcccctgccaggcttttcaaggcctttactgttgaagctccgaaagtttggcccacggctgcacctaatgcagtaaagagccttgaggttgaagctaatcctagctctggaagtatctgaaaaatcaactttgttgaaagccttccattccaatatatgaagcaccacatcggaggacatgattaaaggtaatcttcataccggtaccactttaatcgaaaagtgggccctttggggggataaagctttgaaa

SEQ ID NO: 209026 - DNA, 201 bp, Gossypium hirsutum
agttaatcgagccttgcttcgaagtgatcataatttattttcgactgagggtgctgatacaattgaaattgtgaataggtttagtagtaatcaaacagctttctttgaaagctttgtggaatctatgatcagaatgggaaatataagccctttaacaggttcggaaggagaaattagatcaaattgccgcgccgggaattc

SEQ ID NO: 209027 - DNA, 237 bp, Gossypium hirsutum
ctgacgcgttggccaaaatagaaccactttgtgggtttaatttcccagcaagggatttcaagccaggaagatttccctgctccacttggaccaacaatggcgaggatttcccatggcttggctttgcactttacatcctttaggacatgttccatcccaggacatgcatcttgaaactgggatgatggctcttgttgtttacgtcctgatcaaccactttttgctgggtttttattg

SEQ ID NO: 209028 - DNA, 237 bp, Gossypium hirsutum
gaaaaatgggtttgaaggaggaattctaggagtatgcggagaaagctaagacccttcccgagaacactaccaacgacgacaaactcattctctatggactcttcaagcaagctacttgtggaccactgaacaccagccgtcctggaatgttcaacatgaaggaaaagttcaagtgggatgcatggaaggctgttgtaaggaaaccgtatgaggaagcaatgaacgattattttactt

SEQ ID NO: 209029 - DNA, 278 bp, Gossypium hirsutum
gaaatgaaaggttctgccattactggtccaattgggaaggagtgtgctgatctgtggccaagaattgcaagtgccagccaatgccattgtttagggatttgaatttttctagagttttttgttcccttgagtcatggctttttgctggatcaagattttgttatgtgttttttagggtttcttgaaaaatatcgtatggatagctttgatttggattttgatgctgggatgtaattaatggatttcttccatgtttaagcttattattttcgcttttt

SEQ ID NO: 209030 - DNA, 320 bp, Gossypium hirsutum
  unsure (1)..(320): unsure at all n locations
gttatagccggaggacgagctcctgaatatcttgctatggatgcatttgtattgaacatggttcgcaattttgttaattctggaaagcctgttgcttcaatttgtcatggtcaattgatattagctgctgccggggcagttggtggtctaaaatgtactggtttccctgctgttggacctacacttattgctgctggtgcattgtggattgaacctgatacttttgcagcttgtgttgttgatggtaatatcattactgctgctacttatattggtcatccccaagtttatcaggctgtnttggaaaaccttaaggggca

SEQ ID NO: 209031 - DNA, 278 bp, Gossypium hirsutum
ctggttgctactgtgattgctgtatatgctaactggggatttgcaaggattcaaggaataggatggggatgggccggtgtcatatggctttacagtgttgttttctacatcccacttgatctaatgaagttcgccattcgttacatcttaagtggaaaagcttggctcaacttgctagaaaacaagactgcattcaccaccaagaaagactacggaaaagaagagagggaagctcaatgggcacttgctcagaggacattacatggacttcacccacc

SEQ ID NO: 209032 - DNA, 338 bp, Gossypium hirsutum
gctttccattttccctttttgatatccaaaaatacattctttcttttttatttcttttcttagttttggaaagatctggtaggtggtggatagatggggaggttatttgtggtgaaccttgaagggaaagtttatagctgcaagcactgcaaaatccatcttgctcttgttgatgatattctttccaagggtgaatgtttctgttggggagaaagaagatagactgatgattacagggttgcacactgtagcagatatcttctgcattgggtgtggatcaattgtgggatggaaatatgaatttgcccatgagaaaagccagaagtacaaaaaaggaa

SEQ ID NO: 209033 - DNA, 263 bp, Gossypium hirsutum
gtcctccccttctccgaacaactcttcttcttcgccacccttatttggcgccatttcttcggcggcgataaatccaaaacctccctatcaccgtcgtcgaagccatacatccccgactacaagctcgccttcgaacacttctgcgtccacgccgcaagcaagacggtgctagacgagctgcaaaagaacttggaactcagcgaaaacaacatggaagcatcgaggatgaccttacaccgattcggcaacacatcgagcagcag

SEQ ID NO: 209034 - DNA, 324 bp, Gossypium hirsutum
gtgctcttggacaatgaagcaatttacgacatatgccggagatccctctatattgagaggccaacttacaccaatttgaacaggctgatttcttaaaccatatcgtgcttgacgacttctttaaggttagatggagccattaatgtagacattacagagttccaaaccaatcttgtgccatatcctcggatccatttgatgctctcttcttatgcgcctgttatctcagcttgagaaagcataccatgaacagatatccgttctctggatcacaaacgctcggtttgagcccttaagcatgatggctaagtgctatccatggca

SEQ ID NO: 209035 - DNA, 411 bp, Gossypium hirsutum
gtgattcgtcgaacgaggggattgcatataattcatgggggcactggaagctggcggtgcgggacttggacgaagctctttgcttgtaattacctttggagcacgggtaaggatacccggggctatacaatatgactcgaaagtcctaagtgatgggcaggctggcacaccacaaaatgttgacaaatcaaccagcttggcacggaaagggatccgtctctttaagattgtgaacgatttgcatggtcttattagcccagttcctcaaagaactccccttccacttgttctgctaggaaagtcaaagaatgcactcgtgtcaactttcttatttctcgatcaaattgtgtggcttggcagaacaggcatctataaaaacaaaaaacgtgctgagttgattggacaaatatc

SEQ ID NO: 209036 - DNA, 376 bp, Gossypium hirsutum
gtccgaatcaagacatggcagggaggttctggttcagtgaaacaagtgacattctcagacatacaattatcagaagttgaaactccaataatgatcgatcaattttattgtgacaaaagccactgctcgaatcaatcttcggctgtagaagtatcggagataaactacgtaaacatacgaggaacctatacagttcaaccggtccacttcgcgtgcagcgatagcttgccgtgcagtggggtttcgttaagtaccatcgagctgcaatcagtttaagaaaaccatcctctcagtggacctttctgttgggaaacatatggtgagcttaaaacatcaactgaaccaccaattagtttgttggagagtggaaaaccat

SEQ ID NO: 209037 - DNA, 451 bp, Gossypium hirsutum
acgcgtgcgcccacgcgtccgcccacgcgtccgggcatggctaaagctacatcttttactgctttcctttggatggcttctctatttctttcttctcacttttctgtctcaaaagcagacaactccgctcccatagtgagtgggctctcatggactttctacaaaacttcatgtcccaaagtagaatccattattagaaaacaactgcagaaggttttcaagaaggacatatgccaagctgctggcttgctccgtcttcatttccatgactgctttgttcaaggatgtgatgcatcggtgctgctggatggatcagcgagtggaccaagcgagcaggatgctccgccgaacctgaccttgagaggattcgaaatcatcaatgacctgcgtgcgcgtgtccacaaggagtgtggaagagtcgtctcttgtgctgatatcgctgctcttgctg

SEQ ID NO: 209038 - DNA, 428 bp, Gossypium hirsutum
cccacgcgtccgtcttatttgaacttaaagtcccagctaatattagaatcatgggggctgggacttatgactatgagaatacctccccagtcgcccctgccaggcttttcaaggcctttactgttgaagctccgaaagtttggcccacggctgcacctaatgcagtaaagagccttgaggttgaagctaatcctaactctggaagtatcgtaaaaatcaactttgttgaaggccttccattccaatatatgaagcaccagatcggaggacatgatgaaagtaatttttcatacagttacgatttaatcgaaggtgggcctttgggggataagctcgtaaaaattagctatgagaacaggtttgaagcaactgcaggtggaaggagtatttgcaagagctcaatgaaattctacactatatgcgataat

SEQ ID NO: 209039 - DNA, 421 bp, Gossypium hirsutum
  unsure (1)..(421): unsure at all n locations
acgcccacgcgtccgagacagggttatggaagaaaccaaggataaaaagaatgctgttgaggcctatgtttatgacatgaggaataagcttagtgataaatatcatgattttgttactgctccggagaaagaagagcttactgccaagcttcaggaaactgaggattggctatatgaagatggcgaggatgaaacgaagggtgtttatgttgccaagcttgaagagcttaagaagcaaggggatcctattgaagaacgttacaaagagtatatggagaggggaactggcattgatcaacttgcttactgtattaacagttacagggaggcagcaatgtcaaatgatcccaaatttgatcacatcgaacttgctgaaaagcaaaaagtcttgaatgagtgcgtanaagctgaagcctggttg

SEQ ID NO: 209040 - DNA, 437 bp, Gossypium hirsutum
cccacgcgtccgtcttatttgaactcaaagtcccagctaatattagaatcatgggtgttggcgcttatgactatgagaatacctgcccagtcgcccctgccaggcttttcaaggcctttactgatgaagctccgaaagtgtggcccacggctgcacctaatgcagtaaagagccttgaggttgaagctaatcctagctctggaagtatcggaaaaatcaactttgttgaaggccttccattccaatatatgaagcaccagatcggaggacatgatgaaagtaatttttcatacagttacgatttaatcgaaggtgggcctttgggggataagcttgaaaaaattagctatgagaacacgtttgaggcagctgcaggtggagggagtatttgcaagagctcaatgaaattctacactataggcgataatgttatcact

SEQ ID NO: 209041 - DNA, 162 bp, Gossypium hirsutum
cccccaccttatgaacatcctgttgataaacctcctaaggtgaaacccccaccttatgaacataagccccctgtctatgaaccaccaaagaaggaaaagcctgagcctaagccaccagtttatacaccttcaaagaaagagaagcctgaacccaaaccacca

SEQ ID NO: 209042 - DNA, 297 bp, Gossypium hirsutum
cgtctggaactctcgcgcatgccatcatcaggaagtacgggctcatgtgttgcagacagtgcttccgtagcaatgccaaggaaattggattcattaagtaccgctgaggaatgtttatatggctagaagttggaaacactttttggctagtatgaacctttgtttcgaaattgtagcaacttttaaaaaaacattgctgttttttggtgaatttaatttaaaaacttgaaagtttgtttttgcaaaaggaaaatttgttggtttctcaaaggaagaaatcatacctgtttttatctt

SEQ ID NO: 209043 - DNA, 441 bp, Gossypium hirsutum
cccacgcgtccgggctaaaaaggcaaaggatgttgtggaagcagtagaccctgataagaattgggtcactttcagagtgatcgaaggagatctaatggaagagtataagagctttgtaatcacgattcaagtttcgcccaagagcgagggtagtggcagcgtagtgcactggactttggaatacgagaagctgcacggcgggattgagcatcctgagactctgctgcaattcgttcaagatgtctgtaaagacattgacggccacctcacccaagcaagttaagcagtatcacatgatgctattgttgccgctacttgaagcactattcatctatttaatgaataaaaggacaacttcctttctcatgtatttcgatctgaatatgtacgtttagatcaatatgcaggcacggggaggagctttgtattttcttgcatgtt

SEQ ID NO: 209044 - DNA, 361 bp, Gossypium hirsutum
gatgtgcgtgcgggaacggcctggccggcccaatcactacgagctgccgaatggcggacggctgatcctatgcaacctacgtgcatcgcgtgcacggcagaaccgagaacaaacaatgctcatccgggcttgaaaccggtgctgatgtaaccgcaacgataaaagcagagcatcatgaaagcgacattggagctgggttggaatgtatgaccactaatccaatggcatgggaaggttcagttaacccatgggtgaagccaatggaacaagctcctaagggtctccttgctatagggattacaacacataacgttgctcatcgatttggtgggacaaggcaggatccggatcttgctgcgga

SEQ ID NO: 209045 - DNA, 326 bp, Gossypium hirsutum
agagaaaacaaatttgaatcctagtgaagttggggatattgttgtgggaacggtcttggcgccaggatctcaacgagctagcgaatgtcggatggctgcattctatgctggcttccctgaaactgtgcctgttagaactgtgaacaggcaatgctcatccgggcttcaagcagttgctgatgtagccgcagcgataaaagcagggttttatgaaattggcattggagctgggttggaatctatgaccactaatccaatggcatgggaaggttcagttaacccatgggtgaagcaaatggagcaagctcagaattgtctccttgcta

SEQ ID NO: 209046 - DNA, 392 bp, Gossypium hirsutum
cccacgcgtccgcgggaagacaacaaattcgagaaccttaacttcaatatgttaaacttggactccaagattggagataatgtaagcaaaagctcattccgaaatggtacctacaatataaatgctgtttaccagaaaaataatagcaatagcctgggaaacctggctggcaacaaatatagcggcaataatcatagcagcaaatatgtcaataataacagcagcaccagcaataacaacagcaacgagaacagtgcaaacaatgctgttgacaaacggttcaagacattgcctccagctgagacactcccgagaaatgaggtgcttggaggatacatttttggtttgtacaatgatacaatgcaggaagatctaaagcggagctattttgt

SEQ ID NO: 209047 - DNA, 278 bp, Gossypium hirsutum
tcgcccacgcgttcgcccacgcgtccgggaagaagagacggtagaaggagcagagcagatgttgtggaggagtatcttccggaccacaatgagaccatctctggcgttcttgacaggtttgccgccatgggtattgacacccctggagtcgttgccctcctaggatctcacagtgtcggcagaactcactgtgtgaagctggtgcatcgtttgtacccagaggttgaccctgccctcaaccccgaccatgttccacacatacttcataaatgccctga

SEQ ID NO: 209048 - DNA, 285 bp, Gossypium hirsutum
cccacgcgtccgcccacgcgtccgcccacgcgtccgcccacgcgtccgcccacgcgtccggtgccttgtacgtagtaacagtagcgggaaagagagaagcctcaccgccgctgccgcagccaccatgggtcgtatgcacagtcgcggtaagggtatttcagcctcagctctgccttacaagaggaccccgccaagctggctcaagatctcgtctcaagatgttgaggaaaacatttgcaagtttgcaaagaagggcttgaccccatctcagattgggggtcattc

SEQ ID NO: 209049 - DNA, 418 bp, Gossypium hirsutum
ggggggtaactcacctcgtgcttattgcacgttgcttcgtcgccgttgtgccaaagactgcatctttgcaccttatttcccttccgacgatccgcacaaattggccatcgatcacaaggttttgggtgccaccaatgtcagcaaaacgttacaggttcattaacaaccccctcatctaatacgttcattaacattttgggtaaattgcaatagtagccacccaactattagtaatttctttgttggtcactcaactatttagttttgtcttttttgatcacccaactatcttggattggaacttacattgttgggtgtttctattttttagttagtgatgacaaaaaagaagaagacaaaattgaataggtgagggctattttgcaactttttatggttgggcgaccaaaaaaagata

SEQ ID NO: 209050 - DNA, 445 bp, Gossypium hirsutum; identical to SEQ ID NO: 194606

SEQ ID NO: 209051 - DNA, 239 bp, Gossypium hirsutum
gcttatacaccggctaagagagaggagcctgtacccgtgcgaccaggctctgaacactcggagaaggaagaggccgctccaaatgcaccagtttatacaactcctaagaaagagatggctgagcccgaaccacctgtttttgaacccgcaaagaaagaaaagccatgtcctaagccaccagctggtacaccaccaaagaaagagaagcctgagcccaaaccaccagtgtatggaccacc

SEQ ID NO: 209052 - DNA, 178 bp, Gossypium hirsutum
acgaccacgcgtacggctctgtatattgaaatttatttactcgaatctctctttagccaaaaaagatgcagatcttcgtaaagactttaaccggctagacgatcactcttgaggtcgagagctccgacacgatcgacaacgtgaagaccaaaaaccaagagaaggttggcataccttc

SEQ ID NO: 209053 - DNA, 304 bp, Gossypium hirsutum
ttgtgggtgctgtacactgtatctcctagccatcacacgtggatgccgatgtcgccgcaccaggtgtaccgaagaagagaacgttcaagaagttcagtttcagaggtgtccatctcgatgctctctcggatatgtccactgatgaactcgtcaagctcttttccgcccgtgcacgccgaaggtttcagagaggtctaaagaggaagccaatggctctgataaaaaaattacgcaaggcttaacgtgaggcgccacctggtgagaaacccgagccagttaggacacaaccttcgcaacatgatta

SEQ ID NO: 209054 - DNA, 369 bp, Gossypium hirsutum
cagtctatggtttcagtgacaagggtggtcttctttctttccctcaaagggacgatgcattcgagatgaccaagccttatagcagcaagaccggtgcaatcatcgattccgaagttagagagtgggtaggcaaggcatacaaccgaacagtgcagctgatagaggagcacaaggaacacgtagctcagattgcagaattgcttctagagaaagaggtccttcaccaaaaagacttggtccgagtacttggtgaacgcccatttaagtcgagtgaacccactaattatgacaggcttaagaaagggttgcaagaagaagataaatcatgcaaggacacatcaacagagagcaagactgtggatgataatg

SEQ ID NO: 209055 - DNA, 354 bp, Gossypium hirsutum
  unsure (1)..(354): unsure at all n locations
gcgcaccactgctgaacgggaaattgtccgtgacatgaaagagaagcttgcttatgttgccctggactatgagcaggaactggagactgccaaaagcatctcatctgttgagaagaactatgagttgtctgacggacaagtcattactattggagctgagagattccgatgcccggaagtcctcttccagccatctttcatcgggatggaagctgctggaatccatgaaactacctacaactctatcatgaagtgcgatgtggatatcangaaggatctctacggtaacattgtgctcagtgngggttcaaccatgttccctggtattgcngaccgcatgagcaaggagatcac

SEQ ID NO: 209056 - DNA, 417 bp, Gossypium hirsutum
  unsure (1)..(417): unsure at all n locations
cccacgcgtccgcccacgcgtccgcgacttctctggattgtccctcttttctcccttcacattgggaacgagtttgggtagccatggcaaagcaccatcctgatttgatcatgtgccggaaacagccggggattgcaataggacgattatgtgagaagtgtgatggcaagtgtgtaatctgtgactcttatgtccgtccttgcacgctcgtgcgagtttgcgatgaatgcaactatgggtcgtttcaaggtaggtgtgttatctgtggaggggtggggatatctgatgcatattactgtaaggagtgtactcagcaagagaaagatcgcgatggttgtccaaaaattgttaatctcggtagtgctaaaacggacttattctatgaaacgtaaaaatatggntttaagaaaagatgat

SEQ ID NO: 209057 - DNA, 348 bp, Gossypium hirsutum
gcggtcacaccatttcagagagttgcgtgttggtgattatcttgctgtgaagggtcccaaggggcggttcaggtatcaacctggtcaagttagagcatttgggatgattgctggaggctctggcattactccaatgttccaagtagccagagccatattggagaacccaaaagacatgacaaacgtacaccttatttatgccaatgttacatatgaggacattcttttgaaggaagagttggatagccttgttgccaagtaccctggtcgcttcaaagtctactatgttttgaaccagcctcctgaagtctggaatggaggtgccggctttgtgtcaaaggaaatgat

SEQ ID NO: 209058 - DNA, 283 bp, Gossypium hirsutum
agcctgcgttctactgaaagccggacaggtgggcctggcatgcaagagaatctcgctgtatgtggccttggcatgagcaggaactgcatactgccataactccgctcatctgttgataagacctatgagtagactgacggacaagtacttactattggagctgacagactccgatgaccggaaggcctgctacatgcagctatcattgggatggaagctgttggtatccatgacactacctacagctttatcatgacgtgcgatgtggatatcaggaaggatc

SEQ ID NO: 209059 - DNA, 413 bp, Gossypium hirsutum
acggtacttcaacaaagggttggacaacaacaaggagatccaagagctgaaggttgaggttgagaggttctcatcctcattcgatatgcctggcttcaagatgtccgaaatgaagtacaaggattagatctaaataatcatacgatctaattgatgttattatcagcatctgccactttttgggttgcccccatttgatgtcttatgagtgaaaggaaaaagaaagggaaaagagaaggatgcaaatgccttccacgtacggttttaagcgtcttcatttactggtcaatttgatatgatctttgtcaaagttttgctgttctggctttataagaatttgcataaaacgtatgtactaaatttatgtattcttttttggtgctagaaaaagtttgagggtggggtggggggga

SEQ ID NO: 209060 - DNA, 264 bp, Gossypium hirsutum
gtgagcctcgccttcttatcctcacagatcctaggaccgaccaccagcctatcaaggaagcaggtcttggaaatattcctaccattgctttttgtgacacagactcaccaatgcgatatgttgacattggtattcctgctaataacaagggaaagcacagcattggttgtcttttctggctgttagctaggatggttcttcagatgcgtggtacaattgctcctggacagaagtgggatgtgatggtggatctatttttctaca

SEQ ID NO: 209061 - DNA, 276 bp, Gossypium hirsutum
cttacactgattttacctcggctccccccatgttttgcaggagctcaagctttaggggattgggcccttgtttgactgaaacgtggggtgatctcccgctcaaagaagacgattccgaggacatgctcggttacggactcttacgagatgctctaaccgtcagttgggcaccgttcgataactctacgacgaatgtcgcgctgatgcaagccggcaaccgcatgaatttctaccgcagacatcggtggaaaaagtggataccgacgcggagaggac

SEQ ID NO: 209062 - DNA, 286 bp, Gossypium hirsutum
gcgaatgggacatggttcgtcatacggtgttggcgtcaagctaggactagtaagagctgagtgtgctgttgaccataacaacggaactggtgcactcttcttccgatttggagaaagatattaaaatgtgatttcgggtctaattctgctaaggtgggccgttacaggttccggttatggttgaactgttatttatcttagaaaatcttgttgagaagtatggaactaggcatgttcttgtgtcaaataaattttgtttcgattttgggctatataattttatctt

SEQ ID NO: 209063 - DNA, 388 bp, Gossypium hirsutum
  unsure (1)..(388): unsure at all n locations
caggaaaccaaaccaaactagtgagccgcagcttctcttcttctgtatcccaaaatggttgcgtttaggtgtcatcaataccaagtggtgggcanaggtcttcctacagacgcagatgagcatcccaagatttaccgtatgaagctttgggccactaacgaagtccgtgccaaatccaagttttggtattttttgaggaagctgaagaaagtgaagaaaagcaatggacaagttttggccatcaatgagatctttgagaaaaaccctaccaagatcaagaactatggcatttggctgcgatatcaaagtcaaactggttatcacaatatgtacaaggaataccgagacacaaccctcaatggtgctgtagaacagatgacactgagat

SEQ ID NO: 209064 - DNA, 487 bp, Gossypium hirsutum
cggaacgaccgggccggccgggcgtgcgatcggaatcaatggatttggaaggatcgggcttttggttgcgagagttgctctcgaaagctgggatattgagctcgttgctgttaaccatcctttcatcaccactgaatacatgacctacatgtttaagtacgacagtgttcacggtcaatggaagcatcatgagcttaaggtgaaggactcaaagacccttctctttggtgaaaagcctgtcacagttttcggtatcagaaaccctgaagaaatcccatgggctgaggctggagctgagtatgttgttgagtctactggtgtttttactgacaaggacaaggctgctgctcacttgaagggtggcgcgaagaacgttatcatttctgctcccagtaaggatgctcccatgtttgttgtgggtgtcaatgagaaggaatataagcctgaccttaacattgtctccaatgctagttgcaccaccaactgt

SEQ ID NO: 209065 - DNA, 447 bp, Gossypium hirsutum
  unsure (1)..(447): unsure at all n locations
acacacaacatctagttttggctcaatttgacaaggngactcgtacaaagagcanatgtaaattcacacttaaggattgcatcatgcatataaacaataaagacattctctttaataaagcaacaggcgaatttgatttctgattttgttagataaaactgtaatcgccatcgtattgcagcacttgccttaaaagagcaagtcaaggggtgttattctgtgtttcgtaatttgtcttttaattattattagagtgaaaagttgattgaagggcatgggatatgctttatattaatgtcttccttaagacttgggttcgatggttgtcgtattttacataaaggaagagagcattttctgccttagaatgtatgactacttgagacacctttttgcacatctaaaaacttttgcaatggaatatgtaatttcatttataccatatac

SEQ ID NO: 209066 - DNA, 334 bp, Gossypium hirsutum
  unsure (1)..(334): unsure at all n locations
ccacgcgtncgctaactcttaagccaagaaagcaagccataaggttntgagaaaagatcaaaatggattcaggaagatgagcttccacagccctccttttagccctcaacattctcttcttttccctagtcagtgctaattgtggatcttgttcttcttctggctctaacccaaggccaactcccacccctactccatctgcacgaggtaggtgccctagggatgccctcaaattaggtgtatgtgccaatgtgcttaacttagtcaatgtcaccgttggttcacccccggtgatgccatgttgttcccttctcaacggtcttgtggacctcga

SEQ ID NO: 209067 - DNA, 195 bp, Gossypium hirsutum
atgacagaacttattatgaacctcaaagtactctaagcagctcaggccgaaatgcggaaagttgtagggtatagaatagtgttcttagaaactgatctgcctcaccttgattacatgaaagctgtcattatagagacctggcgattacatcctcctgcaccggtcttacttggtaggggatctatggaagacctt

SEQ ID NO: 209068 - DNA, 306 bp, Gossypium hirsutum
cccacgcgtccgcccacgcgtccgtgttgctgccacaaatgaggctaaagatgatgctaacgtggatgaatctgatgttgtagtcgtccagactgctattagagggttcttggcacgcaaagagctaggaaagcttaagaacttagtaaagttgcaagctgccttacgggggcacttggttcgaaggcatgctgtggggacattacggtgcattcaagccattgttaaaatgcaaatgctagtccgtgcccatcatgctcgtttgtctcaagaattgtcctattccgaaaaagatgctgcttctac

SEQ ID NO: 209069 - DNA, 377 bp, Gossypium hirsutum
cccacgcgtccgcccacgcgtccgcttcaactatcaaaacaataaaaaaagcttgtgtacaggagcgctcaagtttttatcaatccacagtttgaatttgaattgaacaaatcaatattaagataagagaaatggctcgctctctctccaacgctaagcttttctctacttttgttgtcgatggaatctctaacgttatctccagacgaggatatgcggcggcatcacaaggaattgtgtcgagtggaataagaagaggagcgggaaggagcgctgctacggtggccaagaaaacaggggaagagatgtctcgcggagctaaagagaaggtttcgtgggttcccgaccctgttaccggatgctacaagacccgagaa

SEQ ID NO: 209070 - DNA, 453 bp, Gossypium hirsutum
tacaaatcacccccacctccagtgaaggctccagcacctacctaccattacaactggccctccgtgaccatcaccgagcgccggctcccccatactactacaaatctcccccaccaccagcccactctccctcaccaccatactactacaaatctccacctcctccatctccctcaccacctcctccatactactaccactcacctcccccacctgtgaaatcacctccacctgcagtctacatctacgcttctcctccaccaccaacaccctactagatctaaaaagatcgaccacacaccgttcatgttgtagtttcgccagcaaaataaaggaaggtgccaaggaggaagggagatttggacatcaaagcagttccttttcaagtccatggaataagggtctaagcattacattggagagatacaattttgataattcaagcctacatat

SEQ ID NO: 209071 - DNA, 353 bp, Gossypium hirsutum
cccacgcgtccgcgaatgttgaaaaaagttggggcattttcaaaggatccgattgctgatacgggtgtaaccgtttgtggtgtgtctgagctcgatgcttgctccgatgcttgtgctcgtaccgtttgtgttaaccaacatcaggtacccaactggaatgacattggccttcgaaggtgtcaaagtgaatgtcttagactatctgcttcccattcttcttagaacattggcttttaattacagtgactgccatatcagtttcaaaacttgggtctctcaatggtgtgatccttttagcagtcattacgtgattggtgaatttgtttttgtgttttgacaattagtggttaaaa

SEQ ID NO: 209072 - DNA, 283 bp, Gossypium hirsutum
  unsure (1)..(283): unsure at all n locations
agcctgctgaggagaaaaaggcctacaatgccccanctgagaaaataccaagagccagcaagaaacttcctaaggaagcctcgaacaagaataagaatcgcatcatgaagagcattgaaacctacaagaactacatctttgaggtgctgaagcacgtccattctgatattggcattttcagcaaagtcatgggtattatgaacagcttcatcaacgacatcttctagaagctggctcaagaatctttgaggctcgcacgctttaacaagaagcccaccatcac

SEQ ID NO: 209073 - DNA, 383 bp, Gossypium hirsutum
  unsure (1)..(383): unsure at all n locations
cggttcgacccacgcgntgcgccacgcgtnncgccacgcgtncgtgatccataccaccctgaccagaccgctgaactcctggcaactttctgtgaacgttgcaaggaggacccaaaccactggactaaaatatctgatggagggcttaagaggatttatgaaaggtatacatggaaaatttattctgaaaggctgatgacattggctggagtatatggtttctggaagtacgtttcaaaactcgagagacgtgagacccgaagatatcttgaaatngtctacatcctcaagttccgtgaattggtaaaatctgttcccttggccagtgatgattaaagcttaatccctgcgtgcgctcgtaaggtactggtagtatacataca

SEQ ID NO: 209074 - DNA, 424 bp, Gossypium hirsutum
  unsure (1)..(424): unsure at all n locations
tccgcccatcgtctgcttttgccaaaagacagtttaagactccactttgaaaaccggaaatgtgggacgagtagcatcatttcgagtccaaggccgacnccggcgcttccaaaacctaccctcagcaggccggcaccatccgcaagaacggttacatcgtcatcaaaaatcgcccctgcaaggttgttgaagtttccacctccaagaccgggaagcatggtcatgcaaagtgtcactttgttggaatcgatatcttcactgccaagaagctcgaagatattgttccttcttcccacaattgtgatgttccgcatgtcaatcgtactgactaccagttgattgacatttctgaggatggatttgtgagtttgctgactgatagtggagacactaaggatgatctgaggctcccaactgatgagaa

SEQ ID NO: 209075 - DNA, 377 bp, Gossypium hirsutum
  unsure (1)..(377): unsure at all n locations
nccacgcgtacggcggtgaggaactggtggctgacagtcacttgttaccagccatggcagttgggaggagggtcagtgatttgatcagagaatacccacggtccgatcccaatccaaccgctgcgcttgtcttcggtggtacggttttggatatcaaaccatcaccggttgttgcagcgtttagttcccggggacccaatatggtgacgccacagatcttgaaaccggacgtgattggacctggtgtcaacatattagctgcttggtcagagggtattggtcccactggtttggccaaggactcgaggaagaccatgttcaacatcatgtcaggtacatcaatgttatgcccacacatcagtgggctagcagcgttg

SEQ ID NO: 209076 - DNA, 311 bp, Gossypium hirsutum
  unsure (1)..(311): unsure at all n locations
agagctccatgctgtgagagaatgngagtgaagaaaggtccttggactccggangaagatcagattctcatcaattacattaatctctacggccatggcaactggcgagcactcccaaaacaagctggtttactgaggtgtggaaagagttgtaggctacgctggactaactatttgaggccagacatcaaaagggggaatttcagcagggaagaagaggataccataatcaacttacatgaaatgctcggtaatagatggtcggctattgcggcgagattaccgggacgaacagaacaacaaattaaaaa

SEQ ID NO: 209077 - DNA, 483 bp, Gossypium hirsutum
  unsure (1)..(483): unsure at all n locations
cccacgcgtccgttgacttctaccatttaaaaagtcgcaagggaatgagtcagctggaattggaggatgaggtccaagatgatttgaaacgtgcaactggagagtttgtcaaggatgcagatgatgcaaataagcttaatcgcattcttcaactgactggattgagtgacccagtatatgctgaagcatatgtgactgtccatcactatgatattgttcttgatgtcactgttatcaatcgaaccaaggaaactcttcagaatttgtgcttggagttggcaaccatgggtgatctgaaacttgttgagcgtccacaaaactataccctcgctcctgaatctatcaagcaaataaaggctaacatcaaggtgtcttcaactgagacttgtgtcatatttggcaatatncgttacgagacttcaaatgtgctcgaaagaacttgttgtgntcttaatgacattcatattgatataatggactaca

SEQ ID NO: 209078 - DNA, 374 bp, Gossypium hirsutum
ctcgcctaaatgaaatctgatgcttgagatgcccacatgtgaagggcagagaagatggtttagattatatggatgttgaagcactgaagaagctaaacaagaacaagaagttggtcaaaaagcttgccaagaagtatcatgcttttttggcttctgaatctgttatcaagcagatccctcgtctcctgggtcctggtctcaacaaagccgggaaattcccaacccttgttactcaccaggaatcgctagagtccaaagtgaatgagaccaaggcgatggttaagttccagctgaagaaggttctttgcatgggagttgccgttgggaatgttgcgatggaggagaagcacatcttcctaaatgtgcaaatgagc

SEQ ID NO: 209079 - DNA, 391 bp, Gossypium hirsutum
attagcggttcggccgacgcgtccgcccacgcgtccggttggccaacatccgaaagctaaagacagtccccagcctcaggggagaccgtcacatttgtggatggggcagaatcttcacgtgtgccgcctgctaatcaagtacctacccgggggaacgaagctggtccatcgaatcaacccccacaaggggtcccctatccgcatcaagaaaatcaaattatagggggggattcgatcctagcgatcgaacggcgccttttggagcacaaacacactccttctgaccacgagctctacatggctcgtattcaagccgaacatcttttcgaggtcaaggtcgagattatcaaactcatggctgttcttgaaccaacgggggattggatggggc

SEQ ID NO: 209080 - DNA, 426 bp, Gossypium hirsutum
  unsure (1)..(426): unsure at all n locations
cccacgcgtncgtccactcgtccgccgggttcaagtcctcattgccccggaatacctagcgtggaaccccgacaccggggcagggaccataatagattcgggtacggctgtaacccgattcgtccagcccatttacaaggcaatccgagatgagtttgtgaagcatgtgaaaggtccatttactgccattggagtatttgacacatgctttgatgctacagcagaagctgaggcacctttaataacattacatttcgaagccttgtcgatgccattgccaatggaaaacagcttcttacacaccaatgccgggtctcgggcatgcttggccatagcaccggtccccaacaatgtgaacgccgccatgaatgtgatagccacattgcagcagcagaatcataggattctctttgatgtcatcaattc

SEQ ID NO: 209081 - DNA, 244 bp, Gossypium hirsutum
  unsure (1)..(244): unsure at all n locations
tgatagatcttgctgagctccatggtgacagaaggaggannacaatgacgtcgtgttcatgaagcttgtgagaaatggggcttctttcaggttgataaccatggagttgataagaagttaatggagaaggtgaaagagatggtgaatgattactatgatgagaatttgacagacaagttttatgaatcggagatgactaaaagtttgaacaagaatgagaaaatctncgacatggattgggaaa

SEQ ID NO: 209082 - DNA, 379 bp, Gossypium hirsutum
cccacgcgtccgcccacgcgtccgataaaataaaaccttcagctcaaatccgaggtcctccgggtcatcaagaacccaaccacggtactggcaaagcaaacatgaacatgccaaagcaagtgacaaacacatcttcaccgaaaactccacgaagcaaccagtcacctcgaaaccatgatgctggtagacatctttttagttcattaacaagtacatggcctaagtccttccctactaccattgcaatgatgatgcaaccaccaactgctaccggaaacatgactcggtgccggcatttgagcattaacggacccgacgcatcgaggctgaactacacgagagaccagggagttgttagaaaggacataatgcaatggat

SEQ ID NO: 209083 - DNA, 430 bp, Gossypium hirsutum
tgtttatagctttggagtagtgatgttagagatagtaacggcaagaaaaccgatagagcacgggaaatatatggtaagagaagtggcgacatcgatggataaatcgagaagtttatataatctccaagagattcttgatccaaccattggttcagatacagatacaataccccatgggttggaaaactttgtagatttagcaatgagatgtgttgaagaagcaagaactgataggcctacaatgggtgaagtagtgaaagagattgaaaacattatgcaagcagccggcttgaatccgaatgcggaatcagcttcgagttcggctacttatgaagatgcaaataagggaactcctcatcatccgtacgcttgtaaaatttggaccgaatttaatttggggtgaacccggttgagtgtcatttatattact

SEQ ID NO: 209084 - DNA, 388 bp, Gossypium hirsutum
tctctttcactcacaaacaagcacctccaaatccaatggccgcggcagcttcggcgccaccaccatgcgcgcgccctaaaccttccatggcaccacctgaaacaaccccgataggccaccccgtcttcaccaggatccgcctagccaccccttcagacgttcctttcatgcacaaactaatccaccaaatggtcgactttgagcggctgacccacctttgctccgacaccgaatcttacctatcttccaaccttttcctctaccctccttttcattcattcacaatttttctactcgaacttttctcttcccccaatccttctcttctttcccctttaccaactttcacttccattgaaaagacatttaacttctacattcccttaaa

SEQ ID NO: 209085 - DNA, 419 bp, Gossypium hirsutum
  unsure (1)..(419): unsure at all n locations
gcgaccacgcgtncggcctttggtctcaacactcaagaccttgttgctctcgttggaggacacaccgtanggagttcagcttgccagctttttagctacagattatacaacttcaccaacggtggtccagaccccacagtcaactcagcattcgtgcctcaactgcaagcactttgcccacaaaacggtgacggctcaaggctcattgatttggacactggtagtggaaacaggttcgacacctccttcttcgccaacttgaggaatgttcggggaatactagagtccgatcaaaaattgtggactgatccctccaccaggacttttgtgcagcgcttcttgggtgagagaggctcgcggcctttgaactttaacgtggaatttgcaaggtccatggtgaagatgagcaacattggtgt

SEQ ID NO: 209086 - DNA, 332 bp, Gossypium hirsutum
  unsure (1)..(332): unsure at all n locations
gaatgcagctgaattgggtcttaaattcttcttgaagatatttgagattgcgccatcgtccaagaaactattctcattcttgagagactcaaatgttccattggagcaaaacacanagctgaagccccatgccatgtctgtctttgtcatgacatgtgaatctgcagttcaactgcgtaaagcaggcaaagttacagtgagggaatcaaatttgaagaaattaggagctacccattttaagtatggggtagttgatgaacattttgaggtaacaaaatatgctcttttggagaccataaaagaagctagtccagatatgtggtcagatgaga

SEQ ID NO: 209087 - DNA, 302 bp, Gossypium hirsutum
ggaaaggtgtataatgtaacccaattcttggaggaccatcctggtggagatgaagctttgcttgctgcttgtggtaaagatgcgaccaatgattttgaagacgtatgtcacagtgatgatgcaagagagcagatgcagaagttctatattggtgaggtggatgccaccaccattcccgcacgatggatgtacaaagcacagacgttaaccgcggttacttatcaagaggagcctggctttctgtctaagattatacagatcctggtacccctcttgatattaggcttcgcattcggcttaca

SEQ ID NO: 209088 - DNA, 442 bp, Gossypium hirsutum
gtcatcaccatgattcaaggaaaataattatcatatataatcaatctctttgttgtgctattgatttcaatatctgatatatattggcaagatatactcaaacaagtgagcagattgttctttctctgaaacttacaacttcaccatgaacaaaagcaagctccagctgcaactctgtgcagggatatttactttaagcatcctctccaatggtgcttatggtagtgacaaaatctttgacataactcacaaaatcactttttagttggcaacctttggatcaaaaaaggggcttgggcaaatcatttggcttccttcccggattaaaaaaggggtccacagcgaatgtgtcggaattcaaattgtgaaaccacactggcactcacgttgatgctcctagtcacttctttcagaagtactatgaacaaagatttgatgtttc

SEQ ID NO: 209089 - DNA, 303 bp, Gossypium hirsutum
gcctcccgtccatttacacgtacgtgcacacaattcttgtgttagcaaagcgagtgctttcactggtggaggtattgcctagacgctcgccacattgagcattccttgggttattattggtcatcctgggaggagacttatgttgaaggcgtcaaatttgtgcgttaccgctcaagatgcttatacacttccttaacgcttgaaggtgatcgccttgattacggaaacacttggtcacgagaagcatgattactgggcagtcgagtgcaaaactctcattgagtaaaaataaactggctgatg

SEQ ID NO: 209090 - DNA, 378 bp, Gossypium hirsutum
gccacgcgtccgcccacgcgtccgttttgagtaaacaacactctcaaagcaatggcaaacaatcgctcacagcttctttcatcagagttgatagataggtgcatagggtccaaaatttgggtgataatgaaaggtgacaaggagctcgcgggtactctcagaggcttcgatgtctacgttaacatggtccttgaagatgtcaccgaatacgacatcactactgagggaagacggatcacgaagcttgatcaaatcttgcttaatggaaataacattgtcattctggttccaggaggctcacctgatccagaatgaggctgccacctctattcggttttatgttcatccctttcaacggtatcaaaatctcagtttcag

SEQ ID NO: 209091 - DNA, 297 bp, Gossypium hirsutum
cccacgcgtccgcccacgcgttcggccggaagcaacttgacgaagccggacaagccttgctgtccggaattggctgggctagtggaaagtagccctcaatgcttgtgttatttgctggataagaacgcgacggcgaactatgggttcaacattgacatggatagagctcttaagcttcctgatgtttgccatgttaaaactcctcctgttagtctttgttcagctattgtcggggctccaatcggagttccaactcaaagcactgaaggatctatgtgaccagcatccgagccaaca

SEQ ID NO: 209092 - DNA, 456 bp, Gossypium hirsutum
attctactgatctagtcgctttgtccggtgttcacacattcggaagggctcgatgtgcggcgttcatggaccgactctacaacttcaataacataacggggaaaaccgatcctaccctcaacgcgacatatgcaaacacactcaaacaacgatgtcctaaaggcggagacactaaaagtttgatcgatctcgatgaacaaagttcgcttacgttcgacaacaagtacttttcgaacctacaaaaccgaagggggttgcttcaaacagaccaagaattgttttccactaatggggctgaaacagtggccattgttaacagatttgcaagcagtcaaagccagttctttagtagctttgcgaaggccatgataaagatggggaacttaaaccctttgactggtaccaatggagaaataaggctcgattgcaaaaaggtcaattagagattatgtgaaa

SEQ ID NO: 209093 - DNA, 352 bp, Gossypium hirsutum
gcttgacttacacacagatgttaccgcagatgccgcttcacattgatgagatcaccgtcttgcttgtcactgccatgaaggaaagatgcacgctctgtaaaaattaagaagagctaatactttgtcaagatcacagttcgctgctcaaagtacattgcttcacactgtgtgttccatgctgagaaggctgataagttgaagcaagctctttctacatgtttgcgcgtacaggacctgtgaaaatagggccgctttcagtttatcattcaattactatgtgaaagccagattttgactttggttttatcatatttcatgccctttaaactcaaaatttaactgaatggattct

SEQ ID NO: 209094 - DNA, 452 bp, Gossypium hirsutum
gtctattgaattctttccctcactttctcgaaaaaaaaaatgtcttcaggttgcaattgcggatctaactgcagctgcggtgacaactgctcatgcagcaggaaccttaaccttggatattcggagaagacaaccagcactcagaccatcatctccggagttgcgccagtgaagatgacctttgagggaccagagatgagcactactgaatcaggacatggatgcaagtgtggatcaaactgctcttgtgatccatgcaactgttgaaaagcttgatgaaagccatagattatgaaaaaaagaaagcagcaaaaataacaggcctctgtaatgatatattgtcaaggatggatgcctgcaaggtctataattatgtctctgtctgcgtcttgtgtaatagaagctttttgtggtgaaaataatgtataaaccatttggttgggagcaaattg

SEQ ID NO: 209095 - DNA, 406 bp, Gossypium hirsutum
  unsure (1)..(406): unsure at all n locations
ggcggctggtcgggtccctggatacggtgtcattaccaacatcatcaatggtggcatcgaatgtggcaaaggatccaaccctcaagttgaggatagaatcgggttttacaagagatactgtgacatactgaaagtgagctacggtgacaatcttgactgctacaaccaaagaccctttgcttaattatgcactttaatccatcgtatcatgggtggggtaataaatatatgaaagaatagcatttacaaatcaaattatatttaaaataatcatgctattgtactacgactatatatagatgcatcttccgtggagatggaataagataaatattcaattttnaaaaaaaaaaaaaaaaaaaaaattatattaaatataataatttataaataagggcgggcggtt

SEQ ID NO: 209096 - DNA, 316 bp, Gossypium hirsutum
cggttctgaattcgagggacgcgccaggcgtcccgaacaatctatttatgctgaatagacaatctggactttgcgacgggagcaatgagggggaggtggagattgaagcatataggacactgagggataagggtacataccctgctcatcaggttgttaaggatctggaatgaagcttagccttggtgatctatgacatcaagactgggaccgtgttttctgcactgcgggctgatcgtatggtgaagctgcataggagaattgcacctgatcgctgtgtggtcatatctgatgattcacacgtcattaaagaagg

SEQ ID NO: 209097 - DNA, 404 bp, Gossypium hirsutum
tccacgcgttcgtccacgcgttcgtccacgcgtccgtactttgagcttgttttgattagcaatgtaagtggggcaggatccatccaatccgtatccgttaaaggctctaaaactgggtggatgtcaatgtcaagaaactggggagctaactggcaatccaatgcctacctcaaccgtcaatcgttgtcgttcaaggtcaccactaccgatggtgttacccgactgttccctgatattgtgcctgcaagttgggggtttggccagactttctctatcaaagtacaattctaagctcactaaaagctttagttcccggcggaggcgtgctacattattttacaaaaaagctgtccgccatacatggtatttatcgatacatcacatggtcaataatatcaggctac

SEQ ID NO: 209098 - DNA, 373 bp, Gossypium hirsutum
gaacaatctatttatgctgaatagacaatatggtctttccaaagggagcaatgaggcgatgtttgtgattgaagcatataggacgctgagggataggggtccataccctgctgatcaggttgttaaggatcttgaaggaagctttgcctttgtgatctatgacagcaagactggaaccgtgcttgctgcactggggtctgatggtggggtgaagctgcattggggaattgcagctgatggctctgtggtcatatctgatgatttagatgtcattaaaaaagggtgtgccaaatcctttgctcctttcccaactggattcatgttccacagtgaatgggggctgatgagctttgagcatccaatgaacaaaatc

SEQ ID NO: 209099 - DNA, 421 bp, Gossypium hirsutum
cccacgcgtacgcccacgcgtccgcttgctcttcaagtgatagctcttctaagagacatatttacagctgttggacttaatctctatttatttccctatggcgttctcccaactggtccagagagaggtattattgagtttgtgcctaatacacgaagcagaagccatatgggtgaaacaactgatggtggcttgcactagatttttcaacacgattatgggcctgttggctctcctaatttcgaagctgcacgcagaaactttataattagcagtgcagggtatgctgttacaagccttctacttcaaccgaaggatcgacacaatggcaaccttctttttgaccatgtcaggaggactgttcatattgattttcgcttcatcttggaaacatcacctggttgaaatatgccgttcgaga

SEQ ID NO: 209100 - DNA, 449 bp, Gossypium hirsutum
attccgggggggcggaagcgttcgcccacgcgtccgattttttcagggctaagaaagagaaaaaaaaatggctttgcaaaaggcgaaggacatcgtatctaccaatcctgtcgtcggtttcagcaagtcctactgaccgttctgtgtggatgtgaagcaattgcttcaacaacttggagcttctttcaaggccattgagctcgacagagaaagggatggatctgatattcaagcagctctggctgagtggaccggccagcggactgtgccaaacgttttcattggtgggaaacacattggtggctgtgattctacaatggccttgcacaaggaaggtaagctggttcctctgctaactgaagctggagctattacaaaatcatctggttaaaatagaaggaagctgcttgtctcccctaaaattaataaaagaaaaccaagttcgaatt

SEQ ID NO: 209101 - DNA, 338 bp, Gossypium hirsutum
cggacgcgtgggcggacgcgtgggcggacgcgtgggcggacgcgtgggcggacgcgtgggcggacgcgtgggcagcaactaaaaaaaaaaaaaaaccccaaacagacaatagcctaggacaggaggatctctcagggtttaggtgatggcttcaaagcggatcttgaaggagctcaaggatctccagaaagatcctcctacctcttgcagcgcaggccctgttgctgaagacatgtttcattggcaagcaactattatgggtcctcctgacagtccttatgctggtggagtgtttctagtcaccattcatttccctccggactatccatttaaaccac

SEQ ID NO: 209102 - DNA, 395 bp, Gossypium hirsutum
acaccgacgcttacacctccttatatcacagtgtccaaacagcagatttgtcatgggtaggcagaacatgggggtgtcaaatgtggcactagcggtttatgccactgctcataaaagacgaatcatacaatgaagaggtcaatcaaggtgcctgctctcagtatcaagcttgctgacattcctacagaagattattcatggaggaaataccggcagaagcccatcaagggttctcctcaccctatgggatattataaaagtagccatatgagacagttgccctgcttggaagcatgcttagaggcgcttataaaaaccatccatgcttattgttacctatgaaggtgatcattaccacccaagactaccattagcagtatacaacgtatggaaaa

SEQ ID NO: 209103 - DNA, 360 bp, Gossypium hirsutum
ccacgcgtccgcccacgcgtccgcttgccagcaagacaatatgttctgatgatttggtggtagtctcaccagatgttggtggtgttgctagagcacgtgcttttgcaaaaaaattatctgatgcacctcttgctattgttgataaaaggcgtcatgggcataatgttgcagaggtcatgaatttgataggtgatgtgaaaggaaaggttgcagttatggtggatgacatgattgacactgctggaacaatcgcaaaaggtgcagctcttttgcatcaagagggggctcgggaagtgtatgcgtgtaatacacatgctgtttttagtccttctgcaatagaaagattgtcaagtggtcttt

SEQ ID NO: 209104 - DNA, 338 bp, Gossypium hirsutum
gccacgcgttcgggaaaatccaagtctctctctgtctaaccatgtgtctcttcggtctgggcggaaatcatcgaacattccgtccaaaaaaaagtgcaccttcaggaagtaagggtgcacagcttcaaaagcacatcgatgccaccttaggcagcggaaacttaagggaagcactttgactacctccaggggaggatttaaatgaatggctcgcagtcaatacatgtggatctttttaatcaagtgaatctgctctatggtaccctcactgagctaagtactcctgagaattgccccacaatgactgcaagacctaaatatgaatatagatgggctga

SEQ ID NO: 209105 - DNA, 146 bp, Gossypium hirsutum
acccacgcgttcgcccactcgtccgcccacgcgtccggttttgagttcaaaatcttttatcttaatagtcggtagttttttcgcataaagagtgtagtgtgctgaactttaagctaaagcagaaaattaactaaattaccactttt

SEQ ID NO: 209106 - DNA, 438 bp, Gossypium hirsutum
cccacgcgtccggctaatcctagctctggaagtatagtaaaaatcaactttgttgaaggccttccattccaatatatgaagcaccagatcggaggacatgatgaaagtaatttttcatacagttacgatttaatcgaaggtgggcctttgggggataagcttgaaaaaattagctatgagaacaagtttgaggcagctgcaggtggaggaagtatttgcaagagctcaatgaaattctacactgttggcgataatgttatcactgaagacgaaatcaaggctctcattaaagggagtgaaggagtttacaagcctgttgaagcttacctcttggctaatcccgaagcctgcaactaggatataagttgctttaaattcttattgctgcttttaaagaggggtttgattttaatgttgtgcttttgatattttcttttt

SEQ ID NO: 209107 - DNA, 390 bp, Gossypium hirsutum
caagagtttgcagaagagaagagaaagagtgagaaggccatgaacgcccccgaccgttacgagagattcgtcgtccccgaggggaccaaaaagtaggctctttatccctaaatcctctgtttatcaaactcactgctacatatttgttggttaaatttttagggtttcttacgagagagacaccaaaataataaatgcggccaccttcacaatcgagagagaagaccacaccatcggcaacatcctccgaatgcaattgcatggagatgagaacgttttgtttgctggctacaagcttcctcaccctctgcagtacaaaatccttgttaggatccacacaaccagtcagtcttctccaatgcaagcatataatcaggctataaacgatct

SEQ ID NO: 209108 - DNA, 386 bp, Gossypium hirsutum
cccacgcgtccgcccacgcgtacggatttttaggtgttcctgcacagtgaggaagctcccctgaaagcttcagttgaaaatgcctaagcaaattcatgagagcaaggacttccttctcactgctagaaggaaagatgctcgctctgtaaaaatcaagaaaagcagagatgttgtcaagttcaaggtgcgctgctccaagtacttgtacacgctctgcgtgtctgatgctgagaaggctgacaagttgaagcagtctcttcctccaggcttgagcgtccaagacctgtgaaattaaaactgcccttagcttgtactaggcaatgaaaactagattctgacttttagtttattgcttgcatttcgaatcgttttgcaccgatcaaaag

SEQ ID NO: 209109 - DNA, 375 bp, Gossypium hirsutum
cagagcgatagtgtctacgccggacgagctggtggcggccggttgccgaactccatcacctaagataacggcggacgctctggtgaaacggttccttgagacgaactcctccggcgtgtgcatgcacatcggagaccatgtccaattcgcttattctcaccataaagagtctcctttacagcccagatcatttgctgtgaaagacgaaatcttctgcttgtttgagggagcccttgataacttggggagtgtaaagcagcaatatggtctggcaaagtcagcatatgaagcgatattggtcattgaagcttacaaggcccttcgtgaccgagcaccttatcctccaaaccatgtggttggccatctaattgggag

SEQ ID NO: 209110 - DNA, 417 bp, Gossypium hirsutum
aaagaaggaaaaacctgagcctaaaccaccagcttatacaccaccaaagaaagaaaagcatgaacccaagccaccgatgtatgaaccaccaaagaaggaaaagcctgagcctaaaccgccagtttatgtacctccaaagaaagaaaaaccagaacccaaaccaccagtttataagccttcaaagaagccaccagtgtatgagcctaagccaccaaagccaccggtttatgcaccaccaaagaaagagaagccagaacctaaaccaccagtacatgagtctcccaaaaaaccaccatatggtcactatccaggacaccctccattggagaagcctcaatagagagattccctcggctaaccattcccgacaactgagctactatggctacatagataaattactatcactgcaataag

SEQ ID NO: 209111 - DNA, 434 bp, Gossypium hirsutum
acgagatcaggcaatggggtcattggaccctgcttgccctttggatcccaatccagcatgatgttaactttgatacccagcacaccctgcctaagaaggacatgtctaacagcagaatcaatatattccttgtcaggatgaccagaggatatcatgtacccatccttgaacttcatcgactttgcacgctgagctcggagctttccactcactatgacctcgcatcccttggctccactctccatgacaaatctgagaacaccatagcaagccctccgaacagcaaggcctccaaggaagaggaagagtgtacagaaaagaaagactttgaaccgcttgctccccatgccaatatcgaggttcccgttgtggcttagagcccaccccaaatgagtcttgaatgtagcagttcactcaagctttcaactatttag

SEQ ID NO: 209112 - DNA, 447 bp, Gossypium hirsutum
cccacgcgtccgaaacggctgtaagacgttttacaaagaactgccaaccatgaagataatggtagccgtaaagagggtcgtggattatgccgttaagatcagaatcaaacccgataagagtggggttgaaacccagaatgtgaatatgtcgatgaatccgttttgcgagatagctttagaagaggctttgaaaattaaggaatctgggttggctaaggaggtcgttgcggtcaccatgggaccttcgaactgcgtcgatacgcttcgaacgggtctggctatgggtgccgatagagggatccatgtcgaagctgctcgtgatttggttcctctcagtgttgctaaggttttgaagaagcttgttgaggttgagaatcctgggttgctcattcttggaaagcaggcaatcgatgacgactgtaatcaaacatggcaaatgatagctgc

SEQ ID NO: 209113 - DNA, 126 bp, Gossypium hirsutum
ctcggctctcgcatcgatgaataacgtaacgaaatgcgatacttggtgtgaattgcagaatcaaaataaaaaataaagaagaaacaccaacatgggctccgtagtatattaaaaaataaatcactt

SEQ ID NO: 209114 - DNA, 321 bp, Gossypium hirsutum
gcgtgcgccacgcgtcagctactccgcatcttaataacttcttccgttgatcttcgatagacgagtggcgtcgttaatcgattcattatgggaaagatcaagatcggaacccttggatttggaaagatcgaccggttcggttcgctagagtggctctccaaagcgatgatcttgagctcgttgctggtaacgagtcctttgcatgaccactgaatacatgacgaacatgctctatctcctacatgggtcacggccaatggaggcctcgtgagctcaaggtgaaggactcaaagacccttctctttggtgaaaagcctgtca

SEQ ID NO: 209115 - DNA, 249 bp, Gossypium hirsutum
acggacgccctagctgctatagctgttgtgacaaaggtggaggttctcgcaatatggtcggatcatttattccacatggctctgctcggaacacacgttaggtgaaactgggatgatgctacgaatagtccatgccgggagaagaccatgcctcgcccagttccccagaataaatggaactgtcaccctgtgcgggctccttggtttgaggacacttctcgactgtcatcccaacgcgtgatatgtatt

SEQ ID NO: 209116 - DNA, 314 bp, Gossypium hirsutum
tcggctttcttttactagcgagagcgcttatggcagcactcattggaatgcctattttatgtcttcttatttctcaatgagcaatatcctgatttcaacacagctgatgtaatgaagtgtggaatcctctccagcacttcatttactggaagccttccaactaagatttctcaagatggggggcaaatttctgggggcgtcagtctcaaatatccctgctgatgttcgaacaacctgacgttttatgcttgatattgcgacaccatatggatctgcatgccatgattttataaccgctacacctgataaaaccc

SEQ ID NO: 209117 - DNA, 366 bp, Gossypium hirsutum
cgctataaaaaggtcttaagaatacatctggcatcaaaatcaatgcaacaaagtcgatgatagggcactgtctgggtgcagcaggcggtttagaagccattgccactgtgaaagccattaccacgggatggctgcatccctccataaaccaatttaatccagagccatcagttgagtttgacactgttgccaacaaaaagcagcagcacgaggttaatgttgcaatctcaaattcatttggatttggaggacacaactcggtggtggcattttcagccttcaagccatgaaagtctgttacttacgtgttctgcatttgctaggaaagatgatgatagagaatattgatcgttaaaagagcgagtc

SEQ ID NO: 209118 - DNA, 377 bp, Gossypium hirsutum
tcgcccacgcgtccgtgaccctgtttatgtaagggctgcttgtgaaggtagcttgaaacgtcttggtgttgattgcattgatctttattatcagcatcgggtggatacaagggttcccattgaagtcacgattggagaactgaagaaactagttgaagaaggtaaagtgaagtacataggtttatccgaggcttctgcatcgaccattatgagggctcatgcggttcatccaataactgctgtgcaattggagtggtcattgtggtctagagatgttgaggctgacataattcctacttgcagggaacttgggattgggattgttgcttacagtcctctgggaagagggttcttttcatctggccccaaaatgatgg

SEQ ID NO: 209119 - DNA, 418 bp, Gossypium hirsutum
acgtgaacatgcttcacctggttgaaccttacgttacatacggataccctaatctcaagagtgtgaaggaattgatttacaaacgaggtttcgggaagttgaataagcagagagtcgctttgactgacaatgcaatcgttgagcaggcgcttggcaaatacgggatcatctgtgtcgaagatctcatccatgagatcatgacagtgggtcctcattttaaagaggccaataacttcctttggcctttcaagttgaaggcgccgttgggtggtttgaagaaagaagaggaaccattacgtcgaatgaagagatgccggtaaccgggagaattatatcaacgagctgattagaagaatgaattaaaaattggtatttttttcggtgttaaatggatcgatttcgtatttaaatttaattt

SEQ ID NO: 209120 - DNA, 342 bp, Gossypium hirsutum
gtaaggcctccctctgaccaacaacgcctcgttcgatccgggatgcatcacgcatatggacgtaccatactcgaatacaacatccaagaggattgcgctctccacctgggtgtacacctcaagggcgtcgccaagaagaggaagatgaagacctacacccagcctaagaagatcaaggacaagaagaagaaggtcatgctcgcccggctacaaatctacatggtggaggaatccagcatggttcagaggctgatgaaagagtgccccaatgctgtgtgaggggcaggcactactatggctaaccattttgataggcactattgctgtgagagtggactcact

SEQ ID NO: 209121 - DNA, 351 bp, Gossypium hirsutum
ctttcatttgcccgcactagcagcagcagcgccacactcttcacagtgctgatcaaccatggcggagcagaccgagaaggcatttctaaagcaacccaaagtgtttttaagctccaagaaatctgggaaagggaagagaccaggaaagggaggaaaccgcttctggaagagcattggtttgggcttcaaaacccctcgtgaagctactgaaggaacctacatcgacaagaaatgcccattcaccggcactgtttccatcaggggtcgcattttagccggtacttgccatagtgccaagatgataaggacaatcattgttcgacggaattacctacattatatcaagaaata

SEQ ID NO: 209122 - DNA, 435 bp, Gossypium hirsutum
cgaaaatagaagaaaacccaaagtctcatttcgtgtttgtggattgtaatagcagcccgggagccaaatttatacatgcagctgttgatttatctgtgtccgacattgtttcacctacatatgttccgttggttgttcaatcgttcttcgatcatgatcgagcaatcaactatgatggtcacaccaggcctttgttatcgattcaggtcaccgaactggtagatggagtgttcataggttgttcaatgaaccatgttcttggtgatggagctaccttttggcatttcttcaatgcattatccgaaatatttcaagctcaaggagatactaaaatgaaaatctcacgtccgccagtgctagagaaatggtttccaagaggtcatggtccattacttaaccttcctttcaccaaccaagatgagttcatcactagat

SEQ ID NO: 209123 - DNA, 422 bp, Gossypium hirsutum
  unsure (1)..(422): unsure at all n locations
cccacgcgtccgctgtcgcagttcccttctcgccgaagatctcctgtcctccgacgacagtggttgccgccaagaagaccaagaagacccatgagagcattaacaacatattggctctcgttatgaaaagtgggaaatatactttgggttacaaaattgttttcaaatctcttagaagctccaaaggctgaaaatgatgctgtaggccaagaacttcagaaacaactggaggctgctgtgaaggaactgaaacaggttcaggagttattcagtcaagcagcagataattgtctcaacttgaagcaaccagattgaattcatttccttgaacaatccctccttccatgtttcattttattgtctttatattcngttaatcctaggattcttttcctaggattctaaacgtttatttatgtact

SEQ ID NO: 209124 - DNA, 441 bp, Gossypium hirsutum
cccacgcgtccgcccacgcgtccgcccactcgtccgccagatcggaggacatgatgagggtaatttttcatacagttacgatttaatcgaaggtgggcctttgggggataagcttgaaaaaattagctatgagaacaggtttgaggcagctgcaggtggagggagtatttgcaagagctcaatgaaattctacactataggcgataatgttatcactgaagacgaaatcaaggctctcattaaagggagtgagggagtttacaagcctgttgaagcttacctcttggctaatcccgaagcctgcaactaggatataagttgcttaatttgaattcttatgcttgcttttaaagaggggtttgattttaatgttgtgcttttgatattttctttttcatcttaaaacctatattgtcttctggttgctcagtaggaatgatg

SEQ ID NO: 209125 - DNA, 429 bp, Gossypium hirsutum
cccacgcgtccgtttgctggaacttcttgctcctactgtctagtgtcggctttattagggtttagtttatttttcattagcctaaaggatgttgggttacaggaggtacagaaagtggtgggtttacaagtatgcatagcaagcttggtatttgccacattaagtacatcatacagcaatttaccatctgctccttcaagccaagctaatattgatcttccatattttacaactgagataacaaaggaatcaagtccttttgcgctttctcttgcaaggcatctacattctataagagctaagatgtatggggctttttggtgttctcactgtctagaacaaaaagagatgtttggacgtgaggcagcaaagttgttggactacattgaatgctttcctgatggatataagacgggaacaaaaatgatc

SEQ ID NO: 209126 - DNA, 280 bp, Gossypium hirsutum
ggcaaaactgccaaattccttgagcaatgtttcctgatgctcctgaaatactttacgggggagactgactattcttgcctagcctacaaattttcattgactatgtgaggaaccctaaactttatcctcttgacatcatcaacccttataagattgtcgatacttaaccttataccaacttgatatctcaaatcattaccgtcaattcccgctgcaattcacctgatgccaacttgcctaggaaatggattgtctgtgtctaggtgtctcatgatcttta

SEQ ID NO: 209127 - DNA, 283 bp, Gossypium hirsutum
cccacgcgtccgcccacgcgtccgggttgatgccatcgatgagtatgccattggtcaggtgagggaatttgagggcaaaaagcttgtgtctgcaacaaaggaaggtttgaagcttgatgagagtgaagatgagaagaaaaagaaggaagctttgaaagagaaatttgaaggtctttgcaaggtcatcaaggatgtcttatgtgacaaggtggagaaagttatggtctctgatcgtgtcgttgattccccttgctgtttggtgaccggcgagtatggctggact

SEQ ID NO: 209128 - DNA, 394 bp, Gossypium hirsutum
gttagattctcgttccgacagtcaagaagtagagaaaaatgcattatcaaaagatgaggggaagaatgcagaagacggcctgctgaggattggactaggacatgcgaaacttaaggccagccgaactggatttaaaccttacaaaaggtgttctgtggaagccaaggaaaatagagtgatgaacactggcagtcaaggtgaagagagaggtcccaagagggtacgcttagaaggggaagcttcgacttgacttttacgctattgcatgcaattaacaaatgcgatgtttgtttgttgcatgcaatccctaattttttttccccatatcttatttccttttcatatgttgatcttaaaaacgagcattacgagaccctttcgggtaagggggggt

SEQ ID NO: 209129 - DNA, 404 bp, Gossypium hirsutum
acggagttttcttggttgtctttaatgcaacttctggagcatgctcttgcttttttctgtcgaagctgataggcaggcctttgcttacttggctgtggcctgataaattaagattttttcaagctgacattgctaagcgaagggacaagttgctgaattacatgctctttctgagaattactccaactctacccaacctatttattaatttggcttcacctatagtagacataccgcttcatgtgttcttcttagcaacttttgttggcctaataccagcctcctatataactgtcaaagctggtcttgcactaggcgatcttaagtctgtcaaagacctgtacaatttcaagactttgtctgtgctttaacttatcgggatggtctccatatttcctaccctt

SEQ ID NO: 209130 - DNA, 385 bp, Gossypium hirsutum
aaacaggagagggaaacaatgagccggagtttgggcataccagtgaagctactgcacgaggcatcgggccacgtggtaacggtggagcttaagagcggagagctttacagaggaagcatggtcgaatgcgaggataactggaattgccagctcgagaacatcacctacaccgctaaagatggaaagatatcacagcttgagcatgttttcattcgaggcagtaaagtcaggtttatggtcataccggacatgttgaagaatgctcctatgttcaaacgcctcgatgctaaaatcaagggtaagagctcatctctaggagttggcagaggtagagctgttgcaatgagagccaaagctcaagctgttcgggcgtggcacaacaagt

SEQ ID NO: 209131 - DNA, 407 bp, Gossypium hirsutum
gacaaagcctatatgcattggaaggcatgccttcggtgatcagtaccgagcaactgatgctggcattaaaggagctgggaaacttaaacttgtttttgttccagagggacagggtgagaagactgaatatgaagttttcaacttcactggtgaaggaggagtttcactggccatgtataacacagatgagtctattcgtgcttttgccgaggcttccatgaacactgcttatcagaagaagtggcctctttatcttagtacgaagaatactattcttaagaagtatgatggaagatttaaggatatctttcaagaggtttattaaggtaactggaaatcaaaatatgaagctgctgggatatggtatgaacaccgtctcattgatgatatggtggcatatgctctaa

SEQ ID NO: 209132 - DNA, 374 bp, Gossypium hirsutum
tatctatctaacttaataagacatgttctttgaggtaccccaaagaggccagggggatgcatatatacatatttgtttgctttatttgatcaaaactcgaaaccaggtcctgaattatacagacactttgggttgttttcaccaaacacgcaaccaaaatatcagcttcatttttgaggacgaaggcattgggatattgcttcttaggaatataatggaactctttctcttaagcttcatatgttatatataccattctcgttaacttaaaactttttattgctttttagactttataagcctatctaaaaatactttaaatattataaaaaaacacgggactaacttgttagatgtggatcatataagacatt

SEQ ID NO: 209133 - DNA, 405 bp, Gossypium hirsutum
  unsure (1)..(405): unsure at all n locations
cccacgcgtccgataactgctgtgcaactggagtggtcattgtggactagagatgctggggcggacataattactgcttgtcatgaacctttgcttagaacccccattatcacttactcgaagctgtaagtattctcaatttttgggctaattttagattactcctcaaaatgtttccatcacctagcagtaagcttgaaaacggcgtgtggtgcagacaaaagcagcgaaaccggtgataggaaaatactaccgggagccgaagaaatcagggccgattccgtttcacttaatagagaatctagtgtcgagcatganacacgatcattacgtgagcaacagcggagagnatgtatttatcagacggatcccaacctgtttctcctccaatccgatgaccattta

SEQ ID NO: 209134 - DNA, 342 bp, Gossypium hirsutum
cccacgcgttcgattactacaggatgctgtttctatggctcatccggataggacacatgcttggattaagatggacaacttctacacacagacggattatgaaaagggggctgatggtgacaggatgtacaaaacacttctaggaactcaagggttccgaaagggtatggatctttactttaaaaggcatgacgggcaagcaggaacttgcgaagacttctttggtgccatgaaagatgcaaaaggcgcggaacgtgctaacttcttgctatggtatttacaagctgagactactgtagaaaaagttacttcatcctataatggtgaagcccatactttatg

SEQ ID NO: 209135 - DNA, 313 bp, Gossypium hirsutum
cacacgcgttctactacttggctgagaacattgttatatttgagggcatcttactcaagccgggaatggtaaccccagggactgaacacaagaagagggctaattctgagactattgcgaaatatacactcacaatgcttaaaaggagagttccaccagctgttacaggaataatgtttttgtctggaagacagatggagatggaagccacattgaacttgtatgcaatgaaccagagccccaacctatgggacgtatcttactcttatgcacgagcattgcagaacactgtactaaagacatggcgaggacg

SEQ ID NO: 209136 - DNA, 345 bp, Gossypium hirsutum
cccacgcgtccgaccacgcgtccgtgcatgcgttcgcaacgatgaggatcgctgtgcggggtgcacaggtgatatggatgagcaagataataaagtcttggatgttattgttagagaaaggtatgcagaatggacaaaggattactttcccataaaaaactgatgaaacgcccgatacggctactgaggacattggattacggctgcagcagaaagatcatgctacatttaaacgaatgggtgatgacttatttgtggagcatacattggcacttactgaggccctctgtggctatcatttcatactgactctcttacaaggcacttgcatatatagcatactcg

SEQ ID NO: 209137 - DNA, 386 bp, Gossypium hirsutum
  unsure (1)..(386): unsure at all n locations
cccacgcgtccgaacaatagaccgtgattatggtatattcaatggtatccaccatgacattggcacccatgtcattcatcatctctttcctcagatcccccattatcacttagtcgaagctgtaagtattctcaatttttgggttaattttagattactcctcaaaatgtttccatcacctagcagtaagcttgaaaacggcgtgtggtgcagacaaaagcagcgaaaccggtgataggaaaatactaccgggagccgaagaaatcagggccgattccgtttcacttaatagagaatctagtgtcgagcatgaaacangatcattacgtgagcaacagcggagagattgtattttatcagacggaatcccaacctgttttctcctc

SEQ ID NO: 209138 - DNA, 415 bp, Gossypium hirsutum
gcaggacagaatatgccctgactagctcaatgaggctatatacggcttgctctttgcggcgtcaaggaggggggattttcccgagcttctagagattcgagccgtttttacattatactacggcaaagaattcgatgctcgtgcaatcgagctgcgcaacaattgtggagtgaacgctaagattatacagaagctggcaaccagacaaccagacttgtagagcatatggaatgtgctcaaccagatggctgccgagtacagcattgcttgacaactcgaggaaaccactgattccagcaagggaaatctggatgtaagcatgaagcaggagatatcagtttaggcaaggcatgatacaggacatgatgatgagtgctctgattcaaaaaaaacaaggtgataattcagggatgtg

SEQ ID NO: 209139 - DNA, 363 bp, Gossypium hirsutum
ggcattcgggtggggaatcaacggtaacatatgttggtgctacgatttctgggtcgacgtctgcgagtgcatgtcccgttgcagaaagcccaaggactgtggacttctccgtgaagattatctcgagtgcctccaccattctaaagaatttcaacgaaggaatcgaatttataaggaggagcaacgtaaattaagagctgccgcacgaaaagacaaggaaggcgaaaatggtgttcatcatcatgcatagtcataatttgtgatcctttaattttccaataataataatgcatggagattgttgtatttatgttaggattgatatttaaactctttgctaaattaccttttggttttcctttc

SEQ ID NO: 209140 - DNA, 278 bp, Gossypium hirsutum
gtggagaatacatgttcatatcacatagtacttcgttatgggagagggctactgaacgggcgcaaacatgattctctgttcgtaaagctaggtcatctgaataatccccttcatacttcccaagtgctaatacaccaaataacgtgaccgttatttcctgtccagagtccttcaccaaagcacagtattgggttaaggagctacaaaagcatgggagcccaggtatagtgatggccttggttggtaataaagccgaccttcatgaaaagcgcgaaata

SEQ ID NO: 209141 - DNA, 397 bp, Gossypium hirsutum
cagagaccaaaaaagcttcattggctcttttattgaaaaccccatggctgctcttaagcgtagggtgtgctctagtgatgtgcatgttggtggatgagcccattgccacaaccaccataacatgctgcgatgtgacaagcaaagtggccggttgcttatcatacttgcagaacggagggaacgtgccgaaggcttgctgcgacgggatccgatccctgaacaacatggctcgaaccacccctgaccgccaaaccgtgtgtgggtgcttgcaagctgccgctaaagctgtcaaaattaaaggcaacttggctgagaccctcccagccaaatgtagtgtcaacatcccttacaagatcagcacttgcactaactgctaaaatgtgaagtgagatggatg

SEQ ID NO: 209142 - DNA, 356 bp, Gossypium hirsutum
aaaccaccaaaaccaccagtttatgtacctcctaagaaagagaaaccaggacccgggcggccattttatgaacatccaaagaaaccaccgtatggtcactatccaggacaccctccattggggaagcctcaatagagacatcccatcggctagccatcccaagaactgagctactatggctatatagataaattagtatctatacaataagagtttctttctactcatgttctattctcttgtatgacatgtagtaatgttttcttttacctgcgagaatgccgatggcagtacctattggaatgcttattttatgtcttcttgtttctcaatgagcaatatcctgatttcaacac

SEQ ID NO: 209143 - DNA, 368 bp, Gossypium hirsutum
tgaagacgacgtcccgcctcctggtcaactgtttgctcagatcggggcgggctgctttgggggcgttgaactggctttccagagagtttcggagatcaccaaaactgaagttgcgtattcccaaaggttcatgcataatccgagttatgaaaacgtgtgttcggggactaccaatcacagagaagtggtgagggtttagtatgaccctaatgagtgtagctatgacactttgcttcatgtcttttgggctcgccatgatcctactaccctcaaccgccaaggtaatgatgttgggacacagcacacatctgggatttacttttacagcccatagcatgagaaggcagcagtggaatccatggaaaaac

SEQ ID NO: 209144 - DNA, 444 bp, Gossypium hirsutum
cccacgcgtccgcgatgatggagaaaggcaaagagcccgccgcagccaacgaggatggcgaggttggtaaggccgagagcgaggagattcaggaagccttagaaattgtcctctttcaagtctctgaatgttatgtttatttgatacctccaaggaaaactgcagcatcttacagggctgatgaatggaatgtcaacaaatgggcatgggagggaactttgaaagtcattagcaagggagaagaatgcattatcaggcttgaagacaagaatacaggtgaattgtatgctcgagcatttctgagagatggagagccacatccagtggaatctgtaattgatagcagtagatattttgttcttcggattgaggagaatattggtggtcgccttcggcatgctttcattggcattgcgtttcgagagagaacagatgcttatgatt

SEQ ID NO: 209145 - DNA, 442 bp, Gossypium hirsutum
catgaaagtgcctcaaggaggatgggtgcctcttgtgctgtctgtcatctttatgttgggtatgtacatatggcactatgggactcgcaagaagtacaactttgacctgcacaacaaagtatcactgaaatggttgcttggcttgggtcctagcctcggtattgtgcgtgtgcctgggataggcctcatttactctgaactggcaacaggagtccctgcaatattttcccactttgtcacaaacctgccagcgttccataaggtgctggtttttgtttgtgtgaaatcagttccagtcccatatgtttcaccagaagaacgctttcttattggtcgggtatgccccaagccatatcgtatgtataggtgcattgtcaggtatgggtacaaagatatccagcgagatgatggggattttgaggaccagcttatacaaagcata

SEQ ID NO: 209146 - DNA, 359 bp, Gossypium hirsutum
tccactcgttcgtccagatttcatattgcattacgatggcgtcattggattcaagggaatcgcctgctaataacccaggccttcattttccccctgacgaagccaccaaaggctacatcatgcatcaaaccatgtttcgtattaaggatccaaaacgtactcttgaattttatagtcgtgttttgtgcatgacgttgcttaacaaagtggatgttccatatatgaaaatgacattgtatatgatggtatatgaggattgttcatcaacaccaaatgacccatttgagaaaactatttgtacattttgaagaccagctacttatgaactaacacacttttggggtaccgaaaactatcct

SEQ ID NO: 209147 - DNA, 445 bp, Gossypium hirsutum
ccacgcgtccgcccacgcgtccgattgaagccattcaactgtaatctcctatatcatgatcgagtcaagatagatccagaattggagaaacagaccggagctaaattcgaggaggatcttgatgcaatgcttccaaaatgtgacattattgtcataaatatgcctctaactgagaagacaagagggatgtttgacaaagatcggatcgcgaagatgaagaagggagtccttattgttaacaatgctcgaggagcgattatggatactcaagcagttgctgatgcttgttcaagtggacacattgcaggttacagtggagatgtttggtatccgcaaccagctccgaaggaccatccatggcgttacatgccaaatcaagctatgactcctcatatttctggtaccaccattgatgcgcagttacgatacgctgccggagtcaagg

SEQ ID NO: 209148 - DNA, 323 bp, Gossypium hirsutum
caggaggtggctgtggaattgaacgcgtagatgtatctattgatggcggaaaaacatggatggaagccactaggtttcagaaaactggtatcccttacatagcagatggcataagcaatgacaaatgggcatgggtgctttttgagctaacagttgatatcccacagagcactgagattattgccaaagcggtagattcagctgcaaatgtgcaacctgaaaaggtgcaagatatttggaacctaaaagggattcttaatacttcatggcccagagttcatggccgcattggccactcaaatatgtaaaaacgaaccccgaat

SEQ ID NO: 209149 - DNA, 241 bp, Gossypium hirsutum
acttgttaaaagtgatcagctactttgcaatgggaggcagggtcacctatataacagaaatgcgagacatggactcgtgaccaatatgttacgtgagcatgaaattatggatggtaatggtactgaaatgaatcctgtggattttttggttgctcagttccctggttttgctaccgaaaaccttgcggaggcttattttgcgaatagttgtgatttaaatcggacaattgaaatgcttact

SEQ ID NO: 209150 - DNA, 448 bp, Gossypium hirsutum
aacgcatattgtatgttctagaaagaactagcgtatcttcagacatcatccttgacacttgacgaggcagtcaagactacaaatcgcagggataatgctttggagaatgttgagaagccaagggtggagaataccataagttacatcaagggagagttggatgagcttgaaagggaggatttcttcaggttaaagaagatacaaggttataagaagagggagatagagagacagcttgcagaggccaagctgcttgctgaggaacaggttgctgagaaggcttccttgagaaaaggggtctctataaatgcagctcacaatatgctatccgcagccagggagaaggatgaagatattattttctaatgaagaaggtagttatggtctttcctaagagttctgggtttctatctggtgcctatttgatggggggagatactttaattat

SEQ ID NO: 209151 - DNA, 447 bp, Gossypium hirsutum
acccacgcgtccgtgctattgttcaagttgatgctgcttcattcaagcagtggtatctccagcactatggcattgacattggtcgcaagaagaaatcagctgcagccaagaaagaaggagaggaaggtgaaactgctactgaggaggtgaagaaaagcaaccatgtattgaggaagctggagaagcgtcaacaaaatcgcgctcttgacccacatattgaggaacaatttggcagtggtcgtctgtgggcttgtatctcttcacggcctggtcaatgtggccgtgcacatggttacatcttggagggcaaagaactggagtgctacatgaagaacatccagagaaagaaggggaagggagctgcttaaaaaattatagcatagttttcagcattcatatcagaatgccgcccttaaggattgcctttcacatttccagaacatttaa

SEQ ID NO: 209152 - DNA, 391 bp, Gossypium hirsutum
gtcactcgttcgagtacctgtggatttgttgctcctgagggtttagccacaggtcatttgagtgcttggagggatgtcgatagtttctgagttcttcgtgcggggatggtatggtgccgccgggccctttgacagaatcgaccattcggtgaacacagcctggtgggatgggcgcaaaccatacctggccaacagacgccatatgtgtgcagcgcctatattaccgtgcgtgaacgccaatatgtaatggaaggtgccttcaacggcggaacccttgatgtgggatgcttgactgttgaagcctaattcggaccgaggatgaacgaggacgcaaccgcattggagcgagttcacgatacaagtgaatgccggagctatgcaaacatcatta

SEQ ID NO: 209153 - DNA, 268 bp, Gossypium hirsutum
cccacgcgtccggtacggagttgcgtcagctgtagatatagactaggctaagggacggagccttccactgtagaccgggactacgcaaaggtagaacaccatagaaacttcgcttactttctcataaaccttgattttgctacgaaaaataagaacccggaatagcggaaatcggttcgtgttccgctatcaagtaagttgtctttgcccaagtgtgaactgcagacgactcttcagtggtttcatttccttcttactttactttttg

SEQ ID NO: 209154 - DNA, 250 bp, Gossypium hirsutum
cccacgcgtccgggagtcattattttatttgtgggtataaaggttattatgaatatgccaagtcaaaaggagtagatgtcggtgtgcctgttggttgatgttcttattgatggaacagttcctactggttctggtctatcaagctctgccgcttttgtttgttcatctacaattgctattatggctgcttttggtgttaactttctaaagaaagaattgccaagttacatgtgattgtgaacagaacatt

SEQ ID NO: 209155 - DNA, 429 bp, Gossypium hirsutum
cccacgcgtccgagatgcaattcataaggtagctgcagcttatgactgcaaaattgttgaaggtgttcttagccatcaactgaagcagtttgtgatagatggaaacaaagtcatactgagtgtctccaacccggatacaagagttgatgatgcggagtttgaggagaatgaagtttatgcagtagatatagttgcttcaactggtgaaggcaagccaaaactattggatgagaagcaaaccactatttataagagagcagttgacaagaattatcatttaaagatgaagacctctagatttattttcagtgaaataaatcagaaatttcccattctcccattcactgccagggctctggaagagaaacgagctcgtctaggtttagtcgaatgcgtgaatcatgatctggtgcaggcatatcccggtct

SEQ ID NO: 209156 - DNA, 432 bp, Gossypium hirsutum
gctccattgacatactgagggatgtacatgctgccaaggaacagaggaagccatatgttggggtctttgttggcgttaatggagttgggaaatcaactaatctcgccaaggttgcttactggcttctgcagcacaatgttagtgttatgatggctgctggtgatacattcccgttctggagctgttgagcagttgacaacacatgcacgtacactccagattcctatttttgagaaagggtatgagaaagatcctgcacttgtagcaaaggaagcaatttaagaggccactcgtaatggatctgatgttgttctcgtcgatacagctggtcggatgcaggataatggaccactaatgagagccctctcaaagcttatatacctcaacaatccacatctaatcttatttgtgggagaggcactacttggaaat

SEQ ID NO: 209157 - DNA, 436 bp, Gossypium hirsutum
gtgattcgtaaaactagggatttaaatttaccacatttggggaaatgaaaatggcattatagtaattacaagaaagctttaccattataattaccttgggcgacagcccacggttactgtcgtccactcttattacacagtgagctttttgcagtgttttatttattgattctcttagttctcgttttcatcggagaagaaaagtcaaaaaacaaaaatttcatggctcggaaattctttgtcggtggcaactggaaatgcaatgggacaactgaggaggttaaaaagatcattacaacattgaatgaagctgaagttccttctgaggatgttgtggaggttgttgtgagccctccatttgttttccttacctttgtgaaaagtctgttgcggtctgatttccatgttgctgctcagaactgttgggttcgcaaag

SEQ ID NO: 209158 - DNA, 235 bp, Gossypium hirsutum
  unsure (1)..(235): unsure at all n locations
tcggttcttgatatcgaagctctctacgatatctttttccgtaccctcaagctcaccactccaagttttggagatctcaaccatctaatttctgccaccatgagtggtgtaacatgctgccttcgctttcctggtcagcttaactcggatctccgcaaacttgccgtaaaccttattccatttccccgactacatatctttatgtggtgatttgcacctntcacctcacgcggtt

SEQ ID NO: 209159 - DNA, 274 bp, Gossypium hirsutum
gaacggcacttgcacatgggttagtcgatcctaagagacgggggaagcccgtccgacagcgcgtccagcgcgagcttcgaaagggaatcgggttaaaattcctgaaccgggacgcggcggctgacggcaacgttagggagtccggagacgtctgcgggggcctcgggaagagttatcttttctgtttaacggcctgcccaccctggaaacggctcagccggaggtagggtccagcggtcggaagagcaccgcacgtcgcgtggtgtccggtgcg

SEQ ID NO: 209160 - DNA, 369 bp, Gossypium hirsutum
tgccgtgtgtcgactgacccttcgaggttctgacggagacggacatcgcgaatctactggcacgggatcattcaccaaaattaacatggtgcatcctgttggtgcatcgataggaaataactttctgcagggcatgtgctcgatttggtctcggcttgtatctgtatcatgaagaatatatgttagagagaggatggaggctgactaacctttcaaatcaaacgtgcctttagctcttgcatgaaaactggggtgtgacttaaattctgcctttccctgtttagcatgacatgatatataatcacatttgctaacgctcttgtagaatatatatcaaatctttaactaatgccaatggttgagaatgtg

SEQ ID NO: 209161 - DNA, 423 bp, Gossypium hirsutum
gtgattcgtaaaactagggatttaaatttaccacatttggggaaatgaaaatggcattatgggtattcaaaaaaggccttaccattataattaccttgggcgacagcccacggttactgccgccactcttattacacaagaagctttttgcaatggtttatttattggttctcttaagttttggtttccatcggaaaagaaaagtcaaaaaacaaaaatttcatggttcggaaattctttgtcggtggcaactggaaatgcaatgggacaactgaggaggttaaaaagatcattacaacattgaatgaagctgaagttccttctgaggatgttgtggaggttgttgtgagccctccatttgttttccttacctatgtgaaaagaactgtgcggtctgatttccatgttgctgctcaaaactgt

SEQ ID NO: 209162 - DNA, 317 bp, Gossypium hirsutum
ctcttttctcctccttgtgtcgtgcagataaaggatgagtacactggatgcaactagagcagaacttgctcttgtagttttgtatttgaataaagctgaagcaagggataagatatgcagggctatacaatatggctcgaaattcctaagtgatgggcagcctggcacagcacaaaatgttgacaaatcaaccagcttggcacggaaagtttttcgtctttttaagtttgtgaacgatttgcatgggcttattagccaagttcttaaaggaactcccttccacttggtctgctaggaaagtcaaagaatgcactgtt

SEQ ID NO: 209163 - DNA, 439 bp, Gossypium hirsutum
  unsure (1)..(439): unsure at all n locations
ctgaatgaacgatccttgtggcaccttgcagttcgtggagctctgtattgccgatgtttctgcatcaacgataataactatgctgattggccatctattcctcctattccagataacgtgatggtggagggggatgctcctgaagaagaaatactttcaattctggatgttccgcaagggaagatgggacgtgtcattggaagaaaaggggtttccatcttgtcaattaaggagtcttgcaatgcggaaattcattttgggggtgccaagggcccaccggacaaggtattcatcttatggcccgtgaggcaggtgaggaaagcggcagccatgctgaggggaagaatgatggattgatatttgatgtcttgtanggctctcctctcaaaaactagaactgaaaactgttatcagaatgatctttaaactccttacaccg

SEQ ID NO: 209164 - DNA, 438 bp, Gossypium hirsutum
  unsure (1)..(438): unsure at all n locations
cccacgcgtccgtcttatttgaactcaaagtcccagctaatattagaatcatgggtgttggcacttatgactatgagaatacctccccagtcgcccctgccaggcttttcaaggcctttactgttgaagctccgaaagtttggcccacggctgcacctaatgcagtaaagagccttgaggttgaagctaatcctagctctggaagtatcgtaaaaatcaactttgttgaaggccttccattccaatatatgaagcaccagatcggaggacatgatgaaagtaatttttcatacagttacgatttaatcgaacgtgggcctttgggggataagcttgaaaaaattagctatgagaacaggtttgaggcagctgcaggtggagggagtatttgcaagagctcaatgaaattctacactatangcgataatgttatcactg

SEQ ID NO: 209165 - DNA, 427 bp, Gossypium hirsutum
gggggggtgcaccaatggccacgacagatcaatgtaagggcgggcgttgtggtcaaggcatgaccacttactatcaaatgcaaacaaggagtgcagatgaacctatgacaacctaggtaacatgcgtaaactgcaacaaccattggaaatcctgttaggcggatcctgagatctgtcagtcaatgcggtgaaggtgtaaggttgatcatcttggaagctacattctgttcatctttgtttgtggattgaattttaaataatagtgtaatgacatatttatatgctatatagggactttcttagggataactaggtgtttgggggatgattgtgccaaaatcataactgagttgatacacatcttacgtgattgccacatcctgccattgttgcggaaaacaggagatgtgtctcctttgtatgattc

SEQ ID NO: 209166 - DNA, 359 bp, Gossypium hirsutum
gccacgacatggtctagggcaccaggtttgctgaaggggtgacatcaatgcaccctgagatcatgttggcttagaacctctcaccctcatttaatggggatgcactgggcatgaccgtggaacaaataagagacttcattccacggatagccaagcttggtttgtgttgacagtgcactacgcgaactggatgacatgctgatgcattggtgaccgacgcattaccgagagatttcgccaggagggggatgctactgtatgtagagaagatcgaaaaagaagatggggacaacggtgcggacacatgggctgaccgctaatggtaagataccaactcttatgatagatatgtcatgaca

SEQ ID NO: 209167 - DNA, 386 bp, Gossypium hirsutum
agagaaaacaaatttgaatcctagtgaagttggggatattgttgtgggaacggtcttggcaccaggatctcaacgagctagcgaatgtcggatggctgcattctatgctggcttccctgaaactgtgcctgttagaactgtgaacaggcaatgctcatccgggcttcaagcagttgctgatgtagccgcagcgataaaagcagggttttatgaaattggcattggagctgggttggaatctatgaccactaatccaatggcatgggaaggttcacgtaacccaagggtgaagcaaatggagcaagctcagaattgtctccttcctatgggtattacgtcagagaacgttgctcatcgctttggtgtgacaaggcaagagcaggatc

SEQ ID NO: 209168 - DNA, 435 bp, Gossypium hirsutum
cccacatcatgactaagagttttacctcggagttccctcatgttgagaggtacttttggaccttggttaatcagccaaaaatcaagaagattcttggtgaagtgaagcaggcagtctctctaccacctgttccttcaaagaagcctgctgcccagccaaaagaaactaaaccaaaggctgaaccaaagaaagaagccaaaaaggaggttgagaaacaggcagcaaaggcagaggcagctgaggaggaggaggcaccaaagcccaaaccaaagaatcctcttgatttgctgcctccaagtaagatggtactggatgactggaagaggctttactctaacacaaagaccaatttccgagaggttgcaattaaaggattctgggacatgtatgatcccgagggatactcactgtggttttgtgactacaagtacaatg

SEQ ID NO: 209169 - DNA, 152 bp, Gossypium hirsutum
accgaattacagatccaattgtatttgagggtgggaatgttgggttcaagaagccagcgcgcgaggatcctgagaagactaacaaaatcccatggcgtaaccctatgcaagcttgctatatgaaccccactttttatatgctgaccggagga

SEQ ID NO: 209170 - DNA, 206 bp, Gossypium hirsutum
gggaaaccagcggagtacttgcaatatgatttggattctttggaccagaacctggctaagaatatggctggtgagatcattggaactaggaccgaagttgccgacgtgaaggcgacgccgtttcagccttacagcgaggtttttggtctacagaggcttaaggagtgtgaattgatccatggaccgtgggccatgttggctacgct

SEQ ID NO: 209171 - DNA, 429 bp, Gossypium hirsutum
tcgagacaaggaaattctccaaattgtgaaggagaacttcgactttaggcctggcatgatcacaaacaacctggacctcaagaggggtggcaataaccggttcttgaagacagctgcctatggacattttggaagggacgaccctgacttcacctgggaagttgtgaagcccctcaagtgggacgagtcttaatcttaaaccaagctttgcccatccctcctgctcactggttactttatccacagggctgaataatactcgggtttcttaccctatatctaaaccatcccctgaatggttttaatctacctattaagtgccccattcattttttttcctttgctaatttgaaatttaaaatgggttatctgattttaatccccccttattgaaaaaaaaaaaaaaagggcgggcggtttaaaagattc

SEQ ID NO: 209172 - DNA, 319 bp, Gossypium hirsutum
cccacgcgtgcgcccacgcgtccgaactaggaggcgcattttccagatacatacctgaaggatgacattggctgatgatgtcaacttggaagaatttggtatgaccaaagatgagttctctggagctgatatatatgcaatatgtactgaagctggtctacttgctttaagggagcgccgcatgaacgtgacacatgccgattttcaaaaggccaaggagaaggtgatgttcaagaagaaagaatgggttccggacggtctctatatgtacaaaaactcggtatatgtatatatattccagcgatattcatggtatgta

SEQ ID NO: 209173 - DNA, 441 bp, Gossypium hirsutum
cttcgattatattccttaaaaccatgggaggaaactcaccttgtgcttcttgcaagttgcttcgtcgccgttgtgccaaagactgcatctttgcaccttatttcccttccgacgatccccacaaattcgccatcgttcacaaggtttttggtgccagcaatgtcagcaaaacgttacaggttcattaacaaccccctcatctaatacgttcattaacattttgggtaaattgcaatagtagccacccaactattagtaatttcttttttggtcactcaactatttagttttgtcttttttgatcacccaactatcttggattgtaacttagattgttgggtgtttctattttttagttagtgatgacaaaaaagaagaagacaaaattgaatagttgagggctattttgcaactttttatggttgggcgaccaaaaaaaga

SEQ ID NO: 209174 - DNA, 441 bp, Gossypium hirsutum
cgtccgcttgctatattgctacttggagtggtggctctcgccactccctcttttggtacctatgagtctcccaactatgggaagccccctactcctgtttataaacctcctaaggtgaaacccccaccttatgaacatcctgtttataaacctcctaaggtgaaacccccaccttatgaacataagccccctgtctatgaaccaccaaagaaggaaaagcctgagcctaagccaccagtttatacacctgcaaagaaagagaagcctgaacccaaaccaccagtatatgaacctccaaagaaggaaaagcctgagcctaagccaccagtttatacaccaccaaagaaagagaagcctgagcccaaaccaccagtatatgaacccccaaagaaggaaaagcctgaacctaagccaccagtttatacaccaccaaagaaagag

SEQ ID NO: 209175 - DNA, 397 bp, Gossypium hirsutum
gaagaagtgaagcttttgaagacctggtcaagcgcttatggattaagggttgtttgggcgttgaagctcaaaggtataccatatgaagcaattgatgaagatctgttcaacaagagcgctatgcttcttcagtataaccctgtgcacaagaaaatcccagttcttgttcacaatgggaaccccatctatgaatcccttgtgattcttgaatatattgatgagacatggaagcaaaatcccatattgccccaagatcctctacacagagccagggaacggctctgggccaaatttaatgatgaaaagttaaggatcttctgttgctgcatacattggagaaaacataaacgtatctctgttctggttgctggcgcaactactaccatcagcatggggt

SEQ ID NO: 209176 - DNA, 441 bp, Gossypium hirsutum
acgcgtccgatcaccatgacatgcttgaaagtactcctttgaagcctaacatggggacccccggttctgactccccgaaggatgacccagaggttattgctgagtacactgtccgtgccttgcagcgtaccgaccctgctgcagttcccgctattgtgttcttgtctggtgggcaaagtgaggaggaggctacccttaaccttaatgccatgaacaagctccagaccagaaaacatggtcactctctttctcatttgaacgtgccttcagcaaaacactctaaagcctgggctggaaaggagggaaacggtgaaaaaggacaagaatcctttctttgtaagggcaaagcttacctcggaagccaacctgggtacatacaaaggtgatgcaaagaataatgagggtgctggaaaaagccttcatgttaaggactacaaatac

SEQ ID NO: 209177 - DNA, 407 bp, Gossypium hirsutum
cccacccctccgtggtctttcaaaaggatgaaaatgcaaagggtaaagagggagtcgtttgaacaaccaagctgacataatgattctagctcgcccacttatagcagatggagattatcggacggggaaaagcggcactccacatctattaaacaacaccaagaacaaagccataccatgccctcgggagaaagacgtgatgattgccatgaatgctgccttccaggacgtgttgtacaagaaggtctttgccgattcctatcaacatggtgcacccctcattagatgggcgtgaaaaggccgtggagactttgaccgaatgaatagggatcaattgatagacatttttattgacgaagagaatccaatccaggatgaacgctcttttccttcgctatgtgctgact

SEQ ID NO: 209178 - DNA, 377 bp, Gossypium hirsutum
  unsure (1)..(377): unsure at all n locations
ggctttttgattatctttcanaaaatgatcagccaaatgaaaagaacacgattgtgttcaaactccatgtgcagtgtaaaagaggtagtccacgtattacagggatgatgaagatgattctgttgccaagatgaaggcagctgaggaagccttggaagcaaaacaaaaagtaacaaatagcttgtctgctacctgtttttttttttttttttatcatgttttataattttgtgacaaattgttcttggtactctgaagatatttatgcaaaattaccctatgattctattgtatttatcctacatggctgcaccatgtatttcttaactagtttgataaattttatgtgtggtgtttaatttttcgttnnnnaaaaa

SEQ ID NO: 209179 - DNA, 334 bp, Gossypium hirsutum
  unsure (1)..(334): unsure at all n locations
aaaacttaatcatggctcggttgacgntggtgtcctccatcatcctgtgggtatgctacgtcgccggcggatcaactttctaggactccaaccccatccacatggtatccgatggcctcagcggcttcgaatcctccgttcttcgtgtcatcggtcacactcgacatgctctctccttcgcccgttttgcgtacaagcatgggaagagggatgaaaacgtggaggagatgaagctacggcttcacattttcaaaggcaacttggatttaatcagatccactaacaagaagggactgccttacactcttgctgtcaattagtttggtgattggag

SEQ ID NO: 209180 - DNA, 395 bp, Gossypium hirsutum
ggagatcagtgctatggttctgactaagatgaaggaaacagctgaagctttcctcgggaagaaaagcaaggatgcagtggtcactgttcctgcgtacttcaatgatgcccagagacaagccaccaaggatgctggcgttattgctgggctcaatgtggccagaattatcaatgaaccaactgcagctgccattgcctatggtttggacaaaaagggtggtgagaaaaacattcttgtctttgaccttggtggcggaacatttgatgtcagtatcttgacaattgacaatggtgtattcgaggttctttccacaaacggagacactcatttgggaggtgaggattttgaccatagggttatggagtacttcattaaactgattaagaaaaagcatg

SEQ ID NO: 209181 - DNA, 302 bp, Gossypium hirsutum
  unsure (1)..(302): unsure at all n locations
cttgctcgtgatatcgaggtcatggagcctaaatctccctaccatatctgtggggctcacttgcttgagggccgtgctagtgctcnttcaagtattgattcaactagacagaatttggctgctacgttcgtcaatgcatatgttaatgctgattttggccaggataagttaatgacggcgccagcagactcttcaattggtggttcatctgaaaattagcttttattatcaaaaaacatgggaagaccagtgccgcagcaagtctgggtatgattctattgtgggatgtcgactttgggctt

SEQ ID NO: 209182 - DNA, 368 bp, Gossypium hirsutum
tcccacgcgtccgagcagcctctctgtctcatcttgtgatttgagcttcggggttggattgggttaaacaagtcgccaagatgcagaacgaagagggtcaaaacatggatctttacatccccagaaaatgttcggccactaataggctgatcacctcgaaggatcatgcttctgttcagattaatgttgggcatttggatgagcttggcagatacactggaactttctccacttttgctctttgtggttttgtccgtgcccagggtgatgctgacagtgcacttgacaggctttggcagaagaagaaagctgacgtccgacagcagtagtgggagttggattgctttttactacttgcttggtctctg

SEQ ID NO: 209183 - DNA, 404 bp, Gossypium hirsutum
  unsure (1)..(404): unsure at all n locations
tcccacgcgtccgcacgcatctcaaagttctcgacttgaggggatgcaaaagccttggggatgaatcgctggcggcaattgnctctctctgtgaattgaagatgttacacttggataattctgatatatccgatgtaggaatagcatacttgcaacatggcattattagctcattggtttcgttatctgttaggggatgcaagaaacttacagataaatgtatctctgttctatttgatggctcttctaaactggagttgcaagagctggacctatctaatcttcctaatctctccgacaatggagttttagctcttgcaaaaagtcggcttccaatttcagaactccgaatgcgacaatgtccactcataggtgacacttccatcatggcactagcctcaatg

SEQ ID NO: 209184 - DNA, 389 bp, Gossypium hirsutum
cgacgagcagccatctgtaatcaatcatgggtcattctaacgtctggaactctcaccccaaaaccgacggccctggctctcgcgcatgccgagtgtgtggaaaccctcatgccatcatcaggaagtacgggctcatgtgttgcagacagtgcttccgtagcaatgccaaggaaattggattcattaagtaccgctgaggaatgtttatatggctagaagttggaaacactttttggctagtatgaacctttgtttcgaaattgtagcaacttttaagataacattgctgttttttgttgaatttagtttaagagcttgaagttttgtttctgcaaaggataatttgttgttttctcaatgaagtaatcatactgtttttatcttaaaaa

SEQ ID NO: 209185 - DNA, 404 bp, Gossypium hirsutum
gcgggtactattgattctgatctcactattgtcctttccagcatttccatggccgggtagcaaattgctgctttggttcaaagggctagtatttcaaacttgactggtgttcaaggagctgtcaacgttcaaggagaggatcaaaagaagctcgacgttgtttctaatgaggtgttctctaactgcttgagatcaagtggaaggacagggattatagcatcagaggaagaagatgtgccagtggcagtggaagagagttactctgggaactatattgtggtatttgaccctcttgatggatcatccaacattgatgctgctgtttcaacaggttcaatttttgggatatacagtcccaacgatgaatgcctagcagaaatagatgatgattccactcttggttc

SEQ ID NO: 209186 - DNA, 442 bp, Gossypium hirsutum
gcggataaaggtcaaaacatgggcaaagctgttaaattctttctgcaccagtggaaacattgagctggggcggatatataaagttcagatgcaatgctatgaggatgcaaaattgatgaagctgtttcccgagattgtgagatctctctatgatcaggatgtccttgcagaagacaccattcttcattggttccgcaaaggaaccaacctgaagggcaggcaaacctttgtgaaggccctggagccatttgtgaattggctggaagaagcagaagaagaggaataagctggccaataataatagtatggtcagcaatctatagaaatggtgataaaccttgtacttgttccttgtttttattaggctatctgttgtgagacaaccaactcatagttaccagatccttaagactcatggtgtggctattaaaatatgagatgc

SEQ ID NO: 209187 - DNA, 405 bp, Gossypium hirsutum
ggaaaaaaacgccgttgccagtgttatgatcttatcggactgtcatgatgggcagggacagtccaatccgactaatcagaaccttccagttgtttccaccacgcgcttggcccattcggatatccccgtacacaccttcggtttcggatcgtgcactcacgcgccaaacaacgatgccttttgcaaaatcgtgaatggtctattgagcgtcgtggttcaagacgtgaggcttcaactcggattctcatccggttctgccccgactgagatatcatcggcctattcattaacgactcgaccagctttgatcgggtctaattcggtgcgagttggagatctacatttgggcgaggagaaagacttattagtggaattgaaagtaccagtaacgactcgcgggtccca

SEQ ID NO: 209188 - DNA, 458 bp, Gossypium hirsutum
gcggaaatatgtgggtcacatggaatgaaagatttcatgaacgagagcaaattgatagaccttttgagtggggctgagtatgttcctacttacgaagacagagatggagattggatgcttgttggtgatgttccatgggagatgttcgttgattcatgcaaacgcttacgaattatgaaaggatctgaggcaattggacttgcaccaagagcagtagagaagtgcaagaacagaggctaaggtaggtttaaaaacaacaatcccaattaaaatcaagccagatcaaaatcaaaattgtatgtcaaatcaattaaattgagaaccgagatcaaataaagggtttgaatgtgttgatgatcaagaagaaatattaataaaagttacgagggatatattttgatatttatcaagggacaagaaatcaaataatagaaaagttcataatgtttactttcaat

SEQ ID NO: 209189 - DNA, 257 bp, Gossypium hirsutum
  unsure (1)..(257): unsure at all n locations
ggcgaaaaatgtcgtcgtcggggaggaagatcacccttaagagctcatactgcgaatcattcnatgttgaggaggctgttgcgttggagtcacagactattaaacatattatcgatgactattgcgctgataacgggataccgtttcctaatgttacgagcaagatcttagcgatcgtgatccattactggcctatacacgtcaccgctcctaagacagaccatcgatccggcgattacgaactcaagagacttgac

SEQ ID NO: 209190 - DNA, 429 bp, Gossypium hirsutum
cgcccacgcgtccgcagtaccagatggggatggtttaaatgtgtatgtgaatactgatgatccgggggagtcgccgaacatacctagagccgttcttatggctgtggttcgaagatcaaaagcacgtgctaagaaaaactatgccagagctgatgaacttcgccagaagattattgaatcaggataccaggtcatagaccttcaaaacgaagagattcttgctcgaaagtatcggattcgactgaggggtatagatgcacctgagatgtcgatgccgtttggaaaagaagcaaaagaagagttggttaagcttgttcatgggaaatgtttgagagtgcttgtctacagggaagatcactatggtcgttgtgttgcagacatatattgcaataggcatttcgtgcaggaagtaatgctaaagaaagactc

SEQ ID NO: 209191 - DNA, 428 bp, Gossypium hirsutum
cccacgcgtccggcgggtagagaattattggaatctttgagtccaaagattgaggggaacactttgagaaatttgatggacatgaaagcaaacatgggatcttttgcggctgctctaaaagagaggaatgtttgggtgatgaatgtcatccctgaggatggaccaaacacacttaagttgatatatgacagaggcctcattggcactactcataactggtgtgaagccttttccacataccctcgaacgtatgatttactccatgcttggactgtcttttctgatattgagaagaagggctgcagtgctgaagatttgttactcgagatggatcgcattctccgtcccaagggtttcataatcattcgggacaaacaaccagttatagatttcgtaaggaagtatttatcagctttgcactgggaagc

SEQ ID NO: 209192 - DNA, 467 bp, Gossypium hirsutum
cggacgcgtgggtgctgatgtatggtcatgcggggttacgttgttcgtaatgctggttggggcatggcgttttgaggatcctgacgagccgaaagacattcggaggacaatacaaagaattatcaacgtacagtattcaattcctgattttgtccaaatatctcctgagtgtcggcatctgatttcgaggatttttgttgcagatcctacagctagaattacgattccagaaattaaaaatcatgcgtggttcttgagaaatctccctgctgacttgatggatgagaacacaatgggtaatcactttgaagagcccgatcaacctatgcagagtattgatacgatcatgcagataattgctgaggccactattccagctgctggagcccatggcttaaaccatttaatggtagacaaccttgatgatgaggacatggatgactttgattctgaatctgagcttgatg

SEQ ID NO: 209193 - DNA, 409 bp, Gossypium hirsutum
cccacgcgtccgcccacgcgtccgccagaattgaggccaaaggcacaggaggtttggcatcatccgttattttggagttctgagatgaggctttcatttcttcgagaggctagtgatcgtgttgaattggaagacaggaagagtgcatcagaagtattaaatgaattagaaagtattgcagcagtagctttggatgggaagtgggatgaaaagctggaacctgcattccttaataacattggacactataggagatacaaatttgatagtgttcgggacctactgcgggtaataaggaacaagcaaaaccactacagggaaattcctcaagatatccaagaattattggggccacttccagaaggatttgatggttatttctctagtcgatttccaaaactgttgattg

SEQ ID NO: 209194 - DNA, 268 bp, Gossypium hirsutum
tcttgaaactttacaaaatctcatgggagctcatggtgttattgaggtcaacaggccgagtttgtttaatccggggaactttatagctagacatctcgattcttttaaaactaccgaactgtcaaggcatgaaagggaggaactagtaaatcatagagcccatgtacgatacatgaggctgcaagagcaggtgaaaacagaacatgcaataaaagatctggaacgcctagctcttattcgccaacagagatatgaagcttctaaatat

SEQ ID NO: 209195 - DNA, 426 bp, Gossypium hirsutum
gccgagaaccggagctactgtcgtcgccgccgccatggtgaagtttctgaaatccaacaaggccgtgatggtgctccaaggccgatacgctgggcgcaaagcggtgatcgttagatccttcgacgatggaacacgtgatcgcccctatggccactgtttggttgcagggataaagaagtacccgagcaaggtcatccgcaaggattccgccaagaaaacagcaaagaaatcgcgcgtcaagtgcttcgtcaagctcgtcaactaccagcacctgatgcccacccgctacaccctcgacgtagacttgaaagacgtggttaccgtcgatgcacttcagaccaaggacaagaaagtggctgcttgcaaggcgaccaaggagaggttcgaagagaggttcaagactggatagaacaggtggttctttac

SEQ ID NO: 209196 - DNA, 475 bp, Gossypium hirsutum
gcgtccggaaaaaagtgaggatcaagcatagatggaaaacatgggagttctaggcaaggtggtggattagcgggctattgttatcgttcttcagcatcacattaacagctcagttggacatccccgagtccatcctcccccacgcctacaatcccttctatcaagtttataccacgttaacccaagattatttggtgcttgagcagcctgcttttttcaaggcacttatgacgttggaacttgtttaccaactccctctcgctttgcttaacatctatgggttgttatactctaagccctggttcaacaccacctgcctcctctttggtgcctctatcgttgcctctacgacagctatggtgggagacattctcaattcccagaaggcatcagccaatttgatggccatgtattatccaccgtttcttccattaggggttctggctatagtgcgaggggtggttggacaatcgag

SEQ ID NO: 209197 - DNA, 484 bp, Gossypium hirsutum
ttcccggtcgagcgcaggcgtccgattcatggtttgcatggttcacaagcttggttatgggaactgggaggagttgaaggcagcatgtggtacatcccccttgtttcgatttgattggtttgtgaagtcgcgaacgactcaagagctggctcggagatgtgataccctcatccgattggttgagaaggaaaaccaagaatgtgacgagagggagcgacaagcccgcaaggaaaagaaacttgccaagaacataacaccatcgaagcgcggagggaggcagccaactgagagtcctactcaacaaaagaaacgcaagcagctatcaatggatgattatgcgaattcgggtaaaaagaggaagtgagcgagtaatgtgaactacaaattttgggtctaaaatctctgatatttatttgggtttaaaagcagaaatatcagaacgaggaattgggctgtagtttgcatttggtatttcatggaactc

SEQ ID NO: 209198 - DNA, 481 bp, Gossypium hirsutum
catgaacacaagccaccggtgtatgaaccaccatagaaagaaaaacctgagcctaaaccaccgggggatgcacctccaaagaaagaaaaaccagaacccaaaccaccagtttataagcctccaaagaagccaccagtgtatgagcctaagccaccaaagccaccggtttatgcaccaccaaagaaagagaagccagaacctaaaccaccagtatatgagtctcccaagaagccaccatatggtcactatccaggacaccctccattggagaagcctcaatagagagatttcctcggctaaccattcccgacaactgagctactatggctacatagataaattattatcactgcaataagagctgctgccggctcatgttctgttttcttgtatgtcatgtagtattggtttcttttactagcaagaatgcacatggcagtatcattggaatgaatgcctattctgtatcttcttgtttctc

SEQ ID NO: 209199 - DNA, 425 bp, Gossypium hirsutum
cttcaataatgtctaccacacacttgctaatattgctacttggagtggtggctctcgccactcccgctgttggtacctatgagtctcccaactatgggaagccccctactcctgtttataaacctcctaaggtgaaacccccaccttatgaacatcctgtttataaacctcctaaggtgaaacccccaccttatgaacataagccccctgtctatgaaccaccaaagaaggaaaagcctgagcctaagccaccagtttatacacctccaaagaaagagaagcctgaacccaaaccaccagtatatgaacctccaaagaaggaaaagcctgagcctaagccaccagtttatacaccaccaaagaaagagaagcctgagcccaaaccaccagtatatgaacccccaaagaaggaaaagcctgaacct

SEQ ID NO: 209200 - DNA, 435 bp, Gossypium hirsutum
gggggcacgcgtccgcccactcgtccgcccactcgtccgggcttccaccacctgcctcaaaccgagcccttgcatcatcttgccgtcccaatctcacagagctttagcttccaatttctcttattcaaagccttttcccttccatggcctcaacctctcatcggtcactgaaaccagttccttcacctcatcaagatcctccaaccccttcactaccactgccttcttcttcaacaagttcaagcaggaggccgctccacatactcccaagcccacaaaagttcaagagctacacgtttatgaaatgaacgagagagacagaagcagccctgcagttttgaaactaagccaaaaacccgtaaactctctgggtgatctggttcctttcactaacaagctctactctggagacttgcagaaaagggtgggcatcac

SEQ ID NO: 209201 - DNA, 419 bp, Gossypium hirsutum
aaaactgcacgatgcagctctgcctaaagccctggaagagttggagaccaaactaggagaagttaaatattcaatgcattatttgaatatttcttatgctgaaagaaggaacaatcccgaaaaatatggttttaaggaggcaaatatagcatgttgtggaagcggtccatacagaggaatgtttagctgtgggggaaggaggggtgtgacaaaatatgaattatgttcagaccctaatgattatttgttcttcgactctgaccatcttaccgaaaaggcctgcaagcagattgcccagctcatgtggagtggaacacccaatatcacgggaccttacaatctgaaagcattgtttgaagtatgatatttgatttgatccaatatcatctcaacatgattactttgttggttacctaaat

SEQ ID NO: 209202 - DNA, 409 bp, Gossypium hirsutum
gcgcccacgcgtccgcccacgcgtccgcccacgcgttcgattctattctagaaccactgataggtaccgggagtacgtttatgacagaccctatgtttactccggacctgctgacaaccactgcccctctcttcttggttctgccacctacaacttctctccaagtcatggtaactacttcggctaccagtatcaggttccctatcttcactaatttcccaaaaaatggcaaaaaggtgactgtgatcctctcacattaactattagccttaaccttccatgttgcagagtatgaatgaatttagcattaaaaaaccaacaaaagaaaaaaatgccttgttaattttaatatgttgcacaagaagatattgtgatcctctaatatatgcactgggttgtgatgtatatc

SEQ ID NO: 209203 - DNA, 413 bp, Gossypium hirsutum
tttacatatcacacagtcccttgggtgcatagttacatatgagggggccagatctgttgtaaatgatctcaagttgctgatggatacatttcaccgtgtggagttcactgggacttggagaagactgttctctcgagttaagaagcatattatatggggagttctaaagtctgtaacaggaatgcagggtaaaaaattcaaagacacggcgcatactcaacagccaagtggaactggtgttcctgatagtgacctcaatctcagtgacaatgaccaggttgagaaacctggcccgtacccgatagcttttcttaagcgttcaactgatggagctggggatggatttggtacttccattacgggcctcttcaacactcaacggcggaaagtccaacaattcgggctacgaacta

SEQ ID NO: 209204 - DNA, 414 bp, Gossypium hirsutum
gttttgtttctctttagtttacgttttttttgtccttttggattttttgagactagggaagggaagcaaagaagaagggaaatggagggcaaagaagaggatgttagattgggagccaacaagttcacagagaggcaaccaattgggaccgcggctcagactcaagatgacgggaaagactattctgaaccaccaccggctccatttttcgagcctggcgagttaacctcatggtccttttatagggctgggattgccgagtttgtggcgactttccttttcttgtatatcactattttgactgttatgggagttgttaaggaaaaaactaagtgcccaactgttgggattcaaggaattgcttgggcttttggtggtatgatctttgctcttggttactgcactgctggcatt

SEQ ID NO: 209205 - DNA, 438 bp, Gossypium hirsutum
  unsure (1)..(438): unsure at all n locations
aaaaactgtcaagagagctcttgcaacatatgggactcaagcactgaaagaaatgatccagaattgtgtggcacaagatttttcatggaagggaccatcaaggttgtgggagaagatgttgttgagcctcggggtggctggcagtgaacctggcattgaaggagaggagattgctcctcttgccagggaaaatgttgccacaccctgagcataatcagaaggcaactatggataaagcttagtaacctgttttcttagacaaccaagtccaagtacctgtctactctcgatagctattggcttgaccggcggaaaacaaactgatctgccatacgtgaagtcagtggtgctatttttgagagtgaaaagtcaggagatagtatgatataaatacatagntatagcagctaatgggtgttagtaatgttgtcaagaact

SEQ ID NO: 209206 - DNA, 419 bp, Gossypium hirsutum
gttcccaatggaacaaaatcaaggtttgttgtatgcgagataaagaagaatgatctggaagttggacttaagggccagcctcctattattgatggggagcttttccaaactgtcaaacctgatgactgttactggagcatagaggatagttgtgcactgtcgatccttttgaccaagcacaaccaaatggagtggtggaaatcattggtgaaaggagatcctgaaattgacactcagaaagtcgaaccagagaacagcaaactatctgacttggatcctgaaacacggcaaactgtagagaagatgatgtttgaccagagacagaaggcgatgggccttccaaccagtgatgagcttcagaagcaggaaattctaaagaaattcatgtccgagcaccctgagatggacttttcaagggc

SEQ ID NO: 209207 - DNA, 386 bp, Gossypium hirsutum
cccacgcgtccgtctaggcctcggaaaatgatggaatttcacaatatcaagataagtcacgttgggctggtagttacatatgaagggtccagatttgttgtaaatgatctcaagttgctgatggatacatttcaccgtgtggagttcactgggacttggagaagactgttctctcgagttaagaagcatattatatggggagttctaaagtctgtaacaggaatgcagggtaaaaaattcaaagacaaggcacatactcaacagccaagtggaactggtgttcctgatagtgacctcaatctcagtgacaatgaccaggttgagaaacctggcccgtacccgatagcttttcttaagcgtccaagtgatggagctggtgatggatt

SEQ ID NO: 209208 - DNA, 370 bp, Gossypium hirsutum
  unsure (1)..(370): unsure at all n locations
ccactcgttccctccttattttatatccttcacaaggcctnccaaccaagtgctgtaaacattcaggctcctcatcctcctcataataagtctcttgaataggacttttctcatcacacaactgtttacttccataagctcctcctacctttattgacttcatacacatattaaatataccatgttaacatgactctctcaaaaacacaagctaatttacttcatgagaaaatttcaaacaaatcttacattgataacgatgtcataacgctttttgctacaacaagcaatgcacacatcaatgcaactcttaatcactacaaaaatgaatattaaaatgacataaacaatgacttgatatctgacccta

SEQ ID NO: 209209 - DNA, 356 bp, Gossypium hirsutum
tcgcccacgcgtccgattttgatcggagcatcagtctggttagaagggatctcatggccactactggaggcaagaacatcaatgctaaattagttctacttggggatgttggagctggaaagtctagtcttgttttgcgcttcgttaaagggcaatttgctgaatttcaggaatcaaccataggtgcagcttttttttcccaaacattggctgtgaatgatgcaactgtgaagtttgagatttgggatacagctggtcaagagaggtaccatagcttggcaccaatgtattacagaggagctgcagctgctatcattgtgtatgatattacaaatcaagcatcatttgagagagcc

SEQ ID NO: 209210 - DNA, 339 bp, Gossypium hirsutum
cgtgaattcagacgttataaaaatgttttcttgcggaaaatttacaggtctaagagaactgggtgcgcggtgatgcatgtgtcaagacattgtatcctttgctccaagatgggttcggttctaatgaatgggagtggttccagaattccctatgggatttgagaaggaccgcagaggaactatcacaagggctggataatcttttcaaagcagtagctgggtatttcaaaatagtttcgactgggggctatgctttgctttggaatctaaaaacaagcgttggtgtcccaaattcaatgctaggaagaaaagtcaaagagcaagctcttagatgaatca

SEQ ID NO: 209211 - DNA, 438 bp, Gossypium hirsutum
cccacgcgtccgtttctcctctttctctctattcgaaatttgaatactctctcattttgggatagtgcttagtgtgttttggatcgggaggttagaggtttatcatcaatggcggatactgagacgtttgcatttcaagctgagatcaatcagcttcttagtttgattatcaacactttctacagcaacaaggagatcttccttcgtgagcttatcagtaacgcctctgatgctttggataagatcaggttcgagagcttgacagacaagagcaagcttgatgcacagcctgagctcttcattcatattgttccagacaagaccaataacactctatcaatcattgatagtggtattggtatgaccaaagctgatttggtgaacaatcttggtacaatcgcaagatctggtactaaagagtttatggaagcactggct

SEQ ID NO: 209212 - DNA, 299 bp, Gossypium hirsutum
cccacgcgtccggcggtgataaggaagaagccaggaatggcgagtgtgaaggacatgccacttctgcaagatgggcctcctccgggtgggttcgcccccgtcagatacgcccgtcggattcccaacaagggcccaagtgctatggctatctttctagctgcttttggtgccttctcgtatgggatgtaccaagtcggccaagggaacaagatccgcagggcactgaaggaggaaaaatttgctgcacgtagagcaatattgcctgtgcttcaagctgaagaaaatgaaagatttgtcaa

SEQ ID NO: 209213 - DNA, 407 bp, Gossypium hirsutum
cccacgcgtccggaggagtggccttagggtccgtctaatgcttagacatgtgtcaaaacgtgctgatgcaagagtgaaaaaggggcatgatggagaaggtcaatgtgaggaagatgatgtttgtatttctgaactgccttcaaatgagaaacaacaagaagatccttctcagatgtctgatattcattcacatgggaatcctgcaagttccaatccaattcttataggagaagagcattctaatgagaaagagtgtgggcagaaaaaaagggagaaacaggggccggggtaaaagacgtgggcggactcaataccataataaccatcatagtagtcacggaaatcatgtaggcacttccccttcagcttcaagtaattgggtcagcaatgagcaagctactggagca

SEQ ID NO: 209214 - DNA, 403 bp, Gossypium hirsutum
acccgccacgcgtacgaccacgcgttcgttggttttcggctcacttgcactgcaaattcaccgctcttggtgaacatgaagagggtggtcgagtgacaaaatttcttgcactcaataaatgccttccagggcgcaagttcttgcaggttgttgatattgatctgatctaggaccttatgagggtcagttcgatgaacaatggctggcaataacaccgacattgaactgtctttcctttgaccttccgacgtggagacattggggtggagaaacaaactcgacatgcaagattgttgtccatgcggtcagaaccagattggaagacagatgaacccaacccttgtgaattttttaaaacagttccacctaacaaaccctttgatcttactttttttgggtctcc

SEQ ID NO: 209215 - DNA, 396 bp, Gossypium hirsutum
aattgaagggccgacccaagcgacccgtgcgtccactcgttcgtttacgcgtgggtttaaatttccttcgtgagcttctcaaaattgggacggacgacatgaatgaaggtggagctgatcaaaaataagatatacaagaggatcctacatcttgtacattgcaacgatccatcacttgctgttaaggctgccaaaactattgagttgttgatactaaacgaacagacagaaatccttgtttcgtgccaaatcgcatttgttgaaacatgtcatctaatggaagaaaggctaacatactctaacacagaacatgatatgtttttgttgcaccatgaagtcgaagtagatttccctgatagcaaacagaccgagcgccatacacgcgactttactgga

SEQ ID NO: 209216 - DNA, 395 bp, Gossypium hirsutum
cccacgcgtccgcggacgcgtgggtagaaatttcctttgtgagcttctgaaaattggtactaaagacatgaatgaagttgtagttggggaaaaaaaagatagccgaaaggatcctagaacttggacattgcaaggagccaggagttgctgtaaaggctgccaaaacgattgtgtttttgggactaaacgaacagacaggaatcccggtttcgtgccaaagcgcatttgctgtaacatgtcatcgaatggaagaaaggctaacatactctaacacagaacaggatatggttttgttgcaccatgaagtggaagtagatttccctgatagcaaacagaccgagcgccataccgcgactttactggaattcgggaagtctaagaatggaaaaatgata

SEQ ID NO: 209217 - DNA, 424 bp, Gossypium hirsutum
cagaaaggtaaatcgctaaggagaagaggaagaagagatggccgtgagcgcaacagtgaggggagcgacttctgggactgggcacccagatgtactccaacgctctacgcaagctcccttatatgcgacatccgtgggagcacctgttggggatgggtctgggagccgcgtttgttaaccagctcgtgaattgggacgctcagctccaacgggaccttgacaatatgctcgaaaaggccaaggctgccaacgagcgccgctactttgatggagatgatgaataacgctttcgccctatcatcagataagatattcatgcgccaagctactgtggtcataaaccggttcagattgtgagtgggtgactttggactcttttttttgcttgatttcaagcctgttgaaccttcttttgcttttattt

SEQ ID NO: 209218 - DNA, 272 bp, Gossypium hirsutum
aaagaaaagggcaaccaagcatacaaagataagcaatggcagaaggctattgggttttatagtgaggctatcaagcttagtgacaataacgcaacatattatagcaacagggccgcagcatatctagaactaggaagtttcctccaagcagaaacagattgtaccaaagctatcagccttgataaaaagaatgtaaagtcatatttacgaagaagcactgctagagagatgcttggttactataaagaggcaattgaagattttagctatgc

SEQ ID NO: 209219 - DNA, 299 bp, Gossypium hirsutum
gccacgcgtccctaaaaaacccatataaggatttggagttcttataccttcaaaggaacagggaagtggtataaaaactatcggccctcctttctcatctgtgatgtttcctgatcgtgcacctaataatttgtatctctttacaacctttgttggaggaaaccgaaataaagatctggacaaacttcttacacactaattaaagcatattgatacttgcgaccttcacacttgtttggagtggagggagaaccaacattcttcaatcatttctattggagcaaggcatttcccttata

SEQ ID NO: 209220 - DNA, 390 bp, Gossypium hirsutum
cccacgcgtccgcaagaaacccctagaaggatttggagttcttataccttcaaaggagcagcaaaggggtttaaaaactctcggtacacttttttcatctgtgatgtttcctgatcgtgcacctaataatttgtatctctatacaacctttgttggaggaaaccgaaataaggagctggcaaaagtctcaacagatgaattgaagcatattgttacttccgaccttcagcagttgttgggagtggagggagaaccaacattcttcaatcatttctattggagcaaggcatttcccttatatggccgtaactatgcttcagtctttggagccattgaaaagatggagagagatctccctggatcttttatgcaggtaaccacaaaggggga

SEQ ID NO: 209221 - DNA, 278 bp, Gossypium hirsutum
gccagcagtgccacaaatcgatctcttgctaccaaacaaagtggtatggagaatatttggagcagactcaatggtgcaagtcaacaaggacgtattgtgtttagggtttgtagatggaggactggaacccacaacgtcgatagtgatcggagggcatcaaatagaggacaaccttctgcagatcgatctagctgcatccaagcttgggttcagttcttccctcctcttccgtcgaacaacatgttccaacttcaactttacatcaactgcttaaaggg

SEQ ID NO: 209222 - DNA, 331 bp, Gossypium hirsutum
gttctagatcgcgagcggccacctttatcagatatcaaaaggagtgaacctcagattccggatcggaaaaaagaaaatggtgaagggacgccaaggggagcgagtcagactctatgtaagaggaaccatcttgggttacaagaggtcgaagtcaaaccaagatccgaacacttcattaatccaaattgagggagttaacaccaaagaggaagtagcttggtatgccggcaagcgtatggcttatatttacaaggctaacgcgaagaagaatggctctcattatcgctgcattttgggcaagcgtactagaccgcatggtaacagtgggtgt

SEQ ID NO: 209223 - DNA, 354 bp, Gossypium hirsutum
cccacgcgttcgtccacgcgttcgccttaacttcctcaccaacctaccaagagcaaatgaggggctgaaaatcttcacagccaatcttaatgatcccgagagttttggtactgacatcgagggatgcaaaggagttttccatgttgctgctcccatggatttgcaggacaacgaacccgtagcaggtgtgacccaaaggttaatcgatggaacattacgcatcttgaatacatgcttgacatctaacacagtgaaaaaagttgtatacacttctagtattaccgctgtatatttcaacaagatcaagaatgtcgagatcattgacgatagttattggagtgatgtggatttcat

SEQ ID NO: 209224 - DNA, 322 bp, Gossypium hirsutum
aaggcccgagccagaccgacgcgtccgcccacgcgtacagacaactacacagcctattccctctcatgccttatcaggacccgggtagggtgataaaaactctgggggcactcttttcatctcagatactgactgatcatacacctaataatttgtatctctatacaacctttgttggaggaaaccgaaataaggagctggcaaaagtctcaacagatgaattgaagcatattgttacttccgaccttcaacacttgttgggagtggagggagaaccaacattcttcaatcatttctataggagcaaggcattttccttata

SEQ ID NO: 209225 - DNA, 330 bp, Gossypium hirsutum
gagcgacccgtcacacgtccggtaggaattagcaacaaatttggtgtcttaacagataaaatgactaggtgaggggcatgtgttcatgacgaattagatgactgtacatgaaagatggcaaatcctggttctgataagatgaagttcaagcgatgtcgaattgctaatattgaaataactgatgctcacaaaaaacaaatacttaacattatattagatgctactactcttgatgtttttgagcctgcaacatatgaagacgaatactgacgaggatacgtcatagagctattataagaatgtaagttcggcagaaaactatgcaacaat

SEQ ID NO: 209226 - DNA, 175 bp, Gossypium hirsutum
ttagaatcatgggtgttgtcacttataactatgagtctacctctccagtcgcccctgccaggctggtcaaggctttttctcttgaagctgacaaggtttggcccaaggctgctcctcaggcagtcaagagtgttgaggttgaagctaatcctggccctggaagtatcgtaaagat

SEQ ID NO: 209227 - DNA, 449 bp, Gossypium hirsutum
acctcatcggttcaaccaatcaagtgttttcgctggttttcgcggttatacttctcattggattagctagtccgttggcggtcccgatatatgcttttgtaaagagttggcgcttggtcgggttcgaagctgacatggagcgacaacaaccgttgctgaaagaggaaactacgtcgccgccgtcggagacaaaggacatcattaccgaagtggcagcagcagcttcggcggatgacgcgacggtgttagtggaaaagacaaaaccggtgataggagaggagcacacgataatggaggcgatgcagacatgggacttttgggtatcgctcatatcgttcctttgtggggtgggaacaggtatggcggtgataaacaacatggcacagatcgggttagccttgggtcacgccgacgtttcaatattcatttcattgaccagtatttggggc

SEQ ID NO: 209228 - DNA, 359 bp, Gossypium hirsutum
gccacgcgtacgggtggagttagcatggtattggaggtcttaacagataaaataactcggtcaggggcagctgttatggaggtagtcaaggactgtggaggaaagatggcagatcctggttctgttatgttcaagttcaggcgtgttctgagttgttaatataaaagtcactgatgctgacaaagaccagctccttaacattgcattagatgctggtgctgaggatgttattgagcctccaacatatgaagacgatactgacgaggataggtcagagagctattataagattgtaagttcggcagaaaactatgcaacaattcttttaaagctacgtgatgaaaggaataatttcgaga

SEQ ID NO: 209229 - DNA, 198 bp, Gossypium hirsutum
aggagcattattgaatacgatcctcgtcttgttgctcctacttgcttatatttggcatcagagggggaagaaagcacggtgcatgctagacttcttgtattttacattaaaaaattatcttctgatgaaaagaatagatatgaaattcaaagacatacttgtaatggaaattaagatcttacaagcacttaactatta

SEQ ID NO: 209230 - DNA, 285 bp, Gossypium hirsutum
actaacttacacagctattctgatataagtgattgagaaaatatcgccggctgcgattggtcgggtcaattccaatactggctgccatcttaagaaagggcaaaagactcgagaaaagtttgagaaaaccctgtctgtgctcatgggagctcttgactttgaaatgcttttgtgatgtagacatggtcatccatgctgctatccataatgtgctactcaagctacacatttttagcgatcttgagaaatactgtgcaccacattgcatacttgcatagtaacact

SEQ ID NO: 209231 - DNA, 356 bp, Gossypium hirsutum
  unsure (1)..(356): unsure at all n locations
cccacgcgttcggctggttcttgatggcatatttctttgttgcatatcttggagtggtaaggagaaaggagtggcctcactttttcacatttcatgtggtgatgggaatgctattggaaattgccttacaggtgattgggactgtgagccgctggatgccacttgcaatatactggggtaagattggtatgcacttttggacagctgtggcatttgcctacttatttactgttttggagtgcattcggtgtgctcttgctggtatgtatgctgacattccttttgcctgtgatgctgcatacatccaaattccatatgactaanggtggaatgtagtgaaaatggtttgggattca

SEQ ID NO: 209232 - DNA, 463 bp, Gossypium hirsutum
gtcgtatgtagtcgtaggatcagctgagcagtgtggaaggcaagcaggtggtgctctttgccccggtggtctatgttgtagccaatttggctggtgtggcattactgctgactactgcacagttcctggttgccaaagtcagtgcagcggtattggccctgcccctgggcctggtgggctaaccaatcttatatcaagagagacgtttaatcggatgcttttgcataggaacgatggggcttgtcctgcccgtggcttctatacatatgatgctttcattgctgctgcccgttcctttcctgcatttgctacaactggtgaccaagctactcgcaagagggaaatagctgccttcttagcccaaactttccatgaaactactggtggggcagggtgggctgcaccggatggtccttatgcatggggatactgctacaatagggaattgaatcccccttcatct

SEQ ID NO: 209233 - DNA, 244 bp, Gossypium hirsutum
tgattgatggatggactgtcactgttgcatccgtgggtgattctcggtgtatattagacacccaagggggcatagtttctctcctgactgtacatcataggctagaagagaatgcaaaagaaagggagcgtgtcactgccagcgggcgtgaaataataaggcttaatgttttcttagacaacgacgttcgtccactttcttgcttgcctcgggggtaatgcctctataagtcaatccgtgacac

SEQ ID NO: 209234 - DNA, 395 bp, Gossypium hirsutum
  unsure (1)..(395): unsure at all n locations
gtgcaactatccgtctgtacatcgagcaatatgaaaaggatccatcaaaaataggaagagagtcccaagaagctcttgcccctcttgtggaagttgctctaaaactttcgaagatgcaggagttcaccggccgatccgcaccaactgttatcacatagattcattctgctacacgttaaggtgtgtttgatttaattttgagcaaaagaaaacataaataaagtcctcataagatacgctatatatatatctatgtcagtgtgcatccttgccatgagtacttgagaatggcaaaaggcaataatgcttactcatcaaaatttttgacaatattatttgaggatttattntggtgacccaaaaaacgaacaaataagcgtgtttagatcccttgt

SEQ ID NO: 209235 - DNA, 300 bp, Gossypium hirsutum
gattagctttgcagctgccgaggatgttggtttcatctacaacggattccggtcggctaagctaaaccttgatggcattgcagaactcacttccaatggactcctaaagctcaccaataaaaccgtgcaagaaacaggtcatgctttctaccctcaccccgttgatttcaagaactctaccaacggctctgttttttccttctcttgcacctttgtcttcgccatacttacggagtatccaactctcagcggccatggaatcgctttcgtgattgcaccaaccaaaagcctccccggatc

SEQ ID NO: 209236 - DNA, 395 bp, Gossypium hirsutum
  unsure (1)..(395): unsure at all n locations
cccacgcgtccgcaagatcacctaatagtgccactagtccacaatttacacatcaggtacaggaccatcaccatggctattcatatcaaccacaagtgtccgattatccgtcttcgccgatgcttagtcccggcggcacaatgatgaacgtgccggatccagtgacccgaatattcggtgaaatggtatacgcaagggtatttggggagtcaattacgaacttatatgcgtatccgaattcatacaatcttaccgggagcacccctaggatcagaaggcacctaaagcaagcggataaggcactaaacagaataagctttttcctcttctgttgcttaatcatatgccttctttcattttgatctattcggntaaccgaccattatgtatatata

SEQ ID NO: 209237 - DNA, 308 bp, Gossypium hirsutum
cgtccggaaatcttcaacttaataacaaaaaacttactctcaccaatcactatgaatcctacagccaggaggagatcattagattccatcacaaagcctaaaaatttacagagaaagcctactaatgtttgatgaatatcaaaacccacaacaacccctatacttacatttacaacattaaaaaccatattttttcttatgataaacttactgacaagctcgaatccgaataaaaagagaaagttgcaaccgctgttaaagaatccctctattggctgcatgactaccacaatgtcgatcttgtatac

SEQ ID NO: 209238 - DNA, 458 bp, Gossypium hirsutum
cccacgcgtccgcttgttttgatgatgaataaagagagagtgcaaactagaggtgttaaggttgatgagagtgtaaagactgggtgtacttatatgaaggttaagtttgatgagaatgggaagttgaagatggagactgttaaggaatctgctgaggactctcttcttagctctgaattgaatcttgctgttctcaaagaggctaggattttccacttcaattcagaggttttaacttccccttccatgcgatctacactttttaaagcaattgcatggtccaagaagtttggggggctcatatttttcgatttgaacttaccattacctttgtggagatcacgtgacaaaacaagggaggtgatcaagaaagcctggaacaaagcagacatcattgaggtatcaaggcaggagctggagtttctactggatgaagagtattatgagaggaagagaaa

SEQ ID NO: 209239 - DNA, 371 bp, Gossypium hirsutum
  unsure (1)..(371): unsure at all n locations
cggaatggaaggnccgagccgagcgacgcgtccgcaaaggcacaggtaaatcagagaaaatcacaatcaccaacgacaagggtcgtttgaggcaggaggagatcgagagaatggttcgtgaggccgaaaaatttgcggaggaggacaagaaggttaaggaaaagatcgatgcccgcaacagcctcgagacttacgtttacaacatgaaaaaccagattaatgacaaggataagcttgctgacaagctcgaatccgatgagaaggagaaagttgaaacggctgttaaagaagccctcgagtggctggatgacaaccagaatgccgaaaaagaagacttttgggagaaactcaaagaaaatgaggctgtttgc

SEQ ID NO: 209240 - DNA, 441 bp, Gossypium hirsutum
atcatagaagaacttgattcaaaaatacctataggtgaaattaaaggaggcggctattccgtgtgggtgaggtaaagaatttggtttatctccatggagcattgtgtgaggcattaaggttgtatccaccagcccctttcaatcataaggaacctgtcaaaccagacatacttccaagcgggcatccagttcatccaaagacaaaaatcttgtttagtgtgtattcaatgggaagaatgaagtcaatctggggagaagattgctatgaattcaagcctgagagatggattaatgagagaggagagatcaaacatgagtcatcgtacaagttcttatcttttggtgcagggccaaggatatgtttggggaaagaaacatcatttattcagatgaaagccgtggcatctgctctaatttacaattatcgcattcatgtaatgg

SEQ ID NO: 209241 - DNA, 343 bp, Gossypium hirsutum
cccacgcgtccgatttaacttctttgctttctttgtatttgcagcttctgtaggggaaaaaaaaagatgaagagggtttcctttgttgccttgtgtgtggtggcactgtcggtggtgctgttttcgggtgaaagtcgcatggcggaggcagtgacatgtaatcccacggagctttccccctgcttgtcggcattcacgtcgtcctcgcctccatcagccgcttgttgcagcaagctgaaggcgcagaagccatgcctctgtggatacattaagaacccatctctttaacagtatgtcaacagtcctaacgcttaaaacgttgcttcgacttgtggagtcacat

SEQ ID NO: 209242 - DNA, 440 bp, Gossypium hirsutum
ggaaggcccgggccgaccgacgcgtccgccgacccgacaactcacacgtggcttacgttaacaagatgactcatataaggtgcagcaaggctaaagagcttcaagcaaagaacgactgtatatagaacatgggtgatacaccgtaccgacttagacaatccgtgaaggagctcatccatatgcaacgagctggatgttagggttacatgttgcacatgaacaacgtgcagacatgggtcaccgctgcactgaccgatgagaatacttgccttgatggctttgcaggcagagtcatggatggaaacgtcaaagttgcagtgaggcgcaaggttgtccatgtcgctcaagttactagcatgctcttgcattagtgaatcgctatgctgcaagacaccgagctgctatacctactgaaaaaccttaattttaaactttaaaaa

SEQ ID NO: 209243 - DNA, 289 bp, Gossypium hirsutum
cgctcacccaggcacacaccgagcttataaactatggttttccgatcggtcttcttccgggctcggtgacgaagtacactcttaaccaaacatccggtaacttcgccattgatctcggtggcacgtgcaagatcacgctcccgcctgacaactacctggctacttactcgaagcgggtaacggggaagattgaaaacggaaagatagcggaactcgatggcatcagggtacgggctctgttcaaatggtggtccataaccgggattcgatccagcggggataatttggt

SEQ ID NO: 209244 - DNA, 392 bp, Gossypium hirsutum
  unsure (1)..(392): unsure at all n locations
gaattggaaggncccggcccagaccgacgcgtaacgtctaatagactattcggtgcttgattgggtataacgacagtgaataatcccatatcgggtgctggacttgttatggataaaacaccacattcttatatgctcttagcccgcgcctaagagtttgcgagtaaactacgtttgtagtctgtggacaatgaatatttcattacataagacaatgtggggatgcttaaggtagcaaaagaagcaaactcaatgctgttctattaccgcattctaacccttaccagctgtggcttatgcgcatacagagaaaatcaatcacaaatgaacgacttaccaatcagtctatacgccctagaaacagtacgtttcgttgtagttgacaaacaagg

SEQ ID NO: 209245 - DNA, 387 bp, Gossypium hirsutum
cggacgcgtgggcggacgcgtgggttacgttgccaagatgactcatgtaaggggcatcaagcctagagagcgtcaagcagtgaaagactgtatagagaacatgggtgatacagtggaccgacttagccaatcagtgaaggagctcagccatatgggacgagctggaggtgagggtttcatgttgcacatgagcaacgtgcagacatgggtcagcgctgcacttaccgatgagaatacttgccttgatggcttcgcaggcagagtcatggatggaaacgtcaaagttgcagtgaggcgcagggttgtccatgtcgctcaagttactagcatgctcttgcattagtgaatcgctatgctgcaagacaccgagctgctatacctactgag

SEQ ID NO: 209246 - DNA, 273 bp, Gossypium hirsutum
cccacgcgtccggcaatttagaaaataatagaaagaaacgggaaaaacgcattcgcgcctgtgggtggatgccttgactaaggaaaacacatggccgctggagctgccgatggacttatctggtcgctttactaagggtgcatatccggcaacgaaatcagcatcgagcgccagacgtaccacaagaactgtcgctgcgcactccacgataagtcacgagggaactgccctcgctcaatcgctaaaagcaagaacctatcagatgctattagg

SEQ ID NO: 209247 - DNA, 424 bp, Gossypium hirsutum
ctcagttggacatccccgagtccatcctcccccacgcctacaatcccttctatcaagtttatacggacgttaacccaagattatttggtgcttgagcagcctgcttttttcaaggcacttatgacgttggaacttgtttaccaactccctctcgctttgcttaacatctatgggttgttatactctaagccctggttcaacaccacctgcctcctctttggtgcctctatcgttgcctctacgacagctatggtgggagacattctcaattcccagaaggcatcatccaatttgatggccatgtattatccaccgtttcttccattaggggttctggctatagtgcgaggggtggttggacaatcgagcaaggctgctccatccattggcaatggaccttcgtcggctgtgaaaaagagggctt

SEQ ID NO: 209248 - DNA, 383 bp, Gossypium hirsutum
cacaaaccagataagaaatttgggatgagaaatgtcatgtgcgttttgacgatcaaagatgcggtggagcatgcttgtgcacgggcatgttcatgggctgatatctgctctgttattgctagagatggcgttgtatagctcgtaggaccactcgttggaacaaacaccgatctgaaagacagccggagagattacctgtgaaaggtcgattataccatacacaatcacattgattaactcgatgatgcgctgtaacgcttgctatcaatctgcatatacaccgacagaatagcacctggattaggagctcaatccggaggtcacgttgattgtgtagacctttgacacaaactattccacacagtttatccgacattggaccc

SEQ ID NO: 209249 - DNA, 427 bp, Gossypium hirsutum
gcgcaccgtcaagcttactgtccagaaccggcaagctaaagtcactgtagtcccatccgccgccgctttggtcatcaaggcgttgaaagagcctgaaagggatcgtaagaagacgaagaatattaagcataatggcaatattagccttgatgatgtgatcgagatcgcgaaagtcatgaagcctagatccatggctaaggacctgagaggaaccgtgaaggagattttgggaacttgtgtttccgttgggtgtacggttgatgggaaagatcccaaagatctgcagcaggagatctctgatggggaaattgatgttcccttggagtaaaaccaaatgaaagaaactgggtttttctcttttgctttacttaattgttttcttttcaaaaatttgtgttttataagttttttaagtagttggtaaaaa

SEQ ID NO: 209250 - DNA, 411 bp, Gossypium hirsutum
aagttttcacttccaattcgatcaaaaaacccttcttttttccctcatcaatccatcatgggaggaggaaatggccaaaaatccaagatggcccgtgagaagaacttggaaaagcaaaaagctgctgccaaaggaagccagcttgagtctaacaagaaggccatgtccatccagtgcaaggtgtgtatgcaaacattcatgtgcaccacaacggaagtgaaatgtcgggagcacgctgaggcgaatcatccaaagtccgacgtgtacacgtgttttcctcatcttaaaaaataaacatcaaaactctacagaaagaacggggatgtcaagacagcttgtaatgcatatcatctatctatgttgtatcttggtactctacaatttatcttaaattctctttcacaagcctgt

SEQ ID NO: 209251 - DNA, 373 bp, Gossypium hirsutum
cccacgcgtccggtggggagatggtcttcagactcgatctttcactttcattgatgaatgtgttgaaggtgtacttagattgacaaagtccgatttccgtgagcctgtgaacatcggaagtgatgagatggttagcatgaacgagatggcggagattgtgcttagctttgaagataaaaagcttccgatccaccatatccctggtccagagggtgtccgtggtcgtaattcagacaatacattgatcaaagaaaaacttggttgggcccctacaattgaggtgaaagatgggctgagaattacatatttctggatcaaagaacagattgagaaagagaaggctcaaggcattgatctatcttgttattgatca

SEQ ID NO: 209252 - DNA, 413 bp, Gossypium hirsutum
aaaaagatgatcaagtggtgtccaggcccaggctgtgaaaacgctattgactttgtcgccgggagtgaaaatcttgatgtttcttgcctttgctcccattccttttgctggaattgtactcaagatgctcatcgtcccgtggactgtgaaaccgtgacgaaatggatgtcgaagaacagctcggagtctgagaatgtaaattacatactagcttttaccaagccttgtcccaaatgcaaaaggccaattgagaaaaacatgggatgttcgcatatgacatgtagggcgccttgcctttacgagttctgctggctctgccttggagattggaaaaaccatggcacttgcaatcgtttcaaggggaaccccgaggaggaaaaaagagaaaaggcgaagcaatatgtgatgaaata

SEQ ID NO: 209253 - DNA, 299 bp, Gossypium hirsutum
ggactttggaactgaaggtcgaggtggatattttgatgaatacggcattatccgcgatattatccaaaatcacctgttgcaggtcctttgtcttgttgctatggagaagcctgtatctctcaaacctgagcgcattcgtgatgaaaaagtgaaggttcttcaatcggtacttccaattaaagacgaagaggttgtactcggacaatatgaaggttacagagatgatccgacagttcctgatcactcaaacaccccaacgtttgcaactgttattctccgtatacacaacgaaagatggg

SEQ ID NO: 209254 - DNA, 293 bp, Gossypium hirsutum
caaagaaggaagaatgggaaattgatttggctaaacttgatataaggtatgttatagctcatgggacttatggcaccgtttaccgtggcgtttatgatacccaagatgttgcagtgaaggtattggactggggggaggatgggattgccacggttgctgaagctgctgctcttcgggcgtcattccgacaagaggttgctgtttggcataagcttgacaacccgaatgttacaaagtttatcggagcttcaatgggaacttccaaccttaaaatcccgacaaaagattgaact

SEQ ID NO: 209255 - DNA, 418 bp, Gossypium hirsutum
attgattttgatatagagctcgggtcaactcaatactgggatgaccttgctcgttatctatgagcttacagtaataatggacgaaaggtgtatttaacagcagctccacagtgtccatttcccgatagtttcttagggactgcccttaatacaggtctctttgactacgtttgggttcagttttataacaatccaccatgccaatacacatcggggaacataaacaaccttgtcaactcatggaaccggtggacttcatctataaaagcagggaatatatttttagggttgccggcggcaccagcggcggccggtagtgggtatattccacctaatgtgttgacttctcagattcttcctgttatcaagaggtcatccaagtatggtgggattatgctttggtctaaattctttgatg

SEQ ID NO: 209256 - DNA, 397 bp, Gossypium hirsutum
cccacgcgttcggggacttacaaaggccgggaagggaaagttgttcatgccagtgcgcaaggacgacgaggtccaagtggttcgtgggacttacaaaggccgggaagggaaagttgttcaagtctaccgtcgcaaatgggtgatccacatcgagcgcatcacccgggagaaagttaacgggtcgaccgtcaacgttgggattaacccatccaaggttgtcattaccaagctgaggctggacaaggaccggaagtcgttgttggaccgtaaggctaagggacgggctgctgctgataaggataagggtactaagttctctgccgaggatatcatgcagagtgttgattaaggttgtcttggttttcattgctatgatatcctttgttatgttacaatt

SEQ ID NO: 209257 - DNA, 431 bp, Gossypium hirsutum
ggattccttgcttggaattcgaattagaggagggattcgtgcaccgtaagtactcgagcttacccacgtactacgatggacgctactggaccatgtggaaactgcccatgttcgggtgcaccgactcggctcaggtgttgaaggagcttgaggaatgcaagaaggaataccccaatgcattcattagaatcattgggttcgacaacgttcgtcaagtgcagtgcattagtttcattgcctacaagcctgaaggctactaagttgtttacttccctcctaggaattccatttgtttcaaagttgtacttaaattaagcccctcaaacccccccccctttttctttttcttttttagttgagttatttggcttggggtctctctttgtttgtttttggatttccaatggaacggctgagaactaatgaataaa

SEQ ID NO: 209258 - DNA, 398 bp, Gossypium hirsutum
attgctctcttcgtctgtattcccccagccctcatttttgagggtcctcaattgttgaagcatggtttcaatgatgctattgctaaagtgggtatgactaagttcatctcacatcttttctgggtgggaatgttttaccatctctataatcagttggctaccaatactctggagcgggtggcaccactgacccattcagtgggcaacgtgctgaaacgtgtatttgtcattggcttctcaatcattgtctttggaaacaagatttcaactcagactggtataggaacagtcattgcaattgctggagtggcagcctactctttcattaaggccaagatggaagaagagaaacgacaaatgaaagcagcatgagaagaaaaatggaggcaaggaaattg

SEQ ID NO: 209259 - DNA, 413 bp, Gossypium hirsutum
gaaagctctttctttggcagtgaaaattgaaaatcgacggcgaaaatgttgaggctggcgtggaaacggttgcttgggctaacgtcaagggagatcccgtcacggtccgttcagattctgccacgtctttaccacgaaaacgtcatcgaacactacaacaatccccgtaacgtcggttccttcgataagaacgatccgaacgtcggcaccggtttggtcggagctcctgcttgtggcgatgttatgaagcttcaaatcaaaatcgacgaggaatcggggaagattgttgatgcttgctttaaaacattcggttgtggatcggcgattgcgtcttcttctgttgctactgaatgggtgaaggggaaaaagcatgacgaggttcttaccattaaaaacacggagattgcgaaaca

SEQ ID NO: 209260 - DNA, 412 bp, Gossypium hirsutum
cccacgcgtccgcccacgcgtccgcttggcacagatttaaactacaaccctctcataaagatccaatgaaaaaaaagaaaggtcaaaagaatgatttttgctttttaacagtttggggaatggaaactgaactacctttcggctctcctcgaaaacggcgttcgttttttgagcctatttttaaagaactaaaaaaaaaaataaaaaaatggaaaacgaaatgttttatagctttaacaattttaaaagaaaaaactaaattgtttcgaaaagcttcaaaagaaacaaaaaaatggatcactcaaagcattctatttctaaaaggaataataaaagaacttttaaaaataaatccaattccattttttgggttgagaagaccatatgaattgggcgaaacttaaaaggattc

SEQ ID NO: 209261 - DNA, 396 bp, Gossypium hirsutum
  unsure (1)..(396): unsure at all n locations
ccacgccacactacaacgtgtgcaacagcaaggtgatgaaactccaatggtgtgggaaatgcttctatacttttacatcctctattcaccagactggcactatcggagtacaatgcctactttcctgttcttttatggagtcggctttgcaatagcccatgctctcatccgcttcgaaattggcttcaaggtgcattacatcattctctgccttctctgcatccctcgaatgtacaaatactacatctacactaaagataactatgcaaagcggcttgcaaagctatatatagcaactttgttcctgggaagcatatgttggcttatggaccangtattgtgcaaggagatatctcattggtacttcacccctcaagtcatgctctatggcatgtc

SEQ ID NO: 209262 - DNA, 429 bp, Gossypium hirsutum
attattttctccataccagcataaatcaacaatggcaaagctcgcagtttacttagccaccctggctctcattttgttccttgccaatgcttcaatcacatctgtgacggtcgaaagcgaggaaaaccgggatagctgtgaacagcagataaggaagcaagcccacctgaagcactgccagaagtacatggaggaagagtggggtggcgaaggcagcgacaatatagccggcgggtacattgactcatgttgccagcagctagagaagatggatacgcaatgcagatgtcaaggtctaagacatgcaacgatgcaacagatgcaacagatgcaagaacaaatggggagcaaacagatgcgagagatcatgcaaaaggttaccaagaatataatgtccgaatgtgagatggagcctgggaggtgtgacac

SEQ ID NO: 209263 - DNA, 412 bp, Gossypium hirsutum
ttatgattgttgcttcgcctgagccaattacaactggatgccagtgggccaaatgtatctgaccagcaagtctcgagggtattgtattgagatgtgaagacacatcgaatactgatgccataactgtttagtagtatgtgcatcgtaagctcttttcataaacacaaatttattctattttttcccctttctattaaatatctggcgatgatggtggctgtggtaaggtcgactgatgagcatgagcccctctggtgtttattatcctttttaactgtgtatagcttttccgaggttttgttgtcaaccttttatcttgtaggtttgaagggtgtttttgctttagggtcgggttcatgcagcttacgtgttttgcgaaggattcgggatgatgttactaagaattaaaaac

SEQ ID NO: 209264 - DNA, 430 bp, Gossypium hirsutum
tagagatcaattctataggcatgacgattatagctcattgttgatgtattatggatgatcggttgctggagttttaaaccgatgacagattggcttgggtgtgaagcagattggtcctacttacttaaattgttattaactggtgtttaaatgtgcagactttggttttatctagtaacaatattaaggactggccggttgcaattttgaagtcacttcccaatctttcttgtttgaagttggatagtaatccactaagacagattccatctgatggattccaagcaatctctatgatccaaatactagatataagtggtaatgccacttcattacctgagaatccagcattttccaacttaccacacttgaaggagctttatttgagacgaatgcagctacgagaagtcccatcagaaataatgagctt

SEQ ID NO: 209265 - DNA, 390 bp, Gossypium hirsutum
cccacgcgtccgatcaggggacccagccagaagtttcccttatacagctgccctcgttgtggatactcctccatcctcagcagatgtggctgaaaaagttgtggaggcaggagggaagtcgccattgtctaggaatgcgtcagtggtacagaggaaagggtataccagtgacgaggaactggaggaattgaattctccactttcatcaataattgagaaatttccattgtcaccaacaattgttaccaatggaggagtgaatggaaaccatgaacatgcaggctatggtggtataaatgcaagatacaaactccttcacgaggtatggtccgtgtgagtgtttatggtaaaaccgtttgcgtatatctctcaatgtttggagccatggga

SEQ ID NO: 209266 - DNA, 350 bp, Gossypium hirsutum
tcgcccacgcgtccgccggaagctaagcttttgttcatcattcgaattcgaggtattaatgccatgcacccaaggacaagaaagatcttgcagctcttgcgtctgagacagattttcaatggtgtttttcttaaagtgaacaaggcaacaatgaacatgcttcaccttgttgaaccttatgtgacttatggataccctaatctcaagagtgtgagggagttgatttacaaaagaagttttgggaagttgaacaagcagagaattgctcttaccgacaatgccattgttgagcaggctttgggcaagtttggcatcatctgtgtggaagatctcatccatgagatcatgac

SEQ ID NO: 209267 - DNA, 419 bp, Gossypium hirsutum
gttgtgattgataggatcactgggcgcacaaaaggttatgggtttgtcaggtttggcgatgaggctgaatataatcgtgccatgactgagatgaatggtgctttttgttcaactaggcctatgcgcatagggccggctactaacaagaagactggtgctgcacagcaatatccagcagcttcatctcaagggactcagaacgagaatgatccaaataatacaactatatttgttggtaatttggattctaacgtgactgaagaccatttgagagaggtcttcagcccatatggtcagttggtgcatgtgaagattccacaaaacaagcgttgtggatttgttcaatttgctgataggagttgtgccgaagaatctctccgaatattgaacgggactcagttgggtggacaaagtattcg

SEQ ID NO: 209268 - DNA, 293 bp, Gossypium hirsutum
  unsure (1)..(293): unsure at all n locations
ccctactgatcttggcaacttgaagagccttatcagtttggacttatataacaacaacatctgcngcaccattcctccttcactcgggaaacttaagtctcttgtattcttgcggcttaatgacaacaggttaactggacctatccctagggagcttgttggtatttcaagcctcaaagttgtcgacgtctcaaacaatgatttgtgtggaacaattcctaccagtggtccatttgagcacattcctttgaacaagttcgaggaaaacccttgtctcgaaggcccggatttgt

SEQ ID NO: 209269 - DNA, 412 bp, Gossypium hirsutum
cccacgcgtccgctcggctctcgcatcgatgaagaacgtagcgaaatgcgatacttggtgtgaggggcagaatcccgtgaaccatcgagtctttgaacgcaagttgcgccccaagtcctgtataccataggcgacaaagtcctgattatggtagagctcgtagtcctgtttatgaacgttataatggtcctgcttatgacagacgcaaaagtcctgattacgggaggcataggagtcctgaatatggcagataccgcagccgatcacctgttcgaaggtcccgaacatagaagggcatcagattaacggtgaaaagtatttcgtagctctatgcctagctttctatgtattttggtatgtactttaagaacctaatgttcatgttaatatatgtacttggctttggattaac

SEQ ID NO: 209270 - DNA, 339 bp, Gossypium hirsutum
cccactcgtccgtccacgcgtccgattccagttgttaagacctctattgctggcaccagaatgatgggacgtctatgtgctggaaataagaatgggttacttgtaccccacaacacgaccgatcaagaacttcaacacttgcggaatagtctaccggatcaagtcgttgttcggcgcatagaggagaaactatctgctcttggcaactgtatagcttgcaatgaccatgttgctctgacacacactgatctatacaaggaaaccgaggagataatcgctgatgttctcggcgtaaaagttttcaggcagacaattgctggtaatattcttgtagggagc

SEQ ID NO: 209271 - DNA, 349 bp, Gossypium hirsutum
tgtcgttatttcaacaccgcaccgtgagacatcccggtatggtatgggaagtgaaacacgtatgctctctgcacgaactccattacatccttacatgactcctattagagatcctggagcaacacctatccatgatggcatgaggacacctatgcgtgacagggcctggaatccttatgcaccaatgagtccacctagggataattgggaagaatgaaaccctgcctcttgggggaccagtccacagtatcagccatgaagtcctccttcaagggcatatgaatcacctacacctggttcgggttgtgccaacactccttgcggtagttacagtgaggcttgaacacct

SEQ ID NO: 209272 - DNA, 429 bp, Gossypium hirsutum
cccacgcgtccgcattaaaccaacaacaacaacaaaaaaccaaacacccagagttaacggggggagaaaatggtcaccaaagtctacattgtatactattccatgtacggacatgttgagaaactggcccaagagatgaagaaaggagctgaatctgttgagggagtagaagtcaaactttggcaggtagcagaaacactaccagaagaagttcttgggaaaatgggagcaccaccaaagacagatgcccctatcataacaccagatgagctgacggaggcagatggtgtgctatttgggtttccaactagatttgggatgatggctgcacagtttaaagcattcatggatgcaactggtggtctatggagaacacaagcccttgctggtaaacctgctggcattttctacagcactggctcccaaggt

SEQ ID NO: 209273 - DNA, 349 bp, Gossypium hirsutum
atctgacattgacattgctgctgttatgggcatgggattcccaccttacaggggaggactgatgttttgggctgattctcttggttctaagtacatttattcgagacttgaggagtggtcgaatttatacggaggatttttcaagccttgcgctttcttggctgaaagagctgccaagggtgctccattgagtgcaccactggagatgggaaaatcaagactataaaactgctttgattgcggtgctcggagatggccattgatgttttggtttaccaatttgctgccattgatagaatgataaagctctcaagatgagcctttcaataatgtggtttcaaatccaaaa

SEQ ID NO: 209274 - DNA, 416 bp, Gossypium hirsutum
tcaacacaaaaaaggcctttgtttaaaggagctaaaagaagccgaaaccctggctcaaaagatcggaaaatccaatatgcgccctgtcgccccatctaaatctatggtttacgccgatgtcaacgttattctccctaaaaattattggaactacaacctcctaactgttcaatgggccgaacaagatgattactaggttgtgaggaaagtcgggcgagggaaatacagttaggttttcgagggggttcatattactgataacgagaaatgtgttatcaagattctcaaaccggtcaataagaataagattaagagggtaattaaaatactgcataatcttttctgatggcccaatattgtgaagttgctgtatatagtttgtgatcatcattctaagactccaattcttatatttt

SEQ ID NO: 209275 - DNA, 148 bp, Gossypium hirsutum
caaccacaagctgtaggcggtgctctttcttttttttttttgagaagatcagttccaagcggccggctgctgataaaaagaagattgaggatgcaattgagcaagcacttcactggtgcgatggaaaccagctggctgaggcggatga

SEQ ID NO: 209276 - DNA, 431 bp, Gossypium hirsutum
accagctaggaatcttgcaggaaatgtaccttcctacacaactcgccaagtggagagaacctatgcatccgcagttgcgtcttcagccatagagccatcggaggatgctgttgctacgctggtgtctatgggctttgatcagaactcagctaggcaggcacttgtgcatgctagaaatgacatcaatgctgccacaaacattcttcttgaagcacagtcccactaattgaaacatagaattgctggcgaaaagtggatgccgggatgttatttcatcggtataaatgcataatcacacatatagtggatggcaaccgatttgcttgcctcctggggttatgtggcattccaagatttcactatggagtagtattttcttcccattttgcctcacgtatttctggtagtagcagtaatcatacaccaatgca

SEQ ID NO: 209277 - DNA, 402 bp, Gossypium hirsutum
ctaagccagctcctgttatagaaaccttttgttctgatgaactggtttcaccttatgtggggctggatggagttgtaactttagttgactcgaagcatgctatgaagcatttgaatgaagttaaaccaagatttgttgtgaatgaggcagttgaacaggttgcttatgctgaccgtataatcatgaacaagatagatttggtcactgagggtgacttggagaaactgactgataaaatcaagcatattaatagcatggctcaaatcaagagagcgaaatttggagtcgttgacatggactttgttttgggagttggaggatatgatcttgacagaattgattctgcagttaaagtagatgattctcactgtggaaaccatcaccatgactcacatggacacc

SEQ ID NO: 209278 - DNA, 426 bp, Gossypium hirsutum
aagaaatactgttcttgttgatgcaatatcacgaaggatacctcttgtcagtgaccgtccaactataatttttggcgctgatgttacccatcctcaccctggggaggattcaagcccttctattgcagctgttgttgcctctcaagattggccagaggttacaaagtatgctggcctggtttgtgctcaagctcatcgtcaggagctcatccaagatttattcaagacatggcaggatcccgtaagggggactgtttctggtggcatgattaaggagctcctaatatctttccgacgagccactggacagaagccacagcgcattatattctacagggatggtgtcagcgaatgccagttctatcaagttctgttatatgaacttgatgctattcgtaaggcatgtgcctcgttggagccaaatta

SEQ ID NO: 209279 - DNA, 398 bp, Gossypium hirsutum
gcgcccacgcgtccgctgaatacgcaaagctattcttgcgttttactttcttctccaacattcaccctgtctttatgcatattactaccatttgtaagcattgcttaattgcatttatgctaaaattatactttttcgatcatttctatttatactttttcttcttttgtcaaacatttttttctttttttttttttgaagtgtgggttttacaatggactcttgtagctttaatgtaatattatccatacatttatgctaaatctatactttttcgatcatacgtgtgcaggatgattttgctagtaaactctctggtcacaagtcagaggtttgtgggctgaagtggtcttatgacaaccgtgaactagcatcaggcggaaatgacaacaaacttt

SEQ ID NO: 209280 - DNA, 400 bp, Gossypium hirsutum
gaaacaaaagtaactaatactgcaattgtaccactatcccaatatctattggatcctcaaacgccaagctcagcaggcaaggcttttggcaacattggctcttggtgacctttttcagaatgaggcacttgctcgaagtgctgatgctgtttcagcttgtcgtgctcttgttaatgtgcttgaagaccaaccaacagaagaaatgaaagtggtagccatatgtgctctgcagaatcttgtaatgtatatccgatcaaataagagagcagttgctgaggctggtggtgttcaagttgtattggatctaataggttcaagtgatccagatacatccattcaagctgctatgtttgttaaacttctattttctaacaataccattcaagagtatgcttctagt

SEQ ID NO: 209281 - DNA, 418 bp, Gossypium hirsutum
gccaaacaagccggagcagagggcggattcaccgcaacgggaactggtgcttacaaagcagctgggactcactcttattccaccactggggaacgtggacaatccactggagctcatcagatgtcggcgttgcctggacatgggagtgggcagcctgcagggcaagtggttgagggtactgctgctgcccatcctattgggtcaaatcctggtgtgggaggggccaaatcacataatactcgaggggagggaaatccccatggatatggtactggagggacttacagttaatcccttttttcttgttttgtttgaggaaataagtaatgcaaaagatgatgcagttatgttatgatagaaatcaaatattgagcttagtactgtgaaacgaggtttttgcatggaagctgagcttaat

SEQ ID NO: 209282 - DNA, 415 bp, Gossypium hirsutum
cggacgcgtgggtggtggcctctctgagaaacatcatggattgtccaacttctgggggggggatcgaattaatgagatagattcggaggcattgcagatagtaaacatatgctacgagcgagccaaagagatcttacagcagaaccgaaagctgatggatgcagtggttgatgaactggttgagaaaaagagtttaacaaaacaagaattctttggacttgtggaattgcatgggtcacttcagccaatgccacccagtatagttgacattagggttgccaagcgaactcagttccaagaaatgatgatgaaccccaatgtgaaggttacagggagtagttcttcataaaccaccacctatctactttctattcacatgtataaactttgcatcaatcactttcaggtcatacca

SEQ ID NO: 209283 - DNA, 411 bp, Gossypium hirsutum
gccaggaacaaccacaaaggcctggggctagtcaggaacccatcaagtatggtgatgtcgtgaacgtcaccggtgaactggcttcaaaacctattggaccaaaagatgccgccgccatgcagtcagctgagaacaagatccttggagaaacaccaaaaggtggtgcagcagctgccatgcaatctgcagccatcgccaatgaaagagcaggcgtcgttagtcacaaccaatctgacgttgctggagaccaaggcgtcgccgtcattaagtctgacgcagatggcgatgttatgatcacagaagccgttgctggacagattgtggggcaatacaggcaaccagatgtttcagcggtgactactccagcaatgttggttgatccaggatcaattacgattggagaggctttag

SEQ ID NO: 209284 - DNA, 435 bp, Gossypium hirsutum
atctcaaccaaaaccttctcagcaaattgtttaatccctggcaattcctcccttgttccgccattaaagatctatactttaaatcccctaagcttttgtttcaccttttttaactctttttttctctctcgaaatcccatcaaaactcaagaagaaggaaaaacagataaacttcaatggctatcagaaaacctggtttgattgctttatttgatgttgatggcactcttacagctccaagaaaggtggctacacccaagatgttggagttcatgaaggaactgaaaaaggttgttactgttggagtggtgggcggatctgatctcagtaagatatctgagcaacttgggaaatcagttgtcaatgactatgattatgtattttctgaaaatgggcttgttgctcataaagatggaaaactcattggcacccaga

SEQ ID NO: 209285 - DNA, 430 bp, Gossypium hirsutum
ggagtttgggtctaagcctactcaacgaaacttgttgatttcgggtcagtttctccataaggagcttcctattagaattgcccgaagagcaattgagcttgagagcctcccttatggtctttccgagaagcctgctgttttgaaggtgagggactggtatttggattcctttcgtgacttaagatcttttcccgagatcaaggataccaatgatgagagggaatttacacaaatgattaaggctatcaaggtgagacacaacaatgtggtccctatgatggctttgggggttcaacagttgaagaaaggcatggatccaaagatcatttatgaggatcttgatgagattcatcagtttctagatagattttacatgtcaagaattggaatccgtatgcttattgggcagcatgtggagctgcataaccct

SEQ ID NO: 209286 - DNA, 425 bp, Gossypium hirsutum
gaaaggagccgctgagatgtacgagagtgggacgttcgtcacagtcgatcttcagttcttggtggatgctcacatctgcgtctttgaagatgtttcatcctacggtcgatatctatgcttcaatcacgccattactaaccatgaagatgctattcacctcgcccgtttgcttacaccttctgctccttcccctcctcccagttatgaagaagctaacatgatcatccaacaaagattaagcaacaagaaattgaacaaagtgatggtggattttgagagtgagctgcttttggaggattgatccattcaggctgagggggaaggtccttatgaaacaacagcagaaagaaaatcaattagtttttctttccttccttcctcatccagaagcaaaaattattacagtttgtcttataattaatggg

SEQ ID NO: 209287 - DNA, 335 bp, Gossypium hirsutum
cccactcgtccgctcgtcaccgggtgaggtttccttgtattcaaatcatcaagacaggtgccatcccagcaaaactttgcaagagggacagcaccaagcagttccacaactccaaaatcaaattcccactggtatccaagaaggtcaggccaccaactaggaagctcaagacgacatacaaggcaaccaaacccaacttgtttatgtagttgtctttcatggctggtggtgataggtctaatgccttatagtttgattacttcccttgttagattgagaggggttatcaaattttgaacactctatattaacttttatagttcttttatgtttcg

SEQ ID NO: 209288 - DNA, 424 bp, Gossypium hirsutum
ccggaactgaatggccggatcgacgcgtgcgagaaaatggaagaggaaagatcactctcacttcttcagtggcatgggttaagcgagtagctgggcgacgtcggcttcctaaacaagacatagctgctagtagtgctaccttattaacatatggctcttatggccttggggttcatggttcaaagttagacatcgatcctttttgtatcggtccttactttgccactatggtagatgatttctttattgttctatataacatgcttaagagcagacctgaggtatctgagattcattatgtgaaggacgcaaaagtcctactaatgcgttttgagttcgatggaatctcgataaatcttccctttgtgcagcttaaagttttagttgttctaaagggtgctcgcaaacacaaggatttgtcgca

SEQ ID NO: 209289 - DNA, 387 bp, Gossypium hirsutum
gcgccacgcgtgcgcaaagaatgaagaactacactatttatgcagcttcaatcaccatccgtatggagggtggattcatgtttattgccttgatatggaagttccactttgcacccttcatggttttaattatcgccattctgaacgatggtacaatcatgacaatttcaaaggacagagtgaaaccatctccacagccagacagctggaaactcaaggagattttctttaccggcattgtgcttggaggttacttaccactaatgactgtgatattcttctgggcaatgaaagacaccaatttcttctaaaacacattcaatgttatatcactgaggcataataatattgatggtgagaaaaaaatgatggcagctttataccttc

SEQ ID NO: 209290 - DNA, 346 bp, Gossypium hirsutum
  unsure (1)..(346): unsure at all n locations
acgcgtccgcggacgcgtgggggagggccttggaggaggttatatgctctgccttcatcttgattaggtgggtgatatgatgaggtctcgctgcancacattctatacatgacagcggattggacatgtgaagaaagagaaatgtttagaaacaaggttccaaagactggtcttaatacgccatttcgagatgggttattgtggcacattgcgtaagatgttctaaagttggccaatgatggtttggataggaagggctttaagtaatcccggttcttgtatgaagtggcagatgtgtgttttacagggtgtaacaccaagctgataagcttttttgaattgtatt

SEQ ID NO: 209291 - DNA, 437 bp, Gossypium hirsutum
caggaatactggtggtgtactgagagagcccttgattggggtcctactggtggacctgatctgatcgtcgatgatggtggtgatgctactttgttgatccacgaaggtgttaaagctgaggaagtttatgagaaaactgggcaactcccagatccggcttcgactgataacgctgagtttcagattgttctaaccattatcagagatgggttgaaagcagatcccaagaagtatagaaggatgaaggagagattggtaggtgtttctgaagaaactacaactggagtaaagaggctttatcagatgcaggccaatggtaccttgttgttccctgccattaatgtcaacgactctgttactaagagcaagttcgataacttgtatggatgccgtcactcactttccgatggtttgatgagagctactgatgtgatgat

SEQ ID NO: 209292 - DNA, 408 bp, Gossypium hirsutum
tttgatttttcattgctttacactatttgatcaatcagaagctcaaccctaaaagtttcattagaaggaacagtgttaacctttctcatcaatatcctcgaacatcaagctttacttgtcttaactcttgcttgacagaacactggggtgatttgcccttaaaagtcgatgactctgaggatatgatcatctacaattcccttcatgaagctcttaacttcggttggtcaccgacgacgacgggttcaacggcggcaactacaattaaacctgagccgaaagatgaatcagcagagatcatggaaaacgcgaagccaatggagttgactcaaaaagtggtgaaagggagacattaccgtggagttaggcaaaggccgtgggggaaatttgcggcggagattatggact

SEQ ID NO: 209293 - DNA, 458 bp, Gossypium hirsutum
agcaatcccaccagctaaaatgtttaaggcttgtatccttgatggtgacactctcattccccagatgcttcctcaggcttttaagagtgttgagtacattgaaggcaatggtgaggccggtagcatcaagaaggtcacttttggagaaggaagccaattcaaatacgtgaagcagaaggttgaagcagtagacaaagacaaatttgtgtatatttacagtgtgatcgaaggtgatgcattgatggataagcttgagaagatctcttacgagacgaagttagagacctctccggatgggggatcagtatgcaagactactagtaagtattacaccattgttgagtttgagctcaaggaagagggaatcaaggcaggcaaagaaaaagcattgggaatgttcaaagccattgaagcgtacctgctggcaaattcttacacctattgtaatgatccccata

SEQ ID NO: 209294 - DNA, 413 bp, Gossypium hirsutum
gagatagtgcaaaaagctcttgcttcaaggtttgatttcaacagatggctcatccagacgatggtttggttcatagccaaacctgacataggtttaatattgtcttaaacgaaattactaataaatatattgattgaaggtaactggaaaattttctacggaacgagataaaatggcttttttagattaaccatagttataagaaattacctgcactaaattatattcataaacatgctggcgtgttcttaagacagggtcaatacaattgatgagatttgaccgcataaatattccctactccctactgatccttaccaaagagccatcggtaggttttggggagattttgttgacaagaagatatatcggttacagagtgggaaagtattgaccacatatggggaataaca

SEQ ID NO: 209295 - DNA, 467 bp, Gossypium hirsutum
cggttatgatgccctggttattcctggcggccggttctcggagcacttcagcgttgacgagagggtcgtgagcattgttaaagcgtttgctgaatcatgaaagcctattgtcaccacttgccataaccaactcattttggcggcggcagggcttttgaaaggcaagaaatgcactgcctttgcaagcatgaaaccagtgattgagctggcgggtggtatttggtgggagcaacctggaatcacatcaccttttgacattactgcttgtctcaaagatggaaacatcttgagttccataggatggccagcgcatgctgaaattctcaaaactttgtttgaatccatgggagctcgaattcatacaaccaaggctaactcagtgcttttcctttgtggggactatgtagaagattatgaatttaatgtcccatttcgtgcgcttcaaacattatggtgcaaaggtgatt

SEQ ID NO: 209296 - DNA, 405 bp, Gossypium hirsutum
gcaagcatccgttccgtgtgtgaaccaagatcagggacctcgccaaccgcaagatgtttggctcagggctcacagatagatggcatgcctatacgaaaacctacctagctaaggcgcctgaacctatatccccacaggatggacatgatcgttacatatcttaaacacaaataccataacatgccaatggtgcttacctcaaacggataccgagaggtgatcaaagcacactccaccattgatcaactcttacactatgaagaacgaatagacttcatggatagacacttagatgcactgtccacaactgtccaaagaagagcacatgtaaaggggtactttgcctggtcgatgctagacaactttgaacaggactcttgttatacacttaagctcggggtttag

SEQ ID NO: 209297 - DNA, 288 bp, Gossypium hirsutum
cgtgaatttgcctaatttcatttcaatgagtcgattgctttctggagctttgcttggatggatgattgtaaatgaaatgtttggtcttgcatttgtgggattggctatctctggtgcaactgattgggtctctaattggatgtgtggctttgtcaagggcacatccccatcttttgcacactgctctttctggctctttgtgtttttagatatttgcccttttagtgctgctttgtaccaaaaagcccccttccctggtttgcagtggaaaaaatggctagatttctt

SEQ ID NO: 209298 - DNA, 429 bp, Gossypium hirsutum
gaagaattcaagcaaatcctctaaaaatggcgctaagagctcagatggtgaaaaagggaatggtttggcaccatatttgggtaaattcaagtctatgaggacggtttccaaagagggttatgcttcgtttatggactataagatacttgaaaaagctacaaacaagttccatcatggtaacattctgggtgagggtggatttggatgtgtttacaaggctcaattcaatgatagttcttatgctgctgttaagaagttggactgtgcaagccaagatgctgaaaaagaatatgagaatgaggtgggtttgctatgtagatttaagcattccaatataatttcactgttgggttatagcagtgataacgatacaaggtttattgtttatgagttgatggaaaatgggtctttggaaactcaattacatgg

SEQ ID NO: 209299 - DNA, 397 bp, Gossypium hirsutum
gttcgaagagatttatccttttgtattcatttttgaagaggaacctttcgaagaaagtgatggtctttgtctcttcatgcaactcagtcaagtttcatgctgagcttcttagatatattcatgtggattgccttgatatccatggaaagcagaagcagcaaaagcgaaccactaccttcttcgacttttgtaaagcagaaaagggcattttgctctgcactgatgttgcggcccgtggacttgatattcctgctgtggattggattgtgcagtatgatcctcctgatgaacccaaggaatatattcatagggttggtcgaactgcccgtggagaaggtgcaaaaggaaatgcgcttcttttcctgatcccagaggaactgcagtttctacgctattt

SEQ ID NO: 209300 - DNA, 423 bp, Gossypium hirsutum
cccacgcgtccgcccacgcgtccgcccacgcgtccgcgcagacagcttcaattctacagaaaagtatatccacagaatgccaaggaatgacggtgatcacaatcgcacaccgtatttcaacagttttgaatatggacaatgtatttgttctcaatcaaggaactctggtggaggaaggtaacccaaatgcgcttctacaagatgaatcctccatattttcaagctttgctaaagcgtctacaatgtaatagatggttgatctccaaactcactaaaactaccactccaaatgtaagttttaagcgtttggaaacttgaaagcagctagcacaacttgttttggtagattagttcttcaatcttctgtaacatcaagttggaaaggagagtggaagagagaactacaatcgaatgtttttgttg

SEQ ID NO: 209301 - DNA, 316 bp, Gossypium hirsutum
ctttggccttcagccgatgaggccaggaaacagatattatccatctgggataaggccgatatgatgaaggtcagcgatgttgagctagagttcctcaccggtagcaacaaaatcgacgatgaaactgctatgaaactttggcgccccaacttgacactactcttgatcaccctcggtgaaaagggtagcatgtattataccaagtacttccatgggtcagtggatgcattccatgtgaatacagtggatacaactggcgccggggactcttttgttggtgctttactatgcaagatcgtggaagacccaaccatac

SEQ ID NO: 209302 - DNA, 369 bp, Gossypium hirsutum
  unsure (1)..(369): unsure at all n locations
ggcgaccangcgtccgccacgcgtccggtgccggttaaggcaactagctgagtactgcgaaaatgaaggctatactgggcggcgagacaatggacattccttgtggagttagcataaaagtcaaggctaacgcgatcgacgatgtacgtacaaggtggaagcttacccaccacttctagcacctcaaccttgtttcacatctaatgaaagaccaacagaccggtacgcataagctcacgatcgagacttggcttgtcttcaagatgaccaccgccgtcatccttacagcttttaggcacgatgagaacatcaatcattcggcgtccttaaagataccttttcaagatgagggtcacttaccctcacttt

SEQ ID NO: 209303 - DNA, 458 bp, Gossypium hirsutum
gctgaagctgttctgtgataaagattatccagagaagccaccaagcgtccgttttcattcaagaatgaacatgacttgtgttaaccacgaaactggagtggtggaaccaaagaagtttggacttcttgcaaattggcagagggagtataccatggaggatttactgacacagctgaaaaaggagatggcagcaccacataaccgaaagctggttcaacctcccgagggtacctacttctagctctcaagattatcggacatcctggatctaagtgcatttctggtatgcaatatatagtttgtaatgcttgttgatctttaaagaaaatagtggggaatgccccaaaaagcttctacaattactttcccctggtttcatcttaactatacttttcttatcaaactctggttaaggaatgctgtttaattaatgggactttatacgcatgtcccttatt

SEQ ID NO: 209304 - DNA, 433 bp, Gossypium hirsutum
cccacgcgtccgggagtttccttcatggttgataactgctctaccacagcacgattgggatccaggaaatgggccccacggtttgattacatcctaacccaacaggctttggtggctgtcgacaagggcactcccatcaaccaagatcttctcagcaacttcttgtcagacccagtgcatggtgccatcgaagtctgtgctcaattgaggccgacggttgacatttcagtgacccccgatgctgattttgtgcgaccggagttgcgtcaatctggcaattgagtcggtagaatctcagaactggaatgagcaactatatttatagtgtgtttgagccagaacttgctcgtcatgtatgtagtgatgtagtttttgcaatgtcttggggctggctgtctttttatgtttcatttttaaatgttttatataattg

SEQ ID NO: 209305 - DNA, 386 bp, Gossypium hirsutum
cccacgcgtccgaaaagattggaccaaacaagcctttatcagaagattagagaatcgaaaaacgacacattgagctgacgctggagagggcgtgacacccagagaccctaatctgcttgcttgccttaaaaaaaacgaatttttaattaaaaaaggagaaaagtttgtggatttcgaggtgtcgtgcagataaaggatgagtacactggatgcaactagagcagaacttgctcttgtagttttgtatttgaataaggctgaagcaagggataagatatgcagggctatacaatatggctcgaaattcctaagtgatgggcagcctggcacagcacaaaatgttgacaaatcaaccagcttggcacggaaaagttttccgtcttttt

SEQ ID NO: 209306 - DNA, 411 bp, Gossypium hirsutum
ggaagaacaaccttgttcgacttccgatattaaacgcccggagctaactttcaagctcggcaaggggaaaacttgctcctcttgtcgcacatcagaaactcttgctcataataccaaggcgccaacgctgtcaaacttgtgtaccacttgccctccgaaattagctttacaattcaaaaaccttgtggaggattgggttatgcctacactgcaaagggagataaccagttctggcgatgactggctgcatcagaagaagcaaaacctcaacaccgacgttaaaacccacaaagatggaaatcttaactctaaccaaatgagctcggcaacttggccacgtgcttgcttcttgcccgaggccgatatatacgcagtaccattcacggaaccgctctgaactatatattgcat

SEQ ID NO: 209307 - DNA, 382 bp, Gossypium hirsutum
cagaaaacggttacttccttgcgactgctgctcatgatggtgttaagttgtgggatctacgcaggtggaagaactttcgatcttttgaattatatgatcaagacacaccaaccaactcagtggatttcgaccatagtgggagttaccttgcaattgctggctcagatataagagttttccaagttggcagcgtaaaagctgaatggaattgcatcaaaactttacctgatctgtccggcacaggtaaatcaacttgtgtcaaatttggtccagatgcaaagtacttggcagtgggatcaatggatcgcaaccttcgcatatttggccttcccgaaggtgatgatgctttaacagaatcattaaaaggaaccccttctgttct

SEQ ID NO: 209308 - DNA, 356 bp, Gossypium hirsutum
aaaagaatggaccatacaagcctttatcagaagattatagaatcgaaaaacgacggcattgaggggacgctggagagggcgttacacccatataccctaatctgcttgcttgccttaaaaaaaacgaatttttaattaaaaaatgagaaaagtttgtggattttgaggtgtcgtgcaaataaaggatgagtgcactggatgcaactagagcaaaacttgctcttggagttttgtattttaataaggcttgagcatgggataagatatgcagggctatacaatatgggtcgaaatttctaaatgatgggcagcctggcacatcacagaatgttgacaaataaaccagcttggcacgg

SEQ ID NO: 209309 - DNA, 457 bp, Gossypium hirsutum
cggacgcgtgggggagggccttggaggaggttatgtgctctgcctgcattttgggtaggtgggttatatgatgaggtctcgctccagagtattctagacatgacagcggattggacatgtgaagaaagagaaatgttgagaaacaaggttccaaagactggtcttaagacgccatttcgagatgggttattgtggcacattgcggaagatgttctaaagttggccaaggatggtttggaaagaaggggcttcaaggaatccgggttcttgaatgaggtggcagaggtggttcgtacaggtgtaacaccagctgagaagcttttggaattgtatcatgggaagtggggacaatctgttgaccctgttttcgaagaactcctctactgagggattttatatattttcagggctctttttgagtagggaatcaaattcttaaaatcttagtgatttcatg

SEQ ID NO: 209310 - DNA, 417 bp, Gossypium hirsutum
ctcacgcgtacgatagttacattgatggttgataactgctctaccacagcacgattgggatggaggaaatgggccccacggcttgatttcatgctaacccaacaggctttgaaggctgtcgacaaggtcactcccatcaaccaatatcttcgaagcaacttcttgtcaaacccaatgcatggtgccatagaattctgtgctcaattgaagccgacggtcgacatttaagagactcacgatgctgattttgtgcgaccagcgttacgtctatatgtcaatataattcatagaatctcataactggaatgagcaactatatttatagtgctgtagagccagaactggctcgtcatgtatgtagtgaagcactttttgcaatgtcttgaggctggctgtcttttcaagaatcatttttaa

SEQ ID NO: 209311 - DNA, 369 bp, Gossypium hirsutum
  unsure (1)..(369): unsure at all n locations
cgcgtncgagaaggttcacatcaaccttgttgtcattggccatgtcgactctggcaagtcgaccactacgggtcatttgatctacaagctaggtggtattgacaagcgtgtgattgagaggttcgagaaggaggctgctgaaatgaacaaaaggtcattcaagtatgcttgggtgcttgacaagcttaaggctgagcgtgaacgtggtatcaccattgatattgccctgtggaagtttgagaccaccaaatactattgcaccgttattgatgcacctggacaccgtgactttatcaagaacatgattaccggtacctcacaggctgactgtgctgttctcattattgactcaaccactggtggttttga

SEQ ID NO: 209312 - DNA, 310 bp, Gossypium hirsutum
gaaagaggctgagaaacacatgcctgaggaatgcattgagccagaatcagagtttcaccctaatgtagtgaacagagattcatacatggtgagcatgatgcttcaggtagcaacatttgcagtgaactacatgggtcatcctttcaaccagagcatgcctgaaaacaaaccattcttgtatgctcttggagctgatgctaggttctctgtgggtataactattgatatatatagggatttgaatgattggttgagcttggttactttgcctgtgggattgagggatcagctcttgatatgggctctacta

SEQ ID NO: 209313 - DNA, 324 bp, Gossypium hirsutum
actgagggaaaaaaaaaaaaccatcatggcttaaacactgttgcatccgctgctcttcttcgaccttgaagtggttgttctttactttggatagctctacctacgtgccttgcccaccaccaccaaatagccacaagcctacccacaaaagcccaccctcggcacctgaacagccaggcacttgccccagagatgcactgaaactaggcgtttgtgctgattagttgggctcattgcgcgttagttgttgaccgtcgaggatcaaatgctgctctttcatttcgggttttggatgatctccatgctgcttgttgcctttgcact

SEQ ID NO: 209314 - DNA, 472 bp, Gossypium hirsutum
  unsure (1)..(472): unsure at all n locations
cgaagatttagtctcaactgacttcatcggagacaacaggtcaagcatttttgatgccaaggctggaattgctttgaatgacaactttgttaagcttgtgacttggtatgacaacgaatggggttacagttcccgtgttatcgacttgatccgacacatgtctaaggcttaagtgagtgagtgattgtgcttggtgtatccaagctttagcaattttaatttagaagagatgttatgagagaataaacgaattgtacggagcatatttttgtgtgaagaagggttgtttcagttttattacccaagtacttgaatgtttcaagtttcattgcagttgtttttctactttaatgcatacgtggtgattatggtttctctacttaaaaaaaaanaaattttnnnnnaaaaaaaaaaaaaaaaaataataataaatattttaataatttttttttttttttattttttttttaat

SEQ ID NO: 209315 - DNA, 442 bp, Gossypium hirsutum
acgtgttatcacaatatgtacaaagaataccgttacacaacccttaatggtgctgtagaacagatgtacaccgagatggcgtctcgtcatagggtgaggtttccttgtattcaaatcatcaagacagctaccatcccagcaaaactttgcaagagggacagcaccaagcagttccacaactccaaaatcaaattcccactggtattcaagaaggtcaggccaccaactaggaagctcaagacgacatacaaggcaaccaaacccaacttgtttatgtagttatttttcatggctggtggtggtaggtctaatgcctaatagtttgattacttcacttgttagattgagaggggttatcaaattttgaacactctatgtttacttttatagctcttttatgtttcgaagattgtgttttgatgactttactttttaatttaat

SEQ ID NO: 209316 - DNA, 391 bp, Gossypium hirsutum
  unsure (1)..(391): unsure at all n locations
cacgcgtncgaacgaacgtaacaaagttgtactacttttacagattgcaaggttcataatgaagaccgggtcgcggctgtggtctggaaagaagcctttcataacaatacctcacatgggaccatcagaacacctgttgccatgccgttgtgaagttgaaagggctaacgattggctaaagcctaatgtaatattggacgcattctatgctagggctactacgatgtcaggcacctgtgcaaaacaccttaacaattttgcaaatcaagaacagcgtcatgctcaactctcaactgatttgtcctaagctgtagtcggtcacgttcagttaattattgcttacaagttacatttgaaattgcaacaagacattcccggaaagggagtaaaa

SEQ ID NO: 209317 - DNA, 461 bp, Gossypium hirsutum
  unsure (1)..(461): unsure at all n locations
aacgtgcctaaggctagctgtgacggcatccgttccctgaacaacatggctcgaaccacccctggccgccaaaccgtgtgtgggcgcttgcaagctgccgctaaggctgtcaaaattaaaggcaacttggctgagacccttccagccaaatgtagtgtcaacatcccttacaagatcagcactttcactaactgcaaaaatgtgaagtgagatggatgaagagagggttttgcagcagcttgcaggagataaaatatatgattaaaaagacgaagaagaagaatgaatagggattttgggatggaatattcaaaatccaaacatagtctccactttagtgtagtgaggctatgtttattttggtgtatgatttggaccctgcatgttggctctaattttatatcctctatgtatnggctcatttaacgttttaatgaattaaaagttatgctttggcaatc

SEQ ID NO: 209318 - DNA, 427 bp, Gossypium hirsutum
tcgaacgatgccccggctcttaataaggctgcaatctgttttgctgttccggatgggactgacacggcgaggagtgcttccgatattgtccttactgagccaggtcttaacgtcattatcagcgccgacctcaccagcagatgcatcttccagaggatgaagaactacaccatctatgcagtttccatcacaatccgtatagggctcggatttatgctcattgcgttgatctggcaatacgatttctctcccttcatggttcttatcattgccattctcaatgacggttctatcatgaccatctttaaggacagagttaagccatctccgttgcccgacagttggaaactgaaggaaaatcttgttacgggcatcgtgcttgaaagctaccttgctctgataactggcattttcttctgggctatgc

SEQ ID NO: 209319 - DNA, 378 bp, Gossypium hirsutum
  unsure (1)..(378): unsure at all n locations
ttcaacaagcatgtttagagtgcctggaaggatttgaatcaagagtttctgaagccaacataaaggccaacataagttttaaatcgtatcctaaaccttgcaagggtgatggatgtactttacagggaaggagatggatatacatatgttggaaaagcggctaagggtggaatcacttcattgctcattgaaccaattgcactttaaaattatgttaatttttcctctccaagcttgtttcctaagaaatagttattaagttctaattaataattgtttataatattcatatattataaaagaaagttcaaatctattgtctttgtacttatnggcttatattaattcaataaagttctttccaaacttttcattgtg

SEQ ID NO: 209320 - DNA, 389 bp, Gossypium hirsutum
  unsure (1)..(389): unsure at all n locations
tatgaaggtgacaatgttgtgctacttttacaggttgcaaggtttctaatgaagaccgtttggcagctggggtctggaaagaagcctgtcgggacaatagcttacatgggacgatcagaacacctcttgcaatgccgttgtgaagttgaaagggctgaggattggctaaagcctaatgtaatattggaggcatttgaagcgagggctgctaggatgtcagtcacctgtgcaaaaaaccttaacaattttccaaatcaagaagagggttttgctcaactcgcaactgatttggccgaggctgcagtcgctcatgttcaggtaattatcgctcncaagntcattgagaaattgcaacaagacatacccggaagggagtaaaagacagtgga

SEQ ID NO: 209321 - DNA, 399 bp, Gossypium hirsutum
cccacgcgtccgggtttatcctccatgcatttaaaactgcgtttgtggtcgagcatgattttggaatggcgacttacctcgcagatagagttattgtctacgaggggaagccttcagtggattgtattgcaaacgctcctcagtccttgttaactggcatgaatctgttcctatctcatctggacatcacttttaggcgggacccaaccaattaccgaccgagaatcaacaaactggactcaaccaaggatagagagcaaaagtctgctgggtcatattattacctagatgattgatcgacacatctactggcagttgtcaattgtgatgagatgaacaacaagacgtgaatgttgggtattcccgggatctctgagtggagcagtgatggtatgttga

SEQ ID NO: 209322 - DNA, 395 bp, Gossypium hirsutum
cccacgcgtccgggtttatcctccatgcatagaaaactgcgtttgtggtcgagcatgagttgggaatggcgacttacctcgcagatagagttattgtctacgaggggaagccttcagtggattgtattgcaaacgctcctcagtccttgttaactggcatgaatctgttcctatctcatctggacatcacttttaggcgggacccaaccaattaccgaccgagaatcaacaaactggactcaaccaaggatagagagcaaaagtctgctgggtcatattattacctagatgattgatcgacacatctactggcagttgtcaattgtgatgagatgaacaacaagacgtgaatgttgggtattcccgggatctctgagtggagcagtgattgtatg

SEQ ID NO: 209323 - DNA, 422 bp, Gossypium hirsutum
ggatatggtgagattaccgagcccattgtgaaggagaaaatcatgggttctgctccgaaacgtggaagacatctgaaaagtattggtttgcagaagcagaagatgccaataagcgcagagcttgataaatctgcacatgataagcaactgatcactgaaattgttgatgttggaacccctgctgattgggtgaagatcaatgtccgtgaaactcatgattgctttgaggtatatgctctggtccctgggcttctgcgtgaggaggtacgagttcaatcagatcccgctggacgtgtggttatcactggccaaccagagcaagttgacaatccttggggtatcacgccctttaagaaggtagtgaacttaccatcgagaattgatccgcttctgacaactgctgttgtgagcttgcatggtcg

SEQ ID NO: 209324 - DNA, 304 bp, Gossypium hirsutum
caattgcttctctgcatttgccttggcagatccgggcgtgagatcgaaaccacactattttccagatctgggactggtaatatttgtgtggaaaagtctgttttgcccaaaggtgattcgcttcaaattcaagaagtttggaacgattatctggaagaagagttcgttttgatcctgaaaatagttgatgcttacaactatgatgctatcgatactgagatcccatgagttgttctacgccccgttggaactttcaagaacgtaagtgcttatagctaccaaactttgaaggataatgaggata

SEQ ID NO: 209325 - DNA, 362 bp, Gossypium hirsutum
ggaaaaatggcatccatcaccattacaacatcattccttagcaccactaacctggcaaagggttgtgcaagaattacccagcggagactagtggttgccaatgctgctaagggagctcaagtggagagtgtccagatgagcggtgagaggaaaacagagggcaacaatggcaggagggagatgatgtttgcagctgcagctgctgctatttgctcggttgcgggggttgcaacggcggagcctaaacgtggtagcgcagaggccaagaaggcgtatgctcctgtttgtgttaactatgccaactgctacgatctggcgcaactgaggcagggccactgcacattgcttgagtgccatgagac

SEQ ID NO: 209326 - DNA, 263 bp, Gossypium hirsutum
ggaaaaattacattcatcaccattacaacatcattccttatcaccactaacctgagaaatgtttggcgaataattacccagcggagactactgcttgccaaagctgctaagggagctcaagtggatagtgtccagatgagcggttagaggaaaacagagggcaacaattgcttgatttagattatgtttagcagctgcagctgctgctatttgctcggttgcagtgatcagcatcttcagatgcctaaacgtggtatctcata

SEQ ID NO: 209327 - DNA, 409 bp, Gossypium hirsutum
cccacgcgtccgaaccaaaccaaactagtgagccgctgcttctcttcttctgtatcccaaggtggttgcttttaggtttcatcaataccaagtggtgggcagaggccttcctacagaagcagatgagcatcccaagatttaccgtatgaagctttgggccactaacgaagtccgtgccaaatccaagttttggtattttttgaggaagctgaagaaggtgaagaaaagcaatggacaagttttggctatcaatgacatctttgagaaaagccctaccaagatcaagaactatggcatttggctgcgatatcaaagtcgaactggttatcacaatatgtacaaggaataccgagacacaaccctcaatggtgctgtagaacagatgtacaccgagatggcgtctcgtcat

SEQ ID NO: 209328 - DNA, 476 bp, Gossypium hirsutum
gcagcttgtgtagggggaaaaaattatgaagagggtttcctttgttgccttgtgtgtggtggcactcgcggtggtgctgttttcgggtgaaagtcgcacggcggaggcagtgacatgtaatcccgtggagcttgccccctgctcgccggcgcttacgtcgtcctcgcctccatcaagcgcttgttgcagcaagctgaaggcgcagcagccatgcctctgtggatacattaagaacccatctcttaaacagtatgtcaacagtcctaacgctaaaaaggttgcttcgacttgtggagtcccatatcctaagtgttaaatgttgcttaatggtgtatctactatctactggcagcaaataagtgattctttttgctgtcaagtactgttctgaataaaagaataatgataaaatattagataaaattaaggtaatattttacttatgttggaagaaatgataaattagtatggcttac

SEQ ID NO: 209329 - DNA, 219 bp, Gossypium hirsutum
gttactagtgaaatgacgtgtcccatctagacattcacactcagatcgacggagtgccttcgggaatcacgtatggagagaacacctgggctgatgcgaaggcttacaatgaacccctagctagattgacttggctattctagacgaacgatcagacctttactagttacaagaacgcgagagacttcaagtagacacaagaaatcctgaactctggtt

SEQ ID NO: 209330 - DNA, 346 bp, Gossypium hirsutum
atcactctctggcttccgctttgtttttcctacttcctttctttcttgttgattgggctcatagagctcagtgagttggtgcgaagatgattcgtggggcagcaccgggacccaaggggaagaagaaaggggccttctttaccatcgactgttctaagccggttgaagataacatcatggacatagcctctctagaaaagttcctccaggaaaggatcaaggtcggtggaaaagcgggtgctctcggagattccgtcactgtcacccacgacaagagcaaaatcactgtcttcctccgactccaacttctctaagcggtatcttaagttcttgacttagaagtact

SEQ ID NO: 209331 - DNA, 442 bp, Gossypium hirsutum
cccacgcgtccggagagtctgcatagtggttttagcttgtgtggcgggatcatcggcggcagggagtgctttcaatgtgagagctacttatcatctgtacaatcctcagaacataaactgaaacttgactgctgcaagtgctctatgcatcacatgggatgccaataagtccttagcatggcgtcaaacatatggatggactgctttttgaggtcctgctggtcctcaacgacaagctgcttgttgccgatgcttaatgttgaccaacacccacactggaactcaagcaatggtgagaatcgacgatcaatgcagcaatggaaggctcgatacggatacttacgtctttaaccaacttgacacaaatgggcatgggaatgctgaaagtcaccttgatgcgaactatgaatttgtaaactgtggtgacttaacccacaattta

SEQ ID NO: 209332 - DNA, 442 bp, Gossypium hirsutum
cgaaaacgatcctgaattcaaaggataccacgatgggaattcagaacctattggctttgggcacattggcatcactgtggatgacatgtacaaggcatgcgagagatttgaaagtcttggagtagaatttgtcaaaaaaccaagcgatggttttgcattcatcaaggatcctgatggttattggatcgaaatctttgatttgaaaggaattagacaaatagttaacagtttagcttaagttaatgcttcaccaagttcaggaaattgatctgacaaactcaagtgaaatcttaattgaagcacatttcattctagttatgtttatgttttctttatgtttgatgtgtataacaagtaaggtgaaaataaagagttttgtaagagaaaattcaacctttgaatttactaaattctatttatattacatataaatttgtatgcc

SEQ ID NO: 209333 - DNA, 378 bp, Gossypium hirsutum
cccacgcgtccgctcaagatgatccttcgagcacctttacttgccctgctggttccaattacagggtcgtgttttgcccccgaggctcacctcatatagagatggtcggaagtaagagccaagaaaaataaagggatcatctcttggtctagttaatctgcgccttggaactaaaaaataaaaaagtcatttggtcttccaaatgatatcaaacacgtggttctacttggtttattttacatatgttttgtttaataatattgtgcagtttcaacagcacaagacgtcacaagttgctatcatctttcatcaaaatttccaactcataaatacccatataaaaaagttatatgaacttatattatttcttttatggga

SEQ ID NO: 209334 - DNA, 193 bp, Gossypium hirsutum
cgcacacgtccatgtattcgtacgttaacccgatgggaatcccgtacctattggcttacggcacagcggcatccggggggatgacatgatcagagcatgccacacatttcgaaatcctggagtacaattcttgaaaaaaccagacgattgttttgcatacatcaaagatcctgatagttattggatcgaaatc

SEQ ID NO: 209335 - DNA, 476 bp, Gossypium hirsutum
aggcacctctactttcagtgaatacactgttgtccatgtcggccaggttgccaagatcaatccggaggctccgcttgataaagtttgtgttctaagctgcggaatgtccacagggtttggtgccactgtgaatgtagctaaacccaaaaagggtcaatccgttgcaatatttggactaggtgctgtcggtcttgctgctgctgaaggagcaagagtttctggggcttccaggatcattggtgtcgatttgaaccctagcagattcgaactagccaagaacttcggtgttacggagtttgtgaatccgaaagatcacaacaaacctgttcaagaggtcattgctgagatgacgggtggaggagtcgaccgcagtgttgaatgtaccgggagcatccaggccatgatttctgcatttgaatgtgtccacgatggttggggagttgcagtgcttgtgggggttcccaacaaagacgatg

SEQ ID NO: 209336 - DNA, 341 bp, Gossypium hirsutum
aagcacctttactttcaaggaatacactgctgttcatgtcgagcaggttgccaagagcaatccggaggctccgcttgataaagtttaatttctaaactacgaaacgctcacaaaatttggtgccactttcaatgtaactatacccaacaccggtcaatacgtggcaatattaaggactacgtgctgacactcttgttgctgctgattgagcaagagtctctatttcttacaaaatcattggcgtctatttgaaccctaaactattctaactatccacgaacttttatgaaactgagttaagttaattctaatgatcacgaggatccttgctaagaatttaa

SEQ ID NO: 209337 - DNA, 361 bp, Gossypium hirsutum
ctcaccggccaaatcccgcctgaagttggcgaccttccgtaccttgaaaccctgggtttcagacgacctccctaacctcaatggaaccatacaacccgtcattgccaagctcaagaacctgaagacgcttcgcttgagctggaccaatctttgcggtccagtccttaattttcttagccaacttaagaacttgacttacttggacctttcatttaatacctgttcggaactaatccaaggttccttttaacaactccaaattttcaagctttgcatttggattgaaaccagtttactggttccattccaaaatcctttgggatggttcctaaccaaaacctggttttggtcattttgtctt

SEQ ID NO: 209338 - DNA, 328 bp, Gossypium hirsutum
  unsure (1)..(328): unsure at all n locations
agaacaccattttgttgcataacacatgcgaggtctccctgttggctgctcccatcatcctagaggtggttcttcgggctgagcttagcaccacaatccagcttaaagctgaaggagaggacatgatataatctatccaccctgtggctactatactgaggcacctaacccaggcgcatcttgttccaccaggtacaacccgtgtgaatgcactgtcaaagcaacgtgcaatgcttgagaacatactgaaggcctgtattggcttggccctgaaaacatcatgattttggagttcttgtgaaaatcnttgaaagaaaaaaatgaacaa

SEQ ID NO: 209339 - DNA, 389 bp, Gossypium hirsutum
cttcactttccttcttctcttcttcccttttcctctcttctccttcccctaaactctcaacttcgctttccttcgctttcaaaccttcttcgaacccgtctctttccatttcttcccaactttccaatctccccattttgtccttcaccggcgaaaaaatcggcgaaacttatctcgacctcaaatcagcccctcccgaaaccgctagagccgtcgttcaccgagcaatcatcactgacttacaaaacaagcgtcgtggcacagcttctacactcactcgtggtaaagttcgtggtggagggaaaaagccttaccctcaaaagaaaaccgggcgtgctcgccgtgggtctgcgcgcaccccgctccgtccgggtggtggtgttatcttc

SEQ ID NO: 209340 - DNA, 414 bp, Gossypium hirsutum
  unsure (1)..(414): unsure at all n locations
tacagcttccattgtttttcagtagtgaagagctaaaaaagaagggaaatcaatggaggggaaagaagaagatgttagattgggagccaacaagttcccagagaggcaacctattgggacagcagctcagtcccaagatgataaggattacactgagccaccaccagcacccttgtttgagcctagtgagttgacctcatggtctttttaccgagccggaatcgctgagttcgttgctactttccttttcttgtatatctcggtattgactgtgatgggagttgttaaggacaaaaccaagtgtacaactgttgggattcaagggattgcttgggcttttggtggtatgatctntgcacttgtttactgcactgctgtatctcagtggtcatatcatccagcgggacatttggc

SEQ ID NO: 209341 - DNA, 402 bp, Gossypium hirsutum
tacaactttcattgtttttaagtagtgatgagctaataacgaagggtgatcaatggaggggaaagaagaagatgttagattgggagccaacatgttcccagagaggcaacctattgggacagcagatcagtcccaatatgatatggattacactgagccaccaccagcacccttgtttgaacctagtgagttgacctcatgatctttttaccgagccggaatcgctgaatacgttgctactttcctttacttgtatatctcggtattgactgtgatgggagttgctaaggacaaaaccaagtgtacaactagtgggattcaaggcattgcttgtgcgtttggtgggatgatcattgcacttgtttactgcactgctggtatctcacgtggtcatatcaattc

SEQ ID NO: 209342 - DNA, 453 bp, Gossypium hirsutum
agctattggaataggataattattcttgtagcttgatgtgagagtgataagagttttgttgaatgttcaatattgtaagtgtatggcttaagtcctgataatattccatggttctatgataattgcctttgtggtattttctttgataggtaacccttatatttcattttattctgcagcaacaaaggactttcatacagatgagaactgttctaaaagtagtggacaactcaggggcaaaaaaggtgatgtgtatacaagcattgaaggggaagaaaggggcaagattgggagacaccataattgcatctgtaaaggaagccatgcctaacggaaaggtgaagaaaggaaaggtggtatatggtgtggtgtgcgtgctgccatgcagcggagtcgttgtgatgggagtgaggtcaagttcgatgacaatgcagatgttcttgttgacaagca

SEQ ID NO: 209343 - DNA, 381 bp, Gossypium hirsutum
cccacgcgtccgcccacgcgtccgcccacgcgtccggcactgtccatgatgttgttcttgttggtggttccactagaattccaaaggtccaacaacttttacaagatttcttcaatgggaaggagctttgcaagagcatcaaccctgatgaggccgttgcatgtggtgctgcagtccaagctgctatattgagtggtgaaggtaatgagaaagtgcaagatctcttgctcttggatgtcactccattgtcttccggtttggaaaccgctggtggtgttatgaccgttttgattccaaggaacaccaccattccaaccaaaaaagaacaagtcttctcaacctactccgacaaccaacctggtgtgttgatccaagtttacg

SEQ ID NO: 209344 - DNA, 400 bp, Gossypium hirsutum
aaagaaccctgaaaatccgtttcttccattagaccgaactgctaaaagaattcttgttgctggctgacatgctgacaatctcgggtaccagtgcggtggttggaccagtacctggtttggaggcagtggtagaataacaattggcaccaccatcttggatgccattagagaatctgcaggagacaaaacagaggtgatttatgatgaatacccctcaacaaacaccttagcagggcagtactcttttgccattgtagttgtaggtgaaccaccttatgccgaaaccttaggcgacaacaaagagcttgtaatcccctttaatgggagtgatataatcagttccgttgctgacaaaatccccacattggcaatcttgatatccggaagacccttggtttta

SEQ ID NO: 209345 - DNA, 406 bp, Gossypium hirsutum
aacgaaaagttgttgcatatgatggtgtatacagaacgacaaatactggtaacccacaactggtggaagtgcaaaacagccagcatcagcaacaatatgcgggttattctcagattcatcatgcatcacaatctgttgcacctacctccggcacagctgccacatatgcatatgaattcactgatccaactcatgctcaaatgtattacactcagcctatggcacccaacatgcctcctcagtaccaaaccatgactgcagtagtcttgccagatgcacccacgcaacttccgactgataacatcaagccacagatcagaacttcacagccaatatagatcagtcaagaaagaaagcgacaaaattttgaaaagaagggtttggttatatctttaaaattctgttt

SEQ ID NO: 209346 - DNA, 460 bp, Gossypium hirsutum
cccacgcgtccgattccaggttcttcctctccgccagtttggaagttggggaccagaaataactagcaaatttgatccaacaaaagatacatacgtcttatgtcaccatggcatgcggtcgttacaggttgccaagtggttacagactcagggatttaggaaaatatttaatatatcagggggaatacatgcgtatgcaaccaaggtggatccatcagttcctacttactgagatcctcacgtatccattgctcctattttcatgttttcttcacgtgtgtggtttcaggctccaaatttttgggtttgccctccgtggtattatagagtttaacatttcacaataattagcaagtccaaaacttgttattgcttaattatggtggttgtattgagtatctggaattaagtgtatttcgaaaaagttcattttaaattcaataaatatgttaattttatt

SEQ ID NO: 209347 - DNA, 388 bp, Gossypium hirsutum
cacggtgtaggaaacaacagttttcagctaggttcccaaatatgtcagctggtgctgttgatttgctagaaaaaatgcttgtatttgaccccgaccgacgaattacagttgatgaggcacttagccacccatacttggcatctcttcatgatatcaacgacgaacctgtttgtgccaggccttttattttcgattttgagcaattatcatgcagtgaagatcacatcaaagagcttatttggagggaatctgtaaaattcaatccacatccaatccattaagagaaatcaatctcccatgtagaaatatactgggaaaggcttctttccgcagaattccctatgtgacattgttcttcattgttcatgggagtccttgtcagttgagt

SEQ ID NO: 209348 - DNA, 368 bp, Gossypium hirsutum
ctgccaatcagtgtctacgctccggagacagtcgggtgcgtggtggttgacaagcaagggcgatgtgctgccgccacctccaccggtgggctcatgaacaagatgagtggaaggatcggtgactcgccactaataggatcggggacctacgcatctgagttatgcggggtgtcgtgcaccggcgaaggggaagcaatcatccggagcacactggcgagggaagtgtctgcagtgatggaatacaaagggttgaatctgcatgagtcggtggattatgtcataaagaatacgttagatgaaggcaaagcggggctgatcgcggtgttcaaagacggggaaatgggatgtgggtttaacaccaccgggat

SEQ ID NO: 209349 - DNA, 359 bp, Gossypium hirsutum
ctgacacttactgtctaccctccggagacagtttggtgcgtggtggttgacaagcaagggggatgtgcggccgccaccttcaccggtgggctcatgaacaagatgagtggaaggatcggtgactcgacactaataggatcggggacctacacatctgagttatgcggggtgtcgtgcaccgtcgtatgggaagcaatcatccggagcacactggcgagggaagcgtctgcagtgatggaatacaaagggttgaatctgcatgagtcggtggattatgtcataaagaatatgttttatgaaggcaaagcggggctgatcgccgtgtccaaggacggtgaagtggcatgtgtgtttaacac

SEQ ID NO: 209350 - DNA, 432 bp, Gossypium hirsutum
tgaaggtctaggaaagtttgatgctgcaaaattgaggaagctgcgaccaagtttcaaggataatggaggcactgttactgctggcaatgcctccagtattagtgatggtgctgctgctttaatcctagtcagtggagaaaaggcacttaagctgggattgcaagtgattgcaaagattgcaggatatgcagatgctgcgcaggcaccagagtttttcacaacagcgccagcccttgcaatacccaaagccatttcaaatgctggcttggatgcttctcaagttgattactaccaaatcaatggaaccctttgttgttgtgctttttccaaataaaaacttgttgaccttaatccagaaaaagttaatgtgaatggtggagctgtatccttggacatcctttgggttgcagtggagctcgtatcttggtcaca

SEQ ID NO: 209351 - DNA, 259 bp, Gossypium hirsutum
tacaaccttgctctcgccatgtcatggcgtcatcccgacaatgtggagcttgagaaagtgggagttgtacacatactgcgctgcgggaactaagccttggaggtacacagggaaggatgctatcatgctaagagaagacattaagatgcttgttcagaaatggtgggacatttacaacgacgagtcacttgattaccgcaccagcgcgcctgaaggagggacagagaccgtgaacctgcaaccgatcctgttggcactc

SEQ ID NO: 209352 - DNA, 418 bp, Gossypium hirsutum
cccacgcgtccgggagaagccccgactttgcgttaagaaatcagtgaatatcttaagcgggtgcttggcttacgttagctccggcaacaataacagtcggaataacatcatgtacgagattgaaggctcgtattcgcaacgaaattgcgctgctttcgatgataagaggcggttagtagccgaaatcaagcggaaagaagctgttggcggtgtcgcctttggaaccgacgtcttccgccttattgttcggtcgggatatatcacaacggactccgccatggctctacttatccttctcgatcaaatgttcggatcttctagacgataaaaactttctttttcttcaaccgaaaacatctttggtttctatgaactttctccggtcgtccccagtaaatcatttcacttttgtaagaat

SEQ ID NO: 209353 - DNA, 436 bp, Gossypium hirsutum
caagcttctatttctatttcaagaatcaagattacagtatttgcaaggatgagttcaagtagcagagcatggattgttgcagctagtattggagctgtggaggcactgaaagaccaaggtatctgcagatggaactacacagtaaggtcagttgtgcagcatgccaagaaccatgtgaggtcagcttcacaggccaagaacctctcttctcaatcctcagctgcaatttcaaagggactgaacaagtctaaacaatcggaagagtctttgaggacagtcatgtacttgagttgttggggtcccaactgagccttaaatctgtcaaaatcgcttacaatttagaagaaacatcctttatttgggtgaatcattgactcgtgagtgcaagctttggacattcagaagagggttgacgacgactgagcaatcaaacaca

SEQ ID NO: 209354 - DNA, 377 bp, Gossypium hirsutum
caaacaaaggcttccaagcttagctcaggaactgctcttaggcccaccccatttggggggggaaccaaaaatgcttaccctcttagagatggcgtctctttgggcactcccaaatatgcaatgggaaatgaactattgtatgggccagacagagtgacgtacttgggaccatcttcagctcagactccatcttacttgactggagaattccctgaagactatggttgggacactgctggtttgtcagccgaccctgatgcctttgccaggaatagggctctcgatgtcatccatggaagatgggcaatgttgggagcactatgctgcatcacaccagaagtacttgagaaatggcttaaggttgatttcaaggaacc

SEQ ID NO: 209355 - DNA, 398 bp, Gossypium hirsutum
  unsure (1)..(398): unsure at all n locations
cccacgcgtccgtaaagacccagatcgggtggaagcttttcacggccttgtaatggcttattcggagtcgggtcagaaattgaaagaactggaaaaaagaattgaaggggcaatggagaagtgcaagaatgagaagaagaataaagatttcagggatttcaagctattaattgctcaaattctggtcattgaagggagacattcataagctatgaaggtttatgaaggcttggttaaggaggaaccataggattttaggccatatttgtgtatggggattatctacacgttactgaagaagaaagctgaagctgagaaacagtttgaaaagttcaggaaacttgttactaagaatcacccttacaaggagtactcntgtgataacatgatacgcacta

SEQ ID NO: 209356 - DNA, 450 bp, Gossypium hirsutum
caatcatccacttctcctctttgaactcaaagtctgaattaacattaaaatcatgggtggtgtcagttatgattatgaaactacctccccagtccccccagctaggctcttcaaggcttttactgttgaagctccaaaggtttggcccacggctgctcctaatgcagtcaagagtattgaggttgaagctaatcctagctctggaagtatcgtaaaaatcaactttgttgaaggctttccattccaatatatgaagcaccagatcggaggacacgatgaaaataatttttcatacagttacagtttaattgaaggtgggcctttgggggataagcttgaaaagattagctatgagaacaagtttgaggcaactgcaggtggaggaagtatttgcaagagctcaatgaaattctacactgttggcgataatgttatcactgaagatgaaat

SEQ ID NO: 209357 - DNA, 325 bp, Gossypium hirsutum
tccacgcgtccgcagaattcaggtcaaatagctcctttggacaagatcatcagggggaaagagaagtatcgctctcgtgtcttattggatgagaccaactcatttggtgtacttggccgtactgtaaggtgtctgactgaatactgtggggctccgattgagaagatagacattgtctctgctgccatgggacattcatcgtcaacataaagaggattctgcactggaagtgctcgagtcattgatcatcaacggctgagcagttctggctacagactttactgcataatgacccccatatctggcgtagtgctgcaattactgc

SEQ ID NO: 209358 - DNA, 366 bp, Gossypium hirsutum
ctttgctttctttgtattagcagcttgtgtagggggaaaaaattatgaagagggtttcctttgttgccttgtgtgtggtggcactcgcggtggtgctgttttcgggtgaaagtcgcacggcggaggcagtgacatgtaatcccgtggagcttgccccctgctcgccggcgcttacgtcgtcctcgcctccatcaagcgcttgttgcagcaagctgaaggcgcagcagccatgcctctgtggatacattaagaacccatctcttaaacagtatgtcaacagtcctaacgctaaaaaggttgcttcgacttgtggagtcccatatcctaagtgttaaatggtgcttaatggtgtatctactatctact

SEQ ID NO: 209359 - DNA, 331 bp, Gossypium hirsutum
actttattcgttgcccctgtcttattcaacctttagagacacgattttatatagccgcaagtctctcacagttaatgaggcttatgattctttaacctcatatgataagatgaaacatcttatggttaaaaccgactctcagggagagggtctcattgtttgtgggagacaagatcggaatgctgatgatgatcgtggaaggacacaggaacggaattctcgcggtaaatctaagggtatatcgaagtctttaaaatagaggtaaaacttataccttcttgcaaaaggaaatgacacattaaaatatgaaatgttataaagctaccagaac

SEQ ID NO: 209360 - DNA, 453 bp, Gossypium hirsutum
  unsure (1)..(453): unsure at all n locations
gggaggacgagctaagggtcgtcttcatagatgggactttgaaacagaagaggaatgggcgacgtacaatgagcagaaggaagcaatgccaaaggctgcattccagtttggtgtgaagatgcaagatggaaggaagacaaggaagcaaaacaaggaccagaagctcaacaacgagctacacaagattaacaaaatactggcaagaaagaagatggagaaagaatcaggtggtggtgaaggtggaagtcatagcgatgatgtacagcctggaaagaaacttaggatatcaggttaaaaagttccagttcctttaccagaaaggtaaagaaaagctactatttcttggagctgatgtgttaatttgtatgaaagtaggtcattggcaaagagtgcnaaaattcatgaaaaaatcttttttagaagcattgaatgccaacttaaggccggttttat

SEQ ID NO: 209361 - DNA, 419 bp, Gossypium hirsutum
cccacgcgtccgcccacgcgtccgcccacgcgtccgcccacgcgtccgtgcaaacgatggctatcttttctacatcaatggctgctatgctccttcttctagggctcttcgctgcaaacttgtatcctactgctgcacagattggtgtttgctatgggatgcttggcaataatctcccaaatacatgggaagtcattcaactttacaaatcaaacaacatccggcgattgaggctctacgatccaaatcaacaagcattacaagctcttataggctccaacattgaagtaatgataggtgttcacaaatgatcaacttcaaaacctcgctgacccttccaaagcacgatcatgggttcaatcaaatgtcgtagcttactggccgagtgttacgctccgatacatagctgtcggtaatga

SEQ ID NO: 209362 - DNA, 394 bp, Gossypium hirsutum
cggacgcgtgggctgcgagacgcgtttgtgaaacagacacaggggttgccgagcgcgagtggggtggcgttgttcgacacgtgttacgacttgtcgtcgaagagcagcgtgaaggtgccaacggtgtcgctccatttcggggaagggaaatcacttgatttaccggctacaaattatttaatccccgtggactcctcgggaacgttttgcttcgcttttgctcctacgtcgtcgtctatgtctattattgggaacgtgcaacaacaagggacacgtgttagcttcgaccttgctaataatagggttggcttatcttctcataaatgttaacgacactaattaatttaataattaccctttttcttattgctgctgtaatatgagtaacgctttt

SEQ ID NO: 209363 - DNA, 285 bp, Gossypium hirsutum
cccacgcgtgcgctgatacatacggaaccgtttctagagcatgccatggcactcacgtgtgagatgagaccggctttcactgtcctgcacgatattgcattaagcagagatcttaagacgtccctgtctgttattgctggattatgggtcttgcctattgtggcaagttcgagcaacttcatgactctgacctacataggcaccgtactacttcacactgtacctgtgctgtacgagaagtattaagacaaagcggatcccttcgccgagaacgcaatgcctgag

SEQ ID NO: 209364 - DNA, 375 bp, Gossypium hirsutum
ggaagaccttggtaaggctctagagatagttgctgagaacaatccatgctttcaaccaacggcacaggaggtggatcttgatatatatacccagagtgaattaacgttgtggagattgaaggtttttgttcaagataaactaaaacttgctggaatgtgctctgaagctgtggtctgttacaacatatacaataatgagaataccatcaagatgcaactcgatacgaagaagagagatatctgacgcgcttacaaagaatgccataaagaggaataggaagctctctactaactcatgagcaagcactgttgcatgctagtattatactggatttgtccttaaacctgtgaagttgcccagatgctgactattat

SEQ ID NO: 209365 - DNA, 463 bp, Gossypium hirsutum
ctggatttgagggaccatggactaccaaccctcttatcttcgacaactcttacttcaaggagctcttgactggagagaaggctggcctgttacagttgccaactgacaaagttctcctttccgaccctgttttccgtccattggttgacaaatatgcagctgatgaggatgctttctttgctgattacactgaagctcacctgaagctctctgagctaggatttgctgatgcataagctgatgatgattgcaaaaataggaagaagccaacgacacagatgttttaggttttgttttctctctaaagttggcttaaggaatgaatttggggaggtttccgagacaagcttttttcgataattttattctaaactcacattccccatcttgttgttcgtagctgttgcattttctttcttagtggatgctccatagatatgtttggtgaatgcattccttaaag

SEQ ID NO: 209366 - DNA, 443 bp, Gossypium hirsutum
tccacgcgtacgtacacacgtcctgcgagatctctaacactctcaaaagttctggcagggtgattgcatccgggaaagtaccatacccgggttcactgaatgcaagcgactcgactatgttggacgttgcattgaatgtaccgcatagcgtattggtaagcttgataaagtacattggttcaaactgggatatagactatgaattggaagtgggactcaccgtggatcttcctatctttggagacctgaccatccctctctcataaaaaggagagatcaagctgcctactttcaaagacctcttcttttgacttatatgcatccctcatgtattctttcttttccgaaacttgaatagtatgttaaaaatacgatatgtgctgtaggttgaatagattgatttacccgatcgaggtaatattgcatctttttttttaataaag

SEQ ID NO: 209367 - DNA, 455 bp, Gossypium hirsutum
  unsure (1)..(455): unsure at all n locations
ggggtagtaattgctactgagaagaaattgccttcaatcttggttgatgaaacctctgtgcagaaaatacagtgtctgacaccaaatattggagttgtttacagtggtatgggccctgattttcgagttttggttcggaaaagtagaaagcaggcagaacagtatcatagattgtataaggaaccaattccagtaacacagcttgtaagggaaactgcagctgtgatgcaggagttcactcagtctggtggtgtaaggccttttggtgtatctctactggttgctggatatgatgacaatggtccacaattgtatcaggtggatccatctggttcctatttctcatggaaagcctcagcaatggggaaaaatgtctcanatgcaaaaacatttcttgagaaaagatacactgatgatatggagcttgatgatgctgtgcatactgctattttgac

SEQ ID NO: 209368 - DNA, 441 bp, Gossypium hirsutum
  unsure (1)..(441): unsure at all n locations
cccacgcgtccgcccacgcgtccgcggacgcgtgggccttaatcatattatcaagtgcaaggaatatgaagtgtctcacaccagtatctgcgctagatgatgagtgcggattcctggcagctaacctttacgcgaagtgtgtttggggaggatgccttggtaaatttgagcgttgagaaacaagcagatgggaaacttagtgggtacatcaggataaggagcaagacccagggtattgctcttagtctcggggataagattactctaaaacaaaagggaggcggttgatctgtgggatgttgacatcatttgtttaaccaatactggtagtcattctggttttcgcttttgtcagctgctgcctgtctcaatctcctttgaaatgcanaaaattattactgatctaaaaatgcaggtactttgcctgcattttaaagatag

SEQ ID NO: 209369 - DNA, 379 bp, Gossypium hirsutum
cacattgcccctaaaacgagcattgagtttatcagaacatctggtactgcaacgacttaccctagactttgtggcgaatgtctgttaacacaggctagcatgatccaaacaagaccgcaactcattggccatgcagccctaaacgtgaccctttcaaccgtcaagtcaacctacgccataatggtgaagcttgctacaagccatggattgaagcctacagaggtgggcgccatgcaagattgcgtggaggaatcgtaggacacgatcgatgagctgagatagtcaatcatcgggatgggtcagattaaaggctccaatttcggactaatgattagcgatttacagacatgggttagcgctgttttgacggatgagaaca

SEQ ID NO: 209370 - DNA, 442 bp, Gossypium hirsutum
cccacgcgtccgcccacgcgtccggatttttcttggttagcatatgtctcagaggcctagcgttccccactcttcttcaatagcttttggtctccattctcatctcctggtttccagtgagatgaaccctaattccaactggtcttaatagttccatctctttctttttcttctattgattttttgtttaaacttcttttatttcctttttgaaacaaagtaattgccttgttgatttgcaagcaaattttggtaaagttcttaagtatttgagtttagatcttctttgagagtgccgctatgggagtgaaggcgtttgttgaaggaggcatagcctcaatcgtgggccgggtgttcgacccacccgcttgatttgatcaaagttccgattgcacctccagggtgaaagccatgttcccaatcccgctgttcaaacactccg

SEQ ID NO: 209371 - DNA, 384 bp, Gossypium hirsutum
caaaagcttcagaattgcaaatggagattctttctcaacgaccatcttctttctcaactttgaatcccaacgctccattgtttgttccgttagcgtatcggacggtggaggatttctctgatgagtggtgggctctcgtccaatcctccccgtgtttccgcgactactggcttcaagaacgtttccacgatccccaaaacgacgacgccgatcttctttttcccgacgatcttgatgccgtctttgacgattacgacgactttttcgttgaccctacctgtgaagggaaggaagaagatactcaaaaggaattggtacccgttggagcattcaaatggcggaaggggcgagttgtgagcgagtcaactaggtttcttgagaaag

SEQ ID NO: 209372 - DNA, 336 bp, Gossypium hirsutum
ggctttaataagaatcatggagaagaaatatctctccgtcttcgaaccgatgacctcaaaggattcaggaaatatgagagcataaaaaaaactcttctacatgaacttgctcatatggtattttctgaacatgattcaaattttcatgcccttgataaacagttgaatgaagaagctgctagcctagactggaccaaatctaggggccacgctttaagtggaatcagacactcggagaactatgaagaatattatgttgaagatggcagaaattctcagaaggttggtggaaatatgtcaactttgctggaaaatgcccgtgcgtcttctgtagct

SEQ ID NO: 209373 - DNA, 354 bp, Gossypium hirsutum
cgcgttcggccacgcgttcgggcaaagaaagaagaatggcgtctaatgcggcgggtccattctggcgtgcagccggcatgacttatataacctactcgaacatatgcgccaacctcgttaggaactgcttaaaggaaccttacaagactgaagcccttagtcgtgagaaaggtcatttctccatctccaagtggacggatggaaagcctgaaaagcctactcttcggtcagactcacctgaagaatgagatgcaagtttggtcatggaagcttctaaactggaaggattttattttatttttaagaatttctggtatggctgaaacataagaacagatttcaggctgagatgat

SEQ ID NO: 209374 - DNA, 372 bp, Gossypium hirsutum
cccacgcgtccgcccacgcgtccgaaaaagaaaaaaagaagaggaaaatggaggcaccagagacgattcagcacgaaattggaggagtccagaacgacgcgctgcgattcggtctctacggcgttaagagcgacctcgtcggatctcaccctctccaatctgcttacgaatcagcaaagaaaacgcaggaagagatgaagaggaaagtcctggccaatacttatgggacagcaatgccactcaaaatggatctcgataggcaaattctctcgcggtttcagaggccattgctaccatcttcgatgctagggttggaagcgatgacaggaactttagaataatttggcttcgaggattatctgaatgatcctc

SEQ ID NO: 209375 - DNA, 328 bp, Gossypium hirsutum
  unsure (1)..(328): unsure at all n locations
attcnggattcgacgcgacgcctacgcgctacggtctgatgcacacaatctctacccttcattttacgccttgaccatacattttatggttggtttcaatacgaagttgcctactgatgaatatttcatctaggaaaaccaggaaaagctacgcttactactggatatatatgaggataggctgtcaaagaacaagtacttggccggcgatttcttaagccttgctgatctgaaccacctaccatttactcagttcttgtggcttcaaattgcaaggtaatacatgataaccagcacgaagcaaataagtgctttgttggattatatt

SEQ ID NO: 209376 - DNA, 374 bp, Gossypium hirsutum
cccacgcgtccgacgatgttaaactcaacatttctcctggttcttcgtgccattgtaatgaaccagggtggtttagggtttgtttcgctaacatgtcggaagatgcacatgaactcgccatgcaaaggttaaaatccttcgttggttccattaaaaaacataatcaccaagagtcggaaaagttaaggaaagaatcccacattgggaaatggattttcaggttatcgtttcagtccttcaatgaacaagatcaacgataaagtcattcaagccataacttttacctagtgtggacatgcatatatgtatttgataggagagcttagagatccaacccagactggtgtcaactgcattcggtgtgaacatattat

SEQ ID NO: 209377 - DNA, 304 bp, Gossypium hirsutum
gcgatcggtttcgtagtgatgggattcgtcggattcttcgtcaagctcatctttattccgattaacaacatcatcgttggctccgcttaggaattgcaggctcgtagaaattggtgggggatatgaccagttggcgtagttgcagattctcatagaaaatgaatgttagaatgcagcagttgggggctgtccctcttcccttctcattttacattttattagttgaaccaatagtcttgaatctaaagtaaactctcttggaatttctttgagcaatttgtaatagattatggttaatttttgc

SEQ ID NO: 209378 - DNA, 457 bp, Gossypium hirsutum
cccacgcgtccgcttaactcatccatccggaaatttcccaatgcctcattacacattctggagagcatcgtttgatgaattcttcactctcctcaccaaatactgtgtcaccaaatacgagtcgataatacaatcgatacacaaccagtctctaccaaccacagaagtaattggttcagaagctataagacgtgaaatgccttgcgagctcttacgtgctagtctccctcacaccaatgaagctcaaagaaagcttttaatggacttctcgcaatgttctgtcccggataacggatccaactcgcctgccggaagtaatagccaaataaactctgaatcagtaaggggctaacctaaaagaaaaaaacgttttagaggtcttttacactatgggttcttggttgaatggcacccctttttttattttttattatatcattttctttcttgtcctttt

SEQ ID NO: 209379 - DNA, 396 bp, Gossypium hirsutum
  unsure (1)..(396): unsure at all n locations
cccacgcgtncgttatagattcgtgctatgcccactgtcaagtacgaaagcagatacaagggtcaagcgatagttctacggttgtaatcaacatgaaaattgccaaggctgttggagactggtattatgagcggagccccatcaaaaagcttgactagccttatccttgcaaccctacctgcccaaaagatgactctgattcataaatcctatacatataattatggactacagcttatttattagatggatattagtccattgcttatgtctatgtatccatctataaatctgtctctgctgtttattttaataaaaaagccgatgatcttgtaaacaaataaagttgctcgagctagtatcattaccactagattgcaatggcacttttattta

SEQ ID NO: 209380 - DNA, 389 bp, Gossypium hirsutum
cccacgcgtccggaaagtttcaatggcaaccctcaaagttccagttcacgttccttctccgtctgaggatgctgagcaacttcggaaagcttttgaaggctggggtacgaacgagcaattgattatcgacatattggctcacaggaatgcagcacagcgcaattcaattcggaaagtttatggtgaagcttatggggaagatcttctcaagtgtttggagaaggaacttacaagtgatttcgagcgggctgtgctgctttttacgttggaccctgcagagcgagatgctcatctggctaatgaagctacaaagaagttcacatcaagcaattggattctcatggagatagcttgcagtaggtcttcgcatgaactactcaatgtgaaaa

SEQ ID NO: 209381 - DNA, 229 bp, Gossypium hirsutum
accatacattcagtttatcaaaaaaaatgttggacttcttaactgataaagacgttttgcctcatggcttcaccaaggcttacgccgcccatctcaagcgctcccactagatcgagcttgctttattgactgatgttgagaaaactgctcaactcaaggaacttccatcctacgagccacattggctctttattagaactgctttcatggcaacgaatacatactttaa

SEQ ID NO: 209382 - DNA, 338 bp, Gossypium hirsutum
ataatattagctggatttgatgctgctcgtggtgatcctttaagatgctgtgatgtgactactgctggttatacacagatgacacacatgttgagtaccctctcgggtggaaagatgctagttgtacttgagggcggctacaacctacgttcgatatcatcttctgctactgcagtgaataaggtacttttgggtgaaagtcgcgagtgtgaaccatagaacatcgttccttctaaagctggcctgcttacggtggtggaagtcctgaagattcacatgaagtactggccaaatctaaattgaagcttctaacaactgcagttgcaacgggcaatgta

SEQ ID NO: 209383 - DNA, 390 bp, Gossypium hirsutum
cccacgcgtccgcccacgcgtccgcttgaaaagtgatgaaagacctgagagaagaaaggagctctccaagaaactggaaggaaaatccaatggaagggaagctgaaaggaaaaatctccagacaaaatcaaaggctaacaaagacgcagagataaaaaagttaaggcagagccttaattttaaagctacaccattgcctgctttttatcatggacagagaacatcaaaaagtcctctcgataagataggtcccaagagtgacatccattggcaacctggcttcctcgggtaaatgaattgggcttcatctacaactagtaggaggaaatattaagaattttttaaaaatgaaaaacagtaggaaaagacggaagcataagaagtacacca

SEQ ID NO: 209384 - DNA, 450 bp, Gossypium hirsutum
  unsure (1)..(450): unsure at all n locations
gtaccgaatcgcagtgtcgacccaggcgtacggagtttttgagaggagttgctaatccccttggaattaaggtgagcgataagatggatccgaatgaactagtaaagctgattgaaattttgaaccctcagaacaaagctggaaggattacagttatcacaagaatgggtgctgagaacatgagagtgaagcttccccatctaattagggcagtgcgtcgtgctgggcaaattgtcacttgggtcagtgaccctatgcatggaaacaccatcaaggctccttgtggtctcaaaactcgccccttcgattccataagggctgaagtgagagctttctttgacgtgcacgagcaagagggaagtcatcctggaggagttcatctagagatgactgcacagaatgtgacggaatgcatcggnggatcccggactgttacattccatgacttgg

SEQ ID NO: 209385 - DNA, 455 bp, Gossypium hirsutum
ccatgagctacttaaccatttgccaaatctcctacctcctcttctttagcgtacttttcatttccgctcatgcagcgcgctttgaaatccgcaatgagtgctcctacaccgtctgggcagcaacctctcctggtggtggccgtcgcctagaccctcggcaaagatggaccatcgatgtgcctgctggcactgctatggctcgtatttggggtcgaaccaattgcaatttcgatgccagtggtaggggtcattgccaaaccggtgattgtggtggactccttcaatgcaaaagttggggtgtaccttcaaacaccctggctgaatatgcacttaaccaatttggaaacatggatttctacgacatttccttagttgatgggtttaacatccccatggtgtttgggccaacttatggcggttgtcacaacattcggtgcactgcaaacattaacgga

SEQ ID NO: 209386 - DNA, 337 bp, Gossypium hirsutum
cccacgcgtccgaggactctcagctgatcccgagaccttcgctcggaaccgcgagctcaaggtcatgccctgcatatgggccgtgttgggagctcttggctgtgttttccctgagctgttggctatgaacggcgtcaagttcggcgaagctgtatggttcaagggcggatctcatatctataaagcgggtggacttgactacttgggttacccaagcttgatccatggctcaagcatattggccatctgggctcgccaagatatcttgaggggagccgaccatggttaccgtgttgccggtggacccctcagagaagtgactgacccattgttccca

SEQ ID NO: 209387 - DNA, 374 bp, Gossypium hirsutum
cccacgcgtccgcccacgcgtccgcccacgcgtccggcagagtgcatggtcacttgaattttgagcatgcagttgcaattgctgtaggctgtcttggtacccatatgatcttatcgcagaaggttgggtgacctacagaggttgcagatggtatcactgtaattaacacacgggagggtgaagaaatctccatctttgtgaaagatggttgagaatagaagaaggttatgattttctaatcacacgataccactgttttcttggtccctgcagatattatccagttgaggactcaactggaactgtaaatataaatgcagcggtgtggtcttgtttgctggactttagtttagggttagcactttgtgtataaa

SEQ ID NO: 209388 - DNA, 436 bp, Gossypium hirsutum
cggacgcgtgggttctaaagaggtcatcgtaaattcgagtacaaagcgctaaccgagatgagagccaagtggaagaagaagcgtatgaggaggctgaagaggaagcgccgaaagatgagacagagatccaagtagatgcgccttggactgaattagttttgccctgacaatcccttgtcttcataattatcctgcatatgttgcatgaagttgtgaagattgaagggtattttcaggcaaccttatctgttttgtcttctatatctcggttaaagttttaagactgtttgagatgtttgtctagtactattagatattatgttggggatttgtggtttgatctgtgtaagcagttatcttaacatcctaaatgtttgaaaattgaaacttcgttcttcttatatggtctataatatgcgagatagattgtttcctt

SEQ ID NO: 209389 - DNA, 443 bp, Gossypium hirsutum
ggctcacaccaatcaaaataaacccatcttcttcatttgcaggcaatcaaaaagccaaaaatgatggcactgagaatgagggcttctactactgccaatgccctcaaaatatcttgcgctaccaccaaagcccctgttttgtacctctccacatgctattgcactgtcttggatgggatgaaatatgctgtatcacatgaatgggtgaagcacgaaagaacagtagctaccattggcatcactgaccatgctcaggaccatttatgagaagtagtgtttgtcgagctgccaaaaccaagtggttcaatgagcaaaagactagggcttggagctgatgagagtgttaaagcaaccagagatggcaactcccctatctttggtgaaatcgttgagggtaacttcaagcttactgaaactcctggcctgatcaatatacgtccata

SEQ ID NO: 209390 - DNA, 470 bp, Gossypium hirsutum
cccacgcgtccgcccacgcgtccgaaattgtttttgtttttaaaatataaacttacgacatctacaaatggtgacctcagtgctacctagagtagaaagcttggcaagcagtgggattcaatcaatcccgaaagaatatatcaggcctcaagaagagcttacaagcataggtaacgtgtttgaagaagagaaaaaagaggaagggcctcaggttccgaccatcgatttgacagaaatcgagtcggaggacaaagaggtccgggaaagatgtcagcaagagctgaaaaaggctgccatggaatggggtgtgatgcaccttgttaaccatggcatctccgaggagctcatggatcgtgttaggaaagttgggcagaaattctttgaactccctgtggaggaaaaagagaagtatgccaacgaccaaagctctgggaatgttcaggctatggtagcaagcttgcttacaatgc

SEQ ID NO: 209391 - DNA, 340 bp, Gossypium hirsutum
ctccaggatatgctgcagggcatcaaacaaaacatgttagtttggttacttgtgttgtggacatatgccaaagacaggagaagattatatgataatacctttggcagatagggatgttcttcatcatcgaaggccctcctaagaatccacttctcgatgcgtccttcatccttttttatctgattcatgaaatagagaagcatgtataatgaaccaagcaattccaagacaacaataaattgattgcttaccatctttgattcagggtctaaaaaaaaaaaaaaaattttattaataattaattttattttatattataattaataaaaatattttttaa

SEQ ID NO: 209392 - DNA, 466 bp, Gossypium hirsutum
cccacgcgtccgagaaaatatcacaaatcttcttctccttctcagaaatcttagtatcatcactatggcctcaaatcccaaggtcttctttgacatgacgatcggtggtcagcccgctggtcggattgtgatggagcttttcgcagattgcactcctcgcactgcggagaacttccgtgccctctgtactggcgagaaaggcgtcggccgcagcggtaagcccctccactacaaaagctcttctttccatcgtgtgatccctaactttatgtgccaaggaggtgacttcaccgccggaaacggtaccggaggtgaatccatctacggatcaaagttcgctgacgagaacttcatcaagaagcacactggtcccggtattctctcaatggctaacgctggaccgggaactaacggatctcagttcttcatttgcacggctaagactgagtggctcgacggaaagcac

SEQ ID NO: 209393 - DNA, 454 bp, Gossypium hirsutum
  unsure (1)..(454): unsure at all n locations
cccacgcgtccgcccacgcgtccggtagagatgaggaaaatcatgggtgccaaagttcttttcttctttgctttgctttccttttcagctgtctcggcatttgcacaggatgaggaagaccaaggtcttgttatgaacttctacaaggattcttgtcctcaggctgaagacattatcaaggagcaagttaagctactgtacaagcgacacaaaaacactgctttttcttggctgagaaacattttccatgactgtgctgtccagtcatgtgatgcttcactgctgctggactccacaagaaggagcttgtctgagaaggagacagacaggagctntggcctaaggaatttcaggtacattgagaccatcaaagaagctgtagaaagggaatgtcctggagttgtttctcgtgctgatatccttgttctgtctgctagggaaggcatcgtttcgt

SEQ ID NO: 209394 - DNA, 349 bp, Gossypium hirsutum
cggacgcgtgggttctgactcaattcaattctgcttctctgaaccgccacctttcccgcgcttatgctagtaacatgggtggctacaagaacgaagggttcgtcgaggttcttgctgctcagcagagtcctgagaacccgaactggttccaggggacagcggatgcggtgaggcagtatttgtggttgtttgaggagcataatgttttggaattcttggttcttgctggggaccatttatatagaatggattatgaaaggtttattcaggcgcacagagagactgatgccgacatcactgtagctgcattgccgatggatgaaaaacgggctactgcgtttggtttaat

SEQ ID NO: 209395 - DNA, 474 bp, Gossypium hirsutum
attttgggcccgttgggtttatttaatattcttggttaacttcagataacatggcgtacaaatgggggtgaacctggtcgcttgcaaacacagcaaattctaggcactccaatcagttgcaaagagattgagttgcaaatcctggagattccatctctaatcaatttggataagtcctttttggtacatctaaatctccttaaccatacagacagagagttgggcccatttgatgtccggctatcacaaaatagcgcacatgaggagaagaatgttatgattaatgggcttcagactatcttattaccacaggtggaagcattcggtaccactgattttcatctgagcctgattgcaactaaacttggagtccagataataagtggaattacagtgtttgacacaaaagataagaaaacttatgacccattgccagatgtcgagatctttgtggagtctgattgatttatcaaa

SEQ ID NO: 209396 - DNA, 381 bp, Gossypium hirsutum
atttgaccaattggggctctgaaatttacgttccttctttttttcttctcttttatacattcatgtgctccaattctgaatacccattgtctagtttgtttaaagatcagatctttgatacatcctctgaattttttgggtcttttttttttctatcagaacagagaagatcgaaagggagaaacatggctccacctacaagaatagggcttgctggtttggctgttatgggccaaaatcttgcacttaacattgctgagaaaggctttcccatttctgtttataacagaactacctctaaagtcgatgagactgttgaaagagctaaaaaggagggagatcttcctgtatatggtttccatgatcctgaatcttttgttc

SEQ ID NO: 209397 - DNA, 457 bp, Gossypium hirsutum
gaaggtcgaggcaaagaatgcattggaaaactatgcatacaatatgaggaacacagtgaaggacgagaagattggtgctaaactcccagcagctgataaaaagaagattgaagatgctattgaacaagccattcaatggctagacagcaaccaactcgccgaagccgatgaatttgaagacaagatgaaggagttggagagtatttgcaaccccatcattgctaagatgtaccaaggtgccggcggtgacatgggtggtggcatggatgaggatgttccggctggtggaagtggtgctggtcctaagattgaggaagttgactaaatcattgattttcttcacctggcttctctattggtctcttatgttttttgggatttaaactggttggttttggtgtttggtttctaatcggattgaaatgaacttttataggggttggtccttttttgggat

SEQ ID NO: 209398 - DNA, 392 bp, Gossypium hirsutum
actgtcgttcctggtggtgatcttgctaaggtccagagagccgtttgcatgatttccaactcaaccagcgttgctgaggtgttctcccgcattgaccacaagtttgatctcatgtatgccaagcgtgcctttgttcactggtacgtgggtgagggtatggaagaaggagaattctcggaagctcgtgaggaccttgctgcacttgagaaggattatgaagaagtcggtgctgagtcaggcgagggtgatgaggaaggtgaagatgagtactaaataagtaatgtttgagtggagggcttgcattttgctacccaatgatttgtttccttttatccggtgtttttgcttattctattgtgtgaacttcgactcttctaagctttgttcaagac

SEQ ID NO: 209399 - DNA, 459 bp, Gossypium hirsutum
caaggcatggcaagtacatggcttgctgcctgatgtatcgaggagatgtggtgcccaagggtgtgaacgctgctgttgctaccatcaaaacgaagaggaccgtgcagtttgttgactggtgcccaactggtttcaaatgcggtattaactatcagcccccagctgttgtccctggaggagatcttgctaaggtgcagcgagctgtttgtatgataagcaataacacagcagtggcagaggtgtttgcacgcattgaccacaagtttgatctgatgtactcgaagagagcatttgtgcattggtatgttggagagggcatggaagaaggtgaattctcggaagcccgtgaggatctggctgctcttgagaaggattatgaagaagttggtgctgaaggtggagatgatgaagaggaaggtgaagaatattgatgctactatcgcaatatcatttattttt

SEQ ID NO: 209400 - DNA, 442 bp, Gossypium hirsutum
cggacgcgtgggcagccacctccagggatgaaattcaagtgctacctgcagtgatagcagcccgggcagcactggcaaaaactgcttttgccaagagcctccgccctcaatccttgcccaccaaagtactggtgatagggatgttaggcatggcggcaaacgtaccgttggggatatggagagagcataccaaaaagttctcaccatcttggtttgtggctgtccatgcggctgttccattcatagccatgctccggaaatctgttttgatgccaaagacagctatggctttcacaattgcagcatccatactatgacaggttattggctctagggctgaacggtatcgattgaaagcagtatctgcaaaacaattacatatcagggaatcctctgtttctgttggtgctgcacaacaattggatgtcgtcagttttaagga

SEQ ID NO: 209401 - DNA, 383 bp, Gossypium hirsutum
  unsure (1)..(383): unsure at all n locations
cccacgcgttcgcccacgcgtncgatagctcaaaatgttgacactggagccatattaatgcaaggctttgtcaacagggatgcactagctacaactatcacttctaggaaggcaacgttcttcagtcgatcacgggcaacattgtggacaaaaggagaaacttccaacaatttcatcaacatttatgacatatttgttgattgtgatcgcgattctgttcgttctaaataactttctcattgacatcttattgattgcttaatttatgaagtttgacataattgaaacttgtcctttagataatttacctttgggaagcctgatgggcctacctgctacacaagggcagagacatgctatttcacatcaataggtgatttgtt

SEQ ID NO: 209402 - DNA, 415 bp, Gossypium hirsutum
cggtaaaggtgtatcgaaggctgttgctaatgttaacacaatcatcggccctgcattgattggaaaggacccaaccgagcagactgcaattgacaatttcatggttcaacaactggatggaacccaaaatgagtggggttggtgcaaacaaaagctcggtgcaaatgccattcttgccgtgtcccttgctgtttgcaaagctggagctgaagtcaagaaacttcccctttacaagcacattgctaaccttgccggtaacagcaagttggttcttcctgtccctgctttcaatgtcatcaatggtggttcacatgcaggaaacaaacttgctatgcaggagttcatgattctttctgtaggagcatcatcctttaaggaggccatgaaaatgggtgttgaagtctatcaccatttg

SEQ ID NO: 209403 - DNA, 451 bp, Gossypium hirsutum
accagcatctgtttcaaatgtttcccatgaaagtagccaaggaagggttgatgaccatccttcttttagaccccatttgccacctgaattctacaagaaacctactgtgaaagtctattgcaaagctgatcctaattttcatctcaccatcagagacggtaaagttattcttgctccatctgatccctctaatgaattccagcactggtacaaagatgagaagttcagcacaagtgtgaaagatgaagtgggtttcccaagcttttctctggttaataaagccactggtcaagccattaaacattccattggagcttcttatcctgtccaactggtaccttacaaaccagatcatcttgatgagtcaatgctattgagcgagagcaaggaagtccatgatgggtacagagctataagaatgattaataacattcgcctgaatgtcgatgct

SEQ ID NO: 209404 - DNA, 469 bp, Gossypium hirsutum
  unsure (1)..(469): unsure at all n locations
cccacgcgtccgaatagatataaatcttgcatttatgtatataaccaaatggtgtctggagcaagaaagaccgaactgttcagggggtgtacatataaagctggaaaggaaggttactgtaatggaccaggcacaatagagcttgcccctcacaacgctttgcacacatggatcgggagcagcttaaaccctggaagggaagatatgggtaagttttactctgcagcaaaggaccgtattttctacgcacaccatgcaaacatagatcgcctatgggaagtttggagggaagctcataaacaacaattggatatcaaagatccagattggctcgactctttcttttacttctatgatgagaatttgaagctcgtgagggttaaagtcggtgatgttgtggatacaatcaaactgtgttattcttatgaacaggttcaccgtccgtggttgaatatgcgntccaagcctt

SEQ ID NO: 209405 - DNA, 467 bp, Gossypium hirsutum
catctctctcctttgttttcccttttgtctctctctctctttttccaaccctaaccctacctcaccaaccaggattcaacatgaagggaggaaaatccaagtcagatactaagagtgccaagctatccgtgaaatccaaagctggaaagaaatcggggaaggctgccaaggatccaaacaagccaaagaggcctgctagtgccttctttgttttcatggaggagttccgtgagcaatacaagaaggatcaccctaaaaacaaatccgttgcggctgtcggcaaagctggtggagataaatggaagagcttgtctgaagctgaaaaggcaccttatgtagctaaggcagaaaagcggaaggttgagtatgaaaagaacatgaaggcctacaataagagacaggctgagggtcccaaagacgaagatgttgagtctgacaaatcagtgtctgaggtgaatgatgaggat

SEQ ID NO: 209406 - DNA, 468 bp, Gossypium hirsutum
cccacgcgtccgcccacgcgtccggacaagacaaatagggacctcaaaacgccctgagtgggacgcccccttcgggctgagatgctttccggacatgctattctttttatttatagaatacttcgctacacggcttagccgacctggagcggctgccttcgttgattccccacgaaggaactcgctacttccccttactgtcctaagcgggggagaaggattcaaaaccttgtgtgaaggaaaggctgtcaaagtcgttgaccattaatccggttgaaggacaaatggacagtgaatcaacagaatcgagttctttgcaggataaggattcggcagtcgagacatctatatccatttcattaagaaagaaaggaaaggttgcgcagcaataggttctttgtgaaagaaggttgcttgcaagttctcgaataagctctttgctttgacacagatattatctagatgcca

SEQ ID NO: 209407 - DNA, 422 bp, Gossypium hirsutum
gcggcgactacaacagtatcaaaaccctaagctttcaacaatggcggatgtggaggcagatgtggcggcggccggagtgcctaagaagagaacattcaagaaatttagcttcagaggcgttgatttggatgctcttcttgatatgtccaccgatgagcttgtcaagctcttccccgcgcgtgctcgtagaaggttccaaaggggtctcaagagaaagcccatggcattaattaagaaactccgcaaggcgaaaagggaggccccaccgggtgagaaaccagaaccagtcagaacccacctgcggaatatgatcattgtacccgaaatgattggaagcattatcggtgtgtacaatggcaaggcattcaaccaggttgaaatcaagcctgaaatgatcagccattaccttgccgagttcttca

SEQ ID NO: 209408 - DNA, 480 bp, Gossypium hirsutum
gtgaaacatgccacacgatcaaagcacttcattagtatgattgcctgagagctaacaaagcaacatcagcgtggggattggaggctcgagtacccttcttagacatagaatttatcaacgttgccatgtctatagaccctgaatcaaagatgatcaaaaaggatcaaggacgcatcgagaaatggattcttagaaaggcctttgacgatgaagagcgtccatatttgccaaagcacatcctctaccgacaaaaagaacaatttagcgatggcgttggttatagttggatcgatggtcttaaggcgcatgctgccaaaaatgttactgataagatgatgcttaatgcttcttacatatttcctcacaacacgccaacgacaaaagaagcatattactacaggatgatattcgagagattctttcctcagaactcggctagattgacagtccctggaggagctagcgtggcatgcaacactg

SEQ ID NO: 209409 - DNA, 469 bp, Gossypium hirsutum
cccacgcgtccgggccagcaccagaggcagcttcaaaatggttcagcggctcacttaccgcacgcgtcacagctacgccaccaagtccaaccagcaccgcgtcgtcaaaaccccaggagggaagcttgtttatcaaacgacaaagaaaagagctagtggacctaaatgtcctgttaccggcaagaggattcaaggaattcctcatttgaggcctgctgagtataaaaggtctaggttgcctagaaaccgtaggactgtgaaccgtgcttatggtggagttctatctggaagtgctgttcgagaaaggatcataagggccttcttggtggaagagcaaaagattgtgaagaaggtactgaagattcagaagacaaaggaaaagcaatcatccaagtgagagctaggatttgctaatggattgatagtgaatcttggaatagtagtttgaggggatttaagatttggatta

SEQ ID NO: 209410 - DNA, 438 bp, Gossypium hirsutum
cccacgcgtacgggaaatatgtcatggcgcatgctatcttaggagagcgctgcgttagctttgtcttgttttaaataatattgtgcagcaagtccgtggtcttataaacagatcgggaaaaggtgattcaacttctgaactgcatcggcaggcaacgcgtgatcttgagtccgctgtctctgcctggcactctagtttttgccgtttaatgaaatttcaacgggattttattcactccatccatggctggttcaagctcacccttcgtcctgtcagcaatgacaatgttgaccgcaatggtaaaacagatctctctgatgtatacgctatttgagatgagtgtgaacttgctcttgaacgtgtccctgacacagtagcttcttaagctttcaaaagtttcattaatggtcgccatgtgatattctgttaaacaaaaat

SEQ ID NO: 209411 - DNA, 444 bp, Gossypium hirsutum
cccacgcgtccgcgaaggtgctgatgaggatgaaggtgttgatgaccaagctgtgaaggttgttgacattgttgacactttcaggcttcaggagcaaccccctttcgacaagaagcagtttgtcgtgttcatcaagaagttcatcaagaacttgacaccaaaactggatgcggaaaagcaagagtccttcaagaaaaacattgagggagcaaccaagtttttgctttcaaaattgaaggaccttcaatttttcgtaggagagagcatgcatgatgatggatgcttggtgtttgcttactacaaggatggtgctgttgacccaacatttttgtactttgcatatgcattgaaggaggtcaagtgctgaggtttgaagcaaagaaaaaaaaagtggttgctgaagaatttagtcccttttattattgcttttggctcttgttttca

SEQ ID NO: 209412 - DNA, 385 bp, Gossypium hirsutum
agaagtttcaggctcacgacccagataaccaattcaaagttggcgattatgtgcagcttgagaagagccggcctattagcaagaccaagactttcattgcggtggctgtaccaagtaggaatgggaagcaggagaaggaggaggcaggggagcttgggattccattggagtctaaacagactcaagagcagccgcaggcttagtgttaagcccttcgcgtgggctccttttgttgttggtaaatttgtgatcttttgcaagggatttcactgtttcaaaaactgcttttccttaatgtaataattgtcgtttttcaagggtctggattgttttttgagtttgtcatgacattcattctctgctctatttttgattggtttatttg

SEQ ID NO: 209413 - DNA, 462 bp, Gossypium hirsutum
  unsure (1)..(462): unsure at all n locations
ggttgacagaatactaagaccagaagggaaacttattgttcgagacaacgttgagaccatgaacgagctagagaatatgttaaagtctatgcagtgggaagtgcgtatgacatactcgaaggacaaggaaggcctgctctgcgtccagaaatccatgtggcgacctaaggaggtagagacgatcaaatatgccattgcttaggcaaatgctatctgttaattgatgatgtttgtcggcacgattagttattctttttgttaaggttttgctaattgaaattcatggtgcttgtatcatgttaaatagggcttttctttagtattgcatacgttgcttcttttgttttttattcccttatcttataagtttggtgtccaaatcttcatgtaatgtactgtagactnttaatttaattccttttggactcatttaaaacanaatttcatcgcctgttcaacttg

SEQ ID NO: 209414 - DNA, 432 bp, Gossypium hirsutum
cttccgttcttgctggccttgacactaacttcaccgtcacttcaaaagcatcaaaccaagaatggggttttggtgaaccttacatggtcaaaagggcaacccttcttatcccaacaaccactctccttatcataaacttggtggggggtgttgcaagaatatcgtatgccaataatagtggctaccaatcatggggtcccctctttggtaagctattctttgccttctgggggatcatccatctctaccccttcttgaaaaggttgatgggacgccaaaaccgtacacctaccattgttgttgtatggtcaattctgcttgcctccattttctctttgttgtgggtgcggatcgatcccttcacaaccagagttaccgggccggatgtagaacagtgtggaataaactgttgagagagaacctataaagact

SEQ ID NO: 209415 - DNA, 435 bp, Gossypium hirsutum
cccacgcgtccggtattgacacccctggagtcgttgccctcctaggagctcacagtgtcggcagaactcactgtgtgaagctggtgcatcggttgtacccagaggttgaccctgccctcagccccgaccatgttccacacatgctccataaatgccctgatcaaatcccagaccccaaggccgtccagtatgtgagaaacgatcgtgggacacccatggttttggacaacaactactacaggaacatactggacaacaagggtttgttgattgtggatcaccaactggcttacgacaaaaggaccagaccttatgtgaagaaaatggccaagagccaagactatttcttcaaggagttctcaagggccattactctcctctctgagaacaatcctctcactggtagcaagggtgagatcaggaagcaatgcaatc

SEQ ID NO: 209416 - DNA, 258 bp, Gossypium hirsutum
ctcatcagacataaacaaccctcgaaactttattgccaagattgcacgctacaacagcgggggcaacattcacaagaggaggacaatctcggatgaactacagcctataaaaatcgagatggccaaaaggaacaagcaggggatctggaactatacaaaccctgggggtgaagccacaatgagatcctggagatgtataaaactaacattgacccaaacgctcagtgggcgaacatcacatcgaaagaacaagccaag

SEQ ID NO: 209417 - DNA, 448 bp, Gossypium hirsutum
  unsure (1)..(448): unsure at all n locations
atttgtgcccattgggtacacttttggtgctggtatgtttgagatggagaaagtgaaaggtggaagcccttatggtgctggaacatttgctggggatggttcaagacagccctctgagctagagttagggcaagctttccaccaaggcaagtattttgctggcattgcaaagaagctcaagggaacaacagcttgagagatttggcttatctaaataccagatatatatctatatatatatatagatattcagctttataaatatgtgtttgtttttcttgccttttcatttttactttgttcaagactctctccatagaataatctttgtatgctttggttgggattgtatttgttgtcacaaaacttacattgtttttcttccaagtctaaatcaaatggattngttatctcgattaaacttnnnnnnnnnntttnnttttttttt

SEQ ID NO: 209418 - DNA, 361 bp, Gossypium hirsutum
  unsure (1)..(361): unsure at all n locations
ccgatataaggcaggcgaagtccccgccaccctgcagatctcaatctagcgacggcnnagggaaaagaaaaaaaaaaaaaagaggaaaaaaaaaaaaaaaaaaaaaaaaaaaaaaaaaaaaaaaaaaaaaaaaaaaaaaaaaaaaaaaaaaaaaaaaaaaaaaaaaaaaaaaattaaaaaaatttatttttataaaattattttttattaaatataaaaaaaaaaaaaatggggggggcctttttttaaaacctaattttttttcccccgtcatataaataaataaattttttttaatggaaccaaatataaaataatgtggccttttttaaaaaaatttttaagggaaaaactctttttt

SEQ ID NO: 209419 - DNA, 438 bp, Gossypium hirsutum
gccggaggacttacttcaaggttcctgactgcaaatctgccaagttgtatggtgatgcaaccttggttgaggaacggcatcggcatagatatgaggtcaatcctgatatgatatcacaacttgaagcagctggtctatcatttgttggcagagatgaaagtggtaggcggatggagattgtagaactaccaagtcatccatattttattggtgttcagttccatcctgaattcaagtccaggccgggaaaaccatctgcacttttctcagggcttatcgctgcatcatgtgggcaaatggacttgcttttaaacaaatctgatcatttgagcaatggaatggcaaatgggataaatgggaaagcaacttccaagccccgggcaaacggaaactgtttcaagtcatccaacggatcataaaatggtgtatacagcaatg

SEQ ID NO: 209420 - DNA, 385 bp, Gossypium hirsutum
cggacgcgtgggtaagcgtcatgagatatgcaccaaatgatcatgaatttattttcagaaagataagacatcaaagggatggcctttgagatccttgtactcttatattgctgtccattgtaatatctagaattcatataactggatactcaccattgggttccccaggcaccggaaccatcaagaaagaagtcctcaagcatccagttctgaatatggtagcagagaaattgggcaagtctcctgctcaggtagctcttcgttgggggctacagatgggtcacagtgttttgcctaagagtacaaatgaaacaaggatcaaagagaactttgatgtttttgattggtccatacctgaagaattgttttccaagtttgctgaaat

SEQ ID NO: 209421 - DNA, 472 bp, Gossypium hirsutum
ctttcaagacagtgggaaggttgactttaatgtgtggcgacgggaccaatgatgttggagggcttaagcaggcccatgtaggtgttgctctattgaatgcagtgcctccaactaaaagtgagagctcatcgggaacatctaaagatgaaaacacaaaggcattgaagtcaaagaaatctaagcccactgtagaagcaacgggcaattcagaagcctcttcaaaaggaaaggtagtccccagatcagaatctagcaacaatgcaaccagtaaccggcatcttaatgctgcagagaagcatcgacagaagctgaagaagatgatggatgagctgaatgaggagggtgatggtcgctctgctcctattgtcaaactgggggatgcctcaatggcatcaccatttactgcaaagcatgcatcagttgccccaaccactgacataattcgtcaaggacgcagcacccttgtgactac

SEQ ID NO: 209422 - DNA, 474 bp, Gossypium hirsutum
gcaccctggttctggatcatcagctcagacacagacagcaggagaatctgaagcacctgcaatcaccggagccacgccatccggtccactatcatctagagatgaggcttctccatttccttctagtcagaatacatcagcttctggatctactgtcagtcctctggatagacgaggattttcctttaataatcgaagcacttctagtaattcctcattgccaaatcaagaggaagcaggaccatcagagttgcagtcattttcggagtctataaaatccagacttaatgcagtgtccttgagatacagggagtcaatttcaaagagtacaagaggctggaaggagaggttgttctcacgtagttcttctatgtctgatatcgggaatgaagttcgtcgagaagtgagtgcaggaatagctagtgtatctcgtatgatggagcgtcttgaaatcaatggaaatagcagagaaca

SEQ ID NO: 209423 - DNA, 363 bp, Gossypium hirsutum
  unsure (1)..(363): unsure at all n locations
ctgcactttatcttgggcagcttcttgcactttttcaaagttgcgacgctatcagagctcaaagatgtagatatgacagaaagccctgggttaacaaatctgaaagcaacacctcttgaggttctcatcactccacgtcttgattccaagctttacgtgtgataggcaaagaattcatatatttagctgaaagaaaaaagtatacactgtgcgactactatggtgaaatagatgcatttttcaagcatcttgtagacctgcactctgttattattgttatgtacttatggctttcccacttgtctatgattcaatctgagtagcactccatctaacaatcnnnnnaaaaaaaaaaaaaaaata

SEQ ID NO: 209424 - DNA, 459 bp, Gossypium hirsutum
cccacgcgtccgggcgatgtgacaagcaaagtggccggttgcttatcatacttgcagaacggagggaacgtgccgaaggcttgctgcgacgggatccggtccctgaacaacatggctcgaaccacccctgaccgccaaaccgtgtgtgggtgcttgcaagctgccgctaaggctgtcaaaattaaaggcaacttggctgagaccctcccagccaaatgtagtgtcaacatcccttacaagatcagcacttccactaactgcaaaaatgtgaagtgagatggatgaagagagggttttgcagcagcttgcaggagataaaatatatgatttaaaagaagaagaagaagaatgaataaggattttgggatggaattttcaaaatccaaaattagtctccactttagtgtagtgaggctttgtttattttggtttatgtttcggccctgcatgttggctcta

SEQ ID NO: 209425 - DNA, 447 bp, Gossypium hirsutum
agaaggtgaaggcggagagaagaagaagaagtagaaaaaggagaagggaaagaaagaacaggacagtgcagtcccagtggagaagtgcgatgaggtagcaacagttcaccactcagagacgccggaaaagaagggtttcatggataagatcaaagacaaactcccaggacagcataagaaagatgaagaggacaccacccaaccaccagctgctgctgccccaattgagaacgaccaccatgaaggagagacaaaagagaagaagggatttttggtgaaaatcaaggagaaaattcctggttaccactccaaaacagaggacgagaaggaaaaagagaccactgctcccaattaatgaatcaatataatgcatttcaagtaaaagatgtgtagagattgtgtggtttatcaatttgttggaactgtctgttctctgtttttcttttg

SEQ ID NO: 209426 - DNA, 417 bp, Gossypium hirsutum
cccacgcgtccgcccacgcgttcgcgaccagtatggacaagttgaagacttggttggatgagaaggaggctgatatcttcgtcaccacaaccggtaacaaggacatcatcatggttgatcacatgaggaagatgaagaacaatgccattgtttgcaacattggtcactttgacaatgaaatcgatatgctcggtcttgagacctatcctggtgttaaacgcatcaccattaagcctcaaaccgataggtgggtcttccctgaaaccaaaaccggcatcattgtgttggctgaaggacgtctgatgaacttgggatgtgccactggacacccaagttttgtcatgtcctgctcgttcactaaccaggtgattgcccagctcgaactatggaaggagaagggcactgggaaatatgaga

SEQ ID NO: 209427 - DNA, 474 bp, Gossypium hirsutum
ctctaagcaaagaaagcaagccactattgttttaagagaagatcaaaatggcttcaaaaaaatcagcttccatggccttctttttagcactcaacattctcttcttttccctagtcagtgcttgtggctcttgctcttcacccacccctaaaccaaggccaaacccaaaccccaacacccccacccctactccatccgcacgaggcaggtgccctagagatgccctcaaattaggtgtatgtgccaatgtgcttaacttggtcaatgtcaccgttggttcacctccagtgatgccatgctgttcccttctcaatggccttgtcgacctcgaagctgctgcttgcctttgcactgctattagagctaacatcttaggcatcaaccttaacatccctgtttctcttagcttgctcctcaacgtttgttcaaggaatgttccaactgtgttccaatgctaattaagtcatcactttt

SEQ ID NO: 209428 - DNA, 417 bp, Gossypium hirsutum
  unsure (1)..(417): unsure at all n locations
tttcatgagatgttgaaagaagaaatttaagcgtgcggcggagagaaggcggtggactggagggggactatggagaggagctttgagagaatggataaggaagttcaaaaatggacggtggacgctaaggagcgttcaagttgccgatgcgaacttcaaactccacagtgcgacgccgttggctccaccgcagtggttgctgtcgttacgcctgatgagatcatcgntgctaactgtggtgattcgcgcgctgttttatgccggaacggcgtcgctttacctcttttcgacgatcacaagccggaccgacccgacgaaatgctccgaattcaagaagccggtggccgagtaatttactgggatggtcctcgtgttctttgcgtgttagccatgtccagagcaaatggggataattat

SEQ ID NO: 209429 - DNA, 435 bp, Gossypium hirsutum
  unsure (1)..(435): unsure at all n locations
catttgatgaagaggaaaccgctcagtttggagctcaagttccaatgaaaagacctgggcagcccancgaggttgcaccatgctttgtgttccttgcatgtaaccactgctcctcctacatgactggccaaaccctccatccaaatggtggtaccgttgtgaatggttgatatgcgccatacagagtttactcaagcttctgcttttcgtttctttttatgtttatataaatacggtgtgggtgttttgagttttgctgcatgcaagagtggcaatagtaaacggtcttatctatttccaactgtatgtataactccaggcaaggcagtctcaaggatactaggaggagcctaagcccaactagtgcggtttgtgtaaaaaacaactatgaactttgggtcttttataagaagcaagaaagtataataatgggac

SEQ ID NO: 209430 - DNA, 327 bp, Gossypium hirsutum
cgcttttagcgattaccaatggatcgatgacactgtcggtctcatcctccattcatcccttctcgtcccgtacttttcttggaaatatagtcaccgtcgtcaccattccaacactggttcccttgaacgcgacgaagtatttgttccgaagaaacggagcagcattagatggtgggctaaatacctcaacaatccaccaggtcgtttcgtcacaatcaccattcagctcactctcggatggcctctttacttagcattcaatgtagcaggtagaccttacgaaggattcgcttgtcactacaacccatacggtcctatctacaacga

SEQ ID NO: 209431 - DNA, 279 bp, Gossypium hirsutum
gtaaaaatcaactttgttgaaggccttccattccaatatatgaagcaccagatcggaggacatgaaaagtaatttttcatacagttacgatttaatcgaaggtgggcctttgggggataagcttgaaaaaattagctatgagaacaagtttgaggcagctgcaggtggaggaagtatttgcaagagctcaatgaaattctacactgttggcgataatgttatcactgaagacgaaatcaaggctctcattaaagggagtgaaggagtttacaagcctgt

SEQ ID NO: 209432 - DNA, 354 bp, Gossypium hirsutum
gacattatcacaagatgatgtgcgagagctattttatagagagatattagagtaccatccacagatgcttcagcagcaccttaaaggcaaagatcagattagcttcatgtatccaagtggagttgatcggtataggcaacaatttgcttgtcttgagggacaaggcaaaattgaaagaggcattctgctccaaaggaaacatacatccttgccaagggagcgagtctgcaatgatgatactgatcgcattgatgaatcaaaaaaacgtacagtggcttctgctggtcgtgcaacccttcagagccctacaaagttgcaagcatccgtggaaccagaatatgttaaccaaaatgt

SEQ ID NO: 209433 - DNA, 362 bp, Gossypium hirsutum
caaaccttttacttctgaactctttcaaattcatcatgtctgacaagtgcggcaactgcgactgctctgacaagagccagtgcgtgaagaaaggaaatagctcggtcattgagactgaaaagagctacatcagcactgtagtggtcgaggctgtggcagacaacgatggcaagtgcaagtgtggagatagctgcagctgcacagactgctcatgtgggactcattaagcagacatagaaccatgatgttttagtccatagcaatattaagacctaaaaataatgaaattgagacgaataaaatggtgttttcgtgttgtactttgagacattgaatgcgttttcatgcctgtctgtcttatg

SEQ ID NO: 209434 - DNA, 271 bp, Gossypium hirsutum
accacgcgtgcgcccacgcgtgcgttaaaacaacagatactcttgaaccgaacgattgtttgcgagattctgcctgccaagaagttctatcgtgcagaggaatattaccagcagaaccttgccaaaggaggtcgattcgggtttaaacaatcggctgagaaagggtgcaatgatcctatccgatgctacggctaaaatcccaatactctatatgcaacttttagcttatgatagcttacagatttttgctttagccattcactagcatatt

SEQ ID NO: 209435 - DNA, 55 bp, Gossypium hirsutum
cccacgcgtccgcccacgcgtccgtccacgcgtccggactagttctagatcgcga

SEQ ID NO: 209436 - DNA, 385 bp, Gossypium hirsutum
cccacgcgtccgcccacgcgtccggttataatgttgctcttggaactgcaaggggaatcacataccttcatgaggagtgtagggactgcattgttcattgcgacataaagcctgagaacattctcttggatgaaaatttcaatgccaaagtgtcagatttcggacttgccaaacttataaatcccaaggaccatagataccgaacattgacaagtgttagggggacaaggggctatttggcacctgaatggcttgcaaaccttccaataacttcaaaatctgatgtttatagttatgggatggtcttgttggagatagtgagtggaagaaggaattttgatgtttcagcggacacaaataggaaaaagttctctgtgtgggctta

SEQ ID NO: 209437 - DNA, 262 bp, Gossypium hirsutum
tccggagcccgaaaactttagccaagatgctaggaacagtaatctgtgttggtggagccatttccatggcattgctcaaaggcccgaagttaataaacacacaactattaccaccaaagtctttgttcagcccaggaggagaaaattggttgctgggttgtctatttctgcttggaagcagctttttctggtcactttggatggtcttccaggtcccaatttctgaaagctgtccagaccacttgtattcatctacttggat

SEQ ID NO: 209438 - DNA, 336 bp, Gossypium hirsutum
gtctgggctttcaaaaagatgaaaatgcaaagggtaaagagaaagtcttttgaacaaccaacctgacataaggattctagctcgcccacttagagcagatggagattatcggacggggaaaagcggcactcgacatctattaaacaacaccaagaacaaagccataccatgccctcgggagaaagacgtgatgattgccatgaatgctgccttcgaggacgtgttgtacaagaaggtctttgccgattcctatcaacatggtgcacccctcagtagaggggcgtgaaaaggccgtggagactttgaccgaatgaatagggatcaattgatagacat

SEQ ID NO: 209439 - DNA, 412 bp, Gossypium hirsutum
  unsure (1)..(412): unsure at all n locations
agttaatatagagagttcatatcataaaatgtcgaaccatagatgaggctggaatttctaaaacaacatagtcataaggtaggcacggcacagcctccaagccatgaacaaaatatacgtaactagatcgctacacaactaataaaaggataaatcaacatcaactgttattcctatagtaaaatagtcctaccatacacgctgatgatgatctcctaattgtaggttgatgagaaccttaggactgctttggggagcatctaagcttgtgcccgttggttatggaattaagaaattgcaaattatgatgaccattgtggatgatttggtgtcagttgacactctcatcgaggaacatctgacggttgaaccaatcaatgagtnatgtcagaggtgtgacattgttgcattc

SEQ ID NO: 209440 - DNA, 393 bp, Gossypium hirsutum
  unsure (1)..(393): unsure at all n locations
agattgttgaatgttctttttctcttaagagagttagtttgaaagcaaatgggttttttgctagtgttaatcaagctggaatgggttttgccatctcaccaaaccctcaaattccactccagagtactgcaaagttccattttgccagtcttgtttcaatctctgagcccgggtatctggttttggatgatgaacttgagattgctgagaggttagtggagaagaagaagaagaagaagagtgggtttaagtttagaattaagattgggaatgcgtcattaaggaagttgatgagtggngcagtcgcaggtgcggtatcaaggactgcagtggctccattggagaccattaaaacgcatttgatggtgggaagttgtgggaattccatggctg

SEQ ID NO: 209441 - DNA, 264 bp, Gossypium hirsutum
aggggctaggagcaagcagacggccgtatagggttccaaacctatcttactaataataagaaaggggcaagccaaaacctactcctaacaagttgctggcttttcatccgttgcgcgctagcgcgcttctgttattcagaaagcttcttcaaatatcccaaaaaagtacgggttataactaacagtcgctagctggcgcgctagcgtttttccttactaggaaacgctcttgttgttgtagcgcgcagtgcactaatgaatagg

SEQ ID NO: 209442 - DNA, 426 bp, Gossypium hirsutum
ttttcatcttcttcgcccctcctctctagtttcatcgtaaagaaatatgcctaggtatgatgaccgacgcggtggcactcgtttgtatgttggtcatttgtcttcaaggacaagatcacgtgatctagaggacatgtttagcagatatgggagagtacgtgatgtggatatgaagcgtgactatgcatttgttgaattcagtgatcctagagatgccgatgatgcaagatatgcattgaatggtcgagacatggatggaagccggatgattgttgaatttgccaaaggagtgccccgtggttcatgtggatctcgagattaccctggaagaggccccactcctgggtcaggacgctgctttaacttgggaatagatggtcattgtgctcgtgattgcaagcccgggattggaagaaaagtgttacc

SEQ ID NO: 209443 - DNA, 281 bp, Gossypium hirsutum
  unsure (1)..(281): unsure at all n locations
cccacgcgtccgcccacgcgttcgggctgccagaaggatttcctctctgttatcttcttctgcaacttctttgggaaggttttcaagttggggaagaagaattaaaagctntagtactgctgctgctgctgcgaatgatgaacctatacttccattttttcaaatagatcatactcagcttctcatcaatggacaatttgttgatgctgcatcaggaaaaagcttccctacagttgatcctaggacaggtgatgtaattgctcgagttgcagaaggagatc

SEQ ID NO: 209444 - DNA, 400 bp, Gossypium hirsutum
cccacgcgtccggtatttcatactcatttagcccctttcattagcatcgaaatcactccagttttctttatcactgaaaaatgtcttgctgtggtggaaactgtggctgcggttctggctgcaagtgtggcagtggctgtggaggatgcaagatgtacccagacctgaacgttgccgagatgaccacaactgagactctggttcttggtgtagcaccccagaaagcacactttgagggagctgagatggaattcggggctgagaacggctgcaagtgtggagacaactgcacctgcaacccttgcaattgttaatgattagagaccaaagccaaagctccctggaagcagagacgcctttgtctttaagaaataaaaaggtttggttgttatgtggtttt

SEQ ID NO: 209445 - DNA, 421 bp, Gossypium hirsutum
gtttagtggtaacgagtggagtgcataagcccctttagagagaggggcgagcagcaagcagacccttgtatagggttccaaacctatcttactaataataagaaaggggcaagccaaaacctactcctaacaagttgctggcttttcagccgttgcgcgctagcgcgcttctgtttttcagcaggcttcttcaaatatcccaaaaaagtaggggttataactaaaagtagctagctagcgcgctagcgttttcccttactagtaaaggcgctgctagttgtagcgcgcagtgtactagtgaataggaaaagcggattgatattactaatgacagatggaggttgaggatagaacatgttcggtgcctcgtccttgtctccttcgccggagactcaaaatgataggaatcctatcgataaag

SEQ ID NO: 209446 - DNA, 391 bp, Gossypium hirsutum
cccacgcgtccggattccttgtgtggtcaacgtggtgagggcaatgagagtgaagcatctagacgtatcaaaaccgaacttctcgtgcagatgcagggtgtcggacatactgatcagaaagtcttagtgcttgcggcaacgaatactccctatgcactcgatcaggctattcgccggcgttttgataagcgtatttacattcctctcccagatttgaaggctcgacaacatatgttcaaagtgcatttaggtgatactcctcataacttgaccgaaagtgattttgagaacttagctcgccgaacagaggggttttcaggttcagacatatcagtttgtgttaaggatgttcttttcgaacccgttcgtaaaacccaggatgccatgtttt

SEQ ID NO: 209447 - DNA, 446 bp, Gossypium hirsutum
cttggaggctgggattggtcgagtcaaagccaatttgggaagccgggttaagaaagggcaaatgactcgagaaaagtttgagaaaaccatgtctctgctcaggggagttcttgactttgaaagctttcgggatgtggacatggtcatcgaggctgtaatcgagaatgtgtcattaaagcaacaaatttttgccgatcttgagaaatactgtccaccacattgcatacttgcaagtaacacttccactattgatttgaacttgattggtaaaaggaccaaatcccaggatcggattattggagctcatttctttagtccggctcatatcatgccgttattggaaattgttcgtactgagcatacatctccccaaataattgttgacttggttgatgttgggaagaaaataaagaagactccaatcatcgttggaaattgcacaggtt

SEQ ID NO: 209448 - DNA, 283 bp, Gossypium hirsutum
gcttcgaatcattcatagagacttgaaagccagtaacatcttgttggacgttgaaatgaatccgaagatttcggactttggcatggctaggatctttgggggaaaccaaaatgaagcgattacaattcgagtagttggcacatatggatatatgtcgcctgaatatgcaatggaaggattattttcagtgaagtccgatgtgtacagctttggggtattactgttagaaattgttagtggccggagaaatactagctttcgttcatctgattacacaagtctt

SEQ ID NO: 209449 - DNA, 367 bp, Gossypium hirsutum
gctggtgctcaggtgcttctgagccgattgagattgtttttgagtcctgggtatccatatgaggaaatattgagtacgtttcataatcaaaccagcataattatgtgctcattccttccggttttcactagctttaatagaacaaaaggaggtttgattcagttaaaccatggaaggcctcagccactgcaatacgtagtcaatgcagccttcttagccgccctatatagtgattatcttgatgctgctgatacacctggatggtattgtggtcccaatttctattcaactgatgtcctgcgtgaatttgccaaaacccagattgattatatcctttggcaaaaatcctcgaaaaatgagctatgtt

SEQ ID NO: 209450 - DNA, 387 bp, Gossypium hirsutum
gaataagttgaatggtatggaaacaagagttgaaaagaacttcgaagaacttgacaagttgtacgatgaagtaattgccgatcatgttgctccgacaagaactaaagctaaccatgaagacattgttgatgttcttcttcggttgcaaaaggatgcacgtcaacttatcactcttaacaatcagcaaatcaagggtgtcctcacggacatgttcatagcggggactgatacgacagcatcaagtctggtttggaccttcaccgaattgataagaaatccaccatcaatggagaaggtgaaatatgaggtacgaaaagttggcaatggaagagacaaaattgaagaaagtgacattcccaaactacattacttacactcagtcataaa

SEQ ID NO: 209451 - DNA, 342 bp, Gossypium hirsutum
cggtggtctataacaaaggcttgttgctgagtttcgaggacgagtcaggcaagtgttggtgtttccgttactcgtattggaatagtagccaaagctacgtgttgactaaaggatggagcagatacgttaaagagaagcaactcgatgcaggtgacattattttattccaacgacatcgtctcgatgctgagaggttgtttataggttggaggaggcgcggtgctgcactggatggcgggaacgccgagttgggaaataacagcggcggcgttcgcggtggtgacaatagttggtggagcagtaagagaggattgtatcaagggaatccttatcctgggcaca

SEQ ID NO: 209452 - DNA, 376 bp, Gossypium hirsutum
ccacgcgtccggatttagtttgttgcatgctggaaagcttattatgcctagaagaccaaggactcaattatgttgagtttcttgctgcaaaaggttggaattcaaacagagaagctagaaaatctgcgactttcaattgcaaaaggatctccaatgtgggagacacttgacttgtgcataaatgttgtagatggcaaatcattggagctgttggttccacgtcttgctaacttggttccatctggagttggcctcaatactatggttggtgttgccacctttatcaacttattatttcagaaagttgttgtgggtattaaaccctatatcaacatgctattgaggtcattgtttcctgttgtaaagaagagaaaag

SEQ ID NO: 209453 - DNA, 431 bp, Gossypium hirsutum
cagaaactgaagtatggaattcgggaaaatccacagttcttcaagttcttctgtcactccaggctcttgtgcttaatgagaagccatacttcaatgaggccggatatgataaacagttaggaagagccgagggggaaacaaactcggtgagctacaacgaaaatgctttcctcgtaacctgccagtctatgctttatatactccggcatccacccaagcattttgaggcacttgtcaaggagcactttagtagacgtgccaaaactattctctccgcttgcaatgcatacatggaaggagcacctgtaggatttgctcttgaatgtggcaaaaatgggcacaatgtaaatcttaaagaaaggtctactgggttcaaaatcatgctagccaaagcttttcccaaagctttggggatgcattttctgatcagg

SEQ ID NO: 209454 - DNA, 325 bp, Gossypium hirsutum
gttcactactgtgctgcgggatctaagccttggaggtacacagggaaggaggctaacatgcaaagagaagacattaagatgcttgttcagaaatggtgggacatttacaacgacgagtcacttgattaccgtaccagcgcggctgaaggagggacagagaccgtgaacctgcaaccgttcctggtggcactctctgaagttggtgcagtccatttcgtggccgccccatctgcggcgtaaatatgttgtgtaacgacgataaataccagttcataggtgtaaagaaatattgtaagaatcgagaaaggggcgatcctatgtggaa

SEQ ID NO: 209455 - DNA, 435 bp, Gossypium hirsutum
cggacgcgtgggcggacgcgtgggtttgcaggaaaaattgtagtcccaggctcattatcacggccgttatcggagctgtttttcgattttttgttggtgtttcctttccatctgtttccctttacaagattcgaaactttcctttaagcctcggaccgtcagttggtggagccacatctgaaagcaaacaattctatatggtcggatcttctgaatcatatcgagccaatatttataagatatatgatccaacaaatcctcatggtgcagaaacattaccaccagcaattgttgtaccagagaccgatctttacctgcgcagattatggggtgaacctagtcaggatctagagaagaaaccaaagtatctagtaacatttacagttggtattgatcagatgaataatactgataaatgtgtttaaaaagttttct

SEQ ID NO: 209456 - DNA, 367 bp, Gossypium hirsutum
  unsure (1)..(367): unsure at all n locations
cccaatcttaatctagcagctgtttgtctatctccagggtctgctggtgggcttgagggtccagaccgcatttttgtgggggggcttccatattactttactgaagcgcagatcagggagttgttagagtcttttggaccccttcgaggttttgatctagtaaaagatagagaaactggaaactcaaagggctatgccttctgcatatatcaagatctgtcagttacggacatcgcttgtgctgctttaaatggaattaaaatgggtgataaaactctcactgttaggcgagcaaaccaaggtgctacccactctaaacctgagcaagagagcatncttcagcatgcacagcatcagattgctttgc

SEQ ID NO: 209457 - DNA, 379 bp, Gossypium hirsutum
  unsure (1)..(379): unsure at all n locations
cccacgcgtccggcacgtttcacaacatccgatcaagaggtgcaagcactttgagattggtggagacaagaaggggaaaggaacatctctttttaaacgtgttattcatggtatcttgttatgtttgctttactttatatggagtagtttgaacttacaagactgtaatggaattttgttaaatttgcttagtttcttctgatgatgttttgcagttttctaactgttaccaaatgtttcactggcaattttgagttcaatttgttttnnaaaaaaaaaaannnattaaccntaaaataatttattttttttcttattatattatattctttttatttctttttttatttctttactatcatttttttttttaaatttt

SEQ ID NO: 209458 - DNA, 430 bp, Gossypium hirsutum
cccacgcgtccgaccatatgagaagaggattactgagcttctgaaagttggtaaggacaaacgagcgctcaaggtttctaaaagaaagttgggaactcacaaaagggcaaagaagaagcgtgaggacatgtctagtgtgctccgcaagatgagggctcaccctggaggtggagaaaagaagaagtgaagctctctggtgacaagtcaccttgatgatttcattagagaactttgtttagcatatgttttaacgtattggtttgagactgaaaactatgcactgaatctcgtttgtttaattttataatgtatgctaaatttttgtgtttagttgcatgtccttgacatgttgggtattgccttgttttcttagccgtatggatttggaagttcatcattgagtcaagagagcatctttcgtcgtttattt

SEQ ID NO: 209459 - DNA, 365 bp, Gossypium hirsutum
atcatgagaacggaaaatctagagaaggaagttgcaagctctttggtattcctctcattagtaattctgttgcatcagagcccaccgtctctcctattaatgccacgaacaaggcagcaagtcatgtggaacctgcacctaaccaaggtcgtacatttacgtttgatcaaaagtccgagcagccaaaattctcaccgttggcagagaatctgtctatttttaatgagcaggagaaatcgtttcagctgggtcagcctcatacaagagaggttcaaagcaaatctcctagtgcttcaactaggagttgtacaaaggtcctaatgcaagggagtgctcttggtaggtccgtggaccttactaagttc

SEQ ID NO: 209460 - DNA, 282 bp, Gossypium hirsutum
aggcatttgattaactgacatacatcagatattgctttatgaaggggccactccagactggcgtggtggtcattgtgacctgtccacctatcctctacggatggcgttatacaagttaaagatctagctaatcctacaaacccatacatagaattggggcctgaattcaagaatgtagggctcctgttatatagattcaagtaaaaaccgagcatcattgagcttgatagccttaaggcgactggagatgttcggttatggtgctggcattgtgctcaaggg

SEQ ID NO: 209461 - DNA, 354 bp, Gossypium hirsutum
gatgaagccagaagatgttgggcttagcaaaagtctgcagttcttcaagccaacgggtgctgtgaatgggactccaagggtcacttatactaccatttaccaatgtgaccagttctcgttgtgcattttctttcttccggaaacggctgttattcctctccataaccatccagagatgactgttttcagcaagcttttactggggaaaatgcatataaaatcatatgattgggtcgagcctaaagactcaataccaccctccaaattgaggttggcaaggttgaaagccaatagcgtgtacacgggcccatgcaacaccttggtgttgtatcctacaacaggaggcaatatgca

SEQ ID NO: 209462 - DNA, 260 bp, Gossypium hirsutum
tgagttttgaatctagggatttgcgggtggagaagacgagagctcatctctctgcttcaaagctcctgtccaggtagaattctcttcttcctttgcgttgtgttctttgttgttcagtcgccatggcttcaaagcggattttgaaggaactcaaggatttgcagaaagatccacccacttcttgcagtgctggtccagtagctgaagacatgtttcattggcaagcaacaatcatgggaccctcagatagcccttatgct

SEQ ID NO: 209463 - DNA, 335 bp, Gossypium hirsutum
tctaggtaccatactggcctaaagccccagaagctcatgacgaaggatgccgttatgcaggcagctaaacaggctaaagaggctggtagtacacgcttttgcatgggtgcagcatggagagacacagtccgaaggaaaactaacttcaaccaaattcttgaatatgtaaaagaaattagggatatggggatggaggtgtgttgcactttgggcatgctggagaagcagcaagcacttgaacttaagaaggcaggtcttacagcttacaaccataatctcgatccttcaaaagaatattatccccaacattattacaacaaagaacctatgatgag

SEQ ID NO: 209464 - DNA, 218 bp, Gossypium hirsutum
tctaggtaccatactggcctaaagccccagaagctcatgacgaaagatgccgttatgcagggggctaaacacgctaaaaaggctgttaccccacgcttttgcatgggtgcagcaaggagagacacatttcgaaggaaaactaacttcaaccaaattcttgaatatgtaaaagaaattatggatattggggatggaggtgtgttttacttttggcatgc

SEQ ID NO: 209465 - DNA, 394 bp, Gossypium hirsutum
  unsure (1)..(394): unsure at all n locations
cgctatcactgctgctctgttcttaaaacagtttgttgatgaaaaagtacagtggatgcacatcgacttggctggccccgtctggaatgataagaagcgggtagcaacaggatttggcattgcgactttggtggaatgggttctgaaaaactcatcttaatgaaaagcttggagcatgctgtagtagtgacaaggaagatggaggaggaaacaggagaataaaacttttcccaagttgttggtctttgagatatgtttgatgaacaaaaatttatgttgtgattaagggaaaaaaggggagtgagatagttttgtttttgaggttgttgcanaaagtgagattataaaactattccatgctctttttattgtttaaaaaaaaaaagccccttta

SEQ ID NO: 209466 - DNA, 455 bp, Gossypium hirsutum
gagagggggagaggacaggaagaaaagaatatggtgggggcttcgtctttgcaaccaagactcctctcttcttttgttggtgatcgtttagttcaatcgagacaaccacttgctcagctatttcattacaacccaggtcgtaagcatgtatcaatgcaattatccagaacgttttctggcttaaccaatcttttatttaatagaaggaacaatttggacgaagttccagatggcaagcgcaaacgtctgagacctgggaagttatctcctcgtcgacctgttccaaatcatataaaaaggccaccttatgtcaaaactcgtatggcacctggaattgctagtggccctgaagtgcatgatctaaagggcatagaacacatgagagcttctggaaggcttgcagctcaggttctcaattatgctgggaccttagtgaagccaggcataacaactga

SEQ ID NO: 209467 - DNA, 436 bp, Gossypium hirsutum
gccggacatggggaaaccggatcggggtggtgggcttgatttatgcggggctggagagtggagtcgtggcggtgactgatcgtgatgatgtctggagcagcgtggctgcgggtctggccaccggagcggtttgtcgtgcggcgagaggtgtgaggtccgcggcggtggcgggtgctctgggtgggttggcggcgggagcagtggtcgctgggaagcaagttttgaagagatacgtgcccatttgaaaaaagagatgattttgcaataagttgaggccagcgggttatttaaaggatggaaaggagaagtgattgtatattcaccagagttatgttccgttgttgtttctgactctggggttttgttcttttctttaaagattgggaactttagtgacaccccccaaaaatttaaggataaggtgctagattttatt

SEQ ID NO: 209468 - DNA, 390 bp, Gossypium hirsutum
caaaagtcgttattgatgctaatactggtcgatcaaaaggttatggttttgtgaggtttggggatgagactgaaaggtcacaagccatgaatgaaatgaatggtgcatattgttcaagcaggccgatgcgcattggtgccgcgactccgaggaaatcctcagggtatcagcaacaatattctttgcaaggtgggtatgcatcaaatggtaactcaactcaatctgatggagattcttcaaacacaaccatatttgttggagggcttgacccaaacgtcactgagggagatctccgccaacctttctctcagtatggtgaaatagtctctgttaaaatacctgttggaaaaggatgtgggtttgtacaatatgccaagaggaataatgctg

SEQ ID NO: 209469 - DNA, 412 bp, Gossypium hirsutum
gcgggggttggtggcggctgtacaatttgaatttagatcggcaatctaatggctgaggacaagtataacctcaagaatgcggcggtgaagaggatcttacaagacgttaaggaattgcaatccaatccttccgatgatttcatgagcctaccactcgaggagaatatatttgaatggcaattcgcaattaggggttcaagggattctgaatttgaaggagggatttatcatggaaggattcaattgcctgctgaggatccatttaagcccccttcatttatgttgctcaccccaaatggacgttttgaaaagcaaactaatatttgcttgagtatattgaatcaccacccggagcattggcaaccatcttggacagtgcggactgctctagtggcattgattgcattcatgc

SEQ ID NO: 209470 - DNA, 344 bp, Gossypium hirsutum
cccacgcgtccgggaggttgtccatatgctaagggtgcttcaggaaatgttgccaccgaggatgtggtttacatgctcaatgggcttgggatagagacaaatgtccatctcgaaaaactcttggtggccggagattttatatgcaagcatttgaggcggccacctagttcgaagacagcacttgcgttgagcaatatgaaggctaactccaagctttaaggtacaaaccataaaatacttgtcatgctgtaaaaggccaagatatgcatctaatccttatacttcagtaaaattcgaaatttaatccttgtacttaaaatattaaaaattaacatttacttata

SEQ ID NO: 209471 - DNA, 249 bp, Gossypium hirsutum
gggacgagccacgcggacgcccacgcgttcgatgcattcaagagtaacccttttgatgaagatgccttgagagcaatacagctttggtatgatgcatcactttgttatagaggctacactcctgacaatccagcacagcttagtggtaagatatatgacatgatgggaatggctcttgttggttaatggtcaaacgtttacagttatcattcattagcacagccgccccaaacagaaacattggaagct

SEQ ID NO: 209472 - DNA, 420 bp, Gossypium hirsutum
tagtaaaaattataacagattacagaaccgaaacttcgcttagacatgggtgcaatgatattctcaaggctgattgtgttgatctgttggttaaatactacaaagaagcgagacgtgcagtttacttgagcaatgaagaagacgatactcgatccaagagggatgcaagtggagcctctttaccaatagagaaaacatctagcgtgagaaacatggtggttaagtctaaaactagagggggtggaagatgttgtttgtgtttcgatcctttctcgatacaaaatgtatcggtcattgtgttcttttgttgtcatgcttatcacactacttgcttgacggactctactgacagtaatagcaacaaaaaagggaccggaccgacttcacaagagccatacggttatgacaatgatgatgatg

SEQ ID NO: 209473 - DNA, 312 bp, Gossypium hirsutum
ctttgatctcaaaggcaataggacggtaaaggttttttctggtagaaaactggattacgaacccaaacattgtgagaagcagaagaacgaaggtgactttatgactgctgttgaattttctgttgaacatccatacggaaaagctgttgcattgcttaacttgaaatctagatgcttgaaggcaaaggagggatggtttgttttgcccggattggtatcgatgtttatactttctcacattttgaagaaagaaggacgctttggcttcacttttgatggcaaaagtacgaaagagatagatggtgcaacacg

SEQ ID NO: 209474 - DNA, 377 bp, Gossypium hirsutum
cccacgcgtccgggagatggttaaagtggtaaaggcaaggagaaattttgtgcttgtaaggaagaattcgaaacaagcacattatgattgatcttggcatcgataataataagattaactgggctctcaaggacaaacaggagttcagagacatcattgggactgtataccgtgaggcatggaaaggccgtggtttgaaagattactcgaaaaagtactgctattgagtattcttccaacatttagttgatcagaatgtaaattgtatgtagatatgtgtgtcatttgcaatgtttggttgcatgaatgtggaggataatccaatttgagatgaaactttgaaatatatattttatgtgctcttttgatgcttgttt

SEQ ID NO: 209475 - DNA, 423 bp, Gossypium hirsutum
accacgcgtacggaaaaaagtgaggatcaagctatgatggaaaacatgggagttctggggaaggtggaggatgaccttttatagttatcattcttcagcatcacattaacagatcagttggacatccgcgagaccatacttccccaagcctacaatgacttctatcacgtatataccacgttaacccaagattattagatgcttgagcaacctgctcttttgaaggcacttatgacattggaacttgcataccaactacctcttgcttagcttaacatctatggcgaggtatactctaagcactggttcagcaccacctgcctgctatttgacgcctatatacatgcctctacgacagctatggtgcttggcattctcaattcccagaaggcatcagccaatttgatgggcatgggtgatcca

SEQ ID NO: 209476 - DNA, 448 bp, Gossypium hirsutum
tcaacattcccatttccaatctccagctcccaaggtaaatatgccgatcagaaacatagcggttggccggcccgaagaggctactcaccccgatgctctcaaggctgctttggctgagttcatctcaaccttgatcttcgttttcgctggatcgggctcaggaatggcctttaacaagttgactgacaacggagcaaccaccccggctggtctcgtagccgccgctctagctcatggcttcggtcttttcgtcgctgtctccgttggcgccaacatctcaggtggccacgtcaaccctgccgtcaccttcggtgcttttgttggcgggaacatcactctcttgcgcggcattctttactggatcgcccaacttctaggctcaaccgtcgcttgcctgttgcttaagttcgctaccggcgacctggctgtacccgcttttgggttgtca

SEQ ID NO: 209477 - DNA, 274 bp, Gossypium hirsutum
gcgagacaacctgatggagaggactaccaacttggtctgtgaccagggccctactttatttgagggtctggaccacatcaatgagcccaagaggacttcagacaagcctgtacgacttccactttaggatgcgtacattattgttggtattggaacttatccaggtggtcctgatgaaacccatgccttgacatctgtgatcgatagaacatttgaaacttatggtctaactacctggagtgacctaattcaaagtcaccatggaactcttaca

SEQ ID NO: 209478 - DNA, 455 bp, Gossypium hirsutum
ctggataccacgatcaggatgttttcaatattatattgtttgatcctttaatctcagatatgggggtaaagattaaatttttggatactgcttatattggtggtctttgtgaacctattaaagatttgaatttagtatgcacaatgcatgcaaattgctgttatggtatggatagcaagctttatgatctcaaaattatgcttcaagattggagagctttcacgtcattgtcaccagatctgaagaatgaatctgttatcttctggagggtttctcagaaactggaggcttcaatcgttacgctattttgattcaacatttccagagattaatgtcgaacgagaggaaaaaaattgattggaattggacatatgtttatattattaaccggcacaagaaccttgagaggggtaagcttcgtttttcttcgggtgttgggatcctttttatttacg

SEQ ID NO: 209479 - DNA, 453 bp, Gossypium hirsutum
  unsure (1)..(453): unsure at all n locations
ctggataccacgatcaggatgttttcaataagatcaagtttgatcctttaatctcagatatcggattaaagattaaatttttggatactgcttattttggtggtctttgtgaacctagtaaagatttgaatttagtatgcacaatgcatgcaaattgctgttatggtatggatagcaagcttcatgatctcaaaattatgcttcaagattggagagctttcacgtcattgccaccagatctgaagaatgaatctgttatctcctggagggttcctcagaactgcagtctccattcgttacgccattttgattcaccatctccagagataaatgttgaacgagaggaagaaaattgattggaattgtacatatgtttatattattaactgtcacaagaccttgagagggtaagctttcgttttccttcggnttttgtgatccttctcatttacg

SEQ ID NO: 209480 - DNA, 353 bp, Gossypium hirsutum
cttgcagtacaggtgatgctatggggatgaacatggtttccaagggagtgcaaaatgttttggatttccttcagactgatttccctgacatggatgtcattggcatctctggaaactattgttccgacaaaaaaccggctgcggtaaattggattgaaggacgaggcaaatctgttgtctgtgaagccaccattaatggtgatgtggttaggaaggtcttgaagacaagcgtggaatctctcgttgagcttaacatgctgaagaaccttactggatcagctatggctggagctctgggtggatttaacgctcacgccagcaacatcgatgctgcgatctacatagctaccggc

SEQ ID NO: 209481 - DNA, 349 bp, Gossypium hirsutum
cttgactctccctctatgctttggggatgattttacatgtcaaggggaaggaaatagtaaagagttgccttaaagcagaattgccgcacacggcgttcattgagatcaccttgttactatagtgccaacatatagccttgtggggtgagttggaattagtgactacgtacccactgatgactttacaatacaaaataaagatggtttgtataggcgcgtgttgaatacaaccgtggaatatctcgatgagctgaacatgcttaagaaccttactggatcagctatggctggggctctcggtctatataacgctgactccagtcacatcgctgctgccatatacatattt

SEQ ID NO: 209482 - DNA, 288 bp, Gossypium hirsutum
gcgtacaaaaaataaggacgtcttcaatattttatgtttgatcctttaatctcagatatgggattaaagattaaatttttggatactgcttattttggtggtctttgtgaacctagtaaaaaattagaatggagtgtgctcaatgcatgccaaatgttggtatggtgtggatggcaagcttcatgatcttaaaattatgcttcaagaatggagagcgtctacgttattgacaccagatctggagaaagacattgggatctcctgtaaggtggcttagaactgaagtct

SEQ ID NO: 209483 - DNA, 386 bp, Gossypium hirsutum
cgttgcagtacaggtgatgctatggggatgaacttggtttccaagggagtgcaaaatgttttggaggtgcttcagactgatttgcctgacatggatgtcattggcatctctggaaactattgttccgacaaaaaaccggctgcggtaaattggattgaaggacgaggcaaatctgttgtctgtgaagccaccattaagggtgatgtggttaggaaggtcttgaagacaagtgtggaatctctcgttgagcttaacatgctgaagaaccttactggatcagctatggctggagctctgggtggatttaacgctcacgccaggaacatcgttgctgcaatctacatagctaccgggcaaaaaccggctcaaaaacgtcagagcttgca

SEQ ID NO: 209484 - DNA, 449 bp, Gossypium hirsutum
cccacgcgtccgcccacgcgtccggaaggagctcaaggatctccagaaagatcctcctacctcttgcagcgctggccctgttgctgaagacatgtttcattggcaagcaactattatgggtcctccagatagcccgtatgccggtggggtgtttctagtcaccattcatttccctccggattatccatttaaaccacccaaggttgcattcaggacaaaggtatttcaccctaatattaacagcaacggtagcatttgccttgatattttaaaggaacagtggagccctgccctcaccatatccaaggtgttgctgtcaatctgctcactcctgacggatccaaatcctgatgaccctttggtgccggagattgcccacatgtacaagacggataggaacaagtatgagacaaccgctcggagctggacccaaaaatatgctatgggtt

SEQ ID NO: 209485 - DNA, 323 bp, Gossypium hirsutum
aatggacgatatggttacacttttaggtggccatacagttggtgtggcacattgcttttttttctcgggtcggcttactaatttccaagggacagggaaacccgacccaagtatggatgcgggtttggtaactacgctgaaagggatttgtggtaatggatcgaaccctaaggcgtttctggaccagggcacgtcttttagttttgataatgagttttataggcagattcgggcgaagaaaggggtgatgaagatagatcaagagttggctgatgatagattatcgagtggaatcgtatcgagatttgcttcaaatgcgaatt

SEQ ID NO: 209486 - DNA, 345 bp, Gossypium hirsutum
accacgcgtccggccacgcgtgcggaaggagctcaaggatctccagaaagatcctcctaccggttgcaacgctggccctgatgctgaagacaagtctcagaggcaagcaactatcaagggtcctacaaaaagcccgtatgccggcggggtggttctaggcaccattcacatccctccggattatccatttaaaccacccaaggtggcattcaggacaaaggaaactcaccctaaaattaacagcaacgggagcattcgccatgatattttaaaggaacagaggagccctgccctcaccatatgcaaggagatgctggcaaactgctcactcctgacggatccaaa

SEQ ID NO: 209487 - DNA, 450 bp, Gossypium hirsutum
tgatagtccaaatacaggatcatccacaattgtagagggggatgttaggctagagaacaaggctggatatatttcttgtgatcaagttgaaccttcaagaagtgatcaagaaacaaacaagcccattgataagacacagagacgtctggcacaaaatcgagaagctgctcgtaaaagtcgtctacggaaaaaggcctatgttcaacaattagaatcaagtcgtttgcaactagctcaactggaacaagagctcgaaagaactaggcagcagggtatatacataagcagtccatcagatactggttattttggactgcctggaaccgtaaactcagggattactgcatttgagatggaatatggacactgggttgaggtgcaaaataaacagacttgtgaacttagaagtgcactccaggcacatatcactgatatagagctacaaatact

SEQ ID NO: 209488 - DNA, 413 bp, Gossypium hirsutum
  unsure (1)..(413): unsure at all n locations
aaatgtttgcccacaaaccgcaccatgtgcaccatacttgttatgacaagattcaaggatgcgatttacatgaaggtgaatgggggaaagtcggtaccattgtccattggagttatgtgcatgatggaaaggctaaaaaggcaaaggaagtagtggaagcagtagaccctgataagaatttggtcactttcagagtgatcgaaggagatctaatggaagagtataagagctttgtaatcacgattcaagtttcgcccaagagcgagggtagtggcagcgtantgcactggactttggaatacgagaagctgcacggtgggattgcgcatcctgagactctgctgcaattcgttcaagatatctctaaagacattgacgcccacctcacccaagcaagctaaacagtatcacat

SEQ ID NO: 209489 - DNA, 459 bp, Gossypium hirsutum
atctccctattctcaatggcaatggcaaccctagccttcctcttcactccatcaaccctctgcaccccaaaatccggcgaccgcatcgccgccgtgttacggaaacaaccaccgttcctaaccgtccctagcttcaagtccccaaaaagcatcatcgccccacgcaccatcaaagcccaagcaaccgaagagaaagccgagacaaccgccacaaaggaagcaccagtcggtttcaccccaccagagctggacccaaacaccccatcaccgatcttcggcggcagcaccggcgggcttttacgcaaagcacaattggaagagttttacgtcatcacatgggagtcacccaaggaacaaatcttcgagatgccaacaggtggtgcagccatcatgagacaaggtccgaacctgctgaaattggctcgtaaagagcagagcttggctcttgggactaggctt

SEQ ID NO: 209490 - DNA, 403 bp, Gossypium hirsutum
gtttggcggtctgggcgctggtggccttggtgtccccaaccaacccgatgttccccctgaagaactttacgctccacaattatcacaactccaagaaatgggtttctacgatacacaagagaatatcagagcattacgagctactgccggaaacgtccatgctgcagtcgagagacttctgggaaattccgggcagtagtaactccttgaaatttcatgttcttttttttttcttttttaaatttgaccaagaaaaactgtctcatgtaagattagttgatttgggttggtgccttagcaaaccacagatttatgttgcatatacattgttgattccttgtttttgccgcgtttaataagcaagtaaacacgataaatatatatacccgagaacttgttggtt

SEQ ID NO: 209491 - DNA, 447 bp, Gossypium hirsutum
cccacgcgtccgcggacgcgtggggacaaactggcgtagaccaaagggtattgattctcgtgtcagaagaaagttcaagggatgtactttgatgcccaatattggctatggttcagacaagaagacccgacactatcttccaaatggctttaagaaatttgtcgtgcacaatgtcggagagcttgaactgttaatgatgcacaacaggacatattgtgccgagattgcccatgatgtttcaacaaagaagagaaaggagattgtggaacgggcagcccagcttgatgttgtcgttatgaacaagcttgctaggctgcgcagccaagaagatgaatgagattaagcttgtctcttatgtttatctttgagccttgtttgcgtttcttataaattttggtaattttgttgctttagatgtggcgataacattctcaaccgggatttgtt

SEQ ID NO: 209492 - DNA, 397 bp, Gossypium hirsutum
  unsure (1)..(397): unsure at all n locations
cccacgcgtncgcggacgcgtggggacaaactggcgtagaccaaagggtattgattctcgtgtgagaagaaagttcaagggatgtactttgatgcccaatattggctatggttcagacaagaagacccgacactatcttccaaatggctttaagaaatttgtcgtgcacaatgtcggagagcttgaactgttaatgatgcacaacaggacatattgtgccgagattgcccatgatgtttcaacaaagaagagaaaggagattgtggaacgggcagcccagcttgatgttgtcgttatgaacaagcttgctaggctgcgcagccaataagatgaatgagaataagcttggctcttatgtatatctttgagctttgtttgccgttcttataaaattttg

SEQ ID NO: 209493 - DNA, 448 bp, Gossypium hirsutum
cccacgcgtccgcggacgcgtggggacaaactggcgtagaccaaagggtattgattctcgtgtgagaagaaagttcaagggatgtactctgatgcccaatattggctatggttcagacaagaagacccgacactatcttccaaatggctttaagaaatttgtcgtgcacaatgtcagagagcttgaactgttaatgatgcacaacaggacatattgtgccgagattgcccatgatgtttcaacaaagaagagaaaggagattgtggaacgggcagcccagcttgatgttgtcgttatgaacaagcttgctaggctgcgcagccaagaagatgaatgagattaagcttgtcttttatgtttatctttgagctttggttgcgtttcttataaatttttggtaattttgtcgctttagatgtggcgataacattctcaaccgggattttgt

SEQ ID NO: 209494 - DNA, 434 bp, Gossypium hirsutum
  unsure (1)..(434): unsure at all n locations
ggacatccccgatggggttagcattaaggtcaaggctaaggtgatcgaggttgaaggtccaaggggtaagcttacccgcaacttcaagcacctcaaccttgatttccatctcatcaaggacgaagagaccggcaagcgtaagctcaggatcgaggcttggtttggctccaggaagaccagcgccgccatccgtacagctcttagccacgttgagaacctcatcaccggtgtcactaaaggataccgttacaagatgaggttcgtctacgctcactttccgattaacgcctccatcactaatggcaacaagtcgatcgagatccgtaactttctttggcgagaagaaagtccgtaaggtggataatgtggaaggtgttttncattgttcgatccgagaagggtaaggatgagattgttttggatggtatgacatc

SEQ ID NO: 209495 - DNA, 396 bp, Gossypium hirsutum
caatggcgggatcgatagcgaaaccgactacccctacactggtgtggatggcacatgtaacaccaccaaggaggaaaccaaggttgtatctattgatggctatcaagatgtagagcaatcagatagtgctcttttatgtgccgttgctcagcaacctgttagtgtgggaattgatggttccgccattgattttcaactttacactggtggaatttatgatgggagctgctcggatgatccagatgacattgatcatgctgttttaatagttggttatggttcagaaggcagtgaagagtattggatagtgaagaattcatggggaacaagttgggggatagatggatatttctatctaaaaagagacactgatttaccagtgcacccaccaacata

SEQ ID NO: 209496 - DNA, 334 bp, Gossypium hirsutum
cccacgcgtccggctgcttgctacaaggctctaaatttccaccatgtcatgcttgagggtactcttttgaagcctaacatggtgacccttggttcggactcccctaaggttgccccagatgttattgctgagtatactgttcgtgccttgcaacgaaccgtccctgctgcagtcccagctattgtattcttgtcaggtgggcaaagtgaggaggaggctactcttaaccttaatgccatgaacaagctccagaccaagaaaccatggtcactctcattctcatttggacgtgcccttcagcagagcactctcaagacctgggccggtaaagagg

SEQ ID NO: 209497 - DNA, 359 bp, Gossypium hirsutum
gattgatccaggtgatgaggtgatcctctttgctccattttatgattcttatgaagcgacattatccatggctggtgccaaagtaaaatgcatcacattgcgccctccggattttgctgttcctattgatgagcttaagtcaactatctcaaagaacactcgtgccattcttataaacactccacataatccaacggggaagatgtttactcgtgaggaacttaatacaattgcatcgctatgcattgagaatgatgttttggtttttactgatgaagtttatgataaattatcattcgaaaatcacatttcaatggcatcccttcctggaatgtatgagcgaacggtaactatgaact

SEQ ID NO: 209498 - DNA, 455 bp, Gossypium hirsutum
ctacacccaaattgtttggaagaatacccgacgaattggctgcgctcgagtggtttgcgacactggagatgtgttcatgacttgcaattatgatccgccgggtaattatattggcgaaaggccatattgatatggttcaatattccaattctaaggggtacttcactatacttgttcaatattttcgaaaatttgttctcacgatgctatctcactacttcattaaagctaacaagttttccgaaaactagtgaacaagtatattaaggtactcaatagaaatatatatatatatatgaatttgatgtgaacattatagtaatgttgttaatatgtatgccatttgagtgtcgacatagctatatcatataggaggtaaggagtgcaggctaaattctgaactcgtcatctctatccatgagacgtgatgtgatggttactcatttcgtccctaa

SEQ ID NO: 209499 - DNA, 373 bp, Gossypium hirsutum
tcgctacacccaaattgtttggaagaatacccgacgaattgtctgcgctcgagtggtttgcgacactggagatgtgttcatgacttgcaattatgatccgccgggtaattatattggcgaaaggccatattgatatggttcaatattccaattctaaggggtacttcactatacttgttcaatattttcgaaaatttgttctcacgatgctatctcactacttcattaaagctaacaagttttccgaaaactagtgaacaagtatattaaggtactcaatagaaatatatatatatatatgaatttgatgtgaacattataataatgttgttaatatgtatgccatttgagtgtcgacatatctattttatat

SEQ ID NO: 209500 - DNA, 155 bp, Gossypium hirsutum
atttttatcctgtgcggttggcaaatgtgcaatgaattgggggtcgatggcggacctgcagcataggaggcgataccaaagcgtgatcttgctaagaaacatatatcatctaaactgcatggaaagttgccagagatcgaagttagacaatcagt

SEQ ID NO: 209501 - DNA, 293 bp, Gossypium hirsutum
ttctggccttgcagttggaatgcgagttacgaaagtttactcggaaacaacaaaccattccctcaacctatgcctctccctgaaatgatcgattttctggtcgacatctgggaacaggaaggattatatgactgagcatacagtacagcatagcacattcgggaaaaaaaaaaaaagggggttagatattaatacccttattgttgaaacattttactagcttcattatgaaaaaggcattagagcattttaaactggtatgtattgttaccggaacggtctttggtcttgtt

SEQ ID NO: 209502 - DNA, 254 bp, Gossypium hirsutum
cccacgcgtccggtggtgccagtgggtgcagtttattttggatataggtatgtggttgataagtacaactttctgtttgtgtatagagtccggggatttcctgctggcaatgatggaaggctgatggatactgtgttgagtatcatgcggttctgcctcgacttgttcctcatctcgatgcttttgttcttctcagtcaaaggagactcctcaaagctgtaagccatatttactcttgggtttgctagtaattt

SEQ ID NO: 209503 - DNA, 300 bp, Gossypium hirsutum
cccacgcgtccggcctcatcatgggctatatctgtgtaccatgcctaccaacgtacatggaaaccttttaatcctattattggggaaacatatgagatggttaatcatggagggattacattcatttctgaacaggtcagtcatcatcctccaatgagtgctgggcatgctgaaaatgaacattttacttatgatgtcacatcaaagttaaagacaaaatttttaggaaattctcttgatgtttatcctgctggaagaacacgtgttactcttaaaaaaaatgggggtcggtttaaattt

SEQ ID NO: 209504 - DNA, 212 bp, Gossypium hirsutum
gtcgcgcgaggccaaagcattaacgaaagctatcacaaaaccctagtgtctaactacttgtttggtttgcctaagccatgtcgaggagaaaggctagagagcccaaggaggagaatactaacctacgacctgctgttcgagagggcgagcatgtttttggggtggctcacatctttgcttcatttaatgacacattcattcatgtgactgat

SEQ ID NO: 209505 - DNA, 246 bp, Gossypium hirsutum
gttctcacttaacccgtttgcctccggcatcttccctcatggcttcggagaaagaagctgcccttgctgctgcaccctctgattctcctaccatatttgacaaaatcatcaactaggaaatcccagctaccgtggtgtatgaagatgataaggtcttagcttttatggacatagcttcccaggctcctacgcacattttaattattccaaaatcaaaggatggcctaactggtttgtctaatgctg

SEQ ID NO: 209506 - DNA, 285 bp, Gossypium hirsutum
tcgcccactcgttcgcccacgcgtacggtaccacgtacacacccttggaccgaaccaatgttgttccgcggtgtgtcaacttatcgaagcctcaatcgagacggcttggtccttggttcgcagattcgataacccttaagcttacaaaaattttctcaagagttgccacgttatagtcggggactgtgacgtgggaaccctccgcaaagtccacgtgatatccggccttcccgccgtttttatcacagagaggcttgagatccttgatgaagaacgtcacgtgct

SEQ ID NO: 209507 - DNA, 250 bp, Gossypium hirsutum
cccacgcgtccgcccacgcgtccgctcaatgagactgaaacacaggacccttgcttgctctgctgatgttatcaacccacgaggtggtcgcatcaccacagttaacagtatcaatcatcccattctccaataccttcaacttagcgcctagaggggagtcctttacaatatatgctatctactctcctcactggaacatgaatgctcacagcattgtttacttacaaggggaaatggaaggattcaaatt

SEQ ID NO: 209508 - DNA, 272 bp, Gossypium hirsutum
gggaaccctataagaaggggaaatgccatgaataaagggaccctctgattattcacatgaacccccacgccatccttctcttcaaatcaactccaaggtgccctttaatgccgagccgccgcgttctgctttagcttcctcttatgtgactcctgttgatttgttctacaagagaaatcatggaccaatccccgtagtcgatgacatataaagatattgtgttgatatatgcggtttaattggaactccaaaaaagctgtatatgatagatg

SEQ ID NO: 209509 - DNA, 313 bp, Gossypium hirsutum
gttgcagcactcttcattttgtctaaaaaagaaaaatgccaggcctcaccattggagacacagtgcccaaccttgaagttgaaaccacccacgggacattcaagcttcatgactacttcaacaatgggtggaccatcattttctctcattcttctgatttcacgcctgtgtgtacgacggaactggtgaagatggcggcttacctgccggagtttgaaaaacgaggggttaagcttctaagtttctcttgcgatgatgtgcagtcacacaaggagtggatcaaagatggtgaaacctacacgcctgggtgcaa

SEQ ID NO: 209510 - DNA, 278 bp, Gossypium hirsutum
tcgcccacgcgtccgactgaatgaaccgtgacctaacggctcacttttactgtgtctacgatggacatggagggtgtcaggttgcgaactattgtcgagaacgtatgcatttggctttagccgaggagtatagaaagggcgaaatcatgtattcgcgagggaaatatcaagcacgattggcaggagctatggaagaaagcgttctccatttgtttcatcaaaggcgatgctgatatcggaggagtttgtaacggtgtgaatgattcctataacaaacc

SEQ ID NO: 209511 - DNA, 385 bp, Gossypium hirsutum
cgagaatcagattacggggttaattcccagatgctttgggtacttgaaatctcttgtttttcttgacctaagcagaaacaagtttagaggtccggttcctgaagggctccatcagttgaagtacctcaaacatctctccttggcaagcaacaacctgactggttctattccttctagctttgcacagcttcgttcccttgaagtgttggacctttcatcaaattcgctatctggtgagattccacatggtcttcttgatctgagaaacctaacttctcttcagctcaataataataaattctcaggggaaattccttctggtttctcgaacttgaagtctctttctatgcttgaagtattattcaacgacctgtctggaacatta

SEQ ID NO: 209512 - DNA, 404 bp, Gossypium hirsutum
cccacgcgtccgcccacgcgtccgaccacctgtgctatatccaccacccccggcacagcaaacatgccccattgacactctcaagctaggcgcatgtgttgatgtgttaggtggcttagtgcacattggtatcggcagcagcgccaaggacacatgttgcccagtgcttcaagggttgctagacttggatgctgctatctgtctttgtaccacaatcaaggccaagcttttaaacatcaatattataataccaattggccttcaggtcctcatcgactgtggcaagactccacctccaggattccagtgtccagcataaggatagtacctcttttggacaataacaatattgtcatctcatgacaagaaattaatattgtctaaaattatcaggtttcccgtaa

SEQ ID NO: 209513 - DNA, 225 bp, Gossypium hirsutum
cggacgcgtgcgttcctctcttcgtaaactcttactttaagagttcagtctcattcaagcgttttcattggcagccaacatggggaagactcgcggtatgggagctgctctcttgctgagaacccaccgtagaatgcatatgtggtccgtcaggtcatatatgaagtcaaatctcggatatgaatggaagaaaccctttgctggatcatgacatgcccagggcat

SEQ ID NO: 209514 - DNA, 264 bp, Gossypium hirsutum
ccacgcgtccgagcgaactcgaaagaacatttacagaggaatcaggcaaaggccatgggggaaatgggcggctgagataagagatcctcacagaggtgtccgagtctggctcggtacatacaacacggctgaagaagcggctcgagcctacgatgaagccgccaagcgcatccgtggggagaaagccaagctcaactttccttaaactccacacctaactcagccttctgctaagaaaaggtgtatgatggctcctgagttgac

SEQ ID NO: 209515 - DNA, 212 bp, Gossypium hirsutum
cagcagccgcttgtatttggaagaatggtgagggtgagcgttttgaatgatgcactcaagagcatgtacaatgcatagaagaggggcaaacgacaggtcatgatccgaccgtcctcgaaggtgatcattaagtaccttttggtcatgcagaaacatggttatattggggagtttgagtatcttgatgatcatagatctgttaaaattgtggt

SEQ ID NO: 209516 - DNA, 437 bp, Gossypium hirsutum
aggctatctaaatcaatgaaaaagttggaaaagaatcttaaggacagtgataagtacaagagtgaggaatactgtgccaagctccaaaaatcaaatgagaggactctagctcttgttaaagcaggactggatatagtggtagcagttggccttcttcaattggcacctaagaaagtcacccctcgtgtaacaggggctcttggatttgctacgtctctcatctcctgttatcagttgcttccgtcaccatccaagtccaaggtaaactgaagtgggaagcctgttttgctcatcaagctcgagtatcatcatctaaataaattcaacttgtgcgtttaaagtttgaagaatttgtcaacttgggggtgaacttggacttactctttctatttatagcaccactgttgttgcatattttttaggctttcaacaaaaat

SEQ ID NO: 209517 - DNA, 436 bp, Gossypium hirsutum
ataccaggaacttttgaaagcactgattggttttatagatgttgctggactttattttgccttaacacagttgactcacaggaacatctctcaaaatcataaatttcaagctgttggacttggatgggcttttgctgattctgtgctacatagattggcaccactttgggtgggagcaaggggactagaattcacttgggattacattctgcaaggcctagaagcaaatgcaaatttggtgttgagtatatctcttgcagcattgggatctttgatttggctcaaaaagaacaagcccaagactttgattcccataatatatgcctgcgctggaatttgtgcaaccatgccatccattacaagctacctaaagcgaggattgggatggcacttttcaaaggtggtaggcctttgaattattcacaattttggtgat

SEQ ID NO: 209518 - DNA, 282 bp, Gossypium hirsutum
aactgggaagctgccagaaagatggtggctggaaggtttataaattcttactctacgaaagattggatgcttggagttgctttccgtgcaagtttattgacaaatggattagccggattacaaccagttgatgtgcaagggattgagaatgtaagtcatgccagttataatttttttcacctagctgttcatcgtgctaattccttaaaattctcttcagggtgacgtaacaaatacgatcgaaggtcacttatcctattttgggtcttaaaggaaaaattt

SEQ ID NO: 209519 - DNA, 313 bp, Gossypium hirsutum
cccacgcgtccgcccacgcgttcggctaaattcaagagcaaaaaaaaaaaaaatcttaaataaaaaaaattcatcatgacaacccaaatgaaagagcttgaagatccaatggctctaatcacccaaatgtacccttgcatatacactcaagttgcaccacaacaaggggaaatatcgaagcctcgacgacgacagaagaagaacaagggaggggaaagcggggcggcaaccgcggcggagacagctaagaaaaggaagcttagccaagaacaagttgatcttcttgaacttaactttgggaatgaacataaac

SEQ ID NO: 209520 - DNA, 373 bp, Gossypium hirsutum
cgtttcaatcactctcagctcttctatggcgagcagtcacacgagcaaggaaacttccggctagcaaaacgacgacgtttagaatggcggtgaattgccgtcacaggttgaacccaaaaatggatcctttatatttcggaaacgcaattcaaagcattccgacttacgcatcggccggtgacgtcacgtcacgtgacatacggtggtgcgccgagcaattgaacgaaagcgtgaaagctcatgacgacgagacagttcgtctgtttatttgtaattgggaaaaggatccgcggtgttttccgttgggaaatttcgatggtgcttcgatgacgatggggagttcatcgaggttttcgatgttcgacaatgattt

SEQ ID NO: 209521 - DNA, 324 bp, Gossypium hirsutum
cccacgcgtccgcccacgcgtccgactctaccccacagttgatccgacattggaacctgactatgccgagtaccttaaagggaggtgtccgacacccgaccctgatccggaggcggtgttgtactcgagaaacgaccgggaaacgccgatgattcttgacaatatgtactacaagaacttgttgaagcacaaggggttgctggtgatcgaccagcaactgacctctgatcccactacttccccttttgtggagaaaatggctgctgataatggatatttccatgacccagttgccagagctgtgctgttgttgtcagaaaataa

SEQ ID NO: 209522 - DNA, 262 bp, Gossypium hirsutum
gtcagggtgtttctagagcactggttgagaactcaagaacattaagattgcctacatatttgcatgaaagattgggattaatccgaaatgcaaaatataggctggaggagaaaggaataacaccgactattgataggattgctgagagtctgaacatgtctcagaagaaagttaggaatgccacagaggcagtcagtaaggtcttctcccttgacagggatgctttccccgctttgaatggtcttcctggagagactcacca

SEQ ID NO: 209523 - DNA, 241 bp, Gossypium hirsutum
gtggccaagattatacatccaccaaagaaagagaagcctgagcccaaaccaccagtatatgaacccccaaagaaggaaaagcctgaacctaagccaccagtttatacaccaccaaagaaagagaagcctgagcccaaaccaccagtgtatggaccaccaaagaaggagaagccaccggcttataagcctccaaagaagccaccagtgtatgagcctaagccaccaaagccaccggtttaca

SEQ ID NO: 209524 - DNA, 313 bp, Gossypium hirsutum
ggaagcttggtgaaagagattgatataaagggagtgaagaaaatgattgaggaagggaaggtaggcggtgggatgattcccaaagtgaattgttgtattcgatcgcttgctcaaggggttaccactgctagcattattgacggtcgtgttgagcactctgtgcttcatgagattatgaccgatgagggcgctggcacaatgatcaccggttaaactatagcctactcttaccttttggtagttttaatattggagctcttctatttatcgcagttattgaatgcattgctaccaaacttaatgcttttttttt

SEQ ID NO: 209525 - DNA, 407 bp, Gossypium hirsutum
ggaagagtgagctctgaagcacaagaaagtgattacgtggaaacaggttcctgtgtagatactgaaagcaatgagttaataccacaaaaagaatgtatcgagggtacatatcggccaaaaacacttggaagcagttttgatgttgttaaaattgagccggaaagaaggcatatcccatcagcttcatcagcactggttattggtggcatccttggtctccttcaagccttattcctgatttctggagcaaaacctctattgaacttcatgggaatcagttcagattctcccattgctaaccctgcacaacagtacttgactttaaggtcactaagggcctcctgcccgtcttctttccttaaccattgcaggtgtcttttgaggatttaaagacacaaaaacttctt

SEQ ID NO: 209526 - DNA, 313 bp, Gossypium hirsutum
gctgaattatatatataacaattgtctatatgttcaaaaatttgtgcattcattacagaataacagtcaatgactcaattatacctaagggttctttttttttttttgtggggggggggggaatgcttttagcttgaacaaaataaatatggttgcaggatgctattgaagaatgccggaaattatgtggtggtcatggttatctttctaacaatgggctccctgagttatttgcagtttatatacctacctgtacctatgaaggagacaatgttgtgctgctcttacaggttgcaagatttctaatgaaaac

SEQ ID NO: 209527 - DNA, 295 bp, Gossypium hirsutum
  unsure (1)..(295): unsure at all n locations
atcacccttaagagctcagacggcgaatcattcgaggttgatgaagcggtggcgttggagtcgcagacgattaagcatatgatcgaggacgattgcgctgataacgggataccgttgcctaatgttacgagcaagatcttagcgaaggtgatcgagtactgcaagaaacacgtcgaggctcctaagacagacgatcgatccgccgatgactagctcaagagttgggacgctgactttgtcaaggtcgatcaagctactctctntgatctcattctggcagcgaactatttgaaca

SEQ ID NO: 209528 - DNA, 463 bp, Gossypium hirsutum
gtgcagcagttcaatccgtttgaagagtctggggtcgggtggacatttgacagtgcggatgcaagcaagttgatacatgcattacgtaactgtttgttgacatatcggcagtataaaacaagttgggaagggttgcaaatacggggaatgaagcaagatttgagctgggacaatgcagctgataagtatgaggaagtgcttgttgcagccaaatatcagtggtgagagctctgcttggtctgattgaaccctcttatcacctttttaccgcaaaatttgggtcttgttttaaaatgttggattaatgttggattcctagataattgctctctttttggagggcatgtattgaacttacattgccaagggtcataattaattcataatgtcatgtttacttgtcttaatatttcaaaaattattaaaaatggtattttattttattaaattatgtgtatatatt

SEQ ID NO: 209529 - DNA, 377 bp, Gossypium hirsutum
caagtatgaggttgtgcttaaggctgagccatttgcctatgctccaaagaccccttacaaggagtgtgagaagccaaagccaaagcctactccagctccttactattacacctctccaccaccaccatcgcctacttatgcttacaagtcaccacctcctccaccatactattacaagtccccgccaccaccaagccctacctatgtttataagtcaccaccaccaccaccatactactacaaatctccttctcccccatcgccatctcctccttctccttactactacaaaactccaccaccttcatcttcattaccaccaccaccatactactacaaaatctcaactcctccaatccctttaaccccctccccat

SEQ ID NO: 209530 - DNA, 360 bp, Gossypium hirsutum
gcagcccaaaaatacttaggtcttgtttttgggggaagggttgagacatgctagtgtggatcgtgactctcgcgggctgcgcccttttcaaagtgttggatgaagggaagctaaacaaagttgaggacttgtcaaaagaattcttggctgcagattcagcaggaaaggttgtctctgtgcaagccttttccaagttcgaaaacacagcaaaagcattggaagcagcaacgaaacttacttgaagcacgcccagcaaaggtttaaacatgttttttcctcctcattgtgaaagtgaaacactaatgagttgttgatttaaaactttgaaaatgtcatttaatggaaaactgtaaaattgat

SEQ ID NO: 209531 - DNA, 413 bp, Gossypium hirsutum
cccacgcgtccggcctcatcatgggctatatctgtgtaccatgcctaccaacgtacatggaaaccttttaatcctattattggggaaacatatgagatggttaatcatggagggattacattcatttctgaacaggtcagtcatcatcctccaatgagtgctgggcatgctgaaaatgaacattttacttatgatgtcacatcaaagttaaagacaaaatttttaggaaattctcttgatgtttatcctgttggaagaacacgtgttactcttaaaagagatgggggtcgtttaaatttggtgccctctcctacaaaaggtaaccattctaattttggaacaacttggggtgattcaacaggagagatgatcatgaccaattttacttcttgggaccaagttgtgctttattt

SEQ ID NO: 209532 - DNA, 460 bp, Gossypium hirsutum
ggacaatttgcagtccagcttgcagaactggcaggaaacaaagttgttgccacttgtggaggaaaagagaaggccaggcttttgaaagatttgggggttgatcgagtcatagactacaaaactgaagacatcaaaaccgttctgaaaaacgagtttcctaaaggagttgacattgtctacgaatctgttggtggtgacatgtttgatttgtgtttgaatgctttggctatccgtggacggctcattgtgataggaatgatctctcaatatcaaagagagcatgggtggaagccaaaaaattatcctggtcttgtcgagaagcttttaaccaaaaaccaaatctgtggctggcttttttctggcacaatattacctatttatggaaagaacaccttgctagacaatttgatctttactctttggggaagcttaatggtgcaataaattcaaaaagattttt

SEQ ID NO: 209533 - DNA, 362 bp, Gossypium hirsutum
gtgattggagcaagaagggcatcgtggcggatactgtcttcgatcgaacagaaggaggaagctaagggtaatgaacaaaatgtgaagaggataaaggagtatcggcagagggttgaagatgagcttgcaaagatctgtgatgatatactatccgtcattgataagcatctcattccatcttcctcgacaggggaatcaactgttttctattacaagatgaaaggagattattttcggtatttggcagaatttaaagccggagaggaacgtaaagaaactgctgatcagtcacttaaagcttaccagggctgcaccactaccggaaattcagatttgccggcaaactcacccaaataagactt

SEQ ID NO: 209534 - DNA, 317 bp, Gossypium hirsutum
cccacgcgtgggctgaatcaaagatgataaaaagggatgaaggacgcattgagaagtggattcttaggagggccttcgatgatgaagagcatccctatctgccaaagcatatcctttacagacagaaagaacagtttagtgatggtgtgggttatagttggatagatggtctcaaagcacatgcttgccaacatgtaaccaataagatgatgcgtaacgcatctaacatctttcctcacaacacaccaatgacaaaagaagcttactactacaggatgaatttcgagagaatctttccttaaaaatcggcaagattg

SEQ ID NO: 209535 - DNA, 287 bp, Gossypium hirsutum
cacaaagcctcagttcattaacacaagaaagaacagaaaaaaaggaacaaaagatgggtgaggagcagcagggaattcagattcccagaatcaaactgggaactgaaggacttgaggtttcaaagttggggtttggctgtatgggtctcactggaggttacagttgtccagtctctgaagaagttgggatatcgattatcaagcatgcattccacagaggaatcactttctttgatacatctgatatctatggacccaaaactaatgaaattttgggtggaaaggca

SEQ ID NO: 209536 - DNA, 266 bp, Gossypium hirsutum
cccacgcgtccgcccacgcgtccgaatcggaacaaaaatcagataggagttttgggatgagaaatttcaagtacgttaagacaattaaagatgctctggagcaagaatgtccaaggacagtttcctgcgctgatatcgtctctctttctgctagagatggcattgtcttgcttggaggaccacgcattgagatgaaaaccggtcggaaagatagcaagagaagttacctttcagaggtagaaaataccatccccaaccacaatgat

SEQ ID NO: 209537 - DNA, 275 bp, Gossypium hirsutum
tgggatttggattgcctgctgctattggagctgctgctgcaaacccggaggcagttggtgtagacatcgacggtgatggaagttttatcatgaatgtgcaagagttggcgactatccgtgtggaaaaacttccggttaagatattattgttgaataatcagcatttgggtatggttgttcaatgggaggaccggttttacaaggcaaacagggctcatacatacttggtgagacctatccaacgagtcggaaatatttccaaatatgttgaaatt

SEQ ID NO: 209538 - DNA, 247 bp, Gossypium hirsutum
cccacgcgtccgggtgctcctttaggaaatagctggaggacaactaacgacatatccgataattgggaaagtatgatctctagagctgaccagaatgaaatttatgctgaatatgcaaggcccggtggttggaatgatccggacatgctcgaggtggggaatggagggatgacaaaagatgaatacatagtacatttcagcttgtgggctatttcaaaggcacctcttcttcttggttgtgatataa

SEQ ID NO: 209539 - DNA, 262 bp, Gossypium hirsutum
cccacgcgtccgcggaaccatacggtattgggatggggtatggaggttatggtcatagcttgaggagcccgagttttaaaagtgtaagcggatcgcaattcggattggaacgacaatctaactattcatcttgttgtactgagagccttggtggtgaaatgtcaccatcttcaactagtgatctaagaaggtggttgaggtgatcccatcaatgtagctgttggtttttactagttttatagtgggtttccattgttgattt

SEQ ID NO: 209540 - DNA, 286 bp, Gossypium hirsutum
ctttcaaaacacttctccagtgacccaaaaaagcttcattgtctcttctattgaaaaccccatggctgctcttaagctagtttgtgctctagtgttgtgcatgttggtggttgagcccattgccacaaccgccataacatgcggtgatgtgacaagcaaagtggccggttgcttatcatacttgcagaacggagggaacgtgccgaatgcttgctgcgacgggatccggtccctgaacatgatggctcgaaccacccctgactcgcaaaccgtgtgtgggttgctt

SEQ ID NO: 209541 - DNA, 177 bp, Gossypium hirsutum
gaagatcatgttgacgctcggtgattcacggtcctccagctggatgtggatggtgatttgcggatacattcatggatagaggttccacaaacgtggggatcagcttggcgagcggttgtaaatcaatgtctggactttgcaactcgtgatcaacgaggcatctgcgcatttaatgcc

SEQ ID NO: 209542 - DNA, 423 bp, Gossypium hirsutum
cgtccggttttggtggcagcgtactatcgtctcttttcattcaacgtagcatttctgttggtgcctctggtgcatcttcctgccggtgctcgtgttacatctaagcataaggcataccaatacctatttttggtgatagctatggttttactcattgttggtggggttggtaatgctgtttagagaagagaatggacatgaccattgcagctggtgccattacctgagctgtgttcctacatcaaaatggtactgtgggaactaagcagacctttattacatatcgttcactgattcttttatggtttcctttacattttttacatttggtaatttattggtgttgttacgtgcctatgtgtatatatattcatacattcattcgttcatgggtaggttttaaaaaaaaaaatatattttttt

SEQ ID NO: 209543 - DNA, 414 bp, Gossypium hirsutum
gttcgcccacgcgttcgccatggtgtttggtccaactaatggcggttgtcacaacattcggtgcactgcagacatcaacggacaatgcccgaatgagttaagagctcctggtgggtgcaataacccatgcacggtgtttaagaccaatgaatattgttgcactcaagggtacgggacctgtggtccgacccgttattcaaggtttttcaaggaccggtgccgtgattcatacagttatcctcaagatgatccttcgagcacctttacttgccctgctggttccaattacaggtcgtgttttgccccgaggctcacctcatatagagatggtccggaagtaagagccaagaaaaataagggatcatctcttggtctagtaatcttgcgcctggaactaaaaataaaaagtatttg

SEQ ID NO: 209544 - DNA, 331 bp, Gossypium hirsutum
ctttagcaaaaccacattctcaagagaaacaaaggggaaaaaaaaagcagaacgcaagtgaagagagatcaggaaagaaaattaaagtcgggttggttacgggttttcgagctttgttcgtaaaattttgtgtataagtaacgcaatgactagcattatggatgcagaacatgacaagtatagcatgattaatttcgaagagacggagttacgtttaggattacccacaggcattgaaaatgataatgaaaccgccaaaaataatgggaaaagagggtattcggatatggttgatttgaagcttaaccttttaacaacaaaagaaagcatc

SEQ ID NO: 209545 - DNA, 343 bp, Gossypium hirsutum
ggtcaacgtatgggccatttctcgagaccctaacgagtgggacatcccgcttgagtttcggcccgagaggttcttgcccggctgcgaaaggccgaacgctgatgttaggggcaatgattttgaggtcataccgatcggcgccgggcgtagaatctgtgccggaatgagcttgggattgcgcatggttcaactgttgacagcgacgttagcgcatgctttcgagtgggagttggctgatggattaatgcctgatatgctggacatggaggaagcttatgggttgactttacaacgtgcggcaccattgatggtgcatccaatgccaatgctatcaaagcatgct

SEQ ID NO: 209546 - DNA, 302 bp, Gossypium hirsutum
cccactcgtccggatcacgtcaagcgctggtcgtcgggtctaccttgactatatcaagaagtacgaaacgtctgagaggcggcattaacacatacacggtcatattatagcatgcttccgtgtgatggaaggggatcatgtgattattgggccccgcattccgttaggcaggaccgtgtagctcaatgtcttgatcgcgatctcaagaagatctttccatggtgatacgaaagcgttgaccagaatgcatgctcttatatggaagtacataggcttaggaaccattgataggaatgctgata

SEQ ID NO: 209547 - DNA, 411 bp, Gossypium hirsutum
tcgtccacgcgttcgtccacgcgttcggccacgcgtccgcaacaatgaatatggaaatgacataaacaaggacttgaaggctgatcctaaggatgagttccttgcactactaaggtccacagtgaagtgcttggtctatccggaaaagtattttgagaaggttcttcgcctagcaatcaatagacgaggaacggatgaaggagctcttactagagttgtttgcactagggctgaggttgatctaaagatcatagcagatgagtaccagcgaaggaacagtgtcccactgactcgtgccattgtcaaggacactcatggagactatgaaaaattgctgctggtacttgcaggacatgtggagaattgaatctgatatcttgagacaatttcctggtgaataaatgtttatga

SEQ ID NO: 209548 - DNA, 356 bp, Gossypium hirsutum
cccacgcgtccggcaagccattaaggttttgagaaaagatcaaaatggattcaaaaagatcagcttccacagccctccttttagccctcaacattctcttcttttccctagtcagtgctaattgtggatcttgttcttcttctggctctaacccaaggccaactcccacccctactccatctgcacgaggtaggtgccctagggatgccctcaaattaggtgtatgtgccaatgtgcttaacttagtcaatgtcaccgttggttcacccccggtgatgccatgttgttcccttctcaacggtcttgtggacctcgaagccgctgcttgcctttgcaccgctatcagagctaacatc

SEQ ID NO: 209549 - DNA, 234 bp, Gossypium hirsutum
gcttgaaggtggggggaaaacaccaatactagctccgcttgaactcgaagaaattggatataaacttgtggcatatccgctttccttgatcggggtatccattcgagcaatgcaggattcactgactgctctcaatggtgggcggattacaccttcaggaagcatgccctcctttgaggaaatcaaggaaatcttaagtttcaataattactacgaataagaaaaaagatatgc

SEQ ID NO: 209550 - DNA, 378 bp, Gossypium hirsutum
atcttcgctaattgtttatgcccattctgctctcccataaaaaccgttagagatattcctagggtttgcatttgcggtttggggtatagggttttagacaacgccaaatcttggatttgaggaatggcgactgcgacgggacaggtgaacgcgaatagaaagccggtgttcgtgaaagtggaggatttgaagcccggtactagtgggcacactttgatcgtcaaagtggtggagatgaccccagtcaagacttccgtcaggcccaacatgttccgtgctctcctttctcgacctgtcccttcggtccggatcgctgagtgcgtcgttggggacgagactggcaccatcatctttaccgacgcaacgaacaagttgatc

SEQ ID NO: 209551 - DNA, 391 bp, Gossypium hirsutum
  unsure (1)..(391): unsure at all n locations
gctgaagcgaagcaaatgccctgtaagcatctttatcacaaggactgcatacttccgtggctggaattgcataattcctgccctgtttgtcgtcacgagctgcctaccgatgatcctgattatgagaggagggttcgtggggcgcaggctactggtggagataatgacggcgatagtagtggcggtgataatgagcagaggtctggggataatcggacggcggagaggagttttaggatatcgctgccctggccgtttcgggctcgtgggtcgggttcaggatcaggatcaggtgataatccgcagaccaggcaagaagatttggattgaagactccttgaagtgctgcaaaatatcangcatttctatcatgagacatggtaatagatcg

SEQ ID NO: 209552 - DNA, 395 bp, Gossypium hirsutum
ggaggaactgccaaagaagtcatatgcgtctattttaaaggttttgaaagagaatgcaggccctgtatcggcacctacacatccccctgtgaagcctgcagttaagagccaggagcatcctcgaattgctgcaccaccttctgctccaatgcctgcctctgatgctcaggtttctagcaacaatgttactgaaaatgggaataatcaagatgcagaggctgagggtccctctgtctatgtcaaaggtctgcccttgaatgctacgcctggcatgctggagaatgaatttaagaagtttggacctattaagagtggtggtattcaagttcgaagtcagaaggggttctgttttggttttgtggaatttgaaatggcaagttctgtgcaaagtgcta

SEQ ID NO: 209553 - DNA, 407 bp, Gossypium hirsutum
gcaggaacctgtacgagcggaggctgattttggacgattcgatgctaaaaccgttgtgaggaacatctacatactgttctcaagaagtgaaataccaatcgcagatgaaaaacaaggagatcatggatatggtggatgcttctgttcctcttccaccttggttcactgaggaagttctcgcaacatacggagctttatacgagaaatccggattcaagactgcattgcaagttccatataggtcattcgatgaagactttgggataacacatccaatagttaaagttccggcgttactgataatgggttgcaaagattatgtcttgaaatttcctgggatggaagaatacataaagtttgtgaaggcacaagaactcgtccctaatttgatataatatattttgcct

SEQ ID NO: 209554 - DNA, 419 bp, Gossypium hirsutum
cggatttggctgttgctgttccttaatctctaatctcatctgcaccagccgacgacgtggggaggagacctgcaaggtgttatcgccaaatcaagaataagccataccccaaatctcgattctgccgtggtgtcccacatcctaagatcagaatttatgatgttgggatgaagaaaaaaggtgttgatgagtttcctttctgtgtccatcttgtgagttgggagaaggagaacgtctcaagtgaggcattggaagctgcccgtattgcctgcaacaagtacatggccaactttgcagggaaggatgcttttcatttgagagtgcgggttcatcccttgcatgttctgcgtattaacaaagatgccttcattgtcccggtgctgattggcttcagaccggaatggagtggtgcttttggg

SEQ ID NO: 209555 - DNA, 348 bp, Gossypium hirsutum
cccacgcgttcgtgaccatgaaactacctccccagtcgccccagctaggcttttcaaggcttttactgttgaagccccaaaggtttggcccgcggctgctcctaatgcagtcaagagtattgaggttgaagctaatcctagttccggaagtatcgtaaaaatcaactttgttgaaggctttccattccaatatatgaagcaccagattggaagacatgatgaaaataatttttcatacagttacagtttaattgaaggtgggcctttgggggataagcttgaaaagattagctatgagaacaacgttgaggcagctgcacgtggaagaagtatttgcaagagctcaat

SEQ ID NO: 209556 - DNA, 147 bp, Gossypium hirsutum
ggcgacctggctgtaccagcttttggattgtcatcaggtgtgggcgtgtctaacggatgggttttcgaaatcgtgatgaccttctgattggtgtacacagtttacgccacagtcgttgattctaataagggaatgcttgtgaacaat

SEQ ID NO: 209557 - DNA, 325 bp, Gossypium hirsutum
cccacgcgtccggaagggcgtgccaaatcctttgctcctttcccaactggattcagggtgcacagtgaaggggggctgatgagctttgagcatccaatgaacaaaatcagggcaatgccgagggtagacagtgaaggagtgactcgtggtgctaatttcaaggttgatgtttacagtagagttaatagcattccacgagtgggcagtgcaaccaattggactgatcactgggattcccattaattagtatttaaaaagaggagagagaagcaaaattaaacataagagagatgccatgaatatgctctagacaaacaccggggct

SEQ ID NO: 209558 - DNA, 400 bp, Gossypium hirsutum
  unsure (1)..(400): unsure at all n locations
gaaaaaattatgaagagggtttcctttgttgccttgtgtgtggtggcactcgcggtggtgctgttttcgggtgaaagtcgcacggcggaggcagtgacatgtaatcccgtggagcttgccccctgctcgccggcgcttacgtcgtcctcgcctccatcaagcgcttgttgcagcaagctgaaggcgcagcagccatgcctctgtggatacattaagaacccatctcttaaacagtatgtcaacagtcctaacgctaaaaaggttgcttcgacttgtggagtcccatatcctaagtgttaaatgttgcttaatggtgtatctactatctactggcagcanataagtgattctttttgctgtcaagtactgttctgaataaaagaataatgataaaatatta

SEQ ID NO: 209559 - DNA, 385 bp, Gossypium hirsutum
tcgtccacgcgttcgcatccatatccgaaaacctaaagattctctctcccaaaccaaaccttcgaatttcagcaagagagagagagagagagaacttacatagctcagatttcgatcatcaatttagggtttcttagttcgatccccgattacccaataccccaattttacagatcaggtctgagtgttctagttgttcggctgtttctatcctctaagtttcatgtctgatcttgacatccagattcctactgcctttgatccgtttgctgatgcaaatgctgaagacgctggtgctggtgccaaggaatacgttcacattcgtattcagcagcggaacggtaggaaaagcctgaccactgttcaggattgaaaaagaattagc

SEQ ID NO: 209560 - DNA, 420 bp, Gossypium hirsutum
cacaattcccgcttaactcctatcttcttcacctttagggttacaacagccgcacgccagcctagcgtttccataaggaagaaatggcggtccctttgctgtcgaagaagattgtgaagaagcgtgttaagaagttcaagaggccccaaagtgatcgcaagatctccgtcaagacaaactggcgaaggcccaagggtattgactcccgtgttaggaggaagttcaagggatgcactttgatgcccaacatcggttatgggtcagacaagaaaacacgccactatcttcccgatggatttaagaaattcgtggtgcacaatgtccaagagctagagcttctcatgatgcacaacatgacatactgtgctgagatagcacatgatgtttcaacgaagaagaggaaggaaatcgttgagcgag

SEQ ID NO: 209561 - DNA, 385 bp, Gossypium hirsutum
  unsure (1)..(385): unsure at all n locations
cccacgcgtccggatggcctaggagagctagggtggtggtagcgtctttagagaagactgaggaaggaggttggggtactgtcaagtcaattaagacgtggaagcgccttgatgataaacatctcactgccattgacggggaggtcctttggagcaagaaacatactggtactcgtagaaagaaacatatcaatggcagtcctgcttgaacttcgggaacagaccaactgacagtattattacattattgtctcggaatattttgatctcaaccggctttcaagtttcggactactatgcanaatggagtttagcttgtgtaaaatggtttacggacttgaatgatttgcagtcaatggtgctgtgctggtttctaataatccta

SEQ ID NO: 209562 - DNA, 383 bp, Gossypium hirsutum
cccacgcgtccgcaaagatcagtgaaacagtgaagggaaagctgagtttaggggcaaggattcttcaagtaggagggttagagaagattttcaagcaattgtttagtttcaaagaaggggagaagctgttgaaggcttgccaatgctatttatcaacaacagcaggccctattgctggcctacttttcatctcatctgaaaaggttgccttttgcagtgatagatcaatcaaagtaccttctgcaaatggagaatttctgagagtccattacaaggttgtggttccagttgagaaaataaagggggtgaaccagagtgaaaacatgaagaaaccatggcataagtacatgggaaattgtgacagtggatgggtttcgatatct

SEQ ID NO: 209563 - DNA, 337 bp, Gossypium hirsutum
gtaaaagcgaaaccctagccactctctgctttactcgccaatgggggcttataagtacgtgtcggagctatggaggaagaagcagtcggatgtgatgaggtttttacagagggtgaggtgctgggaataccgccagcatccgtcaattgttagggtcaaccatcctactcgccctgacaaggcacgccgcttgggttataaggccaaacaaggttatgtggtttaccgtgtccgtgttaagaggggtggtcgcaagaggcctgttcctaagggtatcgtgtatggtaagcccacataccagggtgtcacccaattgaagtttcagcgcatcaagcgg

SEQ ID NO: 209564 - DNA, 405 bp, Gossypium hirsutum
cccacgcgttcgtccacgcgttcgccatggtgtttggtccaactaatggcggttgtcacaacattcggtgcactgcagacatcaacggacaatgcccgaatgagttaagagctcctggtgggtgcaataacccatgcacggtgtttaagaccaatgaatattgttgcactcaagggtacgggacctgtggtccgacccgttattcaaggtttttcaaggaccggtgccgtgattcatacagttatcctcaagatgatccttcgagcacctttacttgccctgctggttccaattacagggtcgcgttttgcccccgaggctcacctcatatagagatggtcggaagtaagagccaagaaaaataaagggatcatctcttggtctagttaatctgcgccttgaact

SEQ ID NO: 209565 - DNA, 401 bp, Gossypium hirsutum
gaaacaaattggctatgcaggagttattgattctttctgtaggagcatcatcctttaaggaggccatgaaaatgggtgttgaagtctatcaccatttgaagtctgtgattaagaagaagtatggtcaagatgcaaccaatgtcggtgatgaaggtggctttgctcctaatatccaggagaacaaggaaggacttgaattgttgaatacagccattgctaaagctggttacactggcaaagttgttattggaatggatgttgccgcgtctgaattttatggaacagataaaacttacgacctgaacttcaaagaagagaacaatgacggtaaacaaaagatctcatgagatgctttgaaagaattatacaactcattcgtagccgagtatccaaattgtgtc

SEQ ID NO: 209566 - DNA, 400 bp, Gossypium hirsutum
cccacgcgttcgatcagaaactgcgaaaattcatttaaaaatggcgaccgctgcatcctcttcatcctccatggtggccaccgccgttttgattcctcgttttccggcagcctccgttggaactacccgttgcagtgccttgccgactattcctactcgcgttttgaccgcttacttgtgcttttactcttgcgttaagctaatcccagaatccaagaggttttctctactgcagacataagcctcagaagagacctgtgttgatgctggcgaccttttcgctgacttgaaggaaaagcgggataaagctgaggacaagaccacagttgttctttacagtggaggggcattagttgctgtgtggctatcatacattctgattggtgccatttactcggtc

SEQ ID NO: 209567 - DNA, 317 bp, Gossypium hirsutum
ggttaccgctcttaggtctactgagactgctacagctaggattgaaaatgctggtggggaatgcttgacttttgatcagcttgctttgagggctcctttgggtcataacacgatatcaatctttctcttgcattttgttttgagttgttatgctacattagttagttcaaatgtatgtatgttgattcagatgacatttttgagtcctatttttttgaaaattttattgcttatttgatcatttattgaaactcttatgagttgaaatgccagttttacttccatgcactattaaaaacgctacaaggatgatttct

SEQ ID NO: 209568 - DNA, 416 bp, Gossypium hirsutum
cccacgcgtccgcagctcagttggacatccccgagtccatcctcccccacgcctacaatcccttctatcaagtttataccacgttaacccaggattatttggtgcttgagcagcctggttttttcaaggcacttatgacgttggaacttgtttaccaactccctctcgctttgcttaacatctatggattgttatactccaagccctggttcaacaccacctgcctcctctttggtgcctctatcgttgcctctacgacagctatggtgggagacattctgaattcccagaaggcatcagccaatttgatggccatgtattatccaccgtttcttccattaggggttctggctatagtgcgaggggtggttggactatcgagcaaggctgctccatccattggcaatggaccttcg

SEQ ID NO: 209569 - DNA, 336 bp, Gossypium hirsutum
gtgataacatgattgagaggtctaccaaccttgactggtacaagggtcccactctccttgaggctcttgaccagatcaatgagcccaagaggccttcagacaagccacttcggctcccacttcaggatgtctacaagattggtggcattggaactgtccctgttggtcgtgttgagactggtgtccttaagcctggaatggttgtgacctttggcccctctggtctgaccactgaagttaagtctgttgagatgcaccatgaagccctctctgaggctcttcccggtgacaatgttggattcaacgtcaagaacgttgctgttaaggatctcaagc

SEQ ID NO: 209570 - DNA, 409 bp, Gossypium hirsutum
tttcaaaacacttctccagtgacccaaaaaagcttcattgtctcttctattgaaaaccccatggctgctcttaagctagtttgtgctctagtgttgtgcatgttggtggttgagcccattgccacaaccgccataacatgcggcgatgtgacaagcaaagtggccggttgcttatcatacttgcagaacggagggaacgtgccgaaggcttgctgcgacgggatccggtccctgaacatgatggctcgaaccacccctgaccgccaaaccgtgtgtgggtgcttgcaaactgccgctaaggctgtcaaaattaaaggcaacttggctgagacccttccggccaaatgtagtgtcaacatcccttacaagatcagcacttccactaactggaaaaatgtgaagtgagatg

SEQ ID NO: 209571 - DNA, 335 bp, Gossypium hirsutum
cccacgcgtccgaatcagtttatgctccagagccttttgatgttggtcgaatcctgcaggttgagattatttatgatggccagctaattgtattgacaactgccggtgctattgatccagctgctggtttgggaaactatgtggaggcacttgtgcggaaacatgatattgaattcaatgtagttgttagccaaatgaatggtgcagatcatccatctgaatctattcatgtactacatgttggaaagatgaggatgaaactatgtaaaggaaagacgacaattgtcaaagaatattattccagctcaatgcagctgtgtggagtcagagggggc

SEQ ID NO: 209572 - DNA, 425 bp, Gossypium hirsutum
gaaagagaaacctgaaccgaaaccaccagtaaatgaacctccaaagaaggaaaagcctgagcctaaaccaccggtttatacaccaccaaagaaagaaaagcatgaacacaagccaccggtgtatgaaccaccaaagaaagaaaaacctgagcctaaaccaccagtttatgcacctccaaagaaagaaaaaccagaacccaaaccaccagtttataagcctccaaagaagccaccagtgtatgagcctaagccaccaaagccaccggtttatgcaccaccaaagaaagagaagccagaacctaaaccaccagtatatgagtctcccaagaagccaccatatggtcactatccaggacaccctccattggagaagcctcaatagagagatttcctcggctaaccattcccgacaactgagctactat

SEQ ID NO: 209573 - DNA, 290 bp, Gossypium hirsutum
tcgcccacgcgtccggaaaaccctagccaacctttccgcagctcgctaatgggggcttacaagtacgtgtcggagctatggaggaagaagcaatcggatgtgatgaggtttttacagagggtgaggtgctgggaataccgtcagcatccagccattgttagggtcaaccaccctactcgtcctgacaaggctcggcgcttgggttacaaggctaagcagggttatgtagtttatcgtgttcgagttagaaagggtggtcgaaagaggcctgttcccaaaggtattgtcta

SEQ ID NO: 209574 - DNA, 442 bp, Gossypium hirsutum
gccagagctagtgaagaagagggatgacaaatacagcatctcaaccgaagcaattatgcagtcaagggtggaaattgaagaacctgaatggatcaatccacaggctgattactggaaacagcatgccaagggtttcgccattgacatcgagaaaactgaaatgaagttgagagctcccatcccttataacttgcctttgcctataaccacaaaatattgtgcctaatcactgctagtcttgtgttgctcttcaattgtgtgtggggtaggttttttgcaataatctgtagaaatgatgtggttctatctatcacatttttacttttaagtcaaagtttgtttttctttatatcaaaattacaaaaaggagccttgtaaattttcttcggaaattttttttggtaccggtgatgacaaaaaatttttaagttaccgccttttc

SEQ ID NO: 209575 - DNA, 300 bp, Gossypium hirsutum
aaaatggcttctaaaagatcagcttccatggtcctccttttggcactcaacattctctttttttccctagtcagtgcttgtggctcttgctcttcacccacccctaaaccaaggccaaacccaaaccccaacacccccactcctactccatctgcacgaggcaggtgccctatggatgccctcaaattaggtgtatgtgccaatgtgcttaacctagtcaatgtcaccggtggttcacccccagtgatgccatgctgttcccttctcaatggccttgtcgacctcgaagctgctgcatgc

SEQ ID NO: 209576 - DNA, 413 bp, Gossypium hirsutum
cccacgcgttcgcggacgcgtgggcggacggggaaaagcggcactcgacatctattaaacaacaccaagaacaaagccataccatgccctcgggagaaagacgtgatgattgccatgaatgctgccttcgaggacgtgttgtacaagaaggtctttgccgattcctatcaacatggtgcacccctcagtagaggggcgtgaaaaggccgtggagactttgaccgaatgaatagggatcaattgatagacatttttattgaggaagagaatccaatccaagatgaacgcttttttcgttcgctatgtgctgactggatgcgtactcgcgtgatcgatcaatggacgggggaattgcgtgaatgacgagacccgccctaccctatagtaaaggcttcttccttctctggatggcg

SEQ ID NO: 209577 - DNA, 454 bp, Gossypium hirsutum
cccacgcgtccggacgcatcaccggtcatccacacggtgcttctcagcttcagagagtaggcattggtctgtttatttccatcttatctgtagcctggggtggggttttcgaaaggtttcgaagaggctacgctataaaacacgggtacaagtttagtttcctaactcccttgcccgatctaagtgcatactggttgttgatccagtattgcctaattggtatagctgaagtgttttccatagtggggctattggagtttctatacgaggaagctccggatgcaatgaagagtataggctctgcatatgctgctatagctggtggcttgggttgtttcgctgccagtataatcaacagtatcgtcaaatcggttacaaggaacccagagaataagcagcaatcttggctatctcagaatataaacaatgcgaaattcgattatttttactggct

SEQ ID NO: 209578 - DNA, 306 bp, Gossypium hirsutum
cttagtcagaacttgaattaggtgttattgaaacagggttttgtagctacctcgtgtactagcttctttaatcatgattgttaattaaaaaaaaaaaaaaaaaaaaaaaaaaaaaaaaaaaaaaaaaaaggggggcggccaaaaaaaaggaaccaagcaaacgcccgcgtgcgagcgacgacatagcgcgtcgatggcgccacctaaaatcaactcaccggccgtcgacaaacaacggactgacagaaaaaacccgggcccaacccaacttaaccgcctggcaaaacaacccccttccgccagctg

SEQ ID NO: 209579 - DNA, 412 bp, Gossypium hirsutum
cccacgcgtccgggacaagaaggtgaaggaaaggattgatggtcgcaacagcctggagacctatatctacaacatgaaaaaccagattaatgataaggataagctcgctgacaagcttgaatctgatgagaaggagaaagttgaaaccgcagtgaaagaggcacttgagtggcttgatgacaaccagagtgccgagaaggaagactacgaggagaagctcaaggaggtagaggcagtatgcaacccaatcatcacagctgtgtaccaaagatctggtggagatagatgtattagaaaataacaaggaagacaaggaacaaaaggaagattcgaaggcagctgatgcaaatcatccacaagttgaatgtagcaatcgccgtggcagaagcagtaccaacctgagtgattcttg

SEQ ID NO: 209580 - DNA, 438 bp, Gossypium hirsutum
gattgggcaatgacagaacttatcatgaattcgaaagtactctaaaaagctcaagccgacatccggaaagttgtatgggatagaagagtcgtcttagaaactgagctgcctcaccttgattacatgatagctggcatcaaagagacctggcgattacatcctccggcaccggtcttactccctagagaatgcatggaagacgttacgatcgaccggttcgatattccgaccaaaacacggattttcgtcagtgtatgggcaataggaagagatccagaatcatgggaaaatgcagaatgttttgcaccagaaaggttcgtacatagttcaattgacttcaaggggcaaaatttcgagttgataccctttggagctggtcgaagaagctgtcctgttattacattgggcacagtgagtagcgagaaggcactggctcag

SEQ ID NO: 209581 - DNA, 397 bp, Gossypium hirsutum
cttcactttgaggtttgagcagatcggatggcaccaaagaaagataaggcccctccaccttcttccaagccagcaaagtctggtggtggcaagcaaaagaagaagaagtggagcaagggaaagcaaaaggagaaggtgaacaacatggtgttgtttgaccaggctacttatgataagcttttatctgaggctcctaaatataagctcatcactccctcaattttgtctgatcgtatgaggattaatggatcccttgctaggaaggctataagggaattgatggcaagaggatcgattcgtttggtgtctgcccattcaagccagcagatttacactagggcaaccaacacctagatgttttgttatagttttgcttaaattagttctatgtagtatt

SEQ ID NO: 209582 - DNA, 438 bp, Gossypium hirsutum
atgagctacttaaccatttcccagatctctttcattctcttcttcagcgttcttttcatttgcgcccatgcagcgcgctttgaaatccgcaatgagtgcccctacactgtttgggcggcagcctctcctggtggtggtcgtcgcctatacccttggcaaagttggaccatcgatgtgcctgctggcactgctatggctcgtatttggggtcgaaccaattgcaatttcgatgccagtggtaggggtcattgccagaccgacgattgtggtggactccttcaatgtcaaggttggggtgtacctccaaacaccctggctgaatatgcacttaaccaatttggaaacatggatttctacgacatttccttagttgatgggtttaacatccacatcgagtttgggccaactaatggcggttgtcacaacaattcgtgcact

SEQ ID NO: 209583 - DNA, 347 bp, Gossypium hirsutum
  unsure (1)..(347): unsure at all n locations
acgtccacgcgtacgtccacgcgtncgactgatcgcccttacaccattagtatgattgagagagtaatgcatgaaattcatttcgctgttgatcccaatagtacttccaaaaagcaggctctataggttattcggcagcttcagaataacttccccataaaacgggcgcccatgagattacgactcatagttcctggacagaactttcattctctttgtgagaagctgaatgaatggggtgctacccttgtttcaaaagatgaattcggaactcagctgtcagtaatttgtgaaatagaaccagggctttttcgagaatgtgactcccttgtgaggaatttacaggg

SEQ ID NO: 209584 - DNA, 429 bp, Gossypium hirsutum
ctcgactaacagacatatgcattacctggatggatggtacaatcgaaccgggcggtacgatacattgggtccaatcactatgcagatccagaatgcaaacgggccgaggagttagtctttggcaaggaaggcatcatttcacaaatggtcgaaaccacaccaaacaagctatacagcttgaccttttcattgggccacgctagggacaaatgcaaggaaccactagctgtcatggcctttgctggagaccaagcacgaaattttcactacactccggactccaactctaccttccaagtcgctagtgtcaacttcacggccaaagccgagagaacacgaatcgcattctacagcgtgtattacaatacccgaacagacgacatgagctcattatgcggtccggtggtggatgatgttcgtgtttggttt

SEQ ID NO: 209585 - DNA, 415 bp, Gossypium hirsutum
cccacgcgtccgcccacgcgttcgccacaatcgaaacctttaggcggcgactactactcgagcttcataacacacgaagcttttaactatggcgggtgtagagacggaggttgcggcggccggtgtgcccaagaagagaacattcaagaagtttagcttccgaggtgtcgatttggatgctctccttgatatgtccactgatgagcttgtcaagctcttccctgctcgagctcgcagaaggttccagaggggtttgaagagaaagcccatggctctaattaagaagcttcgcaaggcgaaaagggaggctccacctggtgagaagccggaaccagttagaacccacctgcgtaacatgatcattgtacccggaatgattggaagcattatcggtgtgtacaatggcaagacattc

SEQ ID NO: 209586 - DNA, 404 bp, Gossypium hirsutum
gttctttgttaacgaataaggatcttttaagatacgccggatccgctaaaatacgccgatccccgttcgtcttccgatcatatggggctgcttgaccagttgtgggatgataccgttgcgggtccccgacccgataatggtctcggcaagctccgaaagcactccactttcactttccggcctaactctgccaaggaatcggatggcgggagtgtaagatcgtacggtgatgaagcgccggaggaagcgacgagagtgacacgtagtattatgatcgtaaaaccgcctggttaccagagcggatccgcttccgtttcggccgccggatcgacccctcccgtatcttcttttttcggaggcagagaatcatatcggtttccgagaaggtccacatcggatgcata

SEQ ID NO: 209587 - DNA, 436 bp, Gossypium hirsutum
cccacgcgtccgaccacgcgttcgctgccattctacttctgctgaggttgtggcaggatcaacagcatggttgggtcgaggtctttcttgcgtatgtgctcagacagagaaagtgatgctcgtccatcatttgatttaactccttcccaggaggaatgcttgcagaggctgcagaatcgtatagatattgcttatgatagttcaatccctgaacatcaggaagctttaagggccttatggaatgctgcatttccagaagaagaactacgtggtttaatatctgagcagtggaaggaaatggggtggcaagggaaggatccatctacggattttaggggtggtggctttatatcattggagaacctgttattctttgctacaaattttccgaaatccttcaaggatcttctttggaagctggaaggtgatcggtctg

SEQ ID NO: 209588 - DNA, 347 bp, Gossypium hirsutum
cggacgcgtgggcaaccttctgtttttttctcataaaacctccccactactgatttctctatataatctaatgttctcccgttgttttagccgtctttaacacttttcaatggcttcctcttctgttattgcttggggctcaggtgaagatggtcaattgggtatcggaaacaatgaagaaagagaatgggtttgcgttgttcaagctcttgagcctcacaatgttcgctccgtcgtcgctggcagccgtaattctctcgctatttgtgatgatggcaagttgtttacttggggatggaaccagagaggaaccctagggcaccctcccgagaccaaaactgagaata

SEQ ID NO: 209589 - DNA, 445 bp, Gossypium hirsutum
cccacgcgtccgcccacgcgtccgatttgcttatcagatatccttgaaggctagtgaaagagacgtttatgaattcttctctagggctggcaaggtacgagatgttcgcctcataatggatcgaaactcaagacgttctaaaggggttgggtatattgagttctatgatgttatgtctgtccctatggcaatagcactctcaggacagcctcttcttggtcaaccagtgatggtgaaaccatctgaagctgagaagaatctagttcaatcaactacatctgcatcagctggacagactggtccatatgctgctggcggtagaaagttgtatgttggtaacctacatttcaacattacagaagatcaactgcgtcagggttttgaaccttttggttcttgggagctcggtcagttgcctcttgatgaaactggtcattctaaaggg

SEQ ID NO: 209590 - DNA, 399 bp, Gossypium hirsutum
aaaatgatctctgccggtgaagcaacctataataagtggcggcgtcctgatccttagatcggtccttgcgctcctggcggttccaagttcactcaaaaccctgtaccaccatctgggattgagattttatgtgattatggtaaagaagaacatgattaaaacaagatcttttctaccccaacacataaaggtctagagacttcttcgtggatcaaatggcagctactcttattcatgccagtgaaaagtgatgaagctttaataacattaacgttgatgctcctttcgactgaatttggtgtgtctggatcatgatatgagagcattgctcagattgaaagaaccaaatggctgttgacatttgcataggaacactatgatcatgaatgctcttttgtc

SEQ ID NO: 209591 - DNA, 423 bp, Gossypium hirsutum
aaagacttctacgttggaacttttggtgtcagtgttgaaacttataatcagaatcacttgaagaacactgctgttaatgaaggtaattccgatcggctatggtggtttcaagtgtgtactgaagtggcctatttccaggtggcaccctcaaatgatagcatccgctctaccaaaattaatacaaaataccacttggatctttgcaagaacgtctttggagaaggcatctacccagaggttgatatgacaaatatatactatggaggcacaaaaattgcaggttcaaaaatcgtttttacaaatggctcacaggatccattggcgccatgcttccaaacagacatcatctccagacatgccttcggacattattacttgtcataattgcggccatggaactgatatgcgaggatgtccccaatc

SEQ ID NO: 209592 - DNA, 375 bp, Gossypium hirsutum
accaaagggtcaaaacaaatgggatatggctgcatatagcagagcaagggacaggaccacttgttctattgcttcatggcttccctgaaatatggtattcatggcgccaccagatcactttcttggctaaccatggctatcatgtagatgctcctgatttgagaggctatggagactctgactccccacttagcccaacctcctacactgttatgcaccttgttggggacatcattggcctgcttgaccattttggggaacagcacgctattatagtgggacatgattggggagctggtattggctggcatctagcactgtctacacctgagagagtcaaaggattgatcaacttatctgttacatactttagta

SEQ ID NO: 209593 - DNA, 345 bp, Gossypium hirsutum
  unsure (1)..(345): unsure at all n locations
gcgcccacgcgtccgctctgcaacatctggttgttagcttatatccccggtatccatgaatctccccgtgggggaatttgtcacctttccccaccctccaacagcgtccattattaaaaagtcctctcgcagcccatatatttttccaggtaaatgaaggtaaattccccaactgagctttgtagaaatctgaattgggaaaatattttactttcaaaacacgggaaataatgaattctgatatattaataagacgccatccctacttcgctaataatgcaacgttaaatttagcaaaatcacgtantaaataaatttatttataatatattatattttaaatat

SEQ ID NO: 209594 - DNA, 464 bp, Gossypium hirsutum
  unsure (1)..(464): unsure at all n locations
gttatcctttacatcttactttgtggtgtcccacctttctgggcagaaacggaacaaggagttgcgcaagcaatttttcgctctgttatagattttaagagggatccttggcctaaagtttctgataatgcaaaagaccttgtgaggaagatgctcaatcctgatcctaagcaacgacttacagctcaggaagtactagatcatccttggttgcaaaatgcaaagaaggctccaaatgtttccttgggtgagaccgtgaaggcaaggctcaagcagttctctgtaatgaacaagctcaagaaaagagctctcaaggtaatagctgagcatctctctgtggaggaagttgcaggcataaaagagggattccaattgatggatactgccaatagaggcaagattaacattgatgangttaggggtgggttgcataagcttggtcataccattcctgatgcagatct

SEQ ID NO: 209595 - DNA, 457 bp, Gossypium hirsutum
attttggcatgaaaaccaggtgaaggtgtcgattctcgttatgtctggccaggtggaagcatcggcaggagtgcattgggctgtgagtgtatatcgatggtcatatgaagcgcacacatgctatcggtcagattcatcattttgtgagagctcattggattgattatagatggttcgcgatgatgaacatattcagacgatgcattgctggtatctgcacgaggttcgctgctgctaagagctcggatgtttgttaataagccagatggaatggttagggaagagagaggtccttatggtgatcctcaacatccatatttctatgaggaggaagatgtgtggatggcaccaggctttatcaatcagttctaccaaagtccttgatattggaagacatacctgccttaagttgatcaggaaagaaaaatggggctaaactcattttataaagcttccc

SEQ ID NO: 209596 - DNA, 240 bp, Gossypium hirsutum
cagagagggtaattttccaggtggctgcggtcattcatgggtagcaatgttgcctctttcgggacaggtcaaaccaatcaatcacttctctactgaacaaactggcttcctaaccaattgtgttgaaaacagaggagcagaccgtgttggatctcaagctgaggcgggaactgctcctttgaaatggcatatgccaccgtcatgaccatagatgcatgtctgcgctgcttgataggagat

SEQ ID NO: 209597 - DNA, 432 bp, Gossypium hirsutum
accaaagggtcaaaacaaatgggatatggctgcatatagcagagcaagggacaggaccacttgttctattgcttcatggcttccctgaaatatggtattcatggcgccaccagatcactttcttggctaaccatggctatcatgtagttgctcctgatttgagaggctatggagactctgactccccacttagcccaacctcctacactgttatgcaccttgttggggacatcattggcctgcttgaccattttggggaacagcaggcttttatagtgggacatgattggggagctgttattggctggcatttagcactgtttagacctgagagagtcaaaggattgatcaacttatctgttccatactttagtagaaacccgaatgccaaatttgctgaattcttaatcaaaacatattgggatggaattt

SEQ ID NO: 209598 - DNA, 408 bp, Gossypium hirsutum
tcgcccacgcgtccgcggacgcgtgggtagatttgaacttttagcccgactttgcccaagattctactgacggccgacataagaagtgcgttcacagaggctggaatgcctgctattcgggctcggaaaaaaacagtgacagagaaagatcttctagatgcggagaacaaggtcatcaagggatatcaaaagctaagtgcatcccccatatacatggtttacaaataacccaaactttggagccactctcaactccgaaaacacatgataggggctcaagctggcgcaatagtatcggatttagatattgcctgtgctgcttacctggatttgatttcatagttgcctatactttggatgtgcgatgcttaatatgctgcaattccacttcttctctcgtgttagaat

SEQ ID NO: 209599 - DNA, 441 bp, Gossypium hirsutum
caaatggtgacctcagtgctacctagagtagaaagcttggcaagcagtgggattcaatcaatcccgaaagaatatatcaggcctcaagaagagcttacaagcataggtaacgtgtttgaagaagagaaaaaagaggtccgggaaagatgtcagcaggagctgaaaaaggctgccatggaatggggtgtgatgcaccttgttaaccatggcatctccgaggagctcatggatcgtgttaggaaagttgggcagaaattctttgaactccctgtggaggagaaagagaagtatgccaacgaccagagctctgggaatgttcagggctatggtagcaagcttgctaacaatgctagtgggcagcttgagtgggaggactacttcttccatcttatttttcctgaggataagagagacttgtcaatttggcctaaaatccccagc

SEQ ID NO: 209600 - DNA, 465 bp, Gossypium hirsutum
attgaatcggaacaaaaatcagataggagttttgggatgagaaatttcaagtacgttaagacaattaaagatgctctggagcaagaatgtccaaggacagtttcctgcgctgatatcgtctctctttctgctagagatggcattgtcttgcttggaggaccacgcattgagatgaaaaccggtcggaaagatagcaagagaagttaccttccagaggtagaaaataccatccccaaccacaatgattcaatggagttggtgctttcacgctttcaatccattggcatcgacacccaaggagtagtagctttactaggagctcactccgtaggtcgagttcattgtgtaaacttagtacacagactctaccccacagttgatccgacattggaacctgactatgccgagtaccttaaagggaggtgtccgacacccgaccctgatccggaggcggtgttgtactcg

SEQ ID NO: 209601 - DNA, 441 bp, Gossypium hirsutum
ccctcccacggtactgaccggtgatgctgagcttgaaatgagagggcgatgtagtgcaggtcaaaaagttcttgcttctctaatcatacggttggctttagccgagacattttgcctcaactgtggaatcttagcattagatgaaccaaccacaaatttggacggcccaaatgcagagagtctagctgcagctctccatagaatcatggaggacagaaaaggccaggagaattttcagctgatagtaatcactcatgacgaacgctttgctcaattgatcggtcaacggcaacacgcagagaaatattatcgtgttgcaaaagacgaccatcagcatagtataattgaagcccaggagatatttgattgaattctttcaacgggttttcctcgatacttcatccccagagcgccgtttcatcgagattgaatctgtacatg

SEQ ID NO: 209602 - DNA, 440 bp, Gossypium hirsutum
ctcctttacggcccagatcatttgctgtgaaagatgaaatcttctgcttgtttgagggagcccttgataacttggggagtttaaagcagcaatatggtctggcaaagtcggcaaatgaagtgattttggtcattgaagcttacaaggcccttcgtgaccgagcaccttatcctccaaaccatgtggttggccatctaattgggagctttgctttcattgtctttgacaaatccacctccactttgtttgtggcttctgatcaatttggtaaggttcctctctattggggaatcaccgccgacggatatgtggccttttgctgataatgctgaattgctgaaaggtgcctgtggcaaatctcttgcttcttttcctcaaggctgtttctactccacagcagtaggaggattaagaagctatgagaaatcctagaacaagat

SEQ ID NO: 209603 - DNA, 386 bp, Gossypium hirsutum
  unsure (1)..(386): unsure at all n locations
catgtcaccacaagcgaaggaaggactgtgaccagctacaacgtggcaccgggaaattggcagtttggacaaacatttgagggcgatcagttctagagtttcaggacagtaaagggtctttaaatggaagcttgtatatgtaatagccattgtttgagataggggaaggtataagaaggagagttagggtaaaggagaggctcagccggccccatatggctgtcaattgctgaggtgatttattggcacccgctaggcctatacatatatctttacttgattgatgatgatcaaggatattttcatctgtttggcttttgtctaattcatcatagccatgccatgaaacgaatcaaaatatatatttaaaagatttcttttcttna

SEQ ID NO: 209604 - DNA, 452 bp, Gossypium hirsutum
ctgccgggtagtgcggatggttctatgtataacatccctactggaggtagtgattatcctactcccgtgaatgataatggcagtaatgctgacataaaaggtggaaggccaagcccgtatatgcaatctccttctccttggtcaaatcaaaggaccccactaagtgttgatgttaatgttgcttatgtggaagggcgggaggaggtggacaggggaacctctaatcaacccctgacacaggacttctttatgatgtcatctggaaagagaaaacgtgaggattttgcacaataccaaaatggtggatatataccccaacaagatggagctggagatgctacatctgaagttgcaaaggcagagggaagtaggggtggtaatttcctggatagacgtcactcaacaaccactgcaaaaagcaagatcttggcagagttatctaagtcatcatc

SEQ ID NO: 209605 - DNA, 463 bp, Gossypium hirsutum
ggtaacctccccaattgctccagccaggcttttcaaggcttttgttcttgaggctgccaagatttggcccacggctgcccctcatgcagtcaagagtgttgagctcgaaggtgatgctagtcctggaagtattgtaaagatcacctttgttgaaggccttccataccaatatatgaagcaccagattggaggacatgacaaaaacaatttttcatacagttacagtatgattgaaggtgggcctttaggggacaagcttgagaaaatcagctatgagaaccagtttgtggcagctgcagacggaggaagcatttgcaagagctcaataaaatattacaccgttggcgactatgtaatcaccgaggatgaaatcaagactctcattaaagggagtgaggtagtttacaaggctattgaagcttatcttttggctaaccccgatgcctgcaactaaagatacagc

SEQ ID NO: 209606 - DNA, 442 bp, Gossypium hirsutum
cccacgcgtccgcccacgcgtccgcccacgcgtccgcatccccatggtgtttggtccaactaatggcggttgtcacaacattcggtgcactgcagacatcaacggacaatgcccgaatgagttaagagctcctggtgggtgcaataacccatgcacggtgtttaagaccaatgaatattgttgcactcaagggtacgggacctgtggtccgacccgttattcaaggtttttcaaggaccggtgccgtgattcatacagttatcctcaagatgatccttcgagcacctttacttgccctgctggttccaattacagggtcgtgttttgcccccgaggctcacctcatatagagatggtcggaagtaagagccaagaaaaataaagggatcatctcttggtctagttaatctgcgccttggaactaaaaaataaaaaagtcatt

SEQ ID NO: 209607 - DNA, 436 bp, Gossypium hirsutum
caaacactagtagaaggtttagttttacaaacatggctcgttgcggtgtccttaaggtggtttccatgattctcatggtgtgcatgactatgatgagtgcacccaaggcaggcaaagccgtcatcacgtgcagcgacgtggtgaaccacttgatcccgtgcttgtactacgtacaaaacggcggtacacccgctgctgcatgctgcagtggggtaaaagcactctacggcgaggttcagaccttcccggaccgtcaaaacgtgtgcaagtgcatcaaatcggcggtgaacggaattccgtacaccagcaataaccgtaatctcgcagccggactacctgctaaatgtggtctccaactcccttacagcatcagcctctccactgactgcaacatggtgcagtgaggttgatgatgatgatattgaaggagtggaag

SEQ ID NO: 209608 - DNA, 240 bp, Gossypium hirsutum
taaaatcccggaattacttaaacaacaatggctacctatgaaggtaaagttttcactgaagaacaaggggctttggtgttcaagttatggactgtaatgaagaataacgcagctgaattgggtcttaaattcttcttgaagatatttgagattgcaccatcagccaagaaactattctcattcttgagagactccaatgttccattggagcaaaacacaaagctgtagccccatgccatg

SEQ ID NO: 209609 - DNA, 294 bp, Gossypium hirsutum
tggagaggctggtacattctgacctactggattgaccactgaagctaagtctgttgagatgcataatggagctatgcaagaggatattgctggagacaatgttgcatggaacatgaagaatgtacctgtgaaggatctaaagcagatatttgttgcgtacaactccaagagaggatctctgacgggaagcaaccagctttacctgcaaagatattatcatgaaccacgcagggcagatggtagaaggctatgcaccgtgtctagatggccacacgttccatattgctagaaagt

SEQ ID NO: 209610 - DNA, 430 bp, Gossypium hirsutum
acggtccaaatggattgctgacaaatcacaggtttacactcaacatgcttatatgagacctcttggagttgttgctatggcgttgggtattgatgaagagaaggggccccaactctacaaatgtgatccagcaggccatttttatggccacaaggcaaccagtgctggatcaaaagagcaagaggcaattaatttcttggaaaagaagatgaagaatgaccctgcttttacttatgaggaaacggtgcatactgctatttctgctctacagtctgttcttcaagaggatttcaaggctactgagatagaggttggagtggtgaaagctgataatccagctttcagagtgatgtcaacagaggaaattgatgtacatctgacagctattattgagcgcgactagtgagcatggaccaatattagctgctgc

SEQ ID NO: 209611 - DNA, 340 bp, Gossypium hirsutum
cccacgcgtccgaatacagctacttaatggcaatataattaagaagtgaaaaatgaggggagctggaagaaatgggaaacagaataaatcagccagacaatactagttgataatattacttatacaacaaaaaagggcaactcttacttcctgccgacatcttttgtcttggttacgtcttcaatggagcctttttctctctatcggatattcgtgcaggacctgtcgtatgtgttttgaagcggcctctccctccttcctctttttcctttttcttaacaatctgaacaacatcttcatcctgcaaggaatggccaagcccacagtgttgacgattatg

SEQ ID NO: 209612 - DNA, 450 bp, Gossypium hirsutum
  unsure (1)..(450): unsure at all n locations
cccacgcgtccgaaaaaagaaaaaaacgcaaagaaaagagaaatggctactttgggtggaattagccaggtcgatggaagcgccaatagtttggagattgaaaacctcgctcgttttgctgttgatgaacacaacaagaaagggaatacgatgctgcagtttaagaaggtgacgaatgtaaaacaacaagtggtttctgggactatgtattacataacattggaggcgatggatggtgacaagacgaaagtttatgaagccaaggtgtgggacaagccatggatgaatttcaaggagttacaggatttcaaggttattggcgatgctcccgccggttgtacttncaccgcttaaggtgactggagattgtagaggaaggatatcgggatatcgaaggcgggttttaaataaatgtaactgtcttatgttaatttggatttagactactaa

SEQ ID NO: 209613 - DNA, 402 bp, Gossypium hirsutum
agccctaatcttctcatcgcttcttcctccacaaaaccctaataaaggtcgtagaaaagaacatgggtcgccgcaaaagcaccaacacaactcaaacctcgaccaactcttcgaacaaattcgaaggagctaacattcgcttccaagacgccgacgacaaggaaatcgccagcaacagctccaatctcgatgattcaatcgtcgccgttgataaagctagtgaagatatttccatgggagagcccgacgtttcgtttttcggttgcgacggcgaagatgataaaaccagtgctgattattacttcgattcttactctcacttccgtattcatgaagaaatgcttaaagatgtagtgcgaaccaagacatatcaaaatgttatttatcggaataagtttctat

SEQ ID NO: 209614 - DNA, 394 bp, Gossypium hirsutum
gcccgcccttgctcgtttgaaagcttatgagggcgttccttccccgtatgataaggttaaaaggatggtcatccctgatgctcttaaggtcttgaggcttctaaagggtcacaagtactgcctgttgggtcgcttgtcatccgaagttggatggaaccattacgataccataagggaacttgagaagaagaggaaggagagggctcaagttacatatgagaggaagaaggagctgaataagcttacggtgaaggctgagaaggcttctgaagcgaaacttggttctcaacttgacatccttgtgcctgttaagtactgaattttctagtgactagcttgtttttcttacaattttgttatttgaatggattacatttcattgttgcattctatt

SEQ ID NO: 209615 - DNA, 446 bp, Gossypium hirsutum
ggcgaagtggcaaagaaacagcagatgcctcctgcaagtgtgatgacaaggcttattcttatcatggtttggaggaagctcattaggaaccctaacacatattccagtcttttcggcttgacttggtccctcatatctttcaggtggaacattcagatgccaacaattgtaagtgggtcgatagcaatattatccgatgctggtctgggaatggcaatgtttagtctaggcttattcatggcattacaacccaagatcatagcttgtggaaaatctgtagcaacattttccatggctgtcaggtttttgactggtcccgctgtcattgctgcaacctccatagccattggtcttcgtggggttcttttgcatgtcgctatcgttcaggctgcccttccacaaggaatagttccatttgtgtttgccaaggagtataacgttcatcc

SEQ ID NO: 209616 - DNA, 433 bp, Gossypium hirsutum
  unsure (1)..(433): unsure at all n locations
gttggaccaggagctcgagacagagatgggaagcatatcccagttaatctgaaggaaggagatacagttcttttgcctgaatatggtggcactgaagtcaagcttggtgaaaaagagtatcacctatacagagatgatgacatcttgggaacccttcatgactgaattttgcggctgtgggactggagaatgattctcattcaaatatgtctctgttcttgaaggaaacaaatatttaccttggacttgtgactctatcagtaattttacatgttttaagactttttattcgtttgaaggcattttggatgaggaatgttttcaagaattttactagccatgggaaaaaaaaaaaaaaaaaacaaaacccccntaaaaaaaaaaataaataaataaaaaataaattattccaaaacctttttataaaaattaa

SEQ ID NO: 209617 - DNA, 261 bp, Gossypium hirsutum
gaaagaagttgtaattgaaaaggttgtgcggtacaaacgcacatgtataactactgtggaaggcctggaactttttggtgataaattaagcgatgcttcaaagaaacttggaaagaagtttgccacaggagcctctgttgttaatgggccaactgacaaggaacatattgatgttcactgagacatatcatacgacattgctgcatgcattaccgaaacctgggctgatgtgcccgagactgcaattttctctattgtgga

SEQ ID NO: 209618 - DNA, 445 bp, Gossypium hirsutum
gagaaagagaagtatgccaacgaccagagctctgggaatgttcagggctatggcagcaagcttgctaataatgctagtgggcagcttgagtgggaggactacttcttccatctaatttttcctgaggataagagagacttgtcaatttggcctaaaatccccagcgagtacactgaagttacaagtgagtatgcaaggcaactgcgagccctagcgagcaaaatactttcagcactatcaatttgcttgggattagaagaaggaaggctagagaaggaagttggtggcgtggaagagcttcttcttcaattgaaaatcaattactaccccaagtgtccacaaccagaactcgctctcggtgtcgaagctcacaccgatataagtgcactcactttcattctccacaacatggttcctggcctccaactcttttaccagggcaagt

SEQ ID NO: 209619 - DNA, 441 bp, Gossypium hirsutum
cttggatgtatggtggagctcctaagggacctcagattacggatcgtaaaagacggggtgacataggctatgcctcacctcgtcgactgatacatctgctagactctctatacacaacctggagaagagtgacttaccttgttttgaaggaagttgatagaatgttggacatgcggattgagccgcaaacaagaaagattgttttttaaagtctacctgagttacaaacattgtactggagtgcaacgaggcctaaagatattgaatctttagcatgacagttattacgcaacccataatatgatgcccatattcttatgatgttatggctatcattgcatctacttatctgaaagcaaccaatttattaaccaagttgttgaagtcataacagatccacaatagttcaacatgctaatctaattgctcgaggatctgatg

SEQ ID NO: 209620 - DNA, 446 bp, Gossypium hirsutum
cactatcttctgaaaaactgggtgcaccatttcctcctaacttcaaagatgtagtgaagacactattcaaaagactgttccgagtatatgcccacatctatcactctcactttcagaaaattgtgagccttaaggaggaagcccatttgaacacatgctttaagcatttcatactttttacttgtgagtttgggctgattgacaagaaagagctagctccacttcaagagctcattgaatccatcatagtcccctactaattacaggactggactttggatatactgatgatgtttctttcttcttctttttttctttttttttttctttattttagggatgcaaagtcaaataaattaagagactgttattgcagacgacttaagaaacaagcgtctctaatttatatctctgcgttataaatgcacgttcatatgtcatgttcc

SEQ ID NO: 209621 - DNA, 351 bp, Gossypium hirsutum
  unsure (1)..(351): unsure at all n locations
cttaatttccatttactagcaatttcttcaagttcttttctttggttttttaatcaatgggtgaccactacctccaaaacactgaaccaatgactcaccaaatggtgaaagccgctactgccgcaacagccggtgggtccctcctcattctctccggtttaatcctagctggcacccttattgcgctcaccatagccactccactcttcgttattttcagtccacttcttgtccctgctctcattgcaacagctctcctagcaacgggtttcgttgcctccggcggtttctgtgttgcanctgtcacggtcctgtcctgggttnacaggtatgttacggggaggcacccac

SEQ ID NO: 209622 - DNA, 365 bp, Gossypium hirsutum
acgcggtcgaaattataacagattacagaaccgattcttagcttagacatgggtgcaatgatatgctcaaggctgattgtgtagatctgttggttaaatactacaaagaagcgagacgtgcagtttacttgagcaatgaagaagacgatactcgatccaagagggatgcaagtggagcctctttaccaatagagaaaacatctagcgtgagaaacatggtggttaagtctaaaactagacggggtggaagatgttgtttgtgattccatcctttctggatacaaaaggtgtcggacattgtgttcttttgttgtcatgcttatcacacgacttgcttgactgactctactgacagtaatagcagc

SEQ ID NO: 209623 - DNA, 369 bp, Gossypium hirsutum
  unsure (1)..(369): unsure at all n locations
gctaaccatgagctacttaaccatttctcaaatctcctacctcctcttctttagcggcctttgcatttccgatcaagcagcgcgctttgaaatccgcaatgagtgctcctacaccgnctgggcagcagcctctcctggtggtggcctgcgtctagaccctctgcaaagttggaccatcgatgtgcctgctggcactgctatggctcgtatttggggtcgaaccaattgcaatttcgatgccagtggtaggggtcattgccaaactcgtgattgtggnggactccttcaatgcaaatggtggggtgtacctcctaacaccctggctgaatatgcacttaaccaatttggaaacatggatttctacaacat

SEQ ID NO: 209624 - DNA, 430 bp, Gossypium hirsutum
aaagcaaccgaactcaactcaaaattacacttatccgacacatccaacttgccgcaaggaacgacgaacagctgagcaagctgctcggcgatgtgaccatcgccaatggtggtgtgatgcccaacatccacaacctcctcctgccgaagaaaaccgggacctccaagacttccggtgccgatgatgattaatgcagataaatttagattccccaaagccgttcacaaatcaaccccttcccccctctctatgtagtacatgacgatcctgatattcaaatctctaaggtttttggctttggctgttgttctattattaccttctgtggaactttagctagcaattagatttttagggatctcggtatgatgtcgatataaatcacattatccatcttttttttcctttgggaaaaaaaagcaaggtcata

SEQ ID NO: 209625 - DNA, 401 bp, Gossypium hirsutum
acaaaattgaagctcacgtggcttgcagaaactagtgaacttgtaaacctttccttggtggagtttgattatctaataacaaagaagaagctggaagaaggggaggatttcctagatgcactaaacccatgtacgaaaaaggagacagcagcaattggagattccaacatccgcaatttgaaacaaggagagatattgcagctggagaggaaaggctacttcagatgtgatgttccctttgttagaccttcgaaaccagtggtgttgatcgcaattccagatgggcggcaacaaagcatgttgaagtaggtcttttaccctatctttattctgatctgtagagtgctgggaagatcctccaactcttttctggctaatacttggacatgcgtatctatgac

SEQ ID NO: 209626 - DNA, 307 bp, Gossypium hirsutum
cccacgcgtccgcagggtttaagaaggatgtttcgcaatcgttggttgataacaccgacatggaactcttgggaatcgattacctatatattcctgcttatgttgatgctgcccctactcatcatatacttctgaaacggaggtaaatcgctataggcgaaggtctaaacctctatagaataaaaccgaagaagtatacgggtcaatgcctacctttaaggatggttggtgcagatggatgcccaacaagatgccttcttactgcttaaaacacaaatgctgacttcaagttggtaagatatatgcc

SEQ ID NO: 209627 - DNA, 431 bp, Gossypium hirsutum
cccacgcgtacggccacgcgtccgaccacgttttcgtacatattaaatcgagaggagaaccaatgcgttgcttgcccgtcaacaaaacggattactcggttggagccaagaattgtcagccgaagaaggtgaattgtaggccgaatggtttcagcttctacaagctagaaggagttgaccatttcatgagccagtacaacgaaggagaagggataaaggagagtgattgtgggaggaaatgcacctctgattgcacgtgtttggggtacttttaccacagggaaacatccaaatgttggatcgctaatgagttgaaaacccttgctaaaacctctaactcttcccatgttggttatataaaggcacccaacaagtgacgggaatcctattaaggatttggaccttttcctttgtattttccagcttcttta

SEQ ID NO: 209628 - DNA, 385 bp, Gossypium hirsutum
gaagaattctacgtgggaactatttttgtttttggcgaaacggataatcagaatgacttggggaacactgctggtaatgaaggtaattcctatcgggtatggcggttacaagtgggtactgaagtggcctatttccaggaggcactctgaaatgatagcatccgctgtaccaagctttatacagaataccacttgtatctatgcaagaaggttttatgagaatgcatctacccacaggctgatatgacaaacatatactattgtggcacaaaaagtagaggttgaaagatagcctttacaggtgtttcacaggatgcatggcgccatgtcttacaacagacattatcttcagacatgccgttcgtccaacttacatgccatacat

SEQ ID NO: 209629 - DNA, 448 bp, Gossypium hirsutum
  unsure (1)..(448): unsure at all n locations
ggtcagcgtcccggtggtagaagggctggggctggtcagcaaagtcagcaaccagttccatgaatgcagcagcagatgctaccgcgagggcgggtctatcgctatccaccagggcgtggtctacctgatgtttcaatgcctaacattgctggaggcatgctttctgttccatatgatatgggtggcatgccaatgcgtgatgcatcaatttctcagccaattccgataggagccttggcctcagccctagcaaatgctacaccagatcagcagagaacgatgctggggagaatctttatcctctagttgaacagctggagcctgatgcancagctaaagttacagggatgcttctggagatggatcaaactgaggttttgcatttgctcgagtcaccagaagctctaaaagcgaacgttgctgaagcaatggaggttcttaaaactgg

SEQ ID NO: 209630 - DNA, 398 bp, Gossypium hirsutum
gaagcgttgaataagcggttagggactgaggatttggatctgtatagaatattagaggagactgaaaggcgcgggataacctttgatcaattactcactatcccggaacaagatgaatgggtctacagtgatgggaaatcaacaacatgtgttgcctttatccttgagatgtataaagaggctggggtcttcggtcccctttcaaactcgattcaagtaaccgaattcactatccgtgatgcgtacatgcttaagatatttgagaacaaccaaacgaacctgcctagttggtgtaacaatggggatggccggcttccattctgtcagattctgggcgagtattggatggagttgccattttataacagcttagaaccatatgccaatatgaatgaaaa

SEQ ID NO: 209631 - DNA, 397 bp, Gossypium hirsutum
gacgagtctgatatattcccaaacatgttgttattcgccgaagcatgcggaatacccgctgctcgtgtgacgaagaaggaagatctccgacaagcgattcagaaaatgttggaaactcctggaccgtacttgttagacgtaatcgtaccgcatcaagaacacgtcttgcctatgatccctggtggaggggcattcaaagatgtgatcacggatggtgatggaagaacaaaatattgattttaatgaactttctgttatatgtatgtatgagcaaccatggaagcttagctgtgggctaataatctagttttcctcttctaagaaactcagggtatacttttatgttgtcttgaagtatatgtgtttgtatatttgggtacgaatataaagatatgat

SEQ ID NO: 209632 - DNA, 440 bp, Gossypium hirsutum
caaggatggagatggttgcattacttccaattagtcgggaactgtgatgcgatcacttgggcagaaccccactgaggcagaactgcaagatatgattaatgaagtcgatgctgatggaaatgggaccattgattttcctgaattccttaacctgatggctagaaaaatgaaggatacagactctgaggaggagcttaaagaggcattcagggtgtttgacaaggatcaaaatgggttcatttctgcagccgagctgcgccatgtcatgacaaaccttggtgaaaagcttacagatgaggaagtcgacgagatgatccgcgaagccgatgttgatggtgatgggcacatcaactacgatgagttcgtcaaagtcatgatggccaagtaaaggacctctccaactataaccagtattaaaaaatggggtttaaaaaaaagga

SEQ ID NO: 209633 - DNA, 410 bp, Gossypium hirsutum
cccacgcgtccgttcaaaacacccttctccctcttccatcgtgatctccgctctcttctctcatatcgaacaaaaaaaaacccgatcccaatggcttcttcaactggattttcactcaatttctcccctctttcaacttctttcaagcacaaccaggtacctcatcatgggatctctaatgtcaacttacttagtctcccatctcttagaatccgaccgggacctatgcgcctccgggtttcttgtgcggccaaacccgagacggtggacaaagtttgtagcatagtgaggaagcaactagcactacccgaagattcttctgttaccggagaatctaagcttgctgcactcggagctgattctcttgacacggtcgagattgtgatgggactcgaggaggagttccgaat

SEQ ID NO: 209634 - DNA, 383 bp, Gossypium hirsutum
tcgcccacgcgttcgggaagcgcttggaaaagcggtagagtctattagaaccaagagatcgtttgaagccttcttccttaaagcttatgcattggccgactctagcatggatttttcatgttcttcaacagttatctcattgcttgaaaatgccttgaaatgcccctcggataatcttcggaaaggtcaagctctgaacaatcttggaagtgtgtacgttgattgtggaaaattggacttagcaaccgattgctacattaatgcccttaaaatacgacacaccacagcccatcaaggccttgcacgagtacattttctcaaaaacaacaaggctgcagcatatgaggaaatgactaaactgattgaaaaagctaaaaacaatg

SEQ ID NO: 209635 - DNA, 398 bp, Gossypium hirsutum
tgatcgtccaaacacaggatcatccacaattgtagagtgggatgttaggctagagaacaagggtgggtatatttcttgtgatcaagttgaaccttcaagaagtgatcaagaaacaaacaagcccattgataagacacagaaacgtccggcacacaatcgagaagctgctcctagaagtcgtctacagaaaaaggcctatcatcaacaattagatatgaagcggttgcaactagctcatctggaacaagatctctaaagaactatgcagcaggtgatatacataaacaatccatcagatactggcgattttggactgtcgtgaaccgtcaactcagggagtactgcatttgagatgagaaatcgacactgcgttgaggtgcaaaataaacagacttgtg

SEQ ID NO: 209636 - DNA, 429 bp, Gossypium hirsutum
tcgcccacgcgtccgctcgaaacctgggacttgctagatgtaaaaggtggcagtgttgcacaatttcagggccaagaaaggggagtcattattgcctctaccgatagatcaacagtccaacacagtgaggttgacagaacttactgtgtgggatttgtaagcaatccaaaaagggttaatgttgcgattacccgggccaaatcattgctcatgattgtcggaaatacacacatcatttgtaaggatccttactgggaaaaactggtgtggcattgtcatgaaaataactcatatcagggctgccccccaccagaaagggtgaaccatgactttgaagagtcatgttctgagactggattaagtaacgaaatagaaggttcacgttggaatgatgggacatgggattgttaatatgaaacaaaagctggt

SEQ ID NO: 209637 - DNA, 412 bp, Gossypium hirsutum
ctttttggacaccgtgagaatcggagaccgagaatccgtctttttaggggttggttcggattttaatttttgtcgcaatggcggatgattcggatagtaagcatgcagcgggggagtctatgatgggcaagatcagcgagaagattcacggcacatgattcatcgtcatcttctgattcggatcatgacaaaccggcttccccttcctccgttaaggctaacagctatcggttgttcggaagagagagaccacttcatcatgtgcttggtggtggaaaacctgatgatgtgttcttgtggaggaacaagaagatttctgctggtgtccttggtggagcaactgcaatttgggtcctttttgagttgattgaataccacctacttactttaatatgtcacatttcgatactct

SEQ ID NO: 209638 - DNA, 381 bp, Gossypium hirsutum
caaagactcaggtgctcagaatttaattcctatggaattagccttgaagattactagcaagataagggcaaaagaaagatttgcggtttatattgttataccaatgtggcctgagggtgaccctacttcagcctccgtgcaagagatactctgttggcaggcacagacaattcaaatgatgtacggagtcgtagcacaagaattgaaatccatgggtatcgagaattctcatccacaagactacctaaatttctactgccttggtaatagggaagaagttcccaaaagttctgggccaagttcatcccaatgtaaccatagtgaaacggtaaccaaacagtgacactacctttgtcatttggttatatacttgggtgattg

SEQ ID NO: 209639 - DNA, 439 bp, Gossypium hirsutum
atttttctctgctgcctagacagctttgtaatcgtatatgtactctgtatactactactatgtgaaaaccaagatgtcaggcttcttccagaccaggttctacttcggatacactttgatgttttgtcttggtttgggaatcctttgcggagctgttggttatcttggatctaatttgtttgtaaggaggatctacagaaacattaagtgtgactagaactttgctaatggatattagaaccagcagcgcttccacaagcattttcagttgtcgaggcaataatcatggataggtagcttcttgtcacgtatgaggaaccaagcaaagcctcaagatgaaactggaagccctgagatttttgttttgccttcgattttactcgcctgtaattggaagccctgatttagaatatagaaagtaactaaaatattaaacaac

SEQ ID NO: 209640 - DNA, 382 bp, Gossypium hirsutum
tattctttctggcccgagagcaatttctgatttttcatatactagtactataactgctggtgtgcttggggatgctgcccactcgaggctgccacttgctgcgaacatcgctacagctgatgccctcatgactaccctgtctgcaacatacatgaaggcacctgcttgatgagcaagggcatttctttggcagtgaaagcactgaagcgcactccagcttaaccgctctgggcacattgaaagcctgggattgtaatgccgtagatgatgggttacaagggagatgatgaaagctcgacagggcttaacaatctccttgggtctaatatcagtatatggatggtgacaattatgtatatagtatcctatttatgacccatgg

SEQ ID NO: 209641 - DNA, 412 bp, Gossypium hirsutum
tcgcatgaaaccaagctacaaagcgctattagatgtttatgaagaaatggaacaattggggggtgagcatgggagacaatatcgtgtcgaatatgcgaaaaatgcgatgatacgacttgctcaatcttaccttgtggaggccagatggactcttcaaaactacaaaccatcatttgaggagtttaaggctaatgcattgccaacttgtggatatgccatgcttgctattacatctttcgtcggcatgggagatattgtaacaccagaaacctttatatgggcagccaatgaccctaacatcattcaagcttctacaattatttgtaggcttatggatgatgtggctggacacaagttcaaacatatgagagaagacgattgctcagcaattgagtgttacatggaagaatat

SEQ ID NO: 209642 - DNA, 276 bp, Gossypium hirsutum
cgacaagcttggccttcattctctccgccagcgtcactggtatatccagagtacatgcgccacatctggtgaaggactgtacgagggactggactggctctcaaacaacattgcaaacaaggcatagatggcgtaattgacttgtcagtctcagaaaatgccagccccttttggaattattgatgtttctacgtccgttaaaatgttttggtttttcatgttcttttgtttcttgcaaactttgtcatttgttcttgtagtttaagaataattgat

SEQ ID NO: 209643 - DNA, 202 bp, Gossypium hirsutum
cccacgcgtccggttgaacttgtggtgtctgcatccagctataagatgcttacacaaatggacttgctgaaattcctcaaggaccatgcctctgaattgggggagatattatcaagcagcataaaggaaataggttgcttaaaccagaatgtttacgccattaccgatcgtaccagatggatggatgccatcaaatgcttga

SEQ ID NO: 209644 - DNA, 327 bp, Gossypium hirsutum
gtcgaccgaagaccctaattttcggaggtaaggaggaaaagaagaaatggcggtgccgcttctaagtaagaaaatcgtggagagagagggtcaagaagttcaagagaccccagagcgaccgcgaaatctccgttaagacaaactggcgtagaccaaagggtattgattctcgtgtcagaagaaagttcaagggatgtactttgatgcccaatattggctatggttcagacaagaagacccgacactatcttccaaatggctttaagaaatttgtcgtgcacaatgtcggagagcttgaactggtaatgatgcacaacaagacatatt

SEQ ID NO: 209645 - DNA, 429 bp, Gossypium hirsutum
cttcgctggatcgggctcaggaatggcttttaacaagttgaccgacaacggagcaacaaccccggccggtctcgtagccgccgctctagctcatggcttcggtcttttcgtcgctgtctccgttggcgccaacatctcaggtggccacgtcaaccccgccgtcaccttcggtgctttcgttggcgggaacatcactctcttgcgcggcattctttactggatcgcccaactcctaggctcaaccgtcgcttgcctgttgcttaagttcgctaccggcgacctggctgtaccagcttttggattgtcatcaggtgtgggcgtgtctaacgcattggttttcgaaatcgtgatgaccttcggattggtgtacacagtgtacgccacagccgttgatcccaaaaagggaagcttgggacaatcgcaccattg

SEQ ID NO: 209646 - DNA, 446 bp, Gossypium hirsutum
  unsure (1)..(446): unsure at all n locations
ttttggaatcagcaacaacataccatcaacaggttcaagcctctgtgcaagaaactttgaagaagcatgagctgacaagacctcttgcaaccaaagagcttgagtggttttcggcatctgctctattggctctacctattattattttgttcagaatattttcagcaattttctgcaaaaagacaaagaagcgtgttcgacatactaatgcagtccaccatggtcgtcgtaagggcaaaagggggcacacagacaagtagactgcgtgtatttaggttttggtctctgaatgttgggaaatattagaggctaactggacgtatgtttttactttttaggggctctaggtgatcatgttgggtagggagctgtggtgttgcaattgggaagtatttaatcttctcttacccctcagggccctggntttaatattattattatttttt

SEQ ID NO: 209647 - DNA, 288 bp, Gossypium hirsutum
gattaatgaggtctaccacacactttctaatattactactaggagaggaccctctgggcgcggcctcttttggtacgtattagtttaccaactatggcaagcccactacggctgtgtatgagccgacttatgagaaagccacatcttatgaacataaaccatctgtgtatgtacctacagagaaagaacaacctgtgcctgaaccactatttgttacaccaccatagatagagacaccagacgcctggccgcctctatatgaatctaccggcaaggaaaatgccccac

SEQ ID NO: 209648 - DNA, 429 bp, Gossypium hirsutum
  unsure (1)..(429): unsure at all n locations
cccacgcgtccgcccacgcgtcctttcacgcgtccgctgacttgcagggaagaatgggaacagtttgggatggtggttccatggtgttcgcaagtggaagtattgtttcatccatcgttgggttgcttcgtgacgcattgtgggtggaactcgacgttggagagcatggcggccggtgtaccggtggtggctttccctcaatggacggatcaaaggactaatgcgaagctgattgaagatgtgtgggggaatggggtgagagtgagtgctaatgaagaagggatggtggaacgtgatgagatcgataggtgcttggatttggtgatgggggatgataagaaagggattgaagtgaagaaaaatgtagagaaatggaaacggttagccagagaagcccgcatggaaggcnggctccttggatatgaagct

SEQ ID NO: 209649 - DNA, 407 bp, Gossypium hirsutum
gctacttaaccatttcccaaatctcctccctcctcttctttagcgtccttttcatttccgctcatgcagcgcgctttgaaatccgcaatgagtgctcctacaccgtctgggcagcagcctctcctggtggtggccgtcgcctagaccctcggcaaagttggaccatcgatgtgcctgctggcactggtatggctcgtatttggggtcgaaccaattgcaatttcgatgccagtggtaggggtcattgccaaaccggtgattgtggtggactccttcaatgcaaaggttggggtgtacctccaaacaccctggctgaatatgcacttaaccaatttggaaacatggatttctacgacatttccttagttgatgggtttaacatccccatggtgtttgggccaactaat

SEQ ID NO: 209650 - DNA, 381 bp, Gossypium hirsutum
cacacttgataatattgctactaggagtgttttctcttgccactaccgctgttggtacctagcacgctcgccacgatgggaagccgcctactttactttttaaacctgctaaggtgaaagcctccaccttatgaacactcatgcctataaacctcctaacgcgaaaccttcaccttatgaacataagccctctgtctatgaaccaccaaagaaagtattacctgagcctatggcaacagcttatacaccttcaaagaaagagaagcctgaacccgaaccaccagtctatgaaccttccacgaatgataagcctgagcctaatacaccagattatacacgcacccatgaaagagaagccgtgagccataccaccagtatatg

SEQ ID NO: 209651 - DNA, 447 bp, Gossypium hirsutum
gctcaacgatgtctaccacacacttgctgatattactacttggagtggccgctctagccactccctcttttggtacctatgagtctcccaactatgggaagccccctactcctgcttataagcctcctaaggtgaaacccccaccctatgaacatacaccacctgtctatgaacctccaaagaaggaaaaacctgaacctaaaccaccagtttatacaccaccaatgaaagagaagccacagcccaagccaccagtatatgaatcaccaaaaaaggaaaagcccgaaccaaagccaccagtttatacacctgcaaagaaagagaagcttgaacacacaccaccattatatgaaccaccaaagaaggaaaagcctgagcctaagccaccagtttataccccaccaaagaaagagaagcctgaacccaagccaccactgtatgaaccac

SEQ ID NO: 209652 - DNA, 428 bp, Gossypium hirsutum
gccaaaatgccgccaaaacttgatccaagccaagtcgtcgacgtcttcgtccgcgtcaccggcggtgaagtcggagcacctagttcactcgctccgaagatcggtcctctcggtctctctcccaagaagatcggagaagatatcgctaaagagaccgccaaggaatggaagggtctccgcgtaaccgtcaagctcactgtccagaaccgccaggcgaaggtcatggtggtaccgtcggcggcagcgctggtaatcaaggcattgaaggaaccggagagggataggaagaagaccaagaacatcaagcataacgggaacatcggactcgatgacgtcatagagatcgctaaagtaatgaggccgaggtccatggctaaggatttgagagggacggtgaaggagattctgggcacctgtgtttccgttgg

SEQ ID NO: 209653 - DNA, 392 bp, Gossypium hirsutum
gtctcatgttctccagctctattgtcttcactcagcttctactgattttgatttgacaggacaattggtatggcctggtgcaatgcttttgaatgattatctctctaaaaacgctgagatgcttcaaggatgttccgtgatcgaattaggctctggtgtgggtatcactggcatgctctgcagcagattttgtcgtcaaattcttctgactgatcataatgaagaagtgctgaagatccttaggagaaacatagagctcaatgcatcttctgaaaatcctagttgttgtgctgcactagaagctgagaagctggagtggggaaattctgatcagattaacaggattttacacaaatatcctggaggttttgaattgattcttggtgctgaca

SEQ ID NO: 209654 - DNA, 421 bp, Gossypium hirsutum
  unsure (1)..(421): unsure at all n locations
cccacgcgtccggcttggaggttacttagcactaatgactgtgatattcttctgggcaatgaaagacaccaatttcttctcgaacacatttaatgttagatcactgaggcatagtattgatggtgagagagaaatgatggcagctttataccttcaagttagtattgtgagtcaggccctcatttttgtcacaaggtctcgcagctggtcctactttgaacgccctggacttctactagtcagtgcctttctagttgctcagttggtggccactttaatagctgtgtatgcagactgggggtttgcaaggattaaaggtatgggttggggatgggctggtgtaatctggctatacagtgtggtgacttttatcccactggatnttatcaaatttgcaatccgctatgttcttagtggaaag

SEQ ID NO: 209655 - DNA, 340 bp, Gossypium hirsutum
ccacgcgttcggccacgcgttcggccacgcgttcgcccacgcgtacgtccacgcgtccgagggtggtgctaagaaaggggtgatctctgcccctagcaaagatgcacccatgtttgtaatgggtgcaaacgagaaagactacaagccagagcttgacattgttttcaatgctagctgcactaccaattgtcttgctccccttggtaaggttatccatgaccgatttggaatcggtgagggtctcatgactaccgatcatgccattactgctacacaaaagaccgtcgatggaccatcaatgaaagactggagaagtggtagagccgctttcttcaacatc

SEQ ID NO: 209656 - DNA, 341 bp, Gossypium hirsutum
cccacgcgtccgcccacgcgttcgcccacgcgtccggggaatggtttctagcattctgcagattgttattgctcctattactgcaggattgcttttgaatcgggtgttccctcgtctttgtgaagccatgagaccatttctgccgccgctttctgtacttgatacagcttgttgtgttggagcgccccttgctattaacattaattcgggtctgtccccatttggcttaactgattcggtgctcattgctgcattccatttatcagcattcattgctggttatttcctcaggggatcactcttgcataaagcacctgatgtgaaagcattgcgaagaacac

SEQ ID NO: 209657 - DNA, 428 bp, Gossypium hirsutum
gccaaaatgccgccaaaatttgatccaagccaagtcgtcgacgtcttcgtccgcgtcaccggcggtgaagtcggagcagctagttcactcgctccgaagatcggtcctctcggtctctctcccaagaagatcggagaagatatcgctaaagagaccgccaaggaatggaagggtctccgcgtaaccgtcaagctcactgtccagaaccgccaggcgaaggtcatggtggtaccgtcggcggcagcgctggtaatcaaggcattgaaggaaccggagagggataggaagaagaccaagaacatcaagcataacgggaacatcggactcgatgacgtcatagagatcgctaaagtaatgaggccgaggtccatggctaaggatttgagagggacggtgaaggagattctgggcacctgtgtttccgttgg

SEQ ID NO: 209658 - DNA, 286 bp, Gossypium hirsutum
gccacgcgtccgcccacacgttcgcaaatatgagaaatcaggtaatgagcaatttttgaccgaacttagcaaatggaccttccatgaaagaggtcatcttaaggctgtgtatgtaaaacaccacaaagtcgtagaaacagattaacctgctttgtacaggattaatgatgagttggaatactcagttgagatctatgtgtggtctggaactagctgggagccatacattactgacgatgtccaagtccagttttacatgatgagcccccatattttgaaaactttg

SEQ ID NO: 209659 - DNA, 352 bp, Gossypium hirsutum
gattgctgctcatttggaagcattagagttcgatgtctccctcgttgctacggagtggtttctatgcctttttgctaaaagcttgccttccgagacaactctgcgtgtgtgggatgtccttttctacgagggagcgaaggttctttttcatgcagctttggctatatttaagatgaaggaagaagatttacttctagcacatcaggtcggcgatgttattaatataatacaaagaactacgcatcaccttttcgatcccgatgagttattgacggttgcattcaataaaattgggtttatgacgacaaacactatatcgaagcaaaggaaaaagcaggaacccggagtaatg

SEQ ID NO: 209660 - DNA, 375 bp, Gossypium hirsutum
cccacgcgtccgaaaagcaaaagaaccctaccgacgatgttccggcaagcgtcacgcctcttggctcgaactaccaccccatggaggggaagtcgagcattttcgtcagatgtaccagccacacccgctcaagattcgagcttcatcgaatcatggtccaaagtcatacccaacttagaccctcccaagacaccatcttctttcatgacccctcgccccgccaccccttctgctatcccttctaaactcaccgttaactttgttcttccttatgcatctgagctctccgctaaagaggttgacatggtaatagttccagcaacaactggacagatgggtattttgcctggacatgttcctacaattgctgaactg

SEQ ID NO: 209661 - DNA, 436 bp, Gossypium hirsutum
  unsure (1)..(436): unsure at all n locations
cccacgcgtccggggatggccaaattaaaaacgattaccatgattatcaatgaaactttacggctctatcctcctataagtggcgtgataagagaagtaggaagagaagtccaattaggaaaacttgtcctgcctacacattcagaggtcgacatgcgaatcatagcacttcaccatgatcctgacttatggggagatgatgttaatcttttcaaaccagagaggtttgctgaagggatagcgaaagctactaagtacaatgcagctgcatttatgccttttggattgggacctcgatcttgcattggcatgagctttgcaatcactgaagcgaaaactgcactttccatgattctacaacgctacactgtcaccgtcttccctacctatgntcacgcacctgcaccacgtcttacactcaagccacaacatgaga

SEQ ID NO: 209662 - DNA, 458 bp, Gossypium hirsutum
  unsure (1)..(458): unsure at all n locations
atcccaccagaccaacaacgtttgatctttgcagggaagcagcttgaggatgggaggaccttggctgattataacatccagaaggaatcgacccttcaccttgttttgaggcttcgtggaggcatgcagattttcgttaagacattgactgggaaaacaatcacattggaggtggaaagttcggatacaattgataatgtgaaggcgaagattcaggacaaggaaggtatccctccacatcagcaaaggctcatctttgctggaaagcaattggaggatgggaggactttagctgattataacattcagaaagagtccacccttcaccttgttcttcgtctccgtggtgggcagtgagaagttaattcttcttttgtctttgttctagcttaagatggtcgcaaataagcctttaggaaagngcctattttcttatctcttaatgtaacatggtaagc

SEQ ID NO: 209663 - DNA, 406 bp, Gossypium hirsutum
aacacttctgcagtgaccaaaaaagcttcattgtctcttctatcgaaaaccccatggctgctcttaagctagtttgtgctctagtgttgtgcatgttggtggttgagcccattgccacaaccaccataacatgcggtgatgtgacaagcaaagtggccggttgcttatcatacttgcagaacggatggaacgtgccgaatgcttgctgcgacgggatccggtccctgaacaacatggctcgaaccacccctgaccgccaaaccgagtgtgggtgcttgcaagctgccgctaaggctgtcaaaattaaaggcaacttgactgatacccttccagccaaatgtactgtcaacatcccttacaagatcagcacttccactaactgcaaaaatgtgaagtgagatggatg

SEQ ID NO: 209664 - DNA, 439 bp, Gossypium hirsutum
gttggtgaaggctttccaaaagacttactacaatagctatggaggtggtgccaacgagctccaagatgggttcaacaagggcaccggcttgggtgctgagatcattggcaccttcgttcttgtctacactgtcttctcagccactgatcccaagaggagtgcaagggattcccatgttcctgtgttggcaccacttcccattggatttgccgtgttcatggttcaccttgccactatccctatcactggcactggcatcaatccagcaaggagctttggagctgctgtgatttacaaccaagaaaaagcttgggatgatcaatggatattctgggttggacccttcattggtgctttcgttgcagccttttaccaccaatacatcctaagagcagcagcgaaagcaccaatgaaggctttccaaaagacttactacaat

SEQ ID NO: 209665 - DNA, 438 bp, Gossypium hirsutum
gcgccacgagacagcctataccaaaatcgttgaaaagctgtttgagattgatcctgatgaaacagtcctggcatttgctgacatgatgaagaagaaaatcgccatgccggctgagttcatctatgatggcagagattataacttatttgaccactactcagctgttgcccaaagaatcggggtttacactgctaaggactatgttgatatagtagagcacctggtggatcgatggaaggtgaaggagctagctgggctttcagccgaggggcgtaaagctcaggactacttgtgttcacttccttcgagaattagaaggttagaggagagagcgcaagaaaaggccaaggaagcacccagtgtcccattcagttggatatttgatagagaagtgaaactttaggtcatgaaatacagttaagactcctgcaatgcatt

SEQ ID NO: 209666 - DNA, 339 bp, Gossypium hirsutum
agaaggtgaagtgttgactgagaagattggtgtagagacatgggttcgtgccctcagtgtttcctcattgccaacaactcctgcagaacgtttttccatcctcttcaaagaacgagctaaatgggagtggaaagatttagagccctacattagggatctaaatgtacccgggctttcatcggaagctttgcttctgaagtacactcggagatctcaaccgagcattgatgcggaacctgtttttagtgctagatagatatatgtatatattgaggcttggctttctgagggtgccattgtcgtggtttcatgcaatctagtgatttagtactagaagaa

SEQ ID NO: 209667 - DNA, 393 bp, Gossypium hirsutum
cccacgcgttcgggcgcacgttggcgtcgtacgactggtcaagaagtttactcgccggtccttttagccttcacatatgagaacatggagacctggaaatcatcccatttgacaaaagcaactgccatggatccaggctatactttgccactcaatgttgctttaatcactcttcaggaattgagtgatggaactgcactccttcgtttagcacatttatacgaagaggctgaagattctacatattcacaactagcaaaagttgagctaaagaagatgttcaatggaagaacgataaaggaagtacaagaaatgagctttacaacaaatcacgtgaaatcagagatgaagaaattatcatggaaagtagaagggtgacaatggaaacaacct

SEQ ID NO: 209668 - DNA, 340 bp, Gossypium hirsutum
cttcacttgtggaagaagacaaacttgatctagcaacatcactctcttgagaaggccaaggcaaaaggagtctctctcttgctcccctctgatgtggttgttgctgacaagtttgctgctgatgctaacagcaaggtggtgccagcatcagggatcccagatggttggatgggcttggatattggacctgactccatcaaaaccttcagtgaatctttggacactacccagaccattatctggaatggaccaatgggtgtgtttgagtttgagaagtttgctgccggcactgaggcggttgccaagaagcttgcggaactcaatgggaagggagtgacaa

SEQ ID NO: 209669 - DNA, 428 bp, Gossypium hirsutum
gagcaaagaaaaccaaagaacccaaaaccaagaaagctgcagctcctcggaaaccacgggctgctcctactcatccaccttacgaagagatgatcaaagatgcgatcgttactttgaaagagaggacaggttcaagtcagtacgccattgctaagttcattgaagagaaacagaagaatcttcctgggaatttcaagaagcttcttcttgtccatttgaagaagcttgtggctgctgggaagttggtcaaagttaaggcttcgtataaacttccatcggctagatcttcgaagacggctactgctgcttctgctcctgcaaaaaagaaaacggctactaactaagtcaagtctaagcctgcctcaaagcctaaggaagggaagagtacaaaagctactcctaaagcgaaggccaagacaaaaactact

SEQ ID NO: 209670 - DNA, 287 bp, Gossypium hirsutum
cccacgcgtccgctttattttttcttacgctttaaaatctataattgtttacctttttgcttcacttgattgttaaatctccatggctgccaaggtttttgcatattttgtggctttggttgctgtcttcagcgtcgccaaatctgaccctgatcccctccaagatatctgcgtagccgatacatcttcagcggtgaaggtgaacggatttgcatgcaagaaggatgccgatgtaacggaaaatgatttcttctttagtggcttcaacagccaattgccgggaactc

SEQ ID NO: 209671 - DNA, 380 bp, Gossypium hirsutum
cgatgaatctttgttctaaatgttacagagttttccgacttaaagaacaacaacaagcttcttcgggtaaatcggctatctctacctctccttcatcttcgtcaacggcagtcgaatctgcttctcaggtacctctcctgactctccctgaagtcaaaggagttccgctggttgtttcggctgtcgcgatctctccggtggcggaacagaaaccacaacagcaacagcaacagcaacagcaacaacaacaacaacaacagcaaccgactcggtgcactgtttgcaagaaacgggtcgggttgaacggattcaagtgcaagtgcgggaatacgttttgcggggcacacacgtacccggaaaatcatggatgcacgttcgat

SEQ ID NO: 209672 - DNA, 348 bp, Gossypium hirsutum
cccacgcgtccggcttatgaatgttgaaggtttgactatctaccatgtgaaaagccacttacagaaatatcgacttgccaaatatatgccagagaaaaaagaagagaggaagacttcttctagctctgaagaaaagaaaccagcttcaagcagcaatgaaagcgatggaaagaaaagagggggaatgcatattacggaagctttgcgcatgcagatggaagtacagaaacaattgcatgaacagctggagctacaaaggtcgcttcagttacgcatagaagaacatgcaagatatttgctgcatctggttttcaaataataaataaaaaaaagatgattttcactttc

SEQ ID NO: 209673 - DNA, 439 bp, Gossypium hirsutum
gccgcctcccccaagctttgaggtttttttaggttgctcttggaacatttagcagccaaccaaaaatggttctccaaaacgatatcgatttgttgaatcctccagcagagcttgagaagaagaagcacaaactcaaacgtcttgtccagtctccaaattctttcttcatggatgtcaaatgccaaggctgtttcaacataacaatagtgtttagccactctcaaacagtggtggtatgtggtaattgtcagactgttctttgtcaaccaacaggaggaagagctagactcaccgagggatgctctttcaggaagaagggtgattgatctcatatcttgctactttatgattcacaaaaacaaaaggaaagtaatctttggatcaaatatgggaatcatatgaataatctttttcatgtgtttcaagtatgacatatggt

SEQ ID NO: 209674 - DNA, 457 bp, Gossypium hirsutum
ggtgaattggatgtttcaaaaaataggttatctggtttgcttccaaacaaccttggtagctgtgtaagcctagaggagttgtttttggatggcaatttgtttgaagggcccattccttcatctttgagttcattgagaggtcttgcggcactagatgtatccgaaaataatctttcaggtaaggttcctgaatttcttgcaagttttgggacattaaagtatttaaatctctcattcaatgattttgaaggagtgataccaagtgaaggagtcttcaagaattctagtgctacatttgttgaagggaacaataagctttgtggaggcatcactgagttacacttgtcaagatgtaactcggaaaaatcatcaaacacttctcttcgtttaaaatttgttattgttgctgtaattttaggagtgactttgatctttctttttctccttatcatgttgc

SEQ ID NO: 209675 - DNA, 157 bp, Gossypium hirsutum
  unsure (1)..(157): unsure at all n locations
ggatggtcgaactttattatactacaatattcagaaggaatccactctgcatcttgtccttggcctccggggtggtgtctaattgggagtcttgngctcgccatcataattttgcatttctatggaaccgtgcgtgttttaagcgtccaaagccatt

SEQ ID NO: 209676 - DNA, 452 bp, Gossypium hirsutum
  unsure (1)..(452): unsure at all n locations
cccacgcgtccgccaaaacctattcgatgcaatgttggattcattatactcggctctcgagaaagccggacagggagggctcgaagttgtggtatcagaaagaggatggccttcagccggtgggttcgggacatccatcgataacgcggccacttatctatcgaacttaataagacatgtccaaggaggtaccccaaagaggccaggaaaagccatagagacatatttgtttgctttatttgatgaaaacctttaaaccaggtcctgaattagagagacactntgggtttgttttcaccaaacaagcaaccaaaatatcagcttcattttggtggaggaaggcatttgggatattgcttctgaagaatataaagggaactctttctcttaagtcttgatattgtaaaatttaccaagcttgagaaatttggggcatttcaatggggttttcg

SEQ ID NO: 209677 - DNA, 371 bp, Gossypium hirsutum
cccacgcgttcgcccacgcgtccgaaatacacaagaaaaaaaaaaaaaaaaacacgtgagcagataaattgaagacttttatttctgttaacatccattatgagtactgctggtcaagtcatccgttgcaaagctgcggtagcatgggagtcggggaagccactgtcaatagaggaagtggaagtggcaccaccgcagaaggatgaagtccgtattaagatactcttcacttctttatgtcacaccgatgtctacttctgggatgctaagggacaaaaccctctgtttcctcgcatactaggtcatgaagctggagggattgtggagagtgtaagtgaagggggtgactgatctaaagccaggtgatcatg

SEQ ID NO: 209678 - DNA, 246 bp, Gossypium hirsutum
ctcgcagataagataagctgtacaatataccgtatagcaaagacagatagcgaaaaaaaatgaaggagagcggtcatttttcataaacaatttacggggaaaagaagaagcgaattaatcagcatggagacaggggggagaggtgaaagaaagatagtcgagcctgcaagcagcaagcaacaacagctgaaaagccgttgcgcgctatcttataaaataagggtataggaggggagaccccttttt

SEQ ID NO: 209679 - DNA, 278 bp, Gossypium hirsutum
ctctctcatacctgctctaacttactcccgttcagactgctaaggaagtggattacgttgttgactataaatggagttcttgatggaaatcttgattggaagagggattagagcaccgaatgtacctccgcttacccacgtactaacacagacgctactgtaccatgtggaaactgaccatgaaactgtgcaccgactggtgtaacgacttgaatgagcttgtggaagaccttaaggaataccccaatgcattcattagaaccattgttataaacaac

SEQ ID NO: 209680 - DNA, 408 bp, Gossypium hirsutum
gatccattcaacaacttggatgttttgaacccattctcccattctttccctttccctttcccttcatttctttccacccatttccctggtttctcctctgaaattttcccctccttgggaacccaactcaactgtgtagaaaccccaagggcccatgtctacaaagcctaccttccaggggtcaccagagatgaagttctggttttcatcgatgatgacaggatgcttcagataagcactgaaaatggtaacttcatgagcaggttcaagttgcccgacaatgcaaggactgatgagattgagggtttatggagaaagggatgctcatcgtcactattgggaagcaactcaagctcggagagccaaatgtaaggtcgttgaatcacgagtatttcacttttttttatg

SEQ ID NO: 209681 - DNA, 423 bp, Gossypium hirsutum
cccacgcgtccgctggatctggttcagaaggtgcaactatccgcctctacattgaacaatacgaaaaggactcatcaaaaactggaagagattcccaagaagcgcttgctcctcttgtggtggttgctctaaaactttctaaaatgctggagttcaccggccgatccgcacctacagttatcataaactcatacccctataagggttgtctgataaggcacggttctactttggaagaaagtaaaaaaatgaataagctgttcaaggtctgtctagataacctacatacatctttgtcattctgcgtctgtctatgactacattggagtatcctaagtgactgataatactctagcaaaatttttgacagagttcataaaaaataatttgaacgttacagatgcctatactcgtatctttttt

SEQ ID NO: 209682 - DNA, 384 bp, Gossypium hirsutum
  unsure (1)..(384): unsure at all n locations
cccacgcgtccgcccacgcgtccgagagacaaaatggaatgtatgactaggactggcgccaacagttaatcacggaagaaaggactcactgagccgggatcactaactaatactaatctaatctaactaatactaatctaatactaatagaatactaatctaatactctaatactaatagaatagaaaaaatagaatagaaaatactaatataatagaaagaactgtcttttctgtatactttccccggntccgttgctaccgcaggctttacgcaatcgatcggatcatatagatatcccttcaacacaacataggtcgttgaaaggatctcggagactcaccaaagcacgaaagccagcatctttcagaaaatggattccta

SEQ ID NO: 209683 - DNA, 315 bp, Gossypium hirsutum
cagattggaagcgagagagaggctggcgtactcttcaaaagacctggagttgatgcctttttggaacacttggcgaagttctatgaaattgttgtttactccgaccagatgaatatgtatgtcgatcctgtttgcgaaaggttggaccctaaccattgtatacgatataggctatcaaggggtgatactaaatatcagaatggcaagcattatagagatctctcgaagcttaaccggaatccagccaagattttatacgtgagtgctcatgcatttgagtctagccttcaacctgaaaattgtgttcctattaag

SEQ ID NO: 209684 - DNA, 359 bp, Gossypium hirsutum
ggagatactactcactatgatgcggtggctaattctgttgcatctggggtgctttcagctggcctaaactctggtgttccttgcatatttggtgttttgacttgtgaggacatggaccaggcattaaatcgagctggtggtaaatctgggaacaaaggtgcagagtgtgctttgacagcgattgagatggcttccttgtttgatcaccatcttaagtagcctcagcattatccattacatgatgaacttgtgttgttgctgtgggatcattctatctggggagtttacgcaaaagcaaaacggtaaacatagattgatcccggaactctaatttgcaattttcttggtatacactattc

SEQ ID NO: 209685 - DNA, 167 bp, Gossypium hirsutum
gtgattcagaacaatgttttcattatcgctttcttccccaggactgaagggaaccgttgaggcgttttgaccaatacacgtggttggtaacacgcattgttgatgaatagaacttgttccagagcctgccaaaggatttgaggagagatattaagaggcacctctgt

SEQ ID NO: 209686 - DNA, 434 bp, Gossypium hirsutum
gtgattcagatcattggttgcattattgattgcttccccaggacttaagggaacgggtggggcgttatgaccaatacaagtggctggtaacacgcggtgttgatgaatagaacttggtccagagcctgccaaaggatctgaggagagatattaagaggcacctctgtctgtctttgattacaatggttcctttgcttgagagtttggatcagacattgcttgatgccatttgcgaacggctgatatcatgcctgtttactgagagcacctacattgtccgagagggggattctgttttttagattctattctttatttgttgcactggttgatagtgttacaacacatggttgaaggagtgggtttttcaaccagattttgttaaaagaaagagatttctgtggataggaacctttacatgggcattggattcc

SEQ ID NO: 209687 - DNA, 464 bp, Gossypium hirsutum
caagaatttgtcatacagttatagtttgatcgaaggtggacctttgggggacaagcttgagaaaatcagctatgacaacaagtttgaggcagctgcaggtggaggaagcctttgcaagagctcgatgaaattttacactgttggcgactatgtgatcactgaagatgagatcaaggctcaaatcaaagggagtgaaggagtttacaaggctgttgaagcttacctcttggctaaccctgatgcctgcaactaagatatatgttggttgctttgaattctcataacttgaatttaaagaatggggtgcttttggtattttcctttttagtcttaaaactttaaaccgtctttccgattgtcttaaataaaaaatggcgggggggatttgatctttcgatcatcttttggtttattgatggaaataaaataaatttttaaactagggaaaaaatttaccttatttt

SEQ ID NO: 209688 - DNA, 336 bp, Gossypium hirsutum
  unsure (1)..(336): unsure at all n locations
gctgttccagaaggtacttatgatgcacttatagtggattcttctgatcctataggtcctgctcaagaactctttgagaagcccttttttgagtctgtggcaaaggctcttcgtccaggaggagtcgtctgcactcaggcagaaagtatctggctacatatgcacatcattgaggatattgtagcaaactgccgtcaaatcttcaaaggctctgttaactatgcgtggactacagttcctacatacccaagtggtgtgattggtttcatgctttgctcaactgangggcctcttgttgacttcaagcatccggtgaatcctatagacaaagatgag

SEQ ID NO: 209689 - DNA, 320 bp, Gossypium hirsutum
  unsure (1)..(320): unsure at all n locations
caaattcagcgcaagagctgatggatcaaattggcttccagataacaacttgaacgagggcgaattggagtacttttactggttgatcactgccttgcaagtggggaatcttatttactacatctgttgtgctaagctgtatacgtataagccgattcaaatccatggcaaagacagtggatctgattgagatgcatgagtatagcttgctagcaaggcttagtttttgcatttgatgaaactagatggtgaattcttgttcctttttctaaaactgtctanccatacatcttgttgagagagtctaatacattacaatc

SEQ ID NO: 209690 - DNA, 415 bp, Gossypium hirsutum
aaaccaaatacctttagttttttttaagctttaaaatctataattgtttacctttttgcttcacttgattgttaaatctccatggctgccaaggtttttgcatattttgtcgctttggttgctgtcttcagcgtcgccaaatctgaccctgatctcctccaagatatctgcgtagccgatacatcttcaggggtgaaggtgaatggatttgcatgcaagaaggatgccgatgtaacggaaaatgatttcttctttagtggcttagccaagccggcggtggtcaacaactcggtgggatcggtggtgaccggagccaatgttgagaaaatcccagggttgaacacccttggggtgtcgctttctcgtattgactatcaacctggcggacttaacccaccttacacttacccacgcg

SEQ ID NO: 209691 - DNA, 376 bp, Gossypium hirsutum
  unsure (1)..(376): unsure at all n locations
ccgaaaccgaatacatgttacagactctaagggaggagcagaggcttactatggatgactctaatatcttccctgacacaagtgttcatctggatggtggtagtcaccggtttatggctgcttccggttacaatgtgtcggaattggggaggtttggaagcggtgtatctctcactttaggattgcagcattacgaggatggtagcatatctatgtcgggtggaagccatcatcaaaattttgttgcaatgagaggggatgatatgtacaatcatatanccaactggaaccgggatttcgaatgcatgaatcctagtaaccggcagcacaggttgagttcctctcagttggtgcatgattttgtatcatgatacgt

SEQ ID NO: 209692 - DNA, 408 bp, Gossypium hirsutum
cccacgcgtccgcccagctgttcctggaatcatgttcttgtctggcggacaatccgaggttgaagcaaccctcaacttgaacgcaatgaaccaatctccaaacccatggcacgtctcgttctcgtatgccagagctctccagaacacttgcttgaagacatggggaggcagacccgagaacgttaaggctgctcaggatgcactccttgtccgtgccaaagccaactcactcgctcagctcgggaaatacaccggcgagggagaatcagaagaggccaagaaaggaatgttcgtaaagggctacgtctactaagctgctgcaaacaaagttttagctgagatgatggagatttcatgatatggcttctttctctttgtgttgaatggtttataggctctggagactac

SEQ ID NO: 209693 - DNA, 361 bp, Gossypium hirsutum
cccacgcgtccggcatagcttgccttttcttattcggcattcagtgggctgctggattcgcaactttttggtacccaggtggctcaagaaacagcagagctgcattgttgccctggcatgtgttcttcgggatgtatacgtatgcacttgctgttgctactgctactacgggtatcttagaaaagcttacatttctccaaacaaaccgggtaatatcacgctactctacggaggcattgctagtgaactcattgggtattttgattgttgtgctgggtgggtttgtgattctggccacactcactcctgtgaatggcaaaagtgatgtccacaggggactagtggaatgaataggttatag

SEQ ID NO: 209694 - DNA, 394 bp, Gossypium hirsutum
caactatgcagccagtgaaactcaaatccatgaagacccgaatgtggctcttttctttctggaaaaggatatgcaccccggggcaacaatgagcctacatttcactgaaaatacagagaaatcagctttcttaccttatcaaactgcccaaaaaataccgttttcatctgacaagttgccagaaattttcaacaagttttcagtgaaacctgcatcactgaaggcagagatgatgaagaacacaattaaggagtgcgaacagccagcgattgaaggagaggaaaaatattgtgcaacctcactggagtcaatgattgactatagcatttccaaactagggaaagttgatcaggcagtctcaacagaagtggaaaaacaaaccccaacgcagcag

SEQ ID NO: 209695 - DNA, 429 bp, Gossypium hirsutum
  unsure (1)..(429): unsure at all n locations
cccacgcgtccgcccacgcgtccgcaaaggttacagaaagaaagaaaacatgtctcttgtgacagaagagataaaagcgagtgcatcagagatttaccatggagatgagatatgccaggagaaatccaagtttttgttggaggaagtaggcatgccaagggggcttttgccacttagagacatcgaagaatgtgggtacgtgaaggacacaggtttcgtgtggctcaaacaaaagaagagcatcacccacaggttcgaaaagatagggaagctggtttcctatgcaactgaagtcacggctgtcgttgagaaaggcaagatcaagaagctgactggggtgaagaccaaagagcttttggtttggatcacactgagtgatatccaagtggatgatcctcccactgggaagatcactntcaagactccttc

SEQ ID NO: 209696 - DNA, 449 bp, Gossypium hirsutum
tcgggattcgagccacgcgtcacgcgacccgtccggaagaacaggatatcttttatcatccttggccgaaaatgcaaaaaggaagggggaagagcttgagaaaatcggctatggtggtttgctagactaagctcaagaacctaaaggagaggcgtccaacaaggggaaatcgaaggtcatcgagtagcccactcggaattattttacccaacataaagttgcttggtctcatctatttttgcggggtcgggccgtcattgaagtcatcacaccggatagcaagttttggtactttcttcttagtgtgtttagaagatcattttggcatgtataagctagtacgttgtgtttgaattatggcatgtaaactttaagccatgcgaaaatggcacgaatgttcgattgaattggatcaaaggtaggcatgaaatgggcctacgtactttcgt

SEQ ID NO: 209697 - DNA, 421 bp, Gossypium hirsutum
gccacgcggccgactaaagccattatctatgcaagattgcaggcaagcgaagaatcacgtggcggctggcttcgcatatgagggagctggaacgaatgagttaaaacagcggaatgactcgtacagagaaggggcttcatgatattaggtgcggctatcttactttctatgaagggattcgtcctacagttacagacacctcaagaagaatcttaacagagaacccatgattgaagtcatcctccattgacgaccagatgaaatacttctaaagaacaagcaagcaaatcgatgctaaccaggagaagcaaaagccaacctgagaatctatccttgttgctagcctagtcctgtaatgatacaagaaaaggtttgtaatattaatttacagtggtttgtgttgtacccgtacgagtgtagt

SEQ ID NO: 209698 - DNA, 381 bp, Gossypium hirsutum
cacggttaagaacgaggataagatggagttcagcaaaatcctcgaggcaatcaaggccaacttcaacgacaagtacgatgagtacaggaagaagtggggaggtggtatcatgggctcgaaatcacaagccagatccaaggcaaaggagaagcttctcgcgaaagaagccgcacaaaggatgacttaagccaaccattgttcccttccagaggttccctctggttaccaagtcaaattttactcctttgcccgaggattacttatatattttgtagtttaactttcaaaacaccgagtaactgctgtttgtgatgtaattttgtgcccaaaccatcatttatgctgagcgatcttacttaaatagtcgtgtatgatatatat

SEQ ID NO: 209699 - DNA, 453 bp, Gossypium hirsutum
  unsure (1)..(453): unsure at all n locations
cccacgcgtccgcccacgcgtccgagaaaatcaggagtaactgaagaagatgcagatattcgtcaaaaccctaacagggaagactattactctcgaggttgaaagcagcgataccatcgacaatgtcaaggccaagattcaggataaagaaggcatccctcctgatcagcagaggttgatttttgctggtaagcaactggaagatggccgaaccctagctgattataacatccaaaaggagtccactcttcacctagttttaaggcttaggggtggaaccatgatcaaggtgaagactctcaccgggaaagaaattgaaattgacattgaaccaactgataccattgatcgtatcaaggaacgggttgaagagaaagaggaattcctccagttcagcaaaggcttatatacngccggaagcaactngcagatgacaagacagcgcgggactac

SEQ ID NO: 209700 - DNA, 451 bp, Gossypium hirsutum
gggttcatcaccactgccaacaagttgatctccaaatccttaaaaaaaggagacattttcgcgttccctaaaggtttggttcatttccagcagaacaacggcaaagaaccggcatcggtcatctccggcttcaacagccaattgccgggaactcagtcgattgccgttaccttgtttggttcaacaccagcagtgccggaccatgtgttgaccaaggcattccaaattggtaccaaagaagtcaacaagatcaaaagcagactttcccctaagtaagaaaaaaaaaaagaagaagaaggtaatttgagttttgaggtgaaaaatcataaaattgtttctttggagttgaataatgtaatttaaattaccaaaataagttcactttgaggcaatataatcaacatactatcatgtattgaatatttgaagtatttcacacgatatttatttt

SEQ ID NO: 209701 - DNA, 458 bp, Gossypium hirsutum
  unsure (1)..(458): unsure at all n locations
catgtccgtcctatccatacacggatccatattatgggggagtggtgcctccttatgtacctgaatctttggtacattctcatagtcttggagtgcatcctgctagaatggctttgcctcttgaaatggctgaggaaccagtttatgtgaatgctaagcaataccatggtattttgaggcgaaggcagtcacgtgcaaaagctgagctggaaaagaaactgatcaaagtcagaaagccctatcttcatgagtctcgacatttacatgctatgagaagagcaagaggatgtggagggcggttcttaaacacgaagaagcttgatagtgatgcttctaaagccacgcctaacaaaagcagtgacactagtttgaatcttccatcacaatgtcccgaanacacgagtggcatctcagttaccaatcagatgtcctggaatgacaattcatcttgtggtcat

SEQ ID NO: 209702 - DNA, 427 bp, Gossypium hirsutum
  unsure (1)..(427): unsure at all n locations
cccacgcgtccgcgatgacatttttatcaaactgggttctgaaaaggacaagcgcaaggatgctgataaagaagaaagagtcaaaaagtctgttagcatcaatgagtttctgaagccagctgaaggggagaggtactacggacccgggcgtggtcgaggccgtggccgtggtcctagaggtggatatggaggcaatacagctagcagtgtgttagctccctcaatcgaagatcctgggcacttcccttcattgggtggcaagtgagaccccaccgctgcaatctgcacaatggttttcattttcatgggaatgcattgtgatctattcaatagtcaggagtctacaagcttttctgtttttgagtgtaaattntagatactttgcccatttcctgacatgcatgcatgcatactntgnttttcttat

SEQ ID NO: 209703 - DNA, 440 bp, Gossypium hirsutum
ctctttgctgggtatcgtcggctgattcgtctgaagctgctttcgtcaaaaagaccatctctgcccacaagatcgtcatcttcgcaaagtcctattgcccgtactgtaagaaggcaaaatctgtgttcaaggagttgaaagaagttccattcgttgtggagcttgatgagcgagatgatggatggaatattcaggatgccttgagtgagattgttggtaggcgtactgtaccacaggttttcattaatggaaaacacatcggaggctcagacgatactgttgaagcatatcagagtggaaaattggctaagctgttgggtattgaggtagagaacaaggatgatctctgagtccataaacaaaattgaatgtttgttgccagagtaaattttgattttattgcttttacgtacttctttattgtacttcaactttgaact

SEQ ID NO: 209704 - DNA, 407 bp, Gossypium hirsutum
  unsure (1)..(407): unsure at all n locations
cccacgcgtccgcccacgcgtccggtgatccgaccctctcatcatcacattcactgtatttaggcttcctattttttttcttttttcttttttttgtataagtctcaaagaaacttagaccccttcgtattctccgctcataccccaaatccccataccccttctgttcaacagcaaagatggcaactgtgcgggttacctcctctagtatcgttcaagcttcaatcccgaaccgattcacgagtgccattgtcaaggccccgacttctcttggatcttttaagaacatcttcaaatcttttggcttgaaatgttcctccaatcacaaaacattaatggcaggctataagattaagctngtaggacccgatggtgaggtgagcgagtttcaagcccctgacgatcaa

SEQ ID NO: 209705 - DNA, 439 bp, Gossypium hirsutum
  unsure (1)..(439): unsure at all n locations
cgcatgaccatatcgtccacaatgaaaacatattatagacagggattcgtattctaccttctgtttccggccattaatcaatatttgagacactaaaggcttctctaaatcgacataaacagccaacctagcaaatcgtcccctcgtcctactatcggtgctcatatctaacttgaccactttgcccacaagttctcctatttctgtaatgattttactattgtaaagataactcggtagagcagggaatcaaattcatgtcataacaacacttgcgtatgcctgaataggatcgaaagccatcgtccaaggctgaacagtcaaatactgcccgaaaatcgtccatggaccttcggaaagaggcatattgcagtcaagtttgttctagaatttgacaagaaaatagccattntctatgtccatcatatgaataggggct

SEQ ID NO: 209706 - DNA, 378 bp, Gossypium hirsutum
  unsure (1)..(378): unsure at all n locations
cgagctcactcttatcggaaaaatgatcgagtgggatccatggggtgttcctgatgactatgaatgtgaggttatcgaaaatgatgctcctattcccaagcatgttcctcagcaccgacctggtcctcttccggaggagttttacaagacgctagaagctctttctaagaaagacgagcctaaagtcacctgcggagatccacagataaaggagtaatgtgacgcagacggttggctgaaatttgcattngtctttcgttcttatttgtcgatcttgtattgngcctgtttccgttgatggaattgaagctttaacctatgataaaaagctggacccgaaccctttagtgcataataatattgaatgccagtggttat

SEQ ID NO: 209707 - DNA, 383 bp, Gossypium hirsutum
cccacgcgttcgtgaattctttccctcactttctcgaaaaaaaaaatgtcttcaggttgcagtggcggatctaactgcaggtgcggtgacaactgctcatgcagcaggaaccttaaccttggatattcggagaagacaaccagcactcagaccatcatctccggagttgcgccagtgaagatgacctttgagggaccagagatgagcactactgaatcaggacatggatgcaagtgtggatcaaactgctcttgtgatccatgcaactgttgaaaagcttgatgaaagccatagattatgaaaaaaagaaagcagcgcaaataacaggcctctgttatgatatattgtcaaggatggatgcctgcaacgtctataattatgtc

SEQ ID NO: 209708 - DNA, 453 bp, Gossypium hirsutum
ctctcactagccaacgcgccatgtcgatgcgattctctcgtgactgtgacgcctgcgacggtgacggacagtgcgagttctgctccgtcgagttccatcttcgcgccaaatgcataagcgatcaaacactggatgtcaccagtaaggatctatacagttccgaccatacggttgttcccgtcgatttcaccgattacgctggctacgaatcctctgaacaaagggggattatcatcgtgaaattgcggcgagggcaggagttgaggctgagggcaattgcaaggaaagggataggaaaagatcatgcaaaatggtcacctgccgcgactgtgactttcatgtatgaacctgagattcacatcaatgaagatatgatggataccctgacccttgaggagaaagcaaagcttgtcgacagtagtcctactagagtctttgacattgatcctaata

SEQ ID NO: 209709 - DNA, 436 bp, Gossypium hirsutum
aggaaatcagattatgtgagagagccaatcccgaaagctggtttggagtcgctttggaagaaaatgatggagctggaaaagcctaaaatggactttaatccttatggtggaaaaatggcggaaattgcagcagaagaaattccattcccacataaagctggaaatctatggaagattcaatatctggcgaattggaacgaagcagggattgaagcaacaaatccttacatagatttgacaaggagactccacgagttcatgactccttttgtgtcaaagaacccaaggcaagcatttctaaactacagagacgctgatttgggaagcagctcccatggaaaagcctcgtattcggaagcaagacttaatgggatgaagtggtttatgggtaatttcgacagattagtgcagattaaaacggacgttgatcctacta

SEQ ID NO: 209710 - DNA, 452 bp, Gossypium hirsutum
cttcattctcactctctctccactgaactcttgctaaacggtatcgttttagtcagtctttcatcaagggcgaaagaaccggttcgcgtcctcgttactggagctgcaggacaaatcgggtatgctcttgtacccatgattgctaggggagtcatgttgggtgctgaccagcccgtgatccttcacatgcttgatatcccacctgctgcggaggctttgaatggtgtcaaaatggagttggtggatgctgcttttcctcttctaaagggtgttgttgctacaactgatgttgttgaggcatgcactggagtcaatgttgctgtcatggttggtggtttcccaaggaaggaaggaatggagaggaaagatgttatgtcaaagaatgtgtctatttacaagtctcaagcttctgccttggaacagcatgcagctcctaactgcaaggttttggt

SEQ ID NO: 209711 - DNA, 420 bp, Gossypium hirsutum
cttcaaagaacgctttaccatcaaaaccagctagctaaatcaaccgcatttcaccaggatcgctagaggattgaagaaacacttgaagaggctcaatgcccctaggcattggatgcttgacaagcttggtggtgctcttgcacccaagccatcatctggaccccacaaatccagggaatgcttgccattaattctcattctgcgaaacagattgaagtatgctctcacgtacagagaagttattgctattctcatgcataggcatgtcatggttgatgggaaggttcggaccgaatagacttattctgctgggttcatggatgttgtgtccattcctaaaacaaatgaagacttccgtttccttatgacaccaaagggcgttttcgtcttcatgccattacgggtgatgaaaccaaattt

SEQ ID NO: 209712 - DNA, 482 bp, Gossypium hirsutum
  unsure (1)..(482): unsure at all n locations
tcgtctcgacatngnnttggacctttttaaaatcttggaaactccgnnggcgaattcaaccatgctttgagctttgcgtgagggtggtacaaagaaactaatagacctcgaatgctgaagatagacgttcaggctcaaacactagaagatgactccgcacatagaggaagctctgatatctcaagagccaaagagttacttggttggcaacccaaggtctccctccgaaagggtctccctctaatggtttcagacttccgacaacgtatctttggtgatcacaaggtcggcagcagcaccaccaccaccaacgactcatcatcttaagatggcctatatactcttctcacagacagagcgataaaaatatataatggttaagaggaaaagagcttgccgttgtcttttccctattgaaacaattaatattatagtgtatctttatgatagatgtgggatggacgtttttatttttatttttg

SEQ ID NO: 209713 - DNA, 425 bp, Gossypium hirsutum
cgattcgggtcgcccaccgtccgaagttctagagagacaacctattgggacatcagcccagacagacaaggactacaaggagccaccagcagcacccttctttgagcctggtgaactcaaatcatggtctttttacagagctggtattgccgagtttgtagccaccttcttgttcctttacatcaccgtcttgactgtcatgggtgtgtctcagtctaaaaccaaatgtgcaaccgttggtattcaaggcattgcttgggcttttggtggcatgatctttgcccttgtttactgtactgccggcatttcaggtggtcatattaaccctgctgtgacctttggattgtttctagcaaggaaactgtcacttacaagggcattgttctatatgatcatgcagtgcctgggtgctatctgtggagctg

SEQ ID NO: 209714 - DNA, 445 bp, Gossypium hirsutum
  unsure (1)..(445): unsure at all n locations
cccacgcgtccgaaataccttctagagcatggtgctgatcctgctatacccagcaacttagatgccactgctttacatcatgcagctggaattggggatgttgaattgctgaagtatatactggacaaaggcgtcaaggttgattcacaaagtgatgctggtacccctttagtttgggctgctggtcatggtcaacgtgaagctgtgaaagtattattagattatcatgctaatccaaatgctgaaaacgaggataatatcactccattgttgtcatccgtggcagcaggttcacttgcatgcacggatttgttgattcaggcaggtgctaaagtgaatattacagctggtggaacaactccgttgcatattgcagctgatcatggaagcnctgaaactaataacagcttacnntgaagctgagctgatcctaatgcactgatga

SEQ ID NO: 209715 - DNA, 454 bp, Gossypium hirsutum
  unsure (1)..(454): unsure at all n locations
gtgcctgaaccatctgttgatgaaactatacagattttgaaaggtttgcgagaacgttatgagatacaccataagcttcggtacacagatgaggccttaatttctgctgcacagctgtcataccagtacatcagtgaccgttttctacctgacaaagcaattgacttgattgatgaagcctctcgtgttcgccttcgtcatgcacagctccctgaggaagctaaagagcttgaaaaagagctgaggcagatcacaaagtcaaagaatgaagcagtccgcagccaggactttgagaaggccggggaattacgtgatcgagaaattgaacttagggctcagatcactgcaattcaggagaaagacaaggagatgaacaaggctgangctgangcangagatggaggtccttttgtgacagaagtggacatccagcatatagtctcttcatggactg

SEQ ID NO: 209716 - DNA, 450 bp, Gossypium hirsutum
  unsure (1)..(450): unsure at all n locations
gttatctatgttatgacccatgattccattggtcttggggaagatggaccaacccaccagccaattgaacacttggcaagcttccgtgcaatgcctaatgttttgatgcttcgtccagctgatggaaatgaaacagctggtgcatataaggttgctgttctgaacaggaagagaccttctattcttgccctctctaggcaaaagctgccccaacttcctggaacttccattgagggagttgaaaaaggtggctacattgtttcagacaattcgtctggcaacaatcccaatgtaattctgattggaactggttctgagttggagattgctgctaaagctgcagatgaactaaggaaggaaggcaagaccgttagggttgtctactttgtttcttgagagctctntgatgagcaatcagatgcctacaaggaaagcgttttaccatctgct

SEQ ID NO: 209717 - DNA, 395 bp, Gossypium hirsutum
  unsure (1)..(395): unsure at all n locations
ttccttcaacggtttggtttcaaagggccaatcttacaagctggttggactggagcttttaagcggctggaatatacttcaaatataaaccaacttccatctggagaattcattggtggagccattggtgaatcaaaagatgggaagaaaaaagtggtcaatcgactcgataagatcacttaaaagtcaacccttttagcatctaatacaaagtccatctcattactcgattagcatctgcaactagcaaaccatgccaggtcattggaaatgcattcatgaatcctcctncaataatgaaagtggttgagattgttcgaggtgcagacacatcggatgaaacatttcatgcgacanaggcattggcggagaggtttcataagacgataatatgc

SEQ ID NO: 209718 - DNA, 432 bp, Gossypium hirsutum
cccacgcgtccgcttgaaggtacttaatctatcaggaaatgcaatagcaaggattactgctggtgctcttcctcgaggacttcacatgttgaatctgtcaaggaataatatatccaccattgagggtttacgtgagcttactcgacttcgtgtgctgaatctgagctacaatcggatatttagaattggtcatggtttggcttcttgttcctctcttaaagagttatacttggctggaaacaagataagtgaggtagagggtctccatcgtctcttaaaattgactgttttgcatctgcgtttcaacaaaatctctactgccaaatgtcttggccaacttgcagcaaactataattccttgcaagccattggcttggaaggtaaccctgcacagaagaatgttggagatgaaaatctgaagaagcatttgca

SEQ ID NO: 209719 - DNA, 454 bp, Gossypium hirsutum
tcgcccacgcgtccgcccacgcgtccgcccacgcgtccgcccacgcgttcgtgttgagggagatgatgtaccagatgaacagaaagctagaatttgcaagagtttggctgaagcagataagcgtctagttgatggtgctgatgagtatttgcagctgctggatgtggccagcaacacaatgcgagctttgtgtaacatgccacaggaattctcttttgaaacttagtgggaaagcccagtgtgagatggcagatacttttgaagacaaggagagattcttcaaccttttggactgtaaactggtacatattgcaacaaacctgcttttctaactttctgtcatgcctgattgtcatagatgggtccatccttttgaatctcttgtcatttaacatggatttggtgttagttctctaattaactcgtctctagtctattgctatagacgatgagt

SEQ ID NO: 209720 - DNA, 288 bp, Gossypium hirsutum
cggagtgaggttgaaacctaatgtgatattcggactgaaactcatcgatctgagtcgcgactcactgggtattgaacaagacgaaccactgggcgttaagttcgggtgcaagctttaccggatgccggacgaacacgtgttccttatgaagccaagagactagctcttgcgccgcgtgaaatgattagcatcgctcgggctgacattagtggaacaagagatgctcacaaatacggcgccgatcgcgttaagggtgttagaagcatgcatatattacggagctatatt

SEQ ID NO: 209721 - DNA, 336 bp, Gossypium hirsutum
gccatgcatgttatgacctatgatttcattggtgtgggtggagatggacctacccaccaggcagttgatcacttggcaagcttccgtgcaatgcctaatgtttggatgcttattctatctgatggaaatgaaacagctggtgcatataatgttggtgttctgaacaggaagagaccttctattcttgccctctctaggcaaaagctgtctcaacttcctggaacttacattgaaggagttgaaaaaagtggctacattgtgtcagacacttcgcctggcatcaattccaatgtaattctgattggaactatttatgagttggacatagctgcttaa

SEQ ID NO: 209722 - DNA, 380 bp, Gossypium hirsutum
  unsure (1)..(380): unsure at all n locations
tcgacccacgcctcacgccatctcttattccctntaacgatttgtttccaaaggccaaatctcacaggctgcttgtacgtgaagggttgaggcgtctggaatatacttcaaatatagacgagctccgatctgcagatttcattgttgaagcaattgtagaatcagaagatgtgaagaaaaagttgttcatcgaactcgataagatcactaagagttcagccattttagcatctaatacaagttccatctccattactcgattagcatctgcaactagcagaccatgccaagtcattggaatgcatttcatgaatcctcctccaataatgaagttggttgagattgttcgaggtgcagacacatcggatgaaacatttcat

SEQ ID NO: 209723 - DNA, 443 bp, Gossypium hirsutum
cccacgcgtccgcccacgcgtccgctgtatttgtggacacttacggtactggaaagatcccagacaaggaaattctcaagattgtgaaggagacctttgacttcagaccaggaatgattgccatcaatcttgatcttaagagagggggcaatagcaggttcttgaagactgctgcgtatggtcattttggtcgggatgaccaagatttcacttgggaggttgtcaagccactcaagtgggacaaggtccaggcttaattggagcttcatcacattggttctatgtctgatttatttgatctgctgtctgctaccatatgaggctgcttttcttacaatttcctttaatttcttttttgggtttgaaatttgattaacatttatatttatgcatatgatatgatatgagcgataatgaatcgtattattattacaatttgaaag

SEQ ID NO: 209724 - DNA, 457 bp, Gossypium hirsutum
  unsure (1)..(457): unsure at all n locations
ggttttagtccaatctaaaggatccgctttttccgaagcgaccatggccaaccgtacggacgcggcggcgaagagcattaggggaaccaaccctcagaatctggtcgaaaagatcgtgcgctcgaagatataccagaatacgtactggaaggagcagtgtttcggtctgacggcggagacactggttgacaaggcaatggagctcgaccacatcggcggaacttacggcggaaatcggaagcccactcctttcatgtgcctcgtcatgaaaatgcttcaaatccaacccgaaaaggatattgtcgtcgaattcatcaaaaatgacgattacaagtatgtacgagttctgggagctttttatctgcgtcttacggngatcgactccgatatttatcgttatttagagctcttgtacaacgattatcggaaagtaaggcgaaatcacctgatggaaatt

SEQ ID NO: 209725 - DNA, 389 bp, Gossypium hirsutum
cgcacgcacgaagtcccgaattcgacccaccgacccacgcatccgggttcatcatgcccttgtgtcccttgccctctttggtgcttttgtgagccgtgctggtatttcaacaaatgatgtattgacccctaaagcctttatcgtctacactagtcgaacaacgctcgctctctggttttctgctatgaccatgaagagtgtgggaagtgcagcttttaagatggttgaggaagtgcgcatgcaattcaacacaatcccaggtcttatggaaggtactgctaaacctgactatgctacctgtgttaagatctctactgatgcttcaatcaaaaaaatgatcccacctggtgcccttgttatgctaacaccctttgttgttggatcttttt

SEQ ID NO: 209726 - DNA, 405 bp, Gossypium hirsutum
  unsure (1)..(405): unsure at all n locations
cccacgcgtncgggagaatcctctacagttgaagtgcttgaatcacatttcacttgtgtgcagatcagttgaaaaatctgtagatttctatcaaaatattttagggttctttcccgtaaagagacctggttcctttgatttctctggtgcatggctgttcaattatggcattggcatccatcttcttcaatctgacaaccctgatagcatgcctaagattggcggtataaatcccaagaacaatcatatttctttccagtgcgagagcatggcgccattggagaagaaattgaaagagttgaacatagaatacgtgacgagtggtgtggaagaaggtggaatccgcgtggatcaactcttcttccacgaccccaatggctacatgattgagctatgcaattgcga

SEQ ID NO: 209727 - DNA, 434 bp, Gossypium hirsutum
  unsure (1)..(434): unsure at all n locations
cttttcttctttcaactcatagaaaactcccagtaatattagaatcatgggtgttgtcccttataactatgagtctacctctccagtcgcccctgccaggcttttcaaagctttttctcttgaagctgacaaggtttggcccaaggctgctcctcangcagtcaagagcgttgaggttgaagctaatcctggccctggaagtatcgtaaagatcaactttgctgaaggccttccattccaatatatgaagcaccagattggaggacatgacgacaagaatttgtcatacagttatagtttgatcgaacgtggaccttttggggacaagcttgagaaaatcagctatgacaacaagtttgaggcagctgcacgtggaggaagcctttgcaagagctcgatgaaattttacactggtggcgactatgtgatcactg

SEQ ID NO: 209728 - DNA, 437 bp, Gossypium hirsutum
ctttttgaagggagtcgttgttaatggctagcgaccaagatcagttcacgctggtatcccgcgccataaaccaagaagggaagttgccaagaaagtacacggatgaaggtcaaggtgcaaagaggaaggtgtcaccaccattagaatggtacaacgtgccagaagggactcgttcgatggccctggtggtggaagacgtatatgcgccagaccccagcggccccatcgtgccatggacctgttgggtagccattaacataccgacaaagttgaagggtctaccagagggattttctgggaaagaagaggaagttgggggagattatgctagcatcaaagaaggcaacaacgatcacaaggtccctggatggcgaggtcccaagttaccctctgacggccaccagttcctggtcaggctatttgctttggatgatgag

SEQ ID NO: 209729 - DNA, 282 bp, Gossypium hirsutum
  unsure (1)..(282): unsure at all n locations
tcttattatatataaacacctacggnttctcggtttttcatcttagcgtcaatacaagactatttgggggtgtttggaaggattttatatcttacatgagtgcatcctgttgcagttagagtgcaccggaaaagagcgatggccgcagttcccggacagttgatttgggaggtagtgaagaagaacaattgctttttggtgaggcagtttggaagaggaactgctagccttcagttcaccaaagaacccaacaatctctacaacctccactcctacaaacac

SEQ ID NO: 209730 - DNA, 436 bp, Gossypium hirsutum
acggaaggtaatgaaaccattgctgctggccaagcagacggttacacaatcaatggccgtcggggagaaacatatggatgcagtaatgatacaacatatctgctagaagtggcttacgagggtctttaccttcttcgtttaataaatgccgttgccaacgaaacaatggtgttcgccatcgggcagcacagtttcactaccgtcggacaaaacgcgacatatgcccaacgctctttctcaacttctcttaccttagcaccgggccagacgctcgacgttttgctcggcgcaaaccaaaacgtcggccagtattacatcactgctcaaccttcctctggcaggcataataccaccggagttctacagtatctcaccagcactggtgtttaatttatttacttggcttttgggattccattggtatagtttgtttatg

SEQ ID NO: 209731 - DNA, 350 bp, Gossypium hirsutum
  unsure (1)..(350): unsure at all n locations
ccgcccgaattccgggtcgccacgcgtcgagaagggattggctggagtacgtgaaggattgggtacatgggcaagcccgttcgtatgagggtgaaaattgcccttcacctcaaatctgtccgctacgaggacgtggaggaagatttgttggcacccaaaagcgagcttcttcttaaatctaaccctgtttacaagaaaatcccggtcttcttccatgctcataaccctatctgcgagtccctaatcatccttcagtacatcgatgaggtttggaccacctctgcttcttncatcctcccttccgatccctatgaacgttcccaatccccgatttgggctggctatgtcga

SEQ ID NO: 209732 - DNA, 460 bp, Gossypium hirsutum
cccacgcgtccgaggaaacagagaacagcgttccctccaaattttgtgcattcacttgatggttctcacatgatgatgactgctgttgcatgcagagacgcgggtctatattttgcaggggtccatgactctttttggacacacgcgtgtgatgtggagaagatgaaccagatacttagagaaaaatttgtggagctttacagcatgccagttcttgagaatttgcttgaaagctttgagacatcatacccgtcgttggtttttcctcctctcccagagagaggcaactttgacttgcttgaggttctcaagtcgccgtactttttcaactgattctccgagaaaaacaacatttgtatatcatttgcagaaacactgctggcttgtacattcttttgcccttgagaatcaacaaagttcaattgaggactaaggagaaaatccatgtgggactcaactg

SEQ ID NO: 209733 - DNA, 347 bp, Gossypium hirsutum
cccgacttctggaagggatgcatttattagataaaaggtcgacgcgggctttgcccgttgcggtgatgattcatgataactcgacggatcgcacggcctttgtgccggcgacgcatcggctggtgcgtttcgtggggacgttaggtcgtatttggaccctatcataggccacttagcatgggctagaacacccttgcttgccaacatttacacttacttcagctattcaggcaatccaagggatatctcacttccatatgctcttttcacatccccttcacctgttgtatgggatcaaggacgtggataccaaaacctattcgatgcaatgttggattcattatact

SEQ ID NO: 209734 - DNA, 420 bp, Gossypium hirsutum
ctgaaatcgatctttacaaatacgatccttgggaccttccagatttggcgttgtacggagagaaagaatggtattttttctccccgagggataggaaatatccgaacggttcacggcctaaccgggcagctggttctgggtactggaaggcaaccggagctgacaaaccgattgggcagccgaagccggtcgggattaagaaggctttggtgttttacgctgggaaggcacctaaaggagagaaaaccaattggattatgcacgagtatcggttagctgacgtggaccgatcggctcgcaagaagaacagtttaaggttggacgattgtgtgctttgccggatatataacaagaaaggcgccatcgagaaacagtcaccgcaaggaagcattggcaaaagctctgccgtgacggagatcg

SEQ ID NO: 209735 - DNA, 307 bp, Gossypium hirsutum
gtggacttggccaaggctttcaaggctcttgcgaaggacaactcggtgcgggtcatcatcttgtctggagctggacgggctttctgttcaggcatgtatttgacggctgcacaagatgttttcaagggtgacgttaatgacccggagacggatctttttgtgcagatggagcaatgccccaaacccatcatcggagctatcaacggcgttgctattactgtcggcttcgagatcgccctcgcttgtgacatgctggtcgctgctaagggagccactttcggtgatactcacgccagatttgggatat

SEQ ID NO: 209736 - DNA, 421 bp, Gossypium hirsutum
  unsure (1)..(421): unsure at all n locations
atcactttggtttagtagtaaagtactgaagccatggcagcagggaagttttttgtgctgatagtaatggtcgtattaatggttgagggctcaagggcaatgaccttgtgtcgcatgaatgatcagggacttgatgcgtgcaagccatcggtgacacagccgaacccggtcgacccatcacccgagtgttgcaaggctctgaaaggggctgacttgacatgcttgtgttcttataagaattcggtgtggctaggtactttttgggatngatcccaaactttgncttggatttgccttcaaagtgcaagcttcaaatgcctagtgtttgctaaggtttccagaagagcatgaagctgctttctcatgtttgttggactttcacaagtttctttgtattggtttgatgtgaaaatctttgcaa

SEQ ID NO: 209737 - DNA, 434 bp, Gossypium hirsutum
atttttggaggtttctgttgggatttggttttcgttttggttgaatgctacaaattggtcatcgccctatggcatgaaaatgctggttcctctacctgctccactgggccttgtgtgctttggaaaagtttacctattgttgacttcattttcttttgtttccatggggaatggggttaacttaacagatggtcttgatggtctggctggagggactgctgcattagcctttattggaatgtcaattgcagtgcttccagtatgccctgagcttgctatatttggagcatcaatggctggggcctgtgttggttttcttttgcacaaccgatacaaagcatctgtgtttatgggtgatactggatccttggccctcggtggcgcattagctgcaatggctgcttgtactggaatgttctttcccttattccttt

SEQ ID NO: 209738 - DNA, 274 bp, Gossypium hirsutum
  unsure (1)..(274): unsure at all n locations
ctttcccatcatgtgtcatcggnnagaagaagctgtcgtaacccaatgaggggagattaaagnttcaaaaggcgttgtgcgtcaacatctccgtcggtgaaagcggcgatcgtctcacccgtgccgccaaggtcttggaacaactcagtggtcaaacccccgtcttctccaaagctaggtacactgtgagatctttcggaattcggcgtaatgagaagattgcttgctacgtgactgtgaggggagagaaagctatgcagcttcttgagagtgg

SEQ ID NO: 209739 - DNA, 357 bp, Gossypium hirsutum
cggacgcgtgggatcttactcaagcccagtatggtaaccccaggggctgaacacaaggggagggctaatcctgagactattgccaaatatacgctcacaatgctgaaaaagagagttccaccagctgttccaggaataatgtttttgtctggaggacagtcggagatggaagccacattgaacttgcatgcaatgaaccagagccccaacccatggcacgtttctttctcttatgcacttgcattgcagaacactgtactaaagacatggcaaggacgtccagagaatgttgaagctgcacagaaggctcttttggtgcgtgcaaaggcaaactctcttgctcaacttggaaaatac

SEQ ID NO: 209740 - DNA, 373 bp, Gossypium hirsutum
cccacgcgtccgcgttggttcacctccagtgatgccatgctgttcccttctcaatgggctgggcgacctcgaagctgctgcttgcctttgtactgctatcagagctaacatcttaggcatcaaccttaacatcccagtttctcttagcttgctcctcaacgtttgttcaaggaatgttccaactggcttccaatgctaattaagtcatcacttttccctccattctttctcaacttccttgtggtgttttgtgtttggttttttataaagttatgatgtcataacttcattgttttaatttgtatcattcttgctttaatttcattgggagaattgatacagaataatatttttcttaaagtgtttttctttg

SEQ ID NO: 209741 - DNA, 408 bp, Gossypium hirsutum
ctttcttctcttctttcaactcaaaaactcccaagtaatattagaatcatgggtgtgcgcacgtataactatgagtctacctctccagtcgcccctgccaggcttttcaaggctttttctcttgaagctgacaaggtttggcccaaggctgctcctcaggcagtcaagagtgttgaggttgaagctaatcctggccctggaagtatcgtaaagatcaactttgctgaaggccttccattccaatatatgaagcaccagattggaggacatgacgacaagaatttgtcatacaggtatagtttgatcgaaggtggaccttttggggacaagcttgagaaaatcagctatacaacaagttgaagcagctgctgtggaggaagccttgcagaactcgatgaatttacactg

SEQ ID NO: 209742 - DNA, 413 bp, Gossypium hirsutum
cttgaatttaagttgcaagatactgcaagagttagtcacaacactcacttgttcaggttttgatttgatccctctgctaagttgggattggatgtcgcttcatgcatccttactagggctccattaggacaagatgctgaaggaaaaaccaaatatgtcatacgaccgtatactcctatatcagatccagatgctaagggatactttgacttattaatcaaggtgtatccagaaggaaaaatgagccagcattttgctagcttgaaaccaggcgatgtagttgaggtgaaagggcccattgaaaagctcagatactcacccaatatgaagaaacacattggcatgattgcaggtgggacaggcataactccaatgcttcaagttattgaagctatactgaagaaccctgatga

SEQ ID NO: 209743 - DNA, 342 bp, Gossypium hirsutum
  unsure (1)..(342): unsure at all n locations
cgggcgcccagcgtcgttgtccggacttttttccatgcaatacctaaactatggtgctgcagtgagtgaggtggagataaccttttaactggtcaaaccacaatattgcagacagatatcatatatgattgtggcaaagcttaaaccctgccgggtttaggacagattgaaggggcttttgttcaaggaatagggttctttatgcttgaagaataccccacaaactcaaaggattagtggttgcagaaagacttggtcatataagaacctactgggaactgacctaaaagttaatgttgaaatctgaacagggcatnataagaccgtgtctttcataaaagc

SEQ ID NO: 209744 - DNA, 402 bp, Gossypium hirsutum
gtgggactgtactcgtgggcacatctcctcttgcctgtacttagtagcaaaaactgtaatcgacaatcgagagatctaattttacaactggtggaatggatcttatccgtctcaaaagctcgttcaattttagtaaataatgctgttagaaaaggggaacgtttggtgcctccatcttcatttgagatactgatgcgagctaccttccctgcatcttcatctagggtgaaggcgactgaaaggtttgaggccatatatcccacagtaaaggaagttgcacttgctggtgctcacggaagcaaagcaatgagacaagtggctcttcagatgttcgcctttgctatcaaagcagcaggagaaagctctcctgagttatccaaagaggcagctggaatagtcata

SEQ ID NO: 209745 - DNA, 470 bp, Gossypium hirsutum
tcggaaaggaataacaccgactattgataggattgctgagagtctaaacatgtctcagaggaaagttaggaatgccacagaggcagtcagtaaggtcttctcccttgacagggatgcattcccgtctttgaatggtcttcctggagagactcaccatagttacattgcagataaccatgtagaaaacaatccatggcatggagtagatgagtgggcactcaaggatgaagtgaacagactgatcaatataacgctcggagaacgagaaagggagattatacggctttatcatggtttggataaggaaagtcttacatgggaggacatcagtaaacgcataggtttatccagggagagagttaggcaagtcggactcgtggcgctggagaaactaaaacacgcagcgaggaagaagaaaatggaagccatgctagtcaaacattgattttgtaacgcttcaacatacacat

SEQ ID NO: 209746 - DNA, 402 bp, Gossypium hirsutum
aataaccgaacgaaaacgccagggatcatctacacaatgcctgcgttatactatgcgtggtggggcgtatcatcacatggcatggcatgaacatatatgcaccctacctcgggttccatcaaagcctgattaggactcgaaaaccaaacgggacatagcacccgttgcatgatataaaaagacacatactacacgagtctattgacttaattatcaccggctatccataaggaataattaaacagcgttctgctatcttgaaaccacgcgatgtatttgaggtgaacgggcccatttgaaagctcagatactcacccaatatgaagaaacacattggcatgattgcaggtgggacaagcataactccaatgcttcaagttattgaggctatactgaagaacc

SEQ ID NO: 209747 - DNA, 398 bp, Gossypium hirsutum
cccacgcgtccggaagggatgggttcacagcaaaccggacactcgccaactcaaacttgccgggtttcaacaatactctcgaccgattaaagaacaggtttagcaatgtggggcttaacaccagcattgatctagtagccttgtctggtgctcacacatttggcagagctcagtgtttaacttttaccagtcgattgtacaattttacgggagtgggtgatacagatccgaccttgaacaccacatacttggaagaactacgccaaatatgcccacagggtggaaatagtagtgtgttgacaaatcttgatcccacaacacctgatggtttcgacaataactacttcacgaatctacaagttaatcgaagcttgcttcgaagtgatcagaatttattt

SEQ ID NO: 209748 - DNA, 382 bp, Gossypium hirsutum
tcttaatctcactttagttactctctaccttccacagccgcctcatggccgattccgccacgggcgtcttcccccctcaaagtcattgctggagctgattctttcggcgccgagctaaaagacgccatggtatcccacctccgctccctcaacatagaagtcgaagatctcggaatcacctcctactacaacatcggtgctgaagtcggccgtcgagtctcttccgccaccacctccccctccgtggagacccgtggcctccttgcttgcggaacgggcgtcggagtcgggatcttcgccaacaaattccccggcgtattcgccaccacatgtctcactccggacgaagctcgcaacaatcgctccatcaataactgcaacg

SEQ ID NO: 209749 - DNA, 436 bp, Gossypium hirsutum
acaaaatagaggaaggaaggggtacagacagaaaagtaaagcgctaaggagaagaggaagaagagatggcagtgagtgcaacggtgatcggagcactgctgggactgggcacccaaatgtactccaacgctctccgcaagctcccttatatgcgacatccgtgggagcacctgttggggatgggtctgggagccgcgttcgttaaccagcttgtgaattgggacgctcagctccaacgggaccttgacaatatgctcgaaaaggccaaggctgccaacgagcgccgctactttgatggagatgatgattaatgctttcgccctatcatcagaaaagacattcatgcgccaagcttctgtggtcataaaccggttcagattgtgagtggatgattttggactgcttgtttgttttggaaactacttttgcttttttt

SEQ ID NO: 209750 - DNA, 391 bp, Gossypium hirsutum
gcgagaactgtgaaggacgtttctccccacgagttcgtgaagggctacgccgcccacctcaagacgctccggcaagattgagcttcctccatggaccgatattgtcaagggtggtaaattgaaggagcttccaccgtacgaccctgattggtactatataagagctgcttccatggcaaggaaaatctacttgaggggaggtcttggtgttggtgctttcaggaggatatatggaggagccaagaggaacggtagccgcccacgccatttctgcaagagcagtgggtctattgctcgtcatattctccagcaattgcagaatgtgaacatcgtcgatcttgataccgaaggtggtaggaaaatcacatcgaatggccaacgggatctcgat

SEQ ID NO: 209751 - DNA, 329 bp, Gossypium hirsutum
aaagaatcctggtggaactgtcgcaccatgtggtggatatgttgccgggagaaaaggatgggttgatgctgcagcagctcgtctatcaacaccaggcctaggagttgactgtggctcaacccctggcgatatcatgcgtgccttttttcacggtttgtttcttgcaccgcaaatggttggtgaggcaattaagggaacctttctggttgctgaagacatggcttcaaaagggtataacgtgcatgctcttactcgagtcccccgcagtgatacagtacaggcagtgcatcttggaaaccgtgaacttctccttgctttctgtgaagctg

SEQ ID NO: 209752 - DNA, 335 bp, Gossypium hirsutum
ggctactcttgcttttatatccatgcaaagatgcttcaggaccatcgtaacagaggatttgatgatttccgtaacggcgcatgcagaaatcttgtttgtactgatctttttacaaggggtatagatatccaagctgtgaatgttgttattaactttgacttccccaagaactctgaaacatacctccatagggttggtcgatcaggaaggtttggtcatcttggattagctgtgaatttgatcacttatgaagaccgctttaacttgtataggattgagcatgatcttgggactgaaattaagcacattccttcacatattgatcatgctattta

SEQ ID NO: 209753 - DNA, 438 bp, Gossypium hirsutum
aagagctgtcacaatactcccaagaaaagacctgctcctttgaacctccacacacattgtgcgtgatccttatacactgataataactcttaacagatcccaagcagctgaaagctaactctatacagatgacggaaaaagctacaacttcaaacatggggcatacatacatcgccgctttgcgttctctaatgggcatctaacatcctctcccgttggcaactctaggttttcgtctgactgcattatcgagcgggttattcttcttggatatacccctggggctaaaaccgcacttgtcgaaccaggaaatcaaaatgctgaaatctaacttggtccacttctgttcggcggacaacatgctgcttttgctgtaaccatcccgaagcctgccgtgagggttgctgaagattgcaagaaaaaaattttgtatgatgt

SEQ ID NO: 209754 - DNA, 310 bp, Gossypium hirsutum
aagccaccggtttatgcaccaccaaagaaagagaagccagaacctaaaccaccagtaggtgagtctcccaagaagccaccatatggtcactatccaggacaccctccattggagaagcctcaatagagagatttcctcggctaaccattcccgacaactgagctactatggctacatagataaattattatcactgcaataagagctgctgccggctcatgttctgttttcttgtatgtcatgtagtattgttttcttttactagcaagaatgcacatggcagtatcattggaatgaatgcctattctgt

SEQ ID NO: 209755 - DNA, 448 bp, Gossypium hirsutum
ctatcgaaagaggtggctaaaagtatggctgaagatgctggtttgccttcatcccccgttgggcctcaatcgtcagcagcacctaatggattttctggcagcaagattgatgaagttcttaaagaaagttctttaggcagtcaagaaaaacccgaagtttctgctgccccaaaagcttcccataccgttgttaccagcgctgtcaagaagcctcttggtgcccgaaaggttaccgggaagaccggggggcttggtgccagaaagcttactaataggccaagtgaaaatctctacgaacagaagcctgaagaaccagttgtcccagttgcttcctctactaatgacattgcacccactggctcatcttttccatctcgttctcgttttgagtacgtagaaaatgttcaatctacttgagtgaatcatggtggcccacaagtgcttaatc

SEQ ID NO: 209756 - DNA, 319 bp, Gossypium hirsutum
gcaggttaagctggaacagaagtattcttggtgggcttgtcgtagagtttgagcaaaagggggttgacgtgtccattaagactagggcacgacagatggagaggttcttgcgtgagcctatcaactttggttccctctgaaggatgttataaccgccaagtgaccatttcagtttccttgtgcaccaattgggttattccgagaactgcaaagaataattaatggtctttttgttttgcctctgttttcttctactcttgacattatatgatggaatgcatccattcacaataaaagaaactttctcggcatttctttt

SEQ ID NO: 209757 - DNA, 381 bp, Gossypium hirsutum
cggacgcgtgggtgcaatcttagttttgggtagagatctcgtggtagttcctaaactcattggtccgtgacccccagcaatgtcatcaccagaagcatccccagaacgtcatatagaagatacatggatgcaggagctgaatgctaacaggcctccaacaccaactagaggtcgtcctcaagtagcaaatgatcgaggctctcttgcttggatatagtacatccttccaattgtttctatatacatactccttcaggctcatgctataccacatggggattctggctttctggatagagcatgctgccatatacaggcattttcctaccttgtaatctctcccattagaagttagaagggtttacaagattttggtttttt

SEQ ID NO: 209758 - DNA, 458 bp, Gossypium hirsutum
ctgaaactctcagcaacaatgctcttaagagagaacggagggcaagagagaggcaggtcagagaagaggagaaaaagaaggtgaccacaaataagacaccagagaatcagaggcaacaggtggcaaataatgataccatggatccttcgcaattcctcagcaacagaatcaaaagtttggcattactaaaggaatctggtgtaaatccgtaccctcataagtttgatatttcaatgtctatcactgaatttattgacaaatatagaagtttgcacgttggtgaacatgttgagaacactgaaatctccttagcagggagaattttgaacaagaggtcatcatcgtcaaaactatatttttatgatcttcatggaaatggtgctaaaattcaagtaatggcagatgcaaggtacatacataaatacatacgcattccaacatggatgaaaatgagttct

SEQ ID NO: 209759 - DNA, 316 bp, Gossypium hirsutum
cccacgcgttcgctcaaaagaaaagaggaaacgcccaacgtggttcatctaacgcacttaaccgcgccagaatccatctatcatctccgccttggatttgcctccttggcctctaaaccttactcgtcagcttggtactcgtgggtgctctggcccgttacattgtgggccatggtgcttaccacgatttatcgtcgaactcttgttgttgaaaggaaccgctttcatcagcttagattacaaacatgggccatacccaagtacggcatataataccgcttgtaatggcgaaaggaatacgtcaataacatgattg

SEQ ID NO: 209760 - DNA, 414 bp, Gossypium hirsutum
attttgtctaaaaaagaaaaatgccaggcctcaccattggagacacagtgcccaaccttgaagttgaaaccacccacgggacattcaagcttcatgactacttcaacaatgggtggaccatcattttctctcatccttctgatttcacgcctgtgtgtacgacggaactggggaagatggcggcttacctgccggagtttgaaaaacgaggggttaagcttctaggtttctcttgcgatgatgtgcagtcacacaaggagtggatcaaagatgttgaagcctacacgcctgggtgcaaggtggcatacccaatcgtggcagatcccaagagagggatcattaagcaacttaacatggtggacccaaatgaaaaagactcttcagggaacgagctcccatctagagctctgcata

SEQ ID NO: 209761 - DNA, 403 bp, Gossypium hirsutum
gctgaaaatggcaccttcatctccgccacaaacaccgccgtccgccgtggttattgggctcgggttactcttctccacggcattgctttgtgaatcaaggttaagcttagattactactccaaaacctgtcccagtttcaccaaaatcatgcaagacaccataaccaacaagcaaatcaccagccccacaaccgccgccggtacactccgtctatttttccacgactgtcttcccaacggttgcgatggttccatcctcatatcttccaccgcattcaacaaagctgaacgtgatgccgacatcaacttatctctccctggagatccatttgacctcattgttcgagccaaaacagcccttgaactcgcctgtcccaacaccgtctcttgctccgacatcctc

SEQ ID NO: 209762 - DNA, 389 bp, Gossypium hirsutum
cccacgcgtccgcccacgcgtccggttttctttcgccgttctaaatcacagaaagctttgaggaagaagcttttggaggtgcaaaacatggggccgaagaaaggtggaaaggtggctgtgcccgccaagaagaaacaagagaaggttgtcaatccgttatttgagaagcgtccaaagcagttcggcattggaggggctttacctcctaagaaggatttgcatcgattcgtgaagtggcctaaggttgttcgtattcaaaggaagaagaggatcctcaagcagaggttgaaggttccaccagcattgaaccagttcaccaagactcttgacaagaacctcgcaacaagtctgttcaagttgctcctcaagtacaggccagaggacaaagc

SEQ ID NO: 209763 - DNA, 384 bp, Gossypium hirsutum
ggaatatttacattcaaaaaacattgtgcattttgatttaaaatgtgacaacctgcttgtgggcttgaaagatcccgtacggccaatttgcaaggttggggacttcgggttgtcaaagataaaaaggaataccttggttactggtggtgtgaggggaactcttccatggatggccccagagctgttgaatggcagtagtagcaaggtttctgaaaaggtcgatgtgttctcatttggtattgttctatgggagattcttactggcgaggaaccgtatgccaatatgcattatggagcaataatatgaggcatcgatagcaacacgctcaggccacctgtaccaagctactggtacccagaatgtgaagtactaatggagcaatg

SEQ ID NO: 209764 - DNA, 354 bp, Gossypium hirsutum
cggacatccgagatttgagctcattcgtcatgatgtcactgagccgttgctcattgaggttgggcagatctaccatcttgcttgcccggcttcgccaatcttttacaaatacaatcctgttaagacaataaagacgaatgtgatcggtacattgaacatgttgggtctggcaaagcgtgtcggagcaaggattttacttacctcaacttcagaggtttatggagatcccttggaacatccccagactgagagctattggggaaatgttaaccctatcggtgttcgaagctgctacgatgagggaaaacgagtggctgaaactttgatgttttattaccataggcagcatggcat

SEQ ID NO: 209765 - DNA, 434 bp, Gossypium hirsutum
catgatcattaatgaaactctacgattgtatactcccttaaatgggatggtaagaagagctggaagacaagttcaagtgggaaagctagtcttgcctgctgaagtagatgttttgatcccaaacatggcacttcaccatgaccctgagttatggggagacgatgcccatgttttcaaaccggagaggttcgaggaagggatcgcgaaagctaccaagtacaatgcggctgcatttattcctttcggaatgggacctcgagcttgtgtcgggatgacctttgcaatcaatgaaacaaagactgctctttccatgattctacaaagatacaccatttctctctcccctgcgtatgttcactcacccgcacctcgtatcacagttcaaccacaacatgggattcaagttatgctcaattcactgtctaatgatgctt

SEQ ID NO: 209766 - DNA, 439 bp, Gossypium hirsutum
gctgaaaatggcaccttcatctccgccacaaacaccgccgtccgccgtggttattgtgctccgcttactcttctccacggcattgctttgtgaatcaaggttaagcttagattactactccaaaacctgtcccagtttcaccaaaatcatgcaagacaccataaccaacaagcaaatcaccagccccacaaccgccgccggtacactccgtctatttttccacgactgtcttcccaacggttgcgatggttccatcctcatatcttccaccgcattcaacaaagctgaacgtgatgccgacatcaacttatctctccctggagatccatttgacctcattgttcgagccaaaacagcccttgaactcgcctgtcccaacaccgtctcttgctccgacatcctcgccgtcgctactcgtgacttagtcaccatgcttggg

SEQ ID NO: 209767 - DNA, 415 bp, Gossypium hirsutum
gctgaaaatggcaccttcatccacggctcatacaccgccagccgacgccgttattgaggtgcgcttactcttctccaccgcattgcctctgtaatcaaggttaagcttagattactactccaaaaccagtcccaccttcaccaaaatcatccaccacaccatatccaacacgcaaatcaccaaccccacaaccgccgtcagaacactcctcttatttttccacgactgccttcccaactgatcctatgcttccatcctcatatcttacaccgcattcaacaaatctgaacgtgatgccaacatcaacttatctctccctggagatccatttgacctcattgttcgagccaaaacaacccttgaactcgcctgtcccaacaccgtctcatgctccgacatcctcgacgtcattact

SEQ ID NO: 209768 - DNA, 432 bp, Gossypium hirsutum
attggaaccgttgatgattctaatcgcgaaattgcagctttctttgcgcatgtgacgcacgagactggacatttctgctacatataagagataaacggggcctcaagagactactgtgatgaaaccaacacacagtatccatgcaaccctaacaaaagctactatggccgacgaccaatccagctatactggaatttcaactacggaccagctggcgagagcatcgggttcgatggactaaactagcctgaaaccgatgccaccgacccaattatgtacttcaagaccgcagtctggtattgagtgaactctgttcaaccagcgataaaccaagggttgggggcaaccattcttgccattaatggagctctggagtgcgatggtgtgaacccatgcaccgttgagcgacgggtcgagtactatatcgattat

SEQ ID NO: 209769 - DNA, 381 bp, Gossypium hirsutum
gcgaaaaaaaataccaaacatgtcgaaatcggtgattgaaatgcccccaaagggcggcgggagcgggcgatctttgttaaaaaaacgagatgctttcaaagaaaggcgatttttttgctgcatttcataaaacgggtaccacacaacgccggcaagagcgtccacgaggcgcggacccaagcagcatacactagagcaactgaacgactcatagtttgcgataaaaattgtgaaaaaaataattacatggtcaagaacatttactgtcgcggagcttgaactgatactgacacataggctgtaactgacattgtccgttcacagattcagctacaccgctatcataccgctatagagcccatggttgcgacagcattgacc

SEQ ID NO: 209770 - DNA, 437 bp, Gossypium hirsutum
cgcatatggatattcagtggtgacacagatgctgtaatcccaattacatccacccgcgacaggatagatgctctcaagcttgcaactgtgaaaccatggcatgcgtggtatgatgatggccaggtaggaggatggacccaagagtatgaaggactgaagtttgtatcagtgaggggagctggacatgaagtccctttgcatagacccaaacaagctctcgccctcttcaaagctttcttatcaggaacctccatgcctgcgcctgcctctgcctctgcccctgcccatgcccatgcttctcagctactcatctccgactcctgaacttttgggttgatttcatttcatgctttctcaatgtaatatctactttgggggattctaatgttcccgctttcccaaaacattcaataaaattttcaattaagaacaatcat

SEQ ID NO: 209771 - DNA, 422 bp, Gossypium hirsutum
gcacttcgcaaacttgtgccaaaacaccttcgtaagtgttcaacatttgagctattggctgcgtgtttatggcgttgtcgaaccatcgcaattcaagctaatcccgaggaagaggtacgtattatatgcatcgtaaacgcacgttccaggtttaatcctccattaccttcggggtactatgggaatgcattcgcgttcccagtggcagtagcacaagcagggaaactttgtcaaaacccattagggtattcattagagctagtgaaacaagcaaagaatgatgtaacagaagaatacatgaaatcattagcagatttaatggtgattaagggtcgaccacatttcacggttattcgatcttacctggtgtcggatgtgacacgtgccgggtttgatgatgcggatttcgggtggggcaaagc

SEQ ID NO: 209772 - DNA, 334 bp, Gossypium hirsutum
gttctctccaaaatatctgctttttcttagttttcctttttgtcccttgtttatttgggatgggcccctcatggccgccgctgatgtcgagttccggtgcttcgtcggagggctcgcatgggccaccgacgaccgggccctctaagaagccttcagtgcgtttggtgaaatcgtcgaatcgaacatcattaatgatcgtgagactggaagatcccgaggctttggattcgttactttccgtgacgagaaagctatgagggacgcgatcgaaggaatgaacggtcaaaatcttgatggaaggaacatcaccgtcaacgaagcccaatcgcgcaaa

SEQ ID NO: 209773 - DNA, 374 bp, Gossypium hirsutum
cccacgcgtccgggtgttgagcttcatgacacggtaatgttgggagcagactattagcggagtgaacctgaaattgcttctctattggcagagggtaaggtcccgattggaattggacgcaatagtaaaatcaggaactgcattattgacaagaatgctaagattggaaaagatgtggtcattgtgaacaaagatggtgttgaagaagcagatagaccagaagaaggattttacataacgtcaggtttaaccatcataatggagaaggcaaccatagcagacggcacatttatataaaaatgggggaccttaaaaatgacatccatgggggcagctttgaagatcggaattcgagttgcgaaaaaagccaccga

SEQ ID NO: 209774 - DNA, 355 bp, Gossypium hirsutum
gaggttttaggcttcatcagggttttggggaagccaaagaaaacatggcggctacttgtggaagaagaaccctagggttctcctgctcctcggccaagaccattttcacccatttaccatcctcaacacctgctaacaataagctacccggccttttctctcctaacaaaatttctgcttctcgattctctctccgcaatctcactttttccaggctcccattggaattgggtggtgcagtaactttgatgcctttgcatagtgttacggcttctgctttgttcacttccttgctgtctttgcataatcaaagctgggggtgtttgtcagaaagatttgcaactcctctatagca

SEQ ID NO: 209775 - DNA, 333 bp, Gossypium hirsutum
gaactaaaggaaacaaaggccttcatcttagcactccgccgccccttatctcatcgcaatcgtgatcatcccagaaaagaaccgcagggagatatcaaagtacctctttcaagagggtgtttgctacgccaaaaaagattacaacttggcaaaacacccagaaatcgatgttccaaatcttcaagtaataaagctgatgcaaagcttcaaatccaaggaatacgttcgtgaaacttttgcttggatgcattattactggtaccttaccaacgatggcattgaatttttaaggacttaccttaatctcccctctgagattgttctgctactttg

SEQ ID NO: 209776 - DNA, 330 bp, Gossypium hirsutum
tccacgcgtccgaaaaaggtgcttcagttagctggaattgaagatgtcttcacttgtgcaaggggttcaaccaaaactcttgggaactttgtcacagccacctttgaatgtcttctgaaaacatatggttttttgacaccggatttctggagagagactcgtttcacatggtcttcattgcatgagtatactgatctgctgggaaagccatccaagaccctttttctgtaaaatatcgagagagtcgatatctcatcgaagatcaacagtgtcattactcattagttagttggatgcatgtctaagtcctttctatcttgcaatctttac

SEQ ID NO: 209777 - DNA, 342 bp, Gossypium hirsutum
gccacagctaccaaaatttcccaaactaacttttaaagcaaacaaattttacctttgctaaagggcccccaaagctgagaaaaagccagccgaaaagaaaccggcggaggagaaaaagaccaccgttgccgagaaatccccggcggagaagaaaccgaaggccggcaagaagcttccaaaagaaggcggtgccgccgctgacaagaagaagaagaaggccaagaagagtgtggagacttacaagatctacatcttcaaggttcttaaacaagttcaccctgatatcgggatctcaagcaaagctacggggataatgaacagtttcattaacgatatctttga

SEQ ID NO: 209778 - DNA, 436 bp, Gossypium hirsutum
  unsure (1)..(436): unsure at all n locations
cttggctctgctaatcgccacttgagatcttcaaacaggaagaaaatggggttcattgtgggatttgcagagaatctggtgttgaggttaatggaggacccaaaagagagggatagaaaattcagagaacacgtttactctatgaaggatcgatgcgcaaaaaccaaggagatgtggagttatccactgcggccttatgggttttggacatttgagcgccacaatgctcagctccgttgggatcctcagattagccaagtccccggccgcagggatccttatgatgaccttcttcaagacagntatgcgtcttcctccaaacgaaactgaggaatcagaagccattagcagatggtttggagcttgatctacaaatgggaagtggacattgaaaccctttttactgttttgttgaatttattttcaattgtgctac

SEQ ID NO: 209779 - DNA, 385 bp, Gossypium hirsutum
cagtaaactaattgtggcatatgggacaaggattttatctcttcctaatcctgctgatatatgtgccttcaagtacaagggaatatggatttcactaactattctggcaagaggtcttgctggaaactatgtaaactttggtgttttcgaactctatggtgatagggcactctccgatgcactcgacattgctctaaagatgaacattgtcaattcctttggccgatatattggcatttcggaagctaacgagggcgtacttctcgttcttggaggttctattcaatagccacattaactttatattgaatttagatgcagcaaccttcatgcatattggtggttcccttgaatctggtcttaaaggcctggatataaatatctc

SEQ ID NO: 209780 - DNA, 396 bp, Gossypium hirsutum
cccacgcgtccgtgaagatgggaggacccttgcagattacaacatccagaaggagggcacccgccacctggtccttcgcctccgcggcgggatgcaaattttcgtgaagaccctgactggaaagaccatcaccctggaagttgagagctcagacacgattgataatgttaaggccaagatccaggataaggaaggaatcccaccagaccagcagaggctgatttttgctgggaagcaacttgaagatgggaggacccttgcagattacaacatccagaaggaatccactttgcacctggtccttcgcctccgcggtggcttttaagtgtggtgccgaacacctgtccagttattgttgatgtgttaagcttgtatgtgtgtgggtcgtatgctaat

SEQ ID NO: 209781 - DNA, 390 bp, Gossypium hirsutum
accagatcagcagaggttgatttttgctggcaaacagctagaagatggtaggacacttgcagattataatatccagaaagagtctacccttcacttggtgctccgactgcgtggtggaatgcagatttttgtgaaaactttgactggaaaaactatcacattggaggtggagagctcagacacaattgataatgtgaaagccaagatccaagataaggagggtatcccacctgaccagcagaggttgatttttgctggaaagcagctcgaggatgggaggacacttgcggattataacatccagaaagagtctacccttcacttggtgctccgactgcgtggtggaattgcagatttttgtgaaaactttgactggaaaaactatcacat

SEQ ID NO: 209782 - DNA, 376 bp, Gossypium hirsutum
cggacgcatgggctgacacttagacgaactcatgctctagaccattgatcggactcatccatcggacatcgtggggagctttttacgtgacgctctaatttaatgaatccagtaacggtatatgccaattgttgatcgaagggtctatgccacttaaactcaaatctatcttaccttcaatccatctttgttcagccagctcataacaaaatgttagaccgggctgacacaaccaaattggttgaagaaaaggaaaccccagcgaccaatcactcccacccccaaaagtggagaccgaacaccgtcaggttgtcgaggacacgtctgaagaggaggcgggcgcactctaagttgaccaccctacccactaatggac

SEQ ID NO: 209783 - DNA, 302 bp, Gossypium hirsutum
ttggatatacgctccgattgtgcattgataatggcttgtcagtgagacttctatataatagggaaggcatgccgttcaatactgatgtgctgaccattgcaagtacgtggctactgaagtgctcaaagatcacggttatgatggtgcatcatatgatatttcgtcatgcggaggaatcctcttcgtgatcatggctggttattggccctttgatgagccaagcctcataggcttgtataacaaaatctgggaggcttctttcagctgtccatcgcggttttcatctagtgctaggaatttga

SEQ ID NO: 209784 - DNA, 262 bp, Gossypium hirsutum
gcgctcccaacaatggtggcatcaaacttctctcttgctttgacactcgctgccattatatctgtctgggtggccgctgatgccgcccaccaccaccacacggcgtcggctccttccccttcctcttcctcttcctccgtggactgctcctccctcatcttgaaacagatcaaggatgggtttggtgagggaaaagacctggtggtgtctgttatgtcggccatgggggaggagcagatctgtgctctcaaggacattggtc

SEQ ID NO: 209785 - DNA, 426 bp, Gossypium hirsutum
cccacgcgtccgcccacgcgtccgcctacctggaatttcaggctgcaaattctaccttaatgaggagctatggtcttgttcacgaagattgtataacaaagatgaggttgatgtcattggttgatcttggctcttatgaatctggacaaattccatatgccctcatcaaggatactcttaggatcaacgatgatgaggtggaattgtggattgttaaggctataactgctaagttaatcgactgtaaaatggatcagatgaaccaggttgtgattgtaagccgctgtactgagcgcatttttggacagcatcagtggcattctcttcggttatactagcaacatggaggggtaatgttgctagcctcatcagcaccatccaagctaacagggctgtggaagagggctacaagctatgcaagggatg

SEQ ID NO: 209786 - DNA, 393 bp, Gossypium hirsutum
cccacgcgtccgcccacgcgtccggggattcatgggtggtgaaattgccttgtttttgattgaagaattcagtgttcctgttgattgtattacctttttggtgcttctctttaattttgctgttattggtgttttggctgtttttatgtcaaaaatgccaattattgtgactcaaggctacttggttttaattggaatgttggttgcttattggtttactcttttgcctgaatggactacttgggtgttattggttgcaatggcattgtatgatcttgctgctgttttattgcctgttggtcctttaaggctccttgttgagcttgctatgtctagggatgaagatatcccagctttggtttatgaggctaggccagttacacatcatgattc

SEQ ID NO: 209787 - DNA, 354 bp, Gossypium hirsutum
ctcctcaaggcactagacaaggaactctcgaatgactttgagaggctggttctgctttgggctgttgatcctgctgaacgtgatgcccttttggctaatgaagccaccaaaaggtggacttcaagcaatcaagtccttatggaaatagcctgcacaaggtctgccaaccaactgcttcacgcaaggcaggcttatcatgctcgttataagaagtcgcttgaagaggacgttgctcatcacacgactggggacttccataagctcctcctacctctagtgagttcatacagatatgagggagaggaggtgaacatgactctggcaaaaacagaggcgaagttgcttcatgagaaa

SEQ ID NO: 209788 - DNA, 420 bp, Gossypium hirsutum
tccacgcgtgcgggaatatcgtatgccatcaatagtggctaccaatcatggggtcccctctttggtaagggattctttgccttctgggtgatcatccatctctaccccttcttgaaaggtttgatgggacgccaaaaccgtacacctaccattgttgttgtatggtcaattctgcttgcctccattttctctttgttgtgggtgcggatcgatcccttcacaaccagagttaccgggccggatgtagaacagtgtggaataaactgttgagagagaacctataaagactgaagatttgttttggtgtcactaagcttccaatgccaaaagtttgtttagttgtaatttgggtatttcagttcacatcatgtgcagaatatacggttgatatatatatggcatcttgtttctcctttgatg

SEQ ID NO: 209789 - DNA, 272 bp, Gossypium hirsutum
gccacacatacggtcatgagtatatacactatgttggctcctggggtcccgctataattgggggggcacataatgaaggccttgctgccttggctgaaactatgaataaaggaacaagctttggtgctcctcgtcttcttaacaatgttatagcagaagaaggcatcactgctcgacctaccattaaaatggggcgatatataaactctgggacagaagcatgcatgggtgtgctccgacttgcccatgcttttactggccgagagaagatc

SEQ ID NO: 209790 - DNA, 432 bp, Gossypium hirsutum
cccacgcgtccgtgcttgctacgtgacagtgaggggagagaaggctatgcagcttcttgagagcggtttgaaggtcaaggaatatgagcttttgaggaggaacttcagtgatactggctgctttggattcggcatccaggagcacatcgatcttggaatcaagtatgacccttcgaccggtatctacggtatggatttctatgttgttcttgaacgagctgggtaccgtgttggccgtcgtcgcagatgcaagtcacgtgttggtattcagcacagagttacaaaggaggatgccatgaagtggttccaggtcaaatatgaaggtgtcatccttaacaagtcccaaaatattggagcttagaagtagcagtttgagattgtttttagtttgagtacctgattttggctagtttatatttatcagatagtatt

SEQ ID NO: 209791 - DNA, 385 bp, Gossypium hirsutum
atcggtccggaaagcatctattctgactggaaaggttgagattcttcacaagatggctgatggatattttggagagggtttaactcttctgggtgaaaggctgttccaagtaacttggttgacgaaaattggcttcatatatgacataaaaaaattgcagaaattagagcaatttacacatgagatggaagatgggtggggactggcaactgatggcaaaatcttatatggaagtgatgggacttcaacactgtatcaaatcgatcctcaaacattaaaagtcacaacaaaaaatgtcatcaagtttaatggtcaaaatgtacgctacctgaatgaattggaatatataaatggtgaaatatgggctaatgtttgacagactgac

SEQ ID NO: 209792 - DNA, 379 bp, Gossypium hirsutum
cccacgcgtccgaaatcggtgtgggtgatgaatgttgtgcctgttagggcacacagtacgcttgctctcattcttgaccggggttttctgggtgctttgcacgactggtgtgaacccttcccaacatatcctcgaacgtatgatttgcttcatgcaaatgggctcctctcacatctcacttcagagaggtgtggcttgatggagttatttatagagatggatcgaattcttcgtccggagggctgggttgtgctctctgataaattaggagttatagagttggcacgtgcacatgctacacaaatacgatgggatgcaagggtgatcgaccttcagaatggtagtgacgagcccctacttgtttgtcaaaaaccttttg

SEQ ID NO: 209793 - DNA, 358 bp, Gossypium hirsutum
aagagccccaggctcgccgtgtacaattaatcttgcgcctaagctagaaagaaatcctctaaggcggttggggatccaaacaagccattgaggcctgctaataccttctctctcttcatgaaagctttcctttagccattctagtataaacaccccaaagacaaatctgcctctactttgggcacatcttgtgtagaaatatcgctgaacttgtctgtttctaaaaaaccaccttatctagcaaaagcactgtagcgatatgtcgcgtctgcatagaacatgatcgcctacactcttagacacgctgtggctcccacagaagaacagtcgaagtctgagaagtcggtgtctgatgcga

SEQ ID NO: 209794 - DNA, 386 bp, Gossypium hirsutum
gttccttttagcttacatcttccattgttttttatgggcttagagcttataaagaagggggaccaatcgaggggaaataagaagatttgttattgttagcgaacaagttctcagagaggcaacctattgggacagctgcccattcccaagatgataaggattacactgagccacccccatctcccttgtttgagcccagtgagttgacttcatggtcgttttaccgagcttgaatcgatgagttcgctgctactttcctattcttgtacatctcggtgttgactgtgatgggagtccttaatgacaaaaccaagtgtacaactgttgggattcaagggattgctttggcttttggtggaatgatctttgctcttgtttactgcact

SEQ ID NO: 209795 - DNA, 426 bp, Gossypium hirsutum
gcttcatattatcttttttagttccgacaaaagaaaacgaataaaaagaagaagaaatacaatcgttttctttttgaagacgggttttagtttttggggtgaaaaaaatgtcgggagtatttaacagtgcgatagtggcttcgccggactagcttgtggcgggccgttggcgaactccatcacctaagataacggcagacgctctggtgaaacggatccttgagacgaactccttcggcgtgtccatgcacattggagaccatgtgcaattcgcttattctcaccataaagagtctcctttacagcccagatcatttgctgtgaaagacgaaatcttctgcttgcttgagggagcccttgattactttgggagtttaaagcagcaatatggtcttgcaaagtcaagcaatgaagtgatattggtca

SEQ ID NO: 209796 - DNA, 397 bp, Gossypium hirsutum
cccacgcgtccgccgttgtcttccttttttcccttaatttcaaagctctctttctctattctgtttggcttatctatcgctttgatttcgcgtccttactgtgcactcgatggcaaatcgatggttgaggcctgaggtgtatccgctgttcgcggccgtaggtgttgctgtcggaatctgcgggtttcagttggtgcgaaatatctgcatcaaccctgaagtcagggtaaccaaggagaacagggctgctggggttttggacaactttgctgagggagaaaaatattctgaacatttcttgagaaaatatgtccgcaacaagacgccagatatcatgcccagtatcaacagcttcttcactgacccaaagtggaggcttcactcttgctttatgctg

SEQ ID NO: 209797 - DNA, 426 bp, Gossypium hirsutum
gaaaaactctgatctttatgggccatggaagcggaagaatctttctgagtatggcgtcgtggctcagtgtatggcaccagctagggtgaacgatcaataccttacaaatcttcttctgaagatcaatgctaagcttggaggtcttaattcaatgctaactattgagcaaacaccttcaatccctatgatttcaaaggttccaactatcatccttggaatggatgtatctcatggttctcctgggcagtctgatgtgccttcaatagctgcggtggttagcttcaggcaatggccattgattttccgctatagggcatcagtccgtacacagtctccgaagcttgaaatgatagattctcttttcataccagtttctgacataggggatgagggtatcatgagggaggctctcttagacttttatac

SEQ ID NO: 209798 - DNA, 409 bp, Gossypium hirsutum
gttcaccgtgccacaatgttattatgctaagcaaccacctgctttgcatcaaggctatttttggaagtttacagttgatgcgttgttctatatattttacagcatgccaaaagacgaagcccaattatatgctgcaaatgaactttataatagaggctggttttaccacaaggagttccgattctggttcatgagggtccccaatgtggagccactagttaagacaaacacatacgagagaggttcataccactattttgatcccaactcatttgaaataatccgcaaggataattttgtcgtccattatgagttgttggaaaagagaccgtcgctacctcaacattaatattttttcccctcatttacactgtaaagcacaagcatgtaactcattccttttatacat

SEQ ID NO: 209799 - DNA, 419 bp, Gossypium hirsutum
ctccatctctacatcacagtaggaatggcgacagatgttgcagcccccgccaccgccgcacccgaagacccaacccaacctcaccttgaagtaaaactcttcaaccgctggagcttcgaggaagttcaggttgctgatatctccttgagtgattacattggtgtccaagcttcgaagcatgctacctatgtgccacacactgctgggaggtactcagttaagcgtttcaggaaggctcagtgcccaattgttgaaaggcttacaaactcacttatgatgcatggccgaaacaatgggaagaagcttatggcagtcaggattgtgaagcatgccatggatattatttatctcttgactgatcagaacccaattcaagtcattgttgatgctattatcaacagtgggccacgtgaagatgc

SEQ ID NO: 209800 - DNA, 349 bp, Gossypium hirsutum
ctaacaactactttgtaactgcttcacttgacatgacgtggtgtttttatgatctttcgtctggtttatgcgtgacccatgttgaagacccatcaaattctatgggctatacgtctgcagcttttcattctgatggccttatccttggaactgtcaccactggagctactgttagaatttgggatgtgaagagtcggggaaatgtatgccaactttgatggacacactggggctgtaacagccatatacttcttagaaaacggttacttacttgcgactgctgctcatgatggggttaaattgtgggatccacgcaaattgataaaactttcgatcttttgaatttttt

SEQ ID NO: 209801 - DNA, 336 bp, Gossypium hirsutum
ccgggagtttgatagtaatggctttgatatcttcagcattattgattgtaagtcgttactggttttgccaaagtacgttgccttcaaaggatataataacaagtacctgtgtgttcgtgaaaattacataacattttcagcagatgacattggtgactcaactgtggcatgcgagacttttgttactgatgatggaaaggttcacatcaaatccatttgtgctggaaagttttggtgggccgacccgaaatggatttgggtaggatatgatgaccctagcaacaatgatcgcactacgtttcgccctgtcaaaattgaccgataagactataggtc

SEQ ID NO: 209802 - DNA, 302 bp, Gossypium hirsutum
cgtcccacccgaaccaggtactgacataatagcatttgaaacagctccgatcaagatcaaagctcatgcttttggtgaactcttacatgaagaacacacaaagcttcctgcgtggttaactctgaacacaaaagatgtcgtcaatgtacttagccgcgattctttgcttttctgcgcatacaaagctaaatcttgcacacttagatgtgctgtatcaatgaactgcacgccacctaaatttattcatgatctgattttagcaattaaaaaggtcactaccaaacccatagttatatatccca

SEQ ID NO: 209803 - DNA, 344 bp, Gossypium hirsutum
ccgacgcaatacatgccacctatgatgagtgcctgaaatgtgggatggatggatatgtctcggagcccttcatggaaaaaaatctctaccacgcagtagccaacttcttcaaagccaaaccaacctcgtaatcgtcatcaaaacaccttgcaccatcattggaaagtcaacacaaccaaaagctggttggactttttcagcgaaactttcccaatccttctggtgcattttggtcataaaaaaactacgtatagtttcctggagctcccgagaattctggactgcatcgatagcaaacatgcatgcatgttcggtgaattagagttagagtatgtgtatactac

SEQ ID NO: 209804 - DNA, 402 bp, Gossypium hirsutum
cgaccacgcgtccgaaacaaaccttttacttctcaactctttcaaattcatcatgtctgacaagtgcggcaactgcgacgtgctggtacatgatccagtgcgtgaagaaaggaaatagcttggtcattgatactgaaaagagctacatcagcactgtagtggtcgaagctgtggcagagaacgatggcaagtgcaagtgtggagatagctgcagctgcacagactgcacatgtggcactcattaagcagacatagaaccatgatgttttagtccatatcaatattatgacctaaaaataatgaaattgagttgaataaattggtggtttggttgtgtagtttgagacattgaatgcgttttcatgcctgactgtcttatgatttgattctcattgtacacta

SEQ ID NO: 209805 - DNA, 385 bp, Gossypium hirsutum
  unsure (1)..(385): unsure at all n locations
tcgtccacgcgttcgtccacgcgtncgtgaagcccttgagatcactaggaagttcatgaacaaacgagtgagggttttggttaagcgtgatgagctcaccctcgagggtatcaagcagttttatgtgaatgttgaaaaggaggaatggaagcttgaaactctttgtgatctctatgagacccttgccatcacccagagtgtcattttcgtgaacacaagacgcaaggttgactggctaactgacaagatgcgaagccgtgaccacacagtttctgtcacccatggagacatggaccagaacactcgtgacatcatcatgcgtgaattccgctccggttcttctcgtgttctcatcacaactgatctccttgctcgtggtattgat

SEQ ID NO: 209806 - DNA, 321 bp, Gossypium hirsutum
cccacgcgtgcgaatcattcaaggttatttttaatctatatagaagacgccaggaataatatagggaagggtgggacttggcatgggaggagcgaagcgccaccgtgaggtcctacggtgacaacattcatggcattacatattctgcaaatcgactctttgcccgcaggggaagagtgaaacgtatcaatggctttatctacaatgaaacccgaggtgttctcaagatcttattgtataacgtcattcgcgatgctgtcacctacaccgatcattccaagaggaacactgagacgcgacatggatgtggcatatgctctg

SEQ ID NO: 209807 - DNA, 296 bp, Gossypium hirsutum
gagatcccttgaggacatattcatacagattcagagcagcggtgctaatgggcgatcacaaagaaaacgaagctattgcggagctcacaagagcactagctcttaagccagacctgctactactacatcttgaagctgatttccatgactcgatgggggaatatgcatttactgttagagactgtgaaacacacatatgtcttgaacccaaccacgccgatactgtctagctatataataaacgacgagagccggtcttagaacgatattgagaaaaatcaaatcccaataaatca

SEQ ID NO: 209808 - DNA, 401 bp, Gossypium hirsutum
gatccggtgataggaaaatcaaggatccttgttacgcctagtatgaaagagcaggccaaagaaatcgcggagacatggaaaaagagccttgaagagagaggagggattgagaatgtgaaaacccctgatgttcatacttttttgcagcatttggttacgtttgggattgtcaagaaagaggatctggagctttataggaaacttgtcgttgcttctgcttggagaaaacaaatgcccaaactcgccgtttcgcttggcctcggcgatcagatgcctgacatgattgaagaattgatcagcaagggacagcagcttgatgcagttcattttacttatgaagttggccttgtggacaagttcccccctgtgcccctgctgaaatctttcttgagggatgcaaa

SEQ ID NO: 209809 - DNA, 420 bp, Gossypium hirsutum
  unsure (1)..(420): unsure at all n locations
ctctccaaagcgaaccctctcttctctagaaaccaccgtcgagccatggctctaagcacccgggccaccgccaatcgcctccctcacctcctctctctcctcttctgccaccccaaccacatacgctcgcccttctccgccgtccacctccggcactccctccagtctgtctaagcctgctgagtacgtgatctccaaggtcgatgacctcttgaactgggcccgtcgtgggtccatatggcccatgactttcggcctcgcttgctgcgccgtcgaaatgatgcacgccggtgcttctcgctacgacttccatcgctttggtgtcatttttaggcctagccctcgccaatccgattgcatgattgtcgctggcactctcaccaacanaatggcccctgctcttcgcaaggtttacgacca

SEQ ID NO: 209810 - DNA, 320 bp, Gossypium hirsutum
cggacgcgtgggctggagtttacactggtggctcttgggaatctgcccatgctactttttatggtggcagtgatgcttctggaactatgggcggtgcatgtgggtatgggaatctgtacagccaagggtatggcgtgaacactgcagcattaagcacagccattttcaacaatgggctaagctgcggagcttgctttgagatcaagtgcacggatgacccaagatggtgccacccatgcaacccttccatttttattactgctactaacttttgcccttctaactatgctctcccaagtgataatggcggctggtgtaac

SEQ ID NO: 209811 - DNA, 376 bp, Gossypium hirsutum
  unsure (1)..(376): unsure at all n locations
aatgactgatggatttaacagctgcaaaaatgtggtttgtaatttcactgaaggtgccatgggttctttggctcaattacgcttaccaccaaaagctatagaagctgccaaacaggcaggaaaagtcccagatgttttctactgtctcaagttgttggaagcaacaggcatctcaactgtcccgggctccggattcggacaaaaagaaggggttttccacttgaggactacaattctacctgctgaggaagacatgcctgaaatcatgtcgagtttcaagaaattcaacgacgagttcatggctcaatatgaagataactggaatcgttcaaggatgtgaagcatgnttagaagtccttaatactgtatttatcta

SEQ ID NO: 209812 - DNA, 338 bp, Gossypium hirsutum
gacatattctgcttgtttcaaggccacattgagaatattgctgttcttaagcaacaatatggcttgaacggaacagcaaatgaggggatcattgttattgaagcttaccgaaccctcagagacagaggtccttaccctccggatcaggttgtaagagatatccaggggaaatttgctttcattatctttgatagctcttcaaaagccacatttatagcttctgatgctgatggaagtgtacctttcttctggggaactgatgctgaaaaccaccttgttcttgcagatgatgtggagactgtcaagaagggctgtgggaagtcttttgctccattccc

SEQ ID NO: 209813 - DNA, 288 bp, Gossypium hirsutum
gacttcggagccatcggagacggcaaacactacgacacatcctccatccagttggccatcgagagctgcggcactaaaccatgctacgtgaccttcccaacaggcacatacctaacggccaccatcttcctcaaatccaacgtgattttggacatcccgaaaggctccaccatcttgggtgggaccaaattggaagactacccgaaagagttcgataggtggtatgtgatattggcagagaatgcaagggatgtagggataacaggtggaggggtggtggatgggcag

SEQ ID NO: 209814 - DNA, 365 bp, Gossypium hirsutum
tttctgttcatggtatgctttgcaaaagcattggctggctaataatattctgggtctcgcttgctgcattcagggaattgaaatgctttctcttggatcttttaagactggtgccattctattggctgggctttttgtatatgatattttctgggtctttttcactcctgtgatggttagtgtcgcgaagtctttcgatgctcctataaagcttttgttccctacagctgactctacccgaccattttccatgcttggacttggtgacattgtaattcctggtatttttgtagcactagcattaagatatgacgtatctagggggaaagagaggcagtattttaagagcgcattttttgggtaca

SEQ ID NO: 209815 - DNA, 347 bp, Gossypium hirsutum
ggaaaacaagaaaagcagagccgcatcactttttgctagctaagctactgtgggagttattggtcttcataacagcttctgcagtagctaataataacgttatatattatataaattttatacatcctttttaccctacgactccatatataagcaagtaaaaataaatatggctcgctctgtttcttcctttaagttccttggtgcttctgtttttgatgctctttatgtctccatatcaaggagaggttactcaggtgcaccgccggcggcagtgacggctagctttggtaggcctggagcgatggggaaagtggaacgaagatatgcgatgaaagagtcgtcgt

SEQ ID NO: 209816 - DNA, 385 bp, Gossypium hirsutum
gaaagaagctttatagtcttgatgcaggttccgtcattcactcgctttgctttaggcctaataggtactggctttgcgccgccaccgagcagggtatcaagatctgggatctggagagtaagagcatagtggaggacttgaaggttgatcttaaggcagaggctgagaagtctgacgtcactgacatcggaaataagaagaaggtcatatactgcacaagcttgaactggagtgccgatggaagcaccttgtttagtgggtacactgatggtgtaatcagagtttgggggattggtcgttactagatatgcttgtcttgagttaagatttttgttcaaatgtcgggaggttttttggtttattttcttaatatgggtggatattg

SEQ ID NO: 209817 - DNA, 225 bp, Gossypium hirsutum
cttttatagggctgggattgccttgtttgttgctactttactctttttgtatatggggattttgactgttattggagtcgttaacgaaaaaactaatttcccaactgttggtattcaaggaattgctagtgccttacggtggttgtgatcttttatctagtttactgtaaatgtttgcatttcatgtggccatattatacacgaaagtgactttcttaccattct

SEQ ID NO: 209818 - DNA, 434 bp, Gossypium hirsutum
caggaatggcctttaacaagttgactgacaacggagcaaccaccccggctggtctcgtagccggcgctctagctcatggcttcggtcttttcgtcgctgtctccgttggcgccaacatctcaggtggccacgtcaaccctgccgtcaccttcggtgcttttgttggcgggaacatcactctcttgcgcggcattctttactggatcgcccaactcctaggctcaaccgtcgcttgcctgttgcttaagttcgctaccggcgacctggctgtacccgcttttgggttgtcatcaggtgtgggcgtgtctaacgcattggttttcgaaatcgtgatgaccttcggattggtgtacacagtgtacgccacatgcgttgattccaaaaaggggaagctgggaacaatcccaccaatggccaatgggtttatcgggggg

SEQ ID NO: 209819 - DNA, 415 bp, Gossypium hirsutum
  unsure (1)..(415): unsure at all n locations
tccaaacaaagacgacgcattcaaaactcacccagtgaatctgctgaatgagaagactctcaagggtactttctttggaaactacaaacctcggtctgacattcctgctgttgtggagaaatatatgaacaaggaacttgagctggataaattcatcacacacactgtgcctttctcagagatcaacaaggcatttgagttaatgcttgcgggtgagggactgagatgtgtgattcgcatggatacataaggaatggatagcctggattgatcatccatggatgaagggctnttctgtagggtttggatttcctcatagtttacggacacaatatacaccacatatttaaatattttaaaagtccttgtttcttgtttaatcaattacccctaaaaaaatttagtggctaaaaag

SEQ ID NO: 209820 - DNA, 335 bp, Gossypium hirsutum
cccacgcgtccggctccaactccccagggtgcactagggttatcaagtgtacgggcgacattgtcggacaatgcccgaaccagttgaaggttcccggaggttgtaacgggccttgcccagtgttcaaaactgaagaacattgctgtaattctgggaactgtcaacctaccgacttctcgaggtttttcaaggagaggtgccccgatgcttatagttacccaaaggatgacccaacaagcttgtttacatgccccacagggactaattacaaggttattttctgcccatgaagagtatttgggatggttttaagtcctttctatacacaaattagt

SEQ ID NO: 209821 - DNA, 352 bp, Gossypium hirsutum
  unsure (1)..(352): unsure at all n locations
tcgcccacgcgtncggtttaggtcaagttgaattatcggaattggatggaccctttgtgaagattagtctcaagggtcgattttggcacaaacgtaccacggttgtagccagagtcggaaattatctgaagcagagaatccctgaaatcctggaggttgagattgaagatgagaaacaattatatgacagccctgaaaacttctgagaccctgaaatgaccctagggtcgtttattcatttagttgctttcagtttatggccctttttttattattactatttttgcagctcaatggatacaactctaaagggaaaaagactttaatccgttaattataaactattgatttc

SEQ ID NO: 209822 - DNA, 387 bp, Gossypium hirsutum
gagatatatgagcaatgggatgtggcgcctataactatcagccaccctgtggaggatgtgagtttagctacacttccttgagaagcggtgcatttctgggggggctttgctctttcatttgaggcatacaaatcttatcacttgtattgcagcttgtagaaagcctcctgtgttctgtataatcaccgagtatctggcaggtggctgattaagaaagtattcgcatcagcaggagccatattcaggccctcttcatttaactctaacagtagctcttgatattgcacctgggatgcagtaccttgattcacatggaatacttcacagggatctcatatcagataacttactccttggagaagatatgtgtgtgaaggtggcagattt

SEQ ID NO: 209823 - DNA, 342 bp, Gossypium hirsutum
cttcttctctcccagatcggagttccgggcggtccactggacttaacaacgcggacaatcctgaaggtcccgatgccaaaaatctacgcgtaaagctggtcttgttaggtgattctggagttggaaaaagttgtattgttcttcgctttgttcgtggccagtttgaccctacatctaaggtaactgtaggagcttcattcttgtcacagacaatagctttgcaagattcaactactgttaagtttgaaatatgggacactgctggacaagagaggtatgctgcattggcacctctctactacagaggagctggaggtgcagttattgtgtatgatataacta

SEQ ID NO: 209824 - DNA, 403 bp, Gossypium hirsutum
gaaagccacgacgttatcgatgctagaacagatcataatctcttcaagaagagcggcgtgcacggccctccttttagccctgaacatcctgttcttttccctagtcagtgctaattgtggatcttgttcttattctggctctaacccaaggacaactcccacccctactacatctgcacgaggtaggtgccctagggatgccctcaaattatgtgtatgtgccaatgtgcttaacttagtcaatgtcaccgttggttcacccccggtgatgccacgttgttcccttctcaacggtcttgtggacctctaagccgctgcttgcctttgcaccgctatcagagctaacatcttaggcattaaccctaacataccagattcccttaacttgcttctcaacgtttgc

SEQ ID NO: 209825 - DNA, 334 bp, Gossypium hirsutum
gaaaacgggtctaccatacatctatcacagcaaagccagcaacccctttgtgaatctaaggaaagaataccagggtatatcctggcacgatgagatcatgcctttcttccaacaagctgtgcttgcaaaagactgcaccactgttcaaaagtgctatgttgaacaggcttagcacgtgaaagaaaagcttatcaaagctagatcctcctatttggggcatgctcatgcacaaactgctcgcatgtttgcctgtcctggctcgaccctaactctgctgtagccgctgctcgtgatctagagtgtttaacggtattcaacaacctctcatgaacgc

SEQ ID NO: 209826 - DNA, 429 bp, Gossypium hirsutum
cccacgcgtccgattcttcccagataatctaccaccctcattggtgcctcattacaagtacgctgaagtaattaattacctgtgtttctcttctcgatttttctgaaaaatcacaatccggttcaattataatccggactaataacttcaagtcaaacaggttttgcatcctgcagcaatgtctattaacataaataagctcatctgggacatgtacttcaacaaactgctaccatcgtttgtctctccgggcgatgacgaaaactatgctttgaccgctgctcgtgatctcgagtgtttacaggtatttaacaatctcttatgaacgctgaagatatgatattagaaaagtggctctaaaaatgcattgctgatccctttaggctatctctagaagaattcactatggaaaacttgtagctgaagtga

SEQ ID NO: 209827 - DNA, 416 bp, Gossypium hirsutum
  unsure (1)..(416): unsure at all n locations
cccacgcgtncgagtggtttcagatgatgttggaaagatcaaggcagctttgcggacatggagtgatagtgataagctggatctcatccttacacttggtggcaccggcttcactccaagagatgtgacccctgtagcaactaaagaggtgagtgtaaaagaaacacctggtctttagtatgtcacgattcaagagagcttaaaggtaacaccacatgctatgctatcacgctcaggagcaggcataagagggtcaacattgatcatcatcatgcccgtgtatacaaatgcagtcgcagaatgcatggaagcattgttgcctgcccttaagcatgcactaaaacactgtaagggtgacaaaaagagagaaacatccccgggcacattcctgatgaacatgctacaccagtggatac

SEQ ID NO: 209828 - DNA, 431 bp, Gossypium hirsutum
cccacgcgttcgcgaagccaacgctcatcacgccctcccactcaataactattgccatcagtttcagtttcaggtaaccgcaacaaaccaaaccacgcttgaaccagccaggaactcacccaagaagcattacaggggagtcaggcgtcgcccatggggtaaatacgccgccgagatccgtgactccactcgacaaggggcacggatgtggctaggcacattcgaaacagctgaagctgctgctttggcttatgacaaggcagcttataggatgcgtggttcaaaggctttactgaatttccctgctgaagttacggtggaaccatgatcggttcaaagattacggccgaatgtaagctcaaaaagattggaagaaacaacctgtggttcaggtagtagctccaccgtgatttcatttggggcatccatat

SEQ ID NO: 209829 - DNA, 421 bp, Gossypium hirsutum
aaacggaagaggatattaaggcagcaaacgaaagagaagcagctaataagtctgctaagaagaaagagagtgggaaatcttcagtactgatggatgttaaaccatggtgtgacgagaccgacatgaagaatgtggaagaagccgctcgatctgttgtaatgcctggacttttattgggagcatcaaaattggttgcgggcggatttgggattaagaagctccagatcatgcttacaataactgacgatcttgtttctgttgatacccttatcgaagaacactcgacagtcgatcctcacaatgaatatattcagagttgtgacatcgctgcattcaacaaaatttatacaaggacgaaccggcttttattcttcttcttcaagaaatgttgaagcgaaagccgattttacgccatgtttta

SEQ ID NO: 209830 - DNA, 247 bp, Gossypium hirsutum
aaaaaaggaggatctgaatgctgtagatgataaagcagcacctaactagtcttgtaatacgagggagagacgccaatctccaagactgatgcatgttaaaccatggcatgacgagacctgcacgaacaatttggcacaagccgttcgatctgttgaaaagccaggacttctatggtgagcatcaaaactcggtgcggacaaccactcaattaacaagcttcagatgatgcttacaattggtgaacaa

SEQ ID NO: 209831 - DNA, 409 bp, Gossypium hirsutum
attcgaacagttcaaggcaagggctactgaaatgtataatcaagctaaagatccgtctgaaaaagataaacttccaagacctgaggacttttcaaaggcgctttacacctttgacattggccaaaatgatctttctgttgggtttaggaaattgagctttgatcaactgcgtgcttccatcccagatatcataaaccagttagcatcagctgtccatcatctgtatgagcaacgagggaggagtttctggatacacaacacgtggtccgatcggttgcttgccggttaactatttctacattcttaatcccgaacctggttatgttgatcagtactgttgtgtcaagaaacaaaatgaaatggccatggaattcaatagacagcttaaggacagagttatcaagtttag

SEQ ID NO: 209832 - DNA, 424 bp, Gossypium hirsutum
ggaaaaagggggaaaaaagtgaggatcaagcatagatggaaaacatgggagttctaggcaaggtggtggattaccttctattgttatcattcttcagcatcacattaacagctcagttggacatccccgagtccatcctcccccacgcctacaatcccttctatcaagtttataccacgttaacccaagattatttggtgcttgagcagcctgcttttttcaaggcacttatgacgttggaacttgtttaccaactccctctcgctttgcttaacatctatgggttgttatactctaagccctggttcaacaccacctgcctcctctttggtgcctctatcgttgcctctacgacagctatggtgggagacattctcaattcccagaaggcatcagccaatttgatggccatgtattatccacc

SEQ ID NO: 209833 - DNA, 433 bp, Gossypium hirsutum
tgaagaaggtgcataatttagctttgggtatggcggttctggtgatattattgtcgtggatggcttttccagctctagcttgttcctataatggcggcggtagtaataataaagggtgtaaagactgcattgccgagcaaatgaaatacggttgtccaaggtgtgtgccgcttctacggtgcatggcacggtgcttgtggggcggaagttccaggtctaaatgcatgaggcggtgtgattgcgacggtgggaagccgacactttccgattgtaagaaatgcatgtcacggtgcaaatgtagttgtgttgcttgaatccactcttttcatgcaaaactacgtttgtatttgttgtttttttctattctaaactcttttctttcaactgttgttttgcttcaagcttaattaatattggaatctaaattctatcc

SEQ ID NO: 209834 - DNA, 441 bp, Gossypium hirsutum
cccacgcgtccgggatcatcgttatatccagataaggaggtcttcataccatgatgtgataagagtatctgagatacaaaaatacctagacatatctggagtccaaacttatataatcaacagtgctaagatcgtttttcttaatgaaaggccacaacccaggccaggaaaaggtgttaccaacacttgtgaggtctgtgatcgcagccttgtcgattccttccgtttctgctctcttggctgcaagattgttggaacatcaaagaatttccacaagaagaaaaggcagccaggtatgaacatggcagcattagactctgaggattcatacagtagcagttgccatgagaagattaacaacaaagtgcagagctttagaccatcaacaccacctccaactcgaactgccaaacgaagaaaagggattccccacagagcacc

SEQ ID NO: 209835 - DNA, 436 bp, Gossypium hirsutum
tccacgcgttcgcccacgcgtccggcgaattatggcactagatttaccccatggtggacatctttcacatggttatcagactgacactaagaagatatctgctgtgtcaatattctttgagacaatgccatatagattgaatgagggtacaggttatattgactatgatcagctagagaaaagtgcagtgctttttagaccaaaacttatagttgctggtgccagtgcttatgctcgcctttatgattatgctcgtatacgcaaggtctgtgataagcagaaagcaatttatgttggctgacatggcacatattagcgggttggttgctgcaggtgttattccatctccttttgaatacgctgatgttgtgacaaccacaacacacaagtcacttcgtggtccacgtggtgctatgatttcttcaggaagggactc

SEQ ID NO: 209836 - DNA, 397 bp, Gossypium hirsutum
catagactctcttccacggttaaacccttttcaaacaatagtcaaatggcttccaatgatcaccatgggcatcaccatgaccatggccatgaccatcaccaccaccaccaccatcatgaccatgataaatcaacaaaatcatcatgggggggagctgatgggaaagtttaccataaccatgatggccttatcgcctcactcacatgaacccatttactcacctggatacttcagcagaagagccccaccgcttgttaacagggatttcaatgagagggctttcactgctggaattggtggcccctgttggtactgggaaaacagcttttaatgctggcactgtgcacgttcctgcgggataagtacagtcttgccgctgtgacaaatgacatattca

SEQ ID NO: 209837 - DNA, 363 bp, Gossypium hirsutum
cccacgcgttcgcgaagccaacgctcatcacgccctcccactcaataactattgccatcaggttcagtgtgaggtaaccgcaacaaaccaaaccacgcttgaaccagccaggaactcacccaagaagcattacaggggagtcaggcgtcgcccatggggtaaatacgccgccgtgatccgtgactccactcgacaaggggcacggatgtggcttggcacattcgaaacagctgaagctgctgctttggcttatgacaaggcagcttatatgatgcgtggttcaaaggctttactgaatttccctgctgaagttacggtggaaccatgatcggttcatagattacggccgaatgtgagctcaaa

SEQ ID NO: 209838 - DNA, 405 bp, Gossypium hirsutum
agaaaacgaaaaaagaaaaatcaatagctggttgggacccccgaaaacccgatttcgaaaccctaatcggatctcccaaatagcttcgaagcagaagaaagaagatgacgggagtaaccaatcaggaggaagacaagaaacccgctgatcaaacggctcacatcaatctcaaagttaaaggccaggatgggaatgaagtgttctttaggattaaaagaagtactcaactaaagaaacttatgaatgcttattgtgatcggcaatcgggggagttcaactctattgccttccttttcgacggtcgccgtctgcggggcgagcagactccggatgagttggaaatggaggatggggatgagatagatgcaatgctgcatcaaactggtggtaccatggcctaactag

SEQ ID NO: 209839 - DNA, 425 bp, Gossypium hirsutum
cccacgcgtccgtgtggtttcagatgatgtgggaaagatcaaggaagctctgcggagatggggtgatattgataagctggatcttatccttacacttggtggcaccgcattcactccaagagatgtgacccctgaagcaactaaagaggtgattgaaaaaagaaacacctggtcttttgtatgtcatgatgcaagagagtttaaaggtaacaccatttgctatgctttcacgctcagcagctggcatatgagggtcaacattgatcatcaacatgcccgggaatccaaatgcagtcgcagaatgcatggaggcattgttgcctgcccttaagcatgcactaaagcaggttaagggtgacaaaagagagaaacatccccggcacattcctcatgaacatgctacaccagtggatacttgggagcgc

SEQ ID NO: 209840 - DNA, 435 bp, Gossypium hirsutum
tccacgcgtccgccaaaatgaagatttgcatgcttggagatgctcaacacgttgaagaggcagagaagataggtttggattatatggatgtggaagcattgaagaaactaaacaagaataagaagttagttaagaagcttgccaagaagtatcatgcctttctggcttctgaatctgtcatcaagcaaatccctcgtcttttgggtcctggtctcaacaaagcaggtaaattcccaacccttgtcactcaccaggaatccctagagtcgaaggtgaatgaaacaaaggcaatggttaagttccagctgaaaaaggttctatgcatgggagttgctgttgggaatgttgcaatggaggagaagcagatcttccaaaatgtgcaaatgagcgtcaatttcccttgtttctttgctgaagaaaaattggcaaaatgtg

SEQ ID NO: 209841 - DNA, 443 bp, Gossypium hirsutum
gtcccatgcaactttcttggaactacaactactggccgtgtggaagggccataggggtggacttgttgaacaacccagacctgctatcaagtgatcccacagtttccttcaagtctgcgttttggttttggatgactccacaatcaccgaagccatcttgccacaatgtgatcatcggagcatggtcaccctctagtagcgatcgcgcagcaagtcgggctacagggtatggtgtgatcacaaatattatcaatggaagccttgaatgtggtaagggttggaatgcacaagtagaagaccgcattgggttctataagaggtattgtgacattcttggagttagctatggtaacaatcttgaatgctacaaccagaggcctttcgggaatggagtctcggtggactcaatgtagctttttggctcaaatgaaagtaaacgtgca

SEQ ID NO: 209842 - DNA, 390 bp, Gossypium hirsutum
ggcaatagttgccgtttggctatcatctattcttgttggcgccattaactcagtgcccttgcgttccaaagataatggagttggttggacttggatattcaggatggtttgtctatagataccttctcttcaagtcaagcaggaaagaactagctacggatattgaggcactgaagaagaagattgctggaactgaatagatgtacaggattggcaatggcatgctaatctggccttcttgtatcctctaaaagagacatctttattctgtaattgtagggattccttgtatgaattcttgtcacctttatatttcccctgttcctggaataaaacttgtcaattttatgcgcaaaatataaaaaaaatattaaaaatttatattaaaaa

SEQ ID NO: 209843 - DNA, 234 bp, Gossypium hirsutum
gaaaaccaattggattatgcacgagtatcggttagctgacgtggaccgatcggctcgcaagaagaacagtttaaggttggacgattgggtgctttgccggatttataacaagaaaggcgccatcgagaaacagtcaccgcaaggaagcattggcaaaagctctgccgtgacggagatcgaagacaagaagccggatatagcgacacttggcgtggacacgcgccaagttgcccc

SEQ ID NO: 209844 - DNA, 440 bp, Gossypium hirsutum
gattcctttgtacatgctgtagctgagaatctagtacatcgcttggaggactgcaagaaaacatttcctactgcattatgtttgggaagctcgttgcaagctgtgaggcaaatgctgcggggacgtggtgcaattcaaaagtttattatgatggatacctcttatgatatgttaaagctgtgcaaaagttctcaactggattccggcaatgagaatattgagacttcatatgtggttggtgatgaggagtttctgcccatcaaagaaagttcagtagatttggtaatcagttgcctagggctccattggacaaatgatcttccaggggccatgatacagtgtaaactggcattgaagccggatggcctattcttagcagctattcttggaggagagaccttaaaggagctgcgaatagcttgcactgtagctcaaatgga

SEQ ID NO: 209845 - DNA, 180 bp, Gossypium hirsutum
acgcttgtttttttgatatacaactatattcacttctgtaatgtccataaccttggagttgttgagcaacccatacctgctgtcaattgatcccacattttcctttaagtctgcgttttgttttttggatgactccaccattcactgaagtcatcttgccacatttggatcatcttagca

SEQ ID NO: 209846 - DNA, 444 bp, Gossypium hirsutum
gtaggattagcaccaacaggcttcaacttcaatgcaaaattacggagagagagtacagatgttcaggacttgctcattgctcatattaacggaatggacaccttggctcgaggactccgaaatgctgctaagctgattgaggatggtactttggctgagcttgctagtcaacgatattctagctttgacacataacttggtgcccacattgaggctggttaagctgattttgaaatgcttgagaagaaagccatgggaatggggagagcccaatgttgcttcatacaagcaggaacttgcatagatgattttccaatctgcactgtaagataccttgattgaccgattatggtcaatagtttcggtttttccttttagatatgaataagtcatgatgactatacaaataattagatttttgtagtttataacaatgcattagtg

SEQ ID NO: 209847 - DNA, 351 bp, Gossypium hirsutum
  unsure (1)..(351): unsure at all n locations
gtgaaacctaagatgggagatgcattgctgttctggagcatgaggcctgatgccacactagattcttgaagtttgcacggtggatgccctgtgatttcggggaacaaatggtcctcaacgaagtggctgcatgttgaagaatacaagttgtaaactgctatatagaggataacagggtacatcagtatgtcataatcgtacggtgctgagaaagtattgagtgatgcaaccnctatgtgatgggggcatttgtatctttgtaggttnggagtacttgtctcatttttttcttaacgccgtggaactatcgccatttcataggagaatacaatatcatcgtaaaatagacgt

SEQ ID NO: 209848 - DNA, 394 bp, Gossypium hirsutum
cttggatcctcctcattttctacgctgccctaattccctctgagtgaacatgactactttgagccttacttccccttgcattgttaaagttgcaattcccgaacgattttcaagtgctatcgtcaaagccccaacatctcttggatctgttaaaagcatcttcaagtcttttggcttgaaatgttccttcaatttcagaacctcaatggcaacttacaagattaagcttgtacgaccaaaaggtgaggtgaacgagtttgagtcccctgatgataagtacattctagatgcagctgaggaagcacgggttgagctaccatattcttgcatagctggagcttgctgcacatgtgccgagaagatgatttcacgttctgtggatcaatctgatggt

SEQ ID NO: 209849 - DNA, 313 bp, Gossypium hirsutum
atgatggttgcttaaactacattgaatagaatgatgaggtgttgattgccggatttggacgaaagggtcatgctgtgggtgatattcctggtgttaggttcaaggttgtgaaggtctcgggtgtttcactgttggcacttttcaaagagaagaaagagaagcctcgatcataaattttgagggagaggtctcatcgtgttctgttagttctatttagaataaactatagagatttttattgctatgtagttatttggtcaacctgttcactttatcttaattaatattttgcgcttttgtactgtttaataaa

SEQ ID NO: 209850 - DNA, 401 bp, Gossypium hirsutum
caagagtgttgaggttgaagctaatcctggccctggaagtatcgtaaagatcaactttgctgaaggccgtccattccaatatatgaagcaccagatcggaggacatgacgacaagaatttgtcatacagttatagtttgatcgaaggtggacctttgggggacaagcttgagaaaatcagctatgacaacaagtttgaagcagctgcaggtggaggaagcctttgcaagagctcgatgaaattttacactgttggcgactatgtgatcactgaagatgagatcaaggctcaaatcaaagggagtgaaggagtttacaaggctgttgaagcttacctcttggctaaccctgatgcctgcaactatatatatgttggttgctttaattctaataacttgaatt

SEQ ID NO: 209851 - DNA, 396 bp, Gossypium hirsutum
tccggaattgacccatccatccaaactgagagtttgcatagtggtgttagcttgcgtggtggtatcggcggcagcccaaagtgcttccaatgtgagagctacttatcatctttacaatccgcagaacataaactgggacttgactgctgcaagtgctttctgcgccacatgggatgccagtaagcccttagcatggcgtcaaaaatatggatggactgctttttgtggtcctgctggtcctcaaagtcaagctgcttgtggccgatgcttaatggtgaccaacaccgccactggaactcatgcaacggtgagaatcgtggatcaatgtagcaatggagggctggatttggatgttaatgtatttaaccaacttgacacaaatgggattgggaatgc

SEQ ID NO: 209852 - DNA, 342 bp, Gossypium hirsutum
cccacgcgttcgaacggcgaatgctgatagacatgctggtaatatcttgattggcaaaggagatgatggtcgcaccgtgcttatttcaatcgatcacggctactgcctgcctgagaattttgaggattgcacatttgattgggtttactggccacaatcacggctgccttactctccagacactcttaactatataaaatcactggatgccgaacaagatatcgcacttctgaattattacgggtgggatgttcctgttgagtgcgctcgcacactgcgaatcttcaccatgcttttgaaaaaaggtgcagagcgaggtctaactcccttcaccatttggag

SEQ ID NO: 209853 - DNA, 426 bp, Gossypium hirsutum
tcgccacgcgttcgaccacgcgttcagaatgcttccgtgaactgttatcgttgatggactgaagaattggaaagctcacacttgctagattactgatggcttatgatgtaatgtcatatccatttgctaacaaactggtgcattcagaagaagttcttgagctgcgtagtgacttgatgaaattggatccaacacattaccagttctacaaggatgaacatagcatggtctcgctacagaaggtgacttctagtaaagagtcattacttcaacattgctttcagtataaggactcagtttcatcagccatatgtggagctatctgtatccggctgaacaacttatcgctatcacggatgggagcttttgagaaattattgtgggttcaaatgttagatctcagccacaatgaactacaatcaattg

SEQ ID NO: 209854 - DNA, 439 bp, Gossypium hirsutum
  unsure (1)..(439): unsure at all n locations
cccacacgtncgggcaccagtttatcctccaactaagccgcgaactgcgcccccgactaagggaccagtgcagtcaccgacatatgctccaccatcgtcttgtccagctaagccgcctacttatcctaaaccacaaaagagcctagtggctgttcatggccgtcgtttttgcaagtcatgcatatacgctggatccaacaccctgttgggagcaaaacctattttgggcgccactgttaagctgtcatgcaggaacaccaaatacaagcaagaggccactgcgaatactgacaagaatggctatttcttgctgcaagcaccaaagaccgtcaccagctttggagcccacanatgcacagagtctctagtatcatcgccaatggctaaatgcagcagaccatctaaatctccatgggggattgaaaggcagctaccttga

SEQ ID NO: 209855 - DNA, 332 bp, Gossypium hirsutum
accacgcgtccgtgaagattttgcattttgatatcaagccacataacattctttgagatgagaattttaatccaaaagtttcagattttggtctcgcaaaattatatccagtggatgatagtattatttctctcacagcagcacgtggtacatttggatatatggctcctgaattgttttataaaaatattggaaatatcctcgtataaagctgatatttatagctttggaatgatgctaatggaaattgtaggaaggagaaaaaatttgaaagattctgttgaccattcaagtcaaaattatttccctacatggatttatgatcaattttg

SEQ ID NO: 209856 - DNA, 436 bp, Gossypium hirsutum
cccacgcgtccggctgggagaaaaaatatgagaagggagatattgctatttttaggaaaaaggttaatgacaaatcctgccgcaggaattctgccaatatgtgtaaacctaggggttcagatgatgtttggtacaagaaaatggaaacatgcataacccctttccctaaggtaagtagtgcaagtgaagtggcaggaggggaactgaagaagttcccagctaggctttttgctgtccctcctcgtatatccaaaggacttgttgagggggtctcagttgaaacttaccaagaggacaataagctttggaagaagcatgtaaatgcttacaaaaggataaatagattgattggtactgcaagatacagaaacgtgatggacatgaatgctggtcttggaggatttgcagcagctctcgaatcacccaagtcttgggt

SEQ ID NO: 209857 - DNA, 302 bp, Gossypium hirsutum
gagaatccaatccaggatgaacgcttttttcgttcgctatgtgctgactggatgcgtagtcgcgtgatcgatcaatggacgggggaattgcgtgaatgacgagaccggcctaacctaaagtaaaggctcttccctctctggatggcgaatcttgattgactgacactaggaaccgattcggagaaacaagaagcatgacatgagatacgcggcggataaatttccgatagcgaattacttgactcgatggatggaggggggcctccaactcaagcacgaaatcaatgttgagttcacaatca

SEQ ID NO: 209858 - DNA, 387 bp, Gossypium hirsutum
aattgatatgctcagccttgagacctaccctggcgtcaagcgcatcaccatcaggccccacactgaccgctgggtgttccccgagaccaacactggcatcattgtccttgctgagggtcgcctgatgaaccttgggtgtgctactggccatcctagctttgtcatgtcctgctcattcactaaccacgtcattgcccaacttgaactgtggaaggagaagagctctctcacgtatgagaagaaggtgtatgtgctccccaagcaccttgatgagaaggttgctgctctccacttgggcaagcttggtgccaagctgaccaagctcaccaagtctgaggccgactacatcagcgtgccgatcgagggtccctacaagccttgccacta

SEQ ID NO: 209859 - DNA, 199 bp, Gossypium hirsutum
gcgaatcctgagctctgcatgtacttggcgtattgcatgcagtgaataatttggctggggtttgtttgttgggggcagtgttggggacggatttggattggggtttatgcttggcatcgcgtcgtatcgaaactcagctgctgtttcgctgagtaatgtacatttccctggtaatggtacttgtggactctgatgcttt

SEQ ID NO: 209860 - DNA, 416 bp, Gossypium hirsutum
ctctctctctccaggctcctgtccgggtagaattctcttcttcctttgcgtggggttctttgttgttcaatcgccatggcttcaaagcggattttgaaggaactcaaggatttgcagaaagatccacccacttcttgtagtgctggtccagtagctgaagacatgtttcattggcaagcaacaatcatgggaccctcagatagcccttatgctggaggtgtgtttttagttactatccatttccctccagattatcctttcaagcctcctaaggttgcgtttaggaccaaggtcttccatcccaacatcaacagcaatggaagcacttgtcttgatatcctcaaagaacaatggagccctgcactaaccattttcaaggttctgctctcaatctgctcgttgctgaccgatccaaa

SEQ ID NO: 209861 - DNA, 284 bp, Gossypium hirsutum
cggtggaaacggcgggccacgcgtcgatgtaaaaagccctggctcacgatcatgaaccaacaagaaacttgtcgagctcgtatggaatcaaaccaacagtgctgattggaacatcaggagtaggaaggacatttactaaagaagtggttgaggcaatggctgcgttgaatgaaaaacctattatattcttcctttctaatccaacttcacaatctgaatgtactgctgaagacgcatatacatggagtcagggccgagccatttttgtcagtggaagcccattt

SEQ ID NO: 209862 - DNA, 408 bp, Gossypium hirsutum
ctggtttattgcaaaatacaggagagaatgatccgacaactagaacttttgttgagggttacaagtcaggatcagtggggagatccttggacatcacccggttctctaattatgctgaacttcgagaggaactgggtcagatgttcggcattaagggtcagttggacgaccctgatagatcaggctggcagcttgtatttgtcgacagggagaacgatgtgcttctccttggagacgacccgtgggagtcatttgtgaatagtgtatggtacatcaagatactttcacctgaggatgtgcataagatgggaaagccaggaaacgatccacgctacctatcttagctacctatcttaaatcgatacatggagctctttctggctcccatgacgattctgcggcacactg

SEQ ID NO: 209863 - DNA, 387 bp, Gossypium hirsutum
gttatgtgaagctgctgatgaatcatttgcataggcgaagcaccaagcagtcaatgcgatttattgattccaaatgtcctatctgctgcaattagccgaactgtactatgcttatcctgggtatggttccttgctgagaatgcggttttgtagaaagtgcagagatcacaggatcaactttattggcctaaccctgacagattcggttatgggtgacaaatcaactgcacgagaacaatgaaacgcggtgttcctactgtcggaagtgatggatgttacagagtacagaggaagcaatcaagcttgcccatgagattggctttcctggatgatcaaggccagccggtggggagggcgggaatggctttgctatgagcctgatgagtt

SEQ ID NO: 209864 - DNA, 387 bp, Gossypium hirsutum
gcgcgatcctattgtccctgagattgttcacatgtacaagaccgatcggcctaagtggaaggcatcatcccgcagctggacccataaatatgccatgggatgaaaaagaaatgaagtcgaaactccatattcgtcattactgcttaaatgcagacgattgtggtgttgccccatgaaactttttgtggggacgtatgttcttacattccttgtcgcccgtatgcattctgatccatctaatgatcgcgtgcttatccaacattaacctaccattgccgtcgataatgagatgacttgtgctttctgttataactatgctagtgtcgatgttattaggtaaatgattctcattgaaggcttgttcaagcctcaaggacaagagtcttg

SEQ ID NO: 209865 - DNA, 371 bp, Gossypium hirsutum
  unsure (1)..(371): unsure at all n locations
ttttacgttacgcttcaatagaatgaattcagtaagggtagagccccatggttgatctagcnggctatgccacttaaactcaaatctatcttaccttcaatccatctttgttcagccagctcataacaaaatgttagaccgggctgacacaaccaaattgcttgaagaaaaggaaaccccagcgaccaagcactcccacccccaaaagtggagaccgaacaccgccaggttgtcgaggacacgtctgaagaggaggcgggcgcactctaagttgaccaccctacccactaatggactatgaggggggcaggcgaaccggaaccgaccgagaacccgaaccgcttgactggctgaccccttcatacttcgtt

SEQ ID NO: 209866 - DNA, 393 bp, Gossypium hirsutum
cccacgcgtccgagaagctgctgttctctctctctttcccatagtttcacccgtctttgaatccatcgctcacaaaattatgggtttgaaggaggaattcgaggagcatgccgagaaagttaagaccctcccggccgccccttcgaacgatgacatgctcattctctatggactgtacaagcaagccactgttggaccagtgaataccggccgtcctggaatgttcaacatgagggaaaggtacaagtgggatgcatggaaggctgttgaagggaaatcaaaggaggaagcaatgggggattatatcaccaaagtaaaacaactgtttgaggctgctggaaagtcttgatgtgtgtgtgtatggccaatgaaaaatggtgtaatttcaagccc

SEQ ID NO: 209867 - DNA, 378 bp, Gossypium hirsutum
cccacgcgtccgatttcgctgattgaaaggcttctgtctcttaaacaagacgacccttgcttctgttccgatcaagtcatcaagaccatggttttgatgatgttcattgcaggaactgaatctacggctattacaatggagtggacaatggcactcctgctgagtcatccagaggctttgcagaaggcaagagacgagatcattcgccatgttggaaatgagcgcctgctaaatgaatcagatcttcccaaacttccataccttcgttgtgttgtaaacgagacactaaggttatatcccgcagcaccgcttttattgcctcattgcccatctgaagattgtgtgggggattggatttgagatacctaaaggcacaat

SEQ ID NO: 209868 - DNA, 167 bp, Gossypium hirsutum
tatttcacttaaactcacacctatcttaccttcaatccatctttctacatccatctcataacaaaattttagacctttctatcacaaccaaattttattaattaatcaataccctatctaccaatcacttccaccctcaaaattatatacctaacaccttcttctct

SEQ ID NO: 209869 - DNA, 374 bp, Gossypium hirsutum
aaaagtttctttataactctaggacaacctgcgtgcatgcggactgcaagatagaagggaatcatgtgtcagcagaggagcttggtacggtgattacacagcatcatcaaatcattctcaattacgcgatgatagtgtatcagagtctggaatatgcactcattgcttatgcaccctatcgttcagttgaaggccttgtcaatgacatggagaagctacacctgtcgaacatgaagagacagatgcatcagaggcaaatctcttctcaggcaaatatatactacatccaaatcaagctccgcgaaagcaagtaaaaccggtcgctcgacttcagatgattctgaagttcagattgttactcgacgaggatgttc

SEQ ID NO: 209870 - DNA, 427 bp, Gossypium hirsutum
ctctagccactccctcttttggtacctatgagtctcccaactatgggaagccccctacgggggtttataagcctcctaaggtgaaacccccaccttatgaacataagccacctgtctatgaacctccaaagaaggaaaaacctgaacctaaaccaccagtttatacaccaccaaagaaagagaagccagaacccaagccaccagtatatgaatcaccaaaaaaggaaaagcccgaaccaaagccaccagtttatacacctccaaagaaagagaagcttgaacacaaaccaccagtatatgaaccaccaaagaaggaaaagcctgagcctaagccaccagcttataccccaccaaagaaagagaagcctgaacccaagccaccagtgtatgaaccaccaaaagaggaaaagcctaagcctaagccacc

SEQ ID NO: 209871 - DNA, 374 bp, Gossypium hirsutum
cttatgccaactgtcttatttcatactcaaagtactcaggggcactgtaatctttctaggagacatttgatcccgactttattagcattaggactaaggcccgagaagtgcttcagagggaagatgattggaatgaaattgtccagcttgtaggaaaggatgctctagctgaaaccgataagatcacactagaaactgctaaacttttaagggaagattatcttgctcagaatgcttttactccatatgacacgttctgtccattctacaagtctgtttggatgatgcgcaatattgttcatttcaatgctttgtccaaccaggcagtggagaaagctgtcgtgatggacggccagaagataacatacagtctt

SEQ ID NO: 209872 - DNA, 399 bp, Gossypium hirsutum
atcgactccttgaacccactcatgcatgctgggggtgtggacttcatggacgaggactgctccacaactgctcgtttgggatctaagacgcggacaccacactttgattacatcttgacccaacaggcgatggtgactgttgacaagaaagcgccgatcgaccaagacctcatcagcgagcttcatgtctgaccctgtccacggagccatagaagtctgcgctcagctgaggcccactgttgacatctgagtgaccgctgatgctgatttcgtgcgtccagagcttcgacagtcttcataagcttgtatggatccgcagtgtgactgcaatggctagtttgtaagaacttaatatgcctgggcttttgaactcttagattgtgcctgtattgctcatgt

SEQ ID NO: 209873 - DNA, 252 bp, Gossypium hirsutum
attcatacatgatggctatcaagagccaccattgctgcctcagctttatctttttgtggtaccattactcctacagcttcattctgtcaaaggtaatctccagttgaactactatgctcaaagttgccccaatgctgaagagatcatcaaacaacaagtcatcaagctctacaacaaacatggaaacacagctgtttcttgggttcgaaatctcttccatgactgcatggttaagtcatgcgatgcatcgtt

SEQ ID NO: 209874 - DNA, 425 bp, Gossypium hirsutum
ctgctcttctctgtacccatttttctttacttccaaaacatcccatggccccaaagaaggacaaagcccctcctccttcatctaagccagccaagtctggaggtggaaagcagaagaagaagaagtggagtaagggaaagcaaaaggagaaggtgaacaacatggtactgtttgaccaagctacctatgacaagcttctctctgaagctcctaaatacaagcttatcactccttcaatactctctgatcgtatgaggattaatggatcacttgcaaggaaggcgatacgggagttgatggcaagagggttgattaggttggtctctgcgcattcaagccagcagatttacactagggcaacaaacaactagatctttagttatatttttgcttaattagttctatgaagtattgccatggttgag

SEQ ID NO: 209875 - DNA, 421 bp, Gossypium hirsutum
ggaaatccgttagtgggatgaactactacgcctgtctatctttgttgtctcttgtaatggtcacaccttttgcaattgctgtagagggaccgcagatgtgggctgcaggatgggaaacggccttatcccaaattggaccacagtttatctggtgggtagcggcccaaagtattttctatcatctctacaaccaggtctcatacatgtcccttgatgagatatctcccttgacatttagcgttggcaacaccatgaaacgtatatcagttatagtctcttccatcatcatcttccacacgcctgtccagccaatcaatgctctaggagctgccatcgctatcctcggaaccttcttgtattctcaggcaaaagcgtgagaaaaaccaggggttcgagaattttgaatcatcatacaacatag

SEQ ID NO: 209876 - DNA, 425 bp, Gossypium hirsutum
ccacagtgtatctgtctttatacaagctttcttcaatttcaacattcaagaatcaagtgggtgcaaagatgagttctacaagcagagcatggcttgttgcagctagtattggagctgtggaggctctgaaagatcaaggtatttgcagatggaactacacagtaaggtcagttgtgcagcatgccaagaaccatgtgaggtcagcttcacaggccaagaacctctcctctcaatcctcagctgcaatttcaaagggactgaacacgtctaaacaatcagaagagtctttgaggatggtcgtacacttgccgactacaatatccagaaagaatcaacattgcatctggctctgaggcttcgtggtggcattatcgagccatctttgatggccatggctggaaatacaaccaggacaagatgatctg

SEQ ID NO: 209877 - DNA, 427 bp, Gossypium hirsutum
ggtttaagggatttttttcattcgtttcttctcacgctcgattaccttacaaaaagagaaaatgaccaagtgttacccaactgtgagcgaggaataccagaagtcagttgaaaaggccaagaggaagctcagaggtctcatcgctgagaagaactgtgctccactcatgctccgtttagcgtggcactcagctggaacttttgatgttaagaccaagaccggaggtccattcggaaccatgaagcatcctgctgagctcgcacatgctgctaacaacggcctagatatcgccgtcagacttctcgagccgatcaaggagcagttccctaacctcacctacgctgacttctatcagcttgctggtgtcgttgccgttgagattactggtggacctgaaattcccttccatcccggaagagaggacaag

SEQ ID NO: 209878 - DNA, 365 bp, Gossypium hirsutum
ctcggcacgcaggctagcagcacagcagcagccagagccatcccctctcctcgctgcgcttcgcttcctcggcgccgattcctcctcctgctcctccaccctcgtccgtgcccttccggcgcgcgagctcgcccgagatggcgaacgcgagatcgggtgtcgctgtgaacgatgagtgcatgctgaagtttggcgagctgcagtcgaagaggctgcaccgcttcataactttcaagatggacgacaagttcaaggagatagttgtggaccaggtcggggatcgcgctaccagctacgatgacttcacaaacagcctccctgagaatgactgccgatacgcgatctatgatttcgactttgttact

SEQ ID NO: 209879 - DNA, 426 bp, Gossypium hirsutum
cggacgcgtgggcaggaatgaaccaccatgctctgcaggcacagagaagggagatgaagcacaaaggaagaaatgtagtctggtcaattgcaatggacaagtgtctaattgaagctctggcagttcaggctaaaaatgggaataaaattgacaaatgctttaatgaaaatgcatatactgctgcttgtattgctgtgaattctcgttttaatttgaacttgaacaatcaaaaagtcattaatcgccttaagacaattaagaaaaggtacaaggtaatgagggatatgctaagtcaagatggatttaggtggaatccaaatacaaagatgatcgaatatgacagtgaacatctatggaaaagatatatagtggcacatcccgatgcaaaagggattcgtggaaagcacattgagatgtatgatgagc

SEQ ID NO: 209880 - DNA, 282 bp, Gossypium hirsutum
cccacgcgtccgcccacgcgtccgggcccctgttgaccaaaccattaagactctctctgcatacttggagaaaggtgattgtatcatcgatggtggcaacgagtggtatgaaaacactgagagacgacagaaagagatgtcggcactgggtttgttataccttgggatgggagtttcaggtggtgaacaaggtgcacgaaatggtccctctttaatgcctggagggtcctttgaagcttacaaatacatagaagacattctttttaaagtcgccgctcaagt

SEQ ID NO: 209881 - DNA, 426 bp, Gossypium hirsutum
  unsure (1)..(426): unsure at all n locations
cggacgcgtgggcgaaatctctcactcataaccaaaaaacaaaaacagagcatccactgtttttttcttgagtttcctttgtaaattacttcaagctggcgatcgaaaataaagaaaccactgttcgttaaatcaagcccaagaacagaaggataatgggagctggtgggcctgatgaagaagataacaggtggccgccatggttgaaacctttgctgaaagaacagntctttgttcagtgtaaacatcatgttgcacttcacaagagtgaatgcaatatgttctgcttgcattgcgtcaatggcgctctctgattctttttgttagcttattatcaggatcattgttatatcctgatattgtgcgtctttaatccatgtctttctaattatattcttttttacattaattactcttttcatattt

SEQ ID NO: 209882 - DNA, 399 bp, Gossypium hirsutum
tgctgtcatcaattactgaaagaagatggacttttcgttcttcagttcatatctatccggaggagctttccaaagaaatccagcaaacagctgcttttcttaaggaatatatattccctggtggaaccctgctttctttggataggaatttatcagccatggctgctgcaacaagattcagtgtggagcatgtggaaaacataggaatgagttattaccacacactgagatggtggagaaaacttttcctgaaaaacacatgcaaagttctggctttggggttcgacgagaacgtcatgcggacatgggaatactatttcgattactgtgctgctggttttaagacaggaacccttatagattaccaggttgttttttctcgagccggtaatttcggtt

SEQ ID NO: 209883 - DNA, 362 bp, Gossypium hirsutum
agaaggtgaagctctccgtgctgcagttctataaggtggacgacaccactagcggggggacccgcctccgcaaggagtgccccaactcagagtgcggcgcgggcgtcttcatggccaaccacttcgaccgccactactgcggcaagtgcggcctcacctatgtctacaaccagaaggcgtaattgcttgccccgatttgctttatccgcctaccctatcgagcatccagctgttggttactcgaactgtatctcatgtacatctgtctgaggttgaaacttaaatggagcagtagtatctgacatattggtacccctgttactgaattgacgtgatgctgagtttaattttgttttcgtatc

SEQ ID NO: 209884 - DNA, 399 bp, Gossypium hirsutum
gcagtagtccagatctatttggataatgctggtgacctggaacttgttgccaggagcagtgaatcttcagatcttaacttctcaagatacggtgacaccttctttgaggttgtttttgctggaggccgcacacaaccgggcacacttaaacctgatgaaggggagcgccacccttactctatcatagagtgtgaggctaaacgtgatgccattttaccatctgtgatttacattcagaaaatcttgcgccgaagaccttttctgataaagaatcttgaaaatgttatgcgaaggctcttgcagtccttggagcttttcgaggaaaatgagaggaagaagcttgcaatttttacagcacttgcttttttccagaaattatcagggttgccacctgagact

SEQ ID NO: 209885 - DNA, 365 bp, Gossypium hirsutum
tgcagttcatctctcccgaatcaagaggctggtttatggggccaaggcggaggcggccatcgccattgggttcgacgacttcattgcagatgctctgagaggcactgggttctaccagaaggccaacatggagatcaagaaggccgatggcaatggcgcgctgatcgccgagcaggtcttcgagaagactaaggagaagttccagatgtactgatgcttggctgaagagggatttcggatttgtacaatgctcacccagaaggaataaatacatcgcccaaatgtccattgtttcgaaaaaaaatttacctcaattccaatgcttagcattctgatgatgtctgaattccttgtaaacagacaca

SEQ ID NO: 209886 - DNA, 417 bp, Gossypium hirsutum
gttcggaggaaaaaaggaaaatggtgagaagggtgatgatgcaccttccaaggcaggaattgttgggagcatgcaaaacctctatgagacagtaaagaaagcacaaatggttgtccaggttgaggctgtgcgagtgcaaaaggaacttgccgcagcagagttcgatggctactgtgaaggtgagctgattaaggcaactttatctggaaatcagcaacctgtacgcatagagatcactgaggcagcaatggaattgggtgcagaaaagctatctcttttagttaatgaagcatacaaggatgcacaccaaaaaagtgtccaggccatgaaggaaagaatgagtgaccttgcacaaagtttaggtatgccacaaggtcttagtgagggattaaaacaacaatgatctctcaactagca

SEQ ID NO: 209887 - DNA, 448 bp, Gossypium hirsutum
  unsure (1)..(448): unsure at all n locations
cccacgcgtccgctctgaggcaaaatttctgagaagggccactttcttgaaacataatctgtgggtgacgccgtattcacgtgaagaaatgcatcccggaggggagtttccaaatcaaaatccacgtgtcggggagggattagctacttgggttaagcagaatcgatctttggaagaagctgatatagttctgtggtatgtctttggagtgacacacattcctcggctggaagactggcctgtcatgccagtggaacgcattggtttcatgctcatgccacatggtttctttaattgctcaccagccgttgatgttcctcctagcgcaactgatctggagctcaaggacactgacattgcaacaaagcctatccaaaacgggataattgctaagctttgaattgatcttcaactcggattntagcaaacattatgctttgcagtttgc

SEQ ID NO: 209888 - DNA, 360 bp, Gossypium hirsutum
ggaggacagcctacgttgtcgtgacagccgtggtagccatgattttcccattcttcaacgggttctgtggtcttatcggggcgggctcgtcttggccattaacagtctacttccccatagagatgcacattgctcaaacgaatctgcccaaatactccttcaggtggacgtggctgaaaatactaagctgggtttgcttgattgagtcgctcattgctgcagccggatcggttcacggactgattcaaagcctcaagacgtataagccgtttcagactcaggaatgaaggcattacggatccttttgcctacagtgctttgattgtatgtaaaatataagaaattgtggacaactgtaat

SEQ ID NO: 209889 - DNA, 380 bp, Gossypium hirsutum
ctttagttccttgataaatataagttcagctggtaggcaaattgcccctaaaacgtagcattgagtttatcagaacatcttgtagttcaacgacttaccctaaactttgttacgaatctctcttaacacaggctagcatgatccaaacaagcccccaactcatcgcccatgcagccctaaacgtgaccctttcaaccgccaagtcaacctcggccatgatggtgaagcttgccaaaagccaaggattgaagcctacagaggtgggcgccatgcaagattgcgtggaggaattggaggacacgatagatgagctgagaaagtcaatcagcgagatgggtcagattaaaggctccaattttggactaatgattaacgatata

SEQ ID NO: 209890 - DNA, 338 bp, Gossypium hirsutum
tgaagattccacctctatctatgttcacagttcatattgtttgaacacttgttgcagtctgggatggaccatatcatcatggttgctaatggaaaaaattcccaatctttgtgataccttcttgttaccacatgacagtccattgacttgtccaatggaccgcgtgttttttgacgcatcccttatatggtgacttttcggacctcgtaaaatatttggaacaaaaagcgaatacgggaatgtcaatactatctttttcagtggagctctatctcctttcctagtatggctggcacacaaattattctcagataaagaatggatccgcctcattcaca

SEQ ID NO: 209891 - DNA, 404 bp, Gossypium hirsutum
gcaagaccaaggtctaccatccaaatattgacttggaaggaaatgtttgcttaaacatcttgcgtggagactggaaaccagtgctaaatataaacactgtaatctacggattataccatcttttcacggagccaaattatgaggatcccctcaatcatgatgctgctgcagtgttgagggataatccgaagatgtttgaatcaaatgtgaaaagggctatgtatggtgggtatgtggggcaaacctatttcccacggtgcatgtagcttttacgaggtagctgaaagcgcaaactcgctatgttatggacagttgggtttctgtgggttgtataatttgtctggaaattaccctttgtcatcccctttgattttctcagtgaatctgagtgaaatattttctac

SEQ ID NO: 209892 - DNA, 431 bp, Gossypium hirsutum
gttcaactgcttaaagcaggcaaagttacagtgtgggaatcaaatttgaagaaattaggaggtacccgttttaagtatggggtacctgatcaacattttgaggtaacaaaatttgctcttttggagaccataaaagaagcagtaccagatatgtggtcagatgagatgaagaatgcatggggtgaagcctatgatcgtttggttgcagccattaaaatagaaatgaaggcatgctcactagctgcatgatttcacaagttccctacattattgcttgttaattttgggtccaataagattgaaagttttcaatcatttaaacatgtaatgtaacatagctattgctcatcactactgttttttccccctagtttgttcgctcctgttctttttggccccttgtatctccataaataattggtaacgtaaca

SEQ ID NO: 209893 - DNA, 441 bp, Gossypium hirsutum
ccctttcttctcttctttcaactcaaagaatactcccaagtaatattagaatcgggggtggggtcacttataactatgagtctacctctccagtcgcccctgccaggcttttcaaagctttttctcttgaagctgacaaggtttggcccaaggctgctcctcaggcagtcaagagcgttgaggttgaagctaatcctggccctggaagtatcgtaaagatcaactttgctgaaggccttccattccaatatatgaagcaccagattggaggacatgacgacaagaatttgtcatacagttatagtttgatcgaaggtggacctttgggggacaagcttgagaaaatcagctatgacaacaagtttgaggcagctgcacgtggaggaagcctttgcaagagctcgatgaaattttacacttgtggcgactatgtgatcactg

SEQ ID NO: 209894 - DNA, 408 bp, Gossypium hirsutum
cccacgcgtccgggaagaatggtgagggtgttcgttttgaatgatgcactcaagggcatgggcaatgctcaaaagaggggcaaactacaggtcatgatcccaccgtcctctaacgtgatcattaagttccttttggtcatgcagaaacatggttatattgtggagtttgagtatgttgatgatcatacatctggtaaaattgtggttgaattgaatgggaggctgaacaagtgtggggtgatcagtcctctctttgatgtcagaactaaagaaattgaaggttggactgatctcttgcttacttcaacacagtattgttatattgtgctcacaacatcagctggaattatggaccatgtagaatccacaagaaagaatgttggttggaaagtacttgactttttctac

SEQ ID NO: 209895 - DNA, 414 bp, Gossypium hirsutum
gctgttgataatactggtaggactgtggtattgggattggatttcgagacaaatttgattggtatgcctgtttttggtggcgataagaagtttttggttgattcaaagggtgagttattgttggttgatatgtatttgagcattgaatctgagccaggttcgtcttcttcttcggccggtttcgggttcgtcgaggagtattttgaaaaccttgctttgtatatgaacgagaggatggttaagtttaaggtttttaagttggatgatgctggtaagcagtgggttgaagctaaggatttggacgatcgtgtgttgtttttaggtgatggttgcaccttttctgcttcaatagaagatttatccgtgtgtagagggaattgcataatctatgtggataatttcttttattcgctc

SEQ ID NO: 209896 - DNA, 290 bp, Gossypium hirsutum
ctttcattagcatcgaaatcactccagttttctttatcacttgaaaatgtcttgctgtggggggaaaggggggttgcggttttggctgcaagtgtgccattgcctgtggaggatccaaaatgtccccaacctgaaccttgcccagatgaccacaactgaaactcttgttcttggtgtagcaccccagaaagcacactttgagggagctgagattgaattcggggctgagaaccgcttccagtgtggagacaactgcacctgcaacccttgccattgtgaatgattagaga

SEQ ID NO: 209897 - DNA, 413 bp, Gossypium hirsutum
gcgaatgtttttcgacgtagaatcaacacttcatcttgttctgaggttgagaggtggaattatgtagccttctttgatggctttggctcgcaaatacaaccaagacaagatgatttgccgcaagtgttatgctcgtctgcatccaagagccgtgaactgccgcaagaagaagtgtggtcacagcaatcagttgaggccgaagaagaagatcaagtagataccgactggtgttatcctgtctgctttaaaagaaattgaatgtcagactaggaaaatatttccattgagttcttttgctattattctattttgttgagattttgtttgtgggttctggatttgatgttccaatgtatgtttggacaatcttatgtcttttgtcttggaattttgataaagaggtggaaatttta

SEQ ID NO: 209898 - DNA, 428 bp, Gossypium hirsutum
  unsure (1)..(428): unsure at all n locations
agtgtacggccgacattgtcggacaatgccctaaccagttgaaggttcccggaggttgtagcgggcgttgcccagtgttcaaaactgaanaacattgctgtaattctgggaactgtcaacctaccgacttctcgaggtttttcaaggagaggtgccccgatgcttatagttacccaaaggatgacccaacaagcttgtttacatgccccacagggactaattacaaggttattttctgcccattaagagtatttgggatggttttaagtcctttctatacacaaattagtaggtttatatcaataaatggaataaactcgaatgctatttgagcacatttcttgatgtgcatatgttctgatttgtaataatagtgtttgtcatgaatgaaaaatttgagtctctatgggtttcggtttgtgttcatc

SEQ ID NO: 209899 - DNA, 443 bp, Gossypium hirsutum
  unsure (1)..(443): unsure at all n locations
gggtcgacgccacgcgtgcctnggtttaacatccccatggagttttgtccttctaanggcggatgtcacaacatgcggtggtctgctgacatcaacgcacaattcccaaatgagttaaaagctcctggtggctccaataacccatgcacggtgtttaagaccaataaatattgttgcactcaacggttccgcacctgtggacctacccgccattcaacgttttttaaggacctgtgccctgattcatacagttatcctcaagatgatccttcgatcacctttacttacactgatccttacaattacatggtcatgttttgcccccgaggctcacctcatatacacatagtctgaacttagagccaataaaaataaatgcatcatctctttttctagataatatgcgccttgtaactaaaaataaaaaaagtcattttttcttc

SEQ ID NO: 209900 - DNA, 433 bp, Gossypium hirsutum
gcttgtggcctcttctcaaagagaaaggtggtcttttgatagtgaacactttggttctggggatggcgagataagtggatgtagcagcaggttctcgtattctccatccataggtatgcgaacttgtggggcttgctcaaagcttttggctgagagatcttcgtgtagctgcaatgaaatttcagtggtagctgtacttgtatgtggacatgtttatcatactgaatgcttggaaactatgacgccagaggctgacagatatgacccagcctgcccaatatgtatgggtggagaaaagcaggtctcaaagatatccagaaaagctttgaaagctgaactggagttgatggctaaacatcttaagttattcaagaatagagttaaagatagttttgcggaaagtgattgtaatgattttaaccaatcacaaaat

SEQ ID NO: 209901 - DNA, 405 bp, Gossypium hirsutum
  unsure (1)..(405): unsure at all n locations
cgagaaccgagccccctgcgacgccggcatttacgtatctaaaaagctcttggtcttcgagggcgtctccttcagcttcttccttttctcctccctggtggctcagggtctaaagctcgccatcaatttgttgaacagcaaagatgtggatgaagctttcagggcacacattaaccttaaagtattgaggtttgggatgatgggctccgccgtcgggtccgtcatggggtgcttgtttctgatgctttcgatggtgaacgtgatcgacatccggctggggttgttgtcttgcggcagccagtcctccattcatgccacggcggctttagtcattctggtttcttctgctctcttgattacatttccactgctgtttatgctttcttgcattgaatcatntaaaac

SEQ ID NO: 209902 - DNA, 345 bp, Gossypium hirsutum
cccacgcgtccgcagaaactgaattaggtatctggggcacattttcttgcccaccacctttacttgagtctgttgatgcttttatccagtcaccaccaccaaccagcatagcagagtcagatagcctttcaccccataatagtggcctgctggatgctttacttcacgaggcaaaaactctaagcagcgcaaagaaccatgcatctgagaagagttcaaattcagctactcccggtgatgtagctgaaagttccaccttcaacatctgtgagacagaatgggaaaactgtggagagcctctttcttcaatgggtcattcagcaacttctcttttaagtgagtgta

SEQ ID NO: 209903 - DNA, 447 bp, Gossypium hirsutum
gtcgaaaactggtacgtatataaatctcgtgtcaaattcaaatctccgagacgaacacgggggatagtcaataaaaaattggcgacgatggcgagggcaagctctggcctcgcgtacccggaacgattctatgcggcggctgcttacgttggcttcgacggatctcccaattccaacgacaaggacattggctccaggttctccaatgacgtcgctttgatcctgtacgccttataccagcaggctactgtaggcccttgtaatgttccaaaaccgagtttgtggaatcctgtcgaacaaggcaaatggaaaagctggaagcagcttggaaatatggtgtctgcagaagctatgcgtctctttgtgaaaattttggaggaagaagaaccaggatggtattcacgggcatctaactctgttttggagcctgttacagatgtacaaatg

SEQ ID NO: 209904 - DNA, 453 bp, Gossypium hirsutum
  unsure (1)..(453): unsure at all n locations
gcgcccacgcgtcctaaaagagatgcctatttattgatgcacatganaaggcatgggggtgagggcaaaacaccagcagcgctagctaaacccaataaagaatccacttctgaaccaactcttattaagagatattcatgcccttttgctggttgcaagaggaacaaggatcacaaaaagttccagcctctgaaaaccatcttatgtgtcaaaaaccattacaagacatcccactgtgacaagagctacatctgcagcatgtgccacaccaagaaattctcagtgattgctgatctcaaaactcatgagaagcattgtggtaaagataaatggctatgttcgtgcggcaccacgttttccaggaaagataagctgtttggtcacataactctttttcagtgtcacactccatcaattcccttggatgaaactaaaggacccactgtcccatct

SEQ ID NO: 209905 - DNA, 392 bp, Gossypium hirsutum
cccacgcgtccgcacccatggatgtgaaccacgctgttcttgcagttgggtatggagtcggaaatggcgttccatattggctcattaagaactcatggggtgcagaatggggtgacaatggctacttcaagatggagatgggcaaaaacatgtgcggtgtggcaacttgtgcatcatacccaattgttgcttgatccagtcgatgaaccgtgttggatcatgtcattcctttgtgttatagaaggcgtctagttatggtctacaaatgttgtagttgttcagggttatggtctagttgaaacccatgggttcatgtacaataaggatccaaagacatgtaagatgcaaatctgatgtacacaacaaaggtgtaaatttttatgttgtaatgc

SEQ ID NO: 209906 - DNA, 390 bp, Gossypium hirsutum
ggaaatggcatccctctaggcgctgtgataaccactcccgagatcgcggaggtcttgaccggacgaagttacttcaacacctttggtgggaaccctgtatgtacggctgcaggattagccgttttgaacgtaatcgaaaaagaaaagcttcaagacaatgccttcgtcgtaggatcttacttgaaagagagactaattgcactaaaagataaacatgaccttatcggggatgtgagaggacgtggattgatgctcggagtcgaacttgtcactgatcacgagctcaagacaccggcaaagcttgaaacacttcatgtattggaccaaatgaaagagatcggtgtattggttgggaaaggtggattttatggcaatgtatttaagattaca

SEQ ID NO: 209907 - DNA, 424 bp, Gossypium hirsutum
gaccacgcgtccgggctgttaagcctgtgttaagcaaggagcatgatgagcctgggatcaacttgggcctaatgctcgggatcattggaggcgttgttgccattgcaagacctattgctttgttgatgtttgtgattattcgaagatcacgaacaactgaagacgcaaattatgatgaaaggtccattgtagacaaaatgtctgttcgtagctctcccaaaccacccattgattcaaggcgtgttccacagacaatgagatcagctgcaattgggcttccacgatatcgcgttttcagcttggaagaaattgaagatgcaaccaacaactttaacccatcaaattttatgggggagggatctcaagggcagctttataaaggttgctttgtaaatgggccaggggtggtggtaaaatgtttgaa

SEQ ID NO: 209908 - DNA, 445 bp, Gossypium hirsutum
cccacgcgtccggaagagttggaaaagaaggctaggcctgttaaaggtcgtgatgatatcgaagctggggcttccatttctgctggaaatgatgaccttattggaacaatggtagctgatgctattgacaaagtcggtcccgatggtgttttgtcaatcgagtcatcgtcttcatttgagaccaccgttgatgttgaggaaggaatggagattgacagaggttacatctcaccgcaattcgtaacaaatcccgagaaattaatttgtgaattcgagaatgcaagggtgctagtaaccgatcaaaagattacagctattaaggacataattcccctcttggagaagactactcagttaagagctccattgcttataattgctgaggatgttaccggagaggctcttgctacacttgtagtgaacaaactccgaggtatccttaatg

SEQ ID NO: 209909 - DNA, 458 bp, Gossypium hirsutum
  unsure (1)..(458): unsure at all n locations
ccgggccgacccacgcgtgcggnaatgcataaaaatattaaagattttttttttatcaacaccaatagagaatggggaagtgatacttttttaaataattttgaaagaatatagaaatagagtgttttatgacattacatttgtgatggacctcgtaatgattgcacataccaatggtaaggagagaacatatgcagaatgtaagaaaatcttgagaggaggatgcttttctcactataaaatcattaacattcctgcactgttttccatcatcgaggcgtatcctgattctcagtaactttttagcataatgccagtgatggggatttaatttcctattttatgaatcgatcttttttcgtgtaggcgtcaataaatgtatgtgattgtattattcaatcttttcttattctctgttgaaatggggcaattttatttgcctaaaaataaaataatta

SEQ ID NO: 209910 - DNA, 435 bp, Gossypium hirsutum
gcgcccacgcgtcctattttggcaggaggtgccttctatggagcctcaatgaacccagctgtttgattcggaccagccttggttagctggacatgggacaaccactggatctactgggtcggaccccttatcggtggtgggctcgctggtctcatctacgagttcatcttcatcagcaacacccacgagcagctcccaaccaccgattattaagcctaatcagggtttaattgatttgtctgtcactttgaaaccggattttctccgatcacatttgagtctcctatctctttccttgtattttgtgtttaatttgtggcccgcgatcttgtttacttttttgttttttttcattcccatcctctatcatgatcatcatgaatggcagatgtttacaattgcatgccctgaaaaaatggtatatgagtgacttac

SEQ ID NO: 209911 - DNA, 341 bp, Gossypium hirsutum
ggccaaagttatcgtatccccgaaaagcaatatccaactcgatgccaccaaattgaagacggaattcggtgagctcctttcgattaaagagtctcttgctaagtatgtattccaaccgaataagaagactggtggagcttgagcagatactttgcctgataaaaagtttgtcttcaaagataaactatgtgagactatttgagcttgagattttaggtgtatgaattcattgaactcctcttctttttatcatcttgtttatgaatttgcttcgtgtgggtcagatatggatggcgataacctcggccgataatcacacacgcctactcccagatgacccg

SEQ ID NO: 209912 - DNA, 359 bp, Gossypium hirsutum
gggagcttgaacaatctatttatgctgaatttacagtatggtctttccaaagggagcaatgaggcggtgtttgtgattgaagcatataggacactaagggataggggtccataccctgctgatcaggttgttaaggatcttgaaggaagctttgcctttgtgatctatgacagcaagactggaaccgcgtttgctgcactggggtctgatggtggagtgaagctgtattgggggattgcagctgatggctctgtggtcatatctgatgatttagatgtcattaaagaaaggtgtgccaaatcctttgctccttttccaactggattcatgttccacagtgaaagggggctgatgagctt

SEQ ID NO: 209913 - DNA, 345 bp, Gossypium hirsutum
ctcttattggtttaaattctgcccttgaatcccattaattactactgagtatgacattgggcgtacgcacttcattatgagctcaatccacctattgcaaaagccttgcattttcatcatgctttcaaggtagttccattccattctgccataggctttgctcatatccaattttaaagcaaaataccctgtgcctcctcttttcttttctttttttgaaagagtgtagtaattcataagcaatcattatgttgtcagttatttgtcttcctaggacaaaagcactttgtgtttcttcaatacataagtgtagcacccttcgaaatctattaaccactattgttt

SEQ ID NO: 209914 - DNA, 442 bp, Gossypium hirsutum
  unsure (1)..(442): unsure at all n locations
cgctgtttattcgcttcagctcatcacttcccatagtctctcctcctccctcaccaaatcgaaatgtctctggtggcgaacgaagactttcagcacattttgcgtgtgctgaacaccaacgttgatggaaagcagaagatcatgtttgctttgacctccatcaagggtattggaaggcgtttcgctaacattgtttgcaagaaggctgatgtcgacatgaacaagagggctggtgaattgactgcacaggagctggacaatctcatgaccattgttgcaaaccccaggcagtttaagatccctgactggtttttgaataggcagaaggattacaaggatgggaagtattcccaagttgtgtctaatgctctcgacatgaagttgaaagatgactnggagcgattgaagaagatcaggaaccacccgtggctgaggcactatt

SEQ ID NO: 209915 - DNA, 361 bp, Gossypium hirsutum
cccacgcgtccgtggagaaaatgttagtggttatggaggaaagaaggaagagaggagcctgtaagatatttgaagcaatcgaaggtgtattgattaataaactaaaagccaaagaagaagagattgaaaagattgggaaattaaattgggcactcgaagaaagggtgaaatcactatgcgtatagaaccaaatatggcgagatttggctcaaaccaacgaggcaacagccaacgcgttacggaccaacttagaacaagtactcgccgccgctgccaacaaccgtgaggaaacggaagcggcggcggcagacgatgtgcacgatgcacaatcttgttgcgggagcaactgggaagcaacagc

SEQ ID NO: 209916 - DNA, 428 bp, Gossypium hirsutum
cccacgcgtccggaaacagctcaaggatggggaaaaggaattttctcaggctatccttgaggagcgcaccaagaaagcagaggcatggcatcgtgatgctgcagctcgtgcacggtatactcaacctgcagcacaggttttccaacctgcttatcggatgccaactataagcatcgaggaagctggtctgagggagatggaaatgatgaataagtggcaggagaggaatgcaaaaatgtttgaagaagctaactcagcatggtacaaggacaaaccaaagatgggaccaagtgaagatgatgaagacgatgatgctgcccaagagaaggcacgagcatgggatgactggaaagatgacaatcctcgaggtgcaggcaataaaaagcttactccctgcgggtgaaagtgaccagtagttcccatactta

SEQ ID NO: 209917 - DNA, 440 bp, Gossypium hirsutum
caaactctctttgtctctctgtttctactttcactttgcatttttcttgattccttccttgaggacctcaatctctaggagtgtttgtaataaatggctttggtgacaactgctgaagtctgtgatgcaaatccacagctaattgtgagcggtgaacttcgggcccttcaaccaatattccaaatatatggtcgtcgcccagtattctccggacctatagtcacacttaaagtgtttgaggacaatgtattgatccgtgagttccttgaggagaaaggtaatggcagagttctggttgtagatgggggtggtagtttaaggtgtgccatacttggaggcaaccctgtagttcaagctcaaaacaatgggtgggctggaatagtggttaatggctgcgtaagggatgttgatgagataaaacggtgtgacattggggtgag

SEQ ID NO: 209918 - DNA, 398 bp, Gossypium hirsutum
  unsure (1)..(398): unsure at all n locations
caaagattgcagaagctatatagcatgcgctttcatgatggggtgctaaagtctgtaattgggtatggatgtggttggtttatgtgggttggcangactgtgttttatgggcagtacaaatgcactggaccaggggcaagctttgcaggcagggtttcatggtcaagagaactgacagatgaagaagccaaaccttttctttctcttagtttcattgatggctccgaatggatcaaattgtaatcatcaaagaagcttttgtacaatctaaccaacaaaaataatacatttctacatgaaggaagaatattataatcaatgataaaatcgataattagaatttggaacccnnnnnaaaaaannaaaaaaatattattaaatataaaaaaaaataaagg

SEQ ID NO: 209919 - DNA, 286 bp, Gossypium hirsutum
gcaggagcagcagccatgtttctcaagacgttgcttttccgattcagtggtgccaaaatatgcccttgtaaaggcatcatatttgttcgtggaaattctcatgttttactcttttccaattcgaaatgcaagaggtacttccacaaccgtctgaagccctcaaaacttacatggacagccatgtatacgaagcaccataacaaggatattgcccaagaggccgttaaaaataaaagacttgcattaaagaagccttactcccgatccattgttggtgccaccttat

SEQ ID NO: 209920 - DNA, 292 bp, Gossypium hirsutum
gacacaatgaagacagcttcaataatatcaatttctgccacaacctttttctatctctgtggtggagcgcttggatatgcagcctttggagataagacaccagggaatctcttgactggttttggattttacgaaccatattggctcatcgactttgctaatatgtgcattgttcttcacctagttggaggatatcaggtttacagccagccactatttgcaaacgttgagaaatgggtctcagtgaaatttccggacagtggaatcatacacaaggatttcaagttgaaac

SEQ ID NO: 209921 - DNA, 440 bp, Gossypium hirsutum
gtagcattagaatcatgggtgttgttagttttgagtttgaggtaacctccccagttgctggagccattcttttcaaggcttttgttcttgaagctgccaaaatttggcccacggctgcccctcatgcagtcaagagtgttgagctcgaaggtgatgctagtcctggaagtattgtaaacatcacctttgttgaaggccttccataccaatatatgaagcaccagattggaggacatgacgaaaacaatttttcatacagttacagtatgattgaaggtgggcctttatgggacaagcttgagaaaatcagctatgagaaccagtttgtggcagctgcagacggaggaagcatttgcaagagctcaataaaatattacacccgttgcgactatgtaatcaccgaagatgaaatcaagactctcattaaaaggagtgaggta

SEQ ID NO: 209922 - DNA, 452 bp, Gossypium hirsutum
acggttagttcatcgacgcaccctcgttcagattcaactatagaagcgaaatggctggtggcagggttgctcatgctaccttgaaaggaccaagtgttgttaaggagatagttatcggaataacacttggcctttgtgctggtgggctttggaagatgcatcactggaatgagcagaggaaagtgagagcattctacgacatgctcgagaaaggtgaaatcagtgtcattgcagaagaataaatgttcttttagtcttgtgaaagtgtggacagcttcagctgtgtttcgttatatgcattctcttcatttggctcttagatagaagatgagcaaaacacaatttggagcttctaagaataatgtcatcattttgggatcttgatttcatattgcatagcaaatccaagcgatttttcaatctagtgcctttgctgtttttcatttgacatt

SEQ ID NO: 209923 - DNA, 286 bp, Gossypium hirsutum
gccacgcgtccaactttttcaggaggtgccctattattatcctcaatgaacccacctgtttgagtcagaccagccttgaatagctggacatgggacaaccactggatctactgggtcaggaccccttatcggtggtgggctcgctggtctcatgtacgagttgatcttcatcagcaacacccacgagcagatcctaaccaccgattattaagcctaattagggtgtaatcgattagtatagcactctgaaaccgaattatctccgatcacatgtgagtcatctatc

SEQ ID NO: 209924 - DNA, 397 bp, Gossypium hirsutum
ttatataggaattcttgaacccaagagttaagaataagaagttcttcattccccaaaatagaataggcacttagaataacgaaacagattagattggtcgagaagtgcaaaatcgtatggatatgatcctcattgtgcagcttgatcaattggatcgtttctttttggattcctatacgaagcttttgtagatgtgtttccgggtattcttttatcatttcgtccaacaggaagagttcctctacttctatgaattgttctagaatactcttttcttgaatatcattcaaaaaaagtttcggattgcctagtatcccaccaattagtaatccaagatttcagacttttattaaatgagagagagatccaccagggcaaaaatactatagatgcaaga

SEQ ID NO: 209925 - DNA, 382 bp, Gossypium hirsutum
tcgatttaactttcatggttaccaatgcaaattcaacattgccattggtgcgaaaggggatgaaaaaattgtctccctcgatagaacgattcgctaagaatgcagttgtgccgagtctcaaaagttgggggatcattttcaacacgtttttggaattagatggtgataaaatggagatcatcaaagaggaattcactgaacacgaccgattgtgggctataggaccattgctacccattaaagctactaacaacgagagaggtggaccgagttctataccaagagatgaagtcattgcatggttagattcttgtaaacgagtcaactcagtagtgttcattgggtttggatcccagatttccttgaccaaactacaaatgga

SEQ ID NO: 209926 - DNA, 426 bp, Gossypium hirsutum
cccacgcgtccgaaacaacaatggctacctatgaaggtaaagttttcactgaagaacaaggggctttggtggtcaagtcatggactgtaatgaagaagaatgcagctgaattgggtcttaaattcttcttgaagatatttgagattgcaccatcagccaagaaactattctcattcttgagagactcaaatgttccattggagcaaaacacaaagctgaagccccatgccatgtctgtctttgtcatgacatgtgaatctgcagttcaactgcgtaaagcaggcaaagttacagtgagggaatcaaatttgaagaaattaggagctacccattttaagtatggggtagttgatgaacattttgaggtaacaaaatttgctcttttggagaccataaaagaagcagtaccagatatgtggtcagatg

SEQ ID NO: 209927 - DNA, 431 bp, Gossypium hirsutum
ctccacatttcactctctttttcaactttcccttcttctctttgttttaaagaggggcttgagttttagccaaagaaaactccatggctaaacttgttgctactttcttcttggctctcattgccatctccatggttcaaactttggttatggcatcacatggacatggtggtcaccattatgataacaaacgttatggacctggaagtctcaagccttaccaatgtccatctcagtgcacaaggaggtgtagccagacacagtaccataaaccatgcatgttcttctgtcagaaatgttgcaggacatgcctttgtgttcctccagggtattatgggaacaaacaagtttgcccttgctacaacaactggaaaaccaaaggaggaggccccaaatgcccttaaattaactaaaaaaaagacccctttttt

SEQ ID NO: 209928 - DNA, 434 bp, Gossypium hirsutum
ggcgatattagagatgagagtacatatggactgtgaaggctgcgcggtcaagataaagaaggctcttggaaaactcaagggagtggacagtgtagatgtggatatgaggatgcaaaaggtaacggtcatggggtgggcagcgtcagaccagaagaagatgttgaaaagagtgagaaaaagcggaaaaagagcagagctgtggccgtatccatacaaacctgacaaccaattttactacgaatactatgaaagacaacccacgattacttaccatgcaaccggccattcatcgtcctactactactacaagcatgggaatgatggccatgatcatggttactatcagccaccaccttattcaactcttgttgatgaacaagccagctctatcttcagcgatgaaaaaccacacgcttgctccataatgtgatata

SEQ ID NO: 209929 - DNA, 169 bp, Gossypium hirsutum
cccacgcgtccggtcgagaagttggctaataagcatggatgtagccctgcacagttagcagttgcctgggttcttcatcaaggggacgatgtagcaccgatttccggaacaaccaagataaagaatctcgatactaacagtgattcactaaaagtaaagctcacaggag

SEQ ID NO: 209930 - DNA, 412 bp, Gossypium hirsutum
ccaagctatgggacacaagaacgttgaatcttatcaagacctatgttactgaacgtccagtgaatggtgttgctatgtctccacttctcgaccatatgtagagggtcagcccgagagcatcgtgcaagatattgagaacatggttcgctcttacattgagaaggaagtacagctttgtcttacgtatatatggtctgcactactttgagccactcgattccaaagtccattgtttattgtcaagtccgtgaagctaaaataagcctgtttgactttttctacacggaattgggtaaactggagcaaaaatgattatcggcattattgaatgaggatccagcaatcatggaatgccgatccgctcttgcgaagagactagaattatataggagtgcacaagctgaaatcgata

SEQ ID NO: 209931 - DNA, 318 bp, Gossypium hirsutum
tccacgcgtccgtttgctggaacttcttgctcctactgtctagtgtcggctttatgatccgtgagtttatttttgattagcctaaaggatgttgggttacaggaggtacagaaagtggtgggtttacaagtatgcatagcaagcttggcatttgccacattaagtacatcatacagcaatttaccatctgctccttcaagccaagctaatattgatcttccatattttacaactgagataacaaaggaatcacgtccttttgcgctttctcttgcaaggcatctacattctatatgaactaagatgtatggtgctttt

SEQ ID NO: 209932 - DNA, 404 bp, Gossypium hirsutum
ctggagacgattgtgtagctgttaagagtgtctgggatgagtacggtatcaagtgggggagtccaacgaagcagctagtgatcagacggctcacgtgcatttctccattcagtgcagtgattgcactaggcagtgagatgtctggcggaattgaggatgttagggccgaagacataacaggcattaattccgagtcggctgttaggatcaaaaccgctgtaggaagaggaaactatgtcaaggacatatatgtaagaaggatgactatgaaaaccatgaaaatggtgttttggatggcagggaactacggttcgcaccctgacaacgattatgatcctaatgcaatccctgttatacaaaatatcaattttcgtgacgtcgttgccgagaatgtaaccatggca

SEQ ID NO: 209933 - DNA, 432 bp, Gossypium hirsutum
  unsure (1)..(432): unsure at all n locations
cccacgcgtccggcaggttcaggcccaacatcgactgagggaagggctgaaactaatgccggtgccaggggtcatggttcaaatagacaagaatcacatcaagctaggaagcagagcactttagaaactcgagctatagcttgggatgaagctgaacgtgccaaatatatggcaaggtataagcgtgaagaagtgaagatacaggcctgggaaaatcacgaaaagaggaaagctgaagtggaaatgaagaaaatagaggtgaaggctgagagattgaaagctcgggcaaaagaaagatatgcaaacaaagtcgcagccacaaggagaatagctgaagagaaacgtgcaaatgcagaatcaaagctaaacgagaaagctataatgacatnctcaaaggcggattatataaggagaactggtcattttccttct

SEQ ID NO: 209934 - DNA, 430 bp, Gossypium hirsutum
ctcttctttcaactcaaagaaaactcccaagtaatattagaatcatgggtgttgtcacttgggacgatgagtctacctcccagtcgcccctgccaggcttttcaaagctttttctcttgaagctgacaaggtttggcccaaggctgctcctcaggcagtcaagagcgttgaggttgaagctaatcctggccctggaagtatcgtaaagatcaactttgctgaaggccttccattccaatatatgaagcaccagattggaggacatgacgacaagaatttgtcatacagttatagtttgatcgaaggtggacctttgggggacaagcttgagaaaatcagctatgacaacaagtttgaggcagctgcacgtggaggaagcctttgcaagagctcgatgaaattttacactgttggcgactatgtgatcact

SEQ ID NO: 209935 - DNA, 400 bp, Gossypium hirsutum
cccacgcgtccggacccctggttccgactccccgaaggttgccccagaggttattgctgagtacactgtccgtgccttgcagcgtaccgtccctgctgcagtccctgctattgtgttcttgtctggtgggcaaagtgaggaggaggctacccttaaccttaatgccatgaacaagctccagaccaagaaaccatggtcactctcattctcatttggacgtgcccttcagcagagcactctcaaggcctgggctggaaaggaggaaaacgtgaagaaagcacaagatgctttccttgttaggtgcaaggctaactcggaggccaccttgggtacatacaagggtgacgcaaagattagtgagggtgctgcagagagccttcatgtttaggactaccaatac

SEQ ID NO: 209936 - DNA, 358 bp, Gossypium hirsutum
cggacgcgtgggttaaaatcccagaattacttaaacaacaatggctacctatgaaggtaaagtttggactgaagaacaagaagctttggtggtcaagtcatggactgtaatgaagaagaatgcagctgaattgggtcttaaattcttcttgaagatatttgagattgcaccatcagccaagaaactattctcattcttgagagactcaaatgttccattggagcaaaacacaaagctgaagccccatgccatgtctgtctttgtcatgacatgtgaatctgcagttcaactgcgtaaagcacgcaaagttacagtgagggaatcaaatttgaagaaattaggagctacccattttaag

SEQ ID NO: 209937 - DNA, 364 bp, Gossypium hirsutum
ggccgaccgacgcgtccggaatgacctaactttgaattttcctccgtgtctcatgacgaacttctatatgtcggagaagagctgctccagaatggtgaccgctgccaaacttacatcgcagagaatctcacatccgaaagcctttatcgctgatgttgttcctctactttttttcttgctcagttgctgaaaataaaatgatacatgcatgttctcgcaatggcatataccatgttcttagggcattgacactgtgaatctatgatttgaaatattttgtttttgctacattttaatgcaattaccgattataaaaccatgtggaaatcccagcctcattgaacaaattttcaaattttttata

SEQ ID NO: 209938 - DNA, 367 bp, Gossypium hirsutum
ggccgacggaggcgtgcgcataaaaatggccagacctgtttatttcctttttccaaggccaactgatatgcaggggatgcaggatcttcttaaggagcttcgataacttgttccaaatggtgctaaatatagcattgatgctcatttgtaccaaactgttaaacacatactgtttttaatgagtgttaccaaccaagctgagaaattgaggcaatgggttcatcgtgtggtatctgatctcaataatacaaggtcattttaaaccatatatggttaccaaactattacaagcttttctttttagattgtaaattaacgaaaagtattccccatcttttttgaataacttacatatccaggacatttt

SEQ ID NO: 209939 - DNA, 425 bp, Gossypium hirsutum
gaatatctcatgagctgatggaaactgtggagaggctgacaaaggagcactacagaaagtgcatggagcaaaggttcaaagaaatggtggccagtaagggtcttgaggctgttcaatctgagatcaatgacatggactgggaaagcaccttctctttgcgccacttgcctgaatctaacatgtctgaaattcctgatcttgaagaagattacagaaaggtgatgaaggaatttgcagtggagttggagaagcttgcagagcaacttttggaccttttgtgtgagaatctggggttggagcctggttacctgaaaaaagtgttttatgggtccaaagggccaacctttggtaccaaggtcagcaactatcctccatgccccaaacctgacttaaatcaaaggactcaggctcacactgatgctggt

SEQ ID NO: 209940 - DNA, 335 bp, Gossypium hirsutum
  unsure (1)..(335): unsure at all n locations
ggaacttgaacttgacaagttcatttctcactcagttcccttctctgagattaacgggncgttggagtacatgcttgctggcgagggcctgaggtgcatgattcgcatggatgcataaggattggctggccatggatgaagggctttttgtcaagtatatgtgcattttaagggaataaataatgtaatgtaatgctacatcgttttgctgtatttaatggcaaatttttatcttatcaaaaaaaaaataaaaaaatataataaaaaaatatattaataataataataaaattaaaaaaatagtggtttggtttggaaattatattttaataatt

SEQ ID NO: 209941 - DNA, 315 bp, Gossypium hirsutum
cccacgcgtccgctgcttcttcttcttcattctgttggctgctgctgctgctttggtggcgtgatggagaagccacaactcaatttcatataaagaaaaaaaaaagagtgagatggatccagacgcagtagccaaggccttcgtcgagcactactactccacattcgatgccaaccgggccggtttagccaatctctaccaggaaggttccatgttgaccttcgaaggtcaaaagatccagggctctcagagcatcgtggctaagctcaccagccttccttttcagcagtgcaagcacaacatcaccaccgtcga

SEQ ID NO: 209942 - DNA, 223 bp, Gossypium hirsutum
gctacttaaccatttcccaaatctcctcctttctcttctttagcgtccttttcggttccggtcatgcatcgcgctttgaaatcctcaatgagtgctcctacaccgtctgggcagcagcctctcctggtggtggccgtcgcctagaccctcggcaaagttggaccatttatgtgcctgctggcactgctattgctcgtatttggggtcgaaccaattgcaattt

SEQ ID NO: 209943 - DNA, 390 bp, Gossypium hirsutum
gatttatgcatcgtgcttttcaatcgtatgagaagcatcgaggccctcttggaaatgtcaggaaaggagtgttggtatcaatgggttatggtacaatcacagcttatgcattgatgagtttggaagctcgtggaactctttttgtgacccctgggatggagacatacgatggcatgatagttggtgagcattcacgtgatacagatcttgatgtgaatccagtaaggagtaaagaactgtcaaatatgcgtgcagctggcaaagatgaaaatgtgaaactatctccgccaaaacttatgactctcgaagaagctattggttatgttgcttctgatgagcttatagaggttacaccaaaggccatccgattaaggaagagatatctggatg

SEQ ID NO: 209944 - DNA, 328 bp, Gossypium hirsutum
gcccgtcttcattccactcgtgtacttggatcctttggttatcatgctcctgaatacgcgatgactgggcaattaaatgccaagagtgatgtatacagctttggtgttgtgctgctggagcttttgactggaagaaaacctgttgatcatactttaccccgtggacagcaaagcctattgacatgggctacaccaagacttattgaagacaaggttaggcagtgtgttgatcaaagactaggaggagattatcctcccaaggccgccgccaagatggctgcagttgctgcattatgcgtgcaatatgaagctgattttaagccaaata

SEQ ID NO: 209945 - DNA, 439 bp, Gossypium hirsutum
taaacgtgaaccaaagaccagggaagctggtgacagtggatggggaaacagagctggaggtagagacattgttgaaggcatcggcttatatattggggacgagtgggtggagcattgtttacaaggcagtgctggagaatgggactgcattcgcagtaagaaggataggggagagttcagtggagaggttgaaggattttgaaagccgcgttaggatgatagccaaattgaggcacccaaacttggtaaagattcgagggttttactggggagatactgagaagcttgttatctatgactacgcctccaatggcagcctcgcctgcaccactaccgcttacagaagatcaggctcatcatcagtttggcatttacctcttgaagcctgtcttaaaatagcaagaggagtggctcggggactggcctacattcatgaaaa

SEQ ID NO: 209946 - DNA, 430 bp, Gossypium hirsutum
cccagggaggatttgaaagatgaagttcttgcttcaattccacgaggaacagtacccgttggaggacctgttgatgcacttccttattacatgcctgcccaacatgcacctcaagttggaactccgggtatgattatgggaaagccggtcatggaccctgctttgtatgctcagcaatctcatccgtacatggcacagccgcagcagatgtggccaccaccaggtcccgagcaacagcagtcatcctctgatcattagcaactctattcatagaagacatgctcctcgagatatctcgagaatgttgtacggaaacggaataaggaggctttgtcttgttgaaaagcatggtcaagattctagctcatagatcagactgtgtaaatatcactctgaacaattttcatttcatttcctttgttttctctat

SEQ ID NO: 209947 - DNA, 418 bp, Gossypium hirsutum
cccacgcgttcgcccacgcgtccggcagccgcctcagagtcatcctccacctatgtggccggcacaacaaggttcggctggggtaccagctcaacaacagccagcgggtcaaccggctaacgcagatgaggttcggactttgtggatcggagatttgcagtattatatggatgagaattatctcttgagctgttttgcccaaactggagaggttgcttctgtaaaagttatccgcaacaagcaaaccggtcaagtggagggctatgggtttattgagtttgtttcaagagctgctgctgagagagttttacaaacatacaatggtacacctatgccaaatggtgagagcaactataggctgaactgtgcatcctttagttcaggtgataggcgagatgagacccctgagttcacaatc

SEQ ID NO: 209948 - DNA, 409 bp, Gossypium hirsutum
ttttctttagccaaggacagtaccatgccaaattgaggaagcttgtgctccgtgccttcgtgcctgaggccgtcaaaagcttcgtttctaacatcgaatccattgccaaagattctctccagtcattggaaggcaggctgattaccactttccaagaaatgaaaacgtacacattcaatgttgcgctgctatcgatattcggagaggatgaagtgaagtacagagaagatctgaagaggtgttattacatattagaaaaagggtataactcgatgcccattaatattccgggtacacttttcaacaaatcgatgaaagcaaggaaagagctagctcacatcctggccaaaatcatatcgaccagggaggaaacgaagcaagagtacaatgacttggtggtttttttcat

SEQ ID NO: 209949 - DNA, 256 bp, Gossypium hirsutum
  unsure (1)..(256): unsure at all n locations
ggaggactcaactattatcgagctatgaatctaaactgggaactgatggcaccgggggcgtgattacaaatccaagtaccgggtaagttcatcgtacgcgacctgtacattacctaccacattcctggcgttaaggaatacttacaaaatggcggattcaagaaaaatgtgcctttcttgcaggaactagttgtcaatgaaggagtagcccattntatcaaccaaagaaaagccttaggagattagcatgcacatt

SEQ ID NO: 209950 - DNA, 317 bp, Gossypium hirsutum
cccacgcgtccgcccacgcgtacgctctggcgttcttgacaggtttgccgccatgggtattgacggggctggagtccttgccctcctaggagctcacagtgtcggcagaactcactgtgtgaagctggtgcatcgtttgtacccagaggttgaccctgccctcaaccccgaccatgttccacacatactccataaatgccctgatcagatcccagaccccaaggccgttcagtatgtgagaaacgaccgtgggacacccatggttttggataacaactactacaggaacatactggacaacaagggtttgttgattg

SEQ ID NO: 209951 - DNA, 273 bp, Gossypium hirsutum
tcgccacgcgttcgcccactcgttcgtccactctttcgtccacgcgttcgtccacgcgttcggaggtcttcaccaccaccttctgctttaccacctccaccatactattacaagtccccaccaccaccaaaacacgtataggagcccccatacatttacaaatctccttcaccaccatcaccatctcctccttcaccatattattacaagtccccaccaccaccagtccactctgcaccaccaccatactattacaaatgccctactccacca

SEQ ID NO: 209952 - DNA, 444 bp, Gossypium hirsutum
  unsure (1)..(444): unsure at all n locations
cccacgcgtccgtccagatttcatattgcaaacgatggcgtcattggattcaaaagaatgagctgccaataacccaggccttcattttccccctgacgaagccaccaaaggctacatcatgcagcaaaccatgtttcgtattaaggatccaaaacgtactcttgaattttatagtcgtgttttgggcatgacgttgcttaacaaagtggatgttccatatatgaaaatgacattgtatatgatgggatatgaggatgtttcatcagcaccaaatgacccagttgagaaaactatttggacatttggaagaccagctactatggaactaacacacttttggngtaccgaaaacgatcctgaattcaaaggataccacgatgggaattcagaacctattggcttttggcaccattgcatcactggggatgacatgtacaaggcatg

SEQ ID NO: 209953 - DNA, 384 bp, Gossypium hirsutum
catactcatttagcccctttcattagcatcggaatcactccagttttctttatcactgaaaaaggtcttgctgtggtggaaactgtggctgcggatctggctgcaagtgtggcagtggctgtggaggatgcaagatgtacccacacctgaacgttgccgagatgaccacaactgagactctggttcttggtgtagcaccccagaaagcacactttgagggagctgagatggaattcggggctgagaacggctgcaagtgtggagacaactgcacctgcaacccttgcaattgtaaatgattagagaccaaagccaaagctccctggaagcagagacgcccttgtctttaagaaaaaaatatgtttcgttgtttatgtgttttta

SEQ ID NO: 209954 - DNA, 368 bp, Gossypium hirsutum
  unsure (1)..(368): unsure at all n locations
cccacgcgttcagagtcggctgtggtacctgctttacaacatctanctggtcaaccggctagggcagatgaggttcggacttcgtggatcggggatttgcagtgttatatggatgagcattatctcttgagctgttttgcccaaactggaaaggttgcttctgtaaaagctatccgtaacaatgcaaaccggtcaagtggagggctatggatttattgagaatgttttaagagctgctagggagagagtcttacaaacatacaatggtacacctatgccaaatggtgagagcaacatataggttgaactgtgcattctatatatcaggcaataggctatattagacccctgagttcacaatctttgat

SEQ ID NO: 209955 - DNA, 307 bp, Gossypium hirsutum
gttggactagaaggaggtggaaattcaaagatgaagggaaatggaaccattattggcaaaaacatgatctttagagctgatcaatttgatttaaaaagcttaaacatgcagctggagaagcacctgacctgagtttggtctaggaccattgagaaacaaaggccagctgaggaatgggagattgatttggctaagttggatttaaggaatgttatagctcatggcacctatggaactgttaatcgggccactaatgataataaagatgttgcaggctgttgttgagttcatggctgatctcgttgcc

SEQ ID NO: 209956 - DNA, 341 bp, Gossypium hirsutum
cccacgcgtccggcagcttaggcaaccagagcgcagccatggtgaagtaggcgaaggagtcagagaaacccaccaagacccgcaaggcaaggggcccagaacacaggggtcacttcaagaacacaagggagactgcgatcgctaacaggaagtcggccaaggagaaggctaagacgcatgaggaggacggaacggctcacaaacaggccagacccagcagacgcttcagaggtggtgtaggacgtacagctcaggcaaagaacaggcattcgaatggacaaggacgcgggcctggaaaaacagccaaactcattctagacgggccgaagaatgcagagagc

SEQ ID NO: 209957 - DNA, 414 bp, Gossypium hirsutum
  unsure (1)..(414): unsure at all n locations
tcggaacccaggtgtaccttgcttcctttttggtcactctaccggtggagctgtggttgtgaaggcagcttcccatcctcgtattgaaagaatgctggagggagttgtgctgacctctccagctttgcatgttaaaccagcacatccaattgttggggctattgctcctcttttttctctggttgctcctaagctccagtttaaaggtgcgaacaagaagggcatcccagtttcaagggaccctgccgcactcttggccaagtactctgatcccttggtctacactggtccaataagggcccgaactgggcatgagatattgcgcatttcctcttatttgatgcggaactataagtccgtgacagncccattctttgttctgcatgggactgcagacaaagtcactgatccact

SEQ ID NO: 209958 - DNA, 293 bp, Gossypium hirsutum
aggcacgagccacgcgtgcctataatgaggggggaattcaaagatgaatggaaatggaagcattagtgggggaaacatgagctttagagctgatcaatttgatttaaaaagcttagacatgcagctggagaagcacctgagctgagtttggtctaggaacattgagaaacaaaggccatgtgaggaatgggagattgatttggctaagttggatttaaagaatggtatagctcatggcacctatgggactgtgtatcgtggcacttattattattaagatgttgcacgctgtt

SEQ ID NO: 209959 - DNA, 434 bp, Gossypium hirsutum
gaatggggtagcactggcccaactgatgctgttcactacaacaattggccagaggatgggccttttttcaagaaagactgcggtggctggcatacgccatatggtgaattcttccttacctggtactctcagatgctgttagaacacggggagagaattctatcgtccgcaacatcgatttttgacggtgcaggtgtgaacatctctgcaatagttgcgggaatccactggcattatggaacccgatcccatgctcctgaactcacagctgggtactataacacaaggtaccgagatggttacctcccgatcgctcaaatgctagcacgtcatggtgccgttttcaacttcacttgcatagacatgcggcatcatgagcagccccaagatgccttgtgtgcacctgagaagctagtgaagcaagttgctttaac

SEQ ID NO: 209960 - DNA, 298 bp, Gossypium hirsutum
gcccccgactaatccaccattgcatccaccgacatattctacaccatcgccttctccagcggagcggcctactgatcctaaaccacaaaggagcctagcggctgttcatggcgttgatttttgcaagtcttgcaagtactctgtatccaacaccccattgggagcacatcctatcttgtgcgccgctgtttagtttacatgcgataacaccatatacaagtcactgttcaatgtaaacactgtcaagaatagttcaccttttctgctagcaccgaagaccgtcaccagctttggagcc

SEQ ID NO: 209961 - DNA, 421 bp, Gossypium hirsutum
gcggattaccattctcaggggaaatcatgaaagtcgccagatcactcaagtttacgggttttacgacgaatgtctgagaaagtatggtcgtgctaatgtttggaagatctttacagacctttttgactattttccattaactgctttggtggagtcagaaatattttgtctgcatggtgggttgtccccgtcaattgaaaccttggataatgtaagaaactttgatcgtgttcaagaggttcctcatgaagggcccatgtgtgatttattgtggtctgatccagatgatcgatgcggttggggtatctcgccacgtggcgctggatatacttttggtcaggatatatctgaacagttcaaccatacaaacagcttaaagttgattgctagagctcatcaactggttatggatggatttaac

SEQ ID NO: 209962 - DNA, 379 bp, Gossypium hirsutum
  unsure (1)..(379): unsure at all n locations
cccacgcgtccgaatttatgtgatgtcggcattgttcagccgtatcctcctctctgcgacatcaagggcagctatgtttctcagtttgaacacaccatcctactgcggccaacctgcaaagaagttatatcgagaggtgatgactattaaggtggaagaccaaaaagtttagttggtaatcatctcctcaaatattttgcgaataattttagttgtgtactttttgtgttttttaacataaggaaggtccctaaatagtggatgatacccatgtttgtcacttgtctgtactcttgctttgccgtgtttgatgatagatggtgtgattgagacttgaatcangcaatatatggtgatgggaagactagaattttcattg

SEQ ID NO: 209963 - DNA, 409 bp, Gossypium hirsutum
ctcttctttcctcctagcccaaaaaaaaaaaaccctctttcctttctctcgttctttttcccgttcaatcatgtcttgcttcattagcaaatatgccgatgagttggctaaaaacgctgcttacattggaacccctggaaagggtatccttgctgctgatgaatccactggcaccatcggcaagcgtctttcaagcattaatgtagagaatgttgaagataacaggcgtgctctccgtgagctcctattcacaactccaggagctcttcagtacctcagtggtgttattctctttgaggaaaccctttatcaaaaaaccgcttcgggcaagcccttcgttgatgttttgaaggaaggtggtgtcctccctggcatcaaggtcgacaagggtaccgttgagcttaacgga

SEQ ID NO: 209964 - DNA, 355 bp, Gossypium hirsutum
gtatattttaaggctggcagattcattccagataaagttttcatgatgcagaacaaatgggcggttctaagaagaaagctgctcgtgaactcagtgagatcaacgtcgttgatgaacaagaacttacagaagcttcagctagtattgaaccaaagcatcacaacgacgttgcagatttaataaatagttacaaaagtttatacccaaaatgggtttttgatctcagcaggccttacaccagggactgagttgattctgttggctggaatgattatggggaagagagtatgttttcttgaagcaacttacttctgggctcctttttggcaccggtggtcattacatattctactga

SEQ ID NO: 209965 - DNA, 335 bp, Gossypium hirsutum
gtctattttactgctagccgaaaaaaattaaaccctctttcctttctctggggcttgttccctttcattcctgcctagctacaatagcacatatgccgatcagtggggtttaaacgcagggtcctttggaacccctagcaagcttttaaccagctgatgaggaatccagtgtcaccataggcaagtcgtttacatgctttaatgtagaaaatgttgaagataacaggcgggctctccgtgagctccgatttacaactcctggatctcttcattacctctgtggcgttattctttttgaagaaactctctatcaaaaaaccctttctgacaagccc

SEQ ID NO: 209966 - DNA, 369 bp, Gossypium hirsutum
attctggttaagcgaaagggtctcaagttaaaccctatatctatcatgtattatgttagtccttgcagtgctctttgtctgtttattccttggatctttctggagaaaccaaaaatggatgcccatgggatgtggaaccttcaccctgttgtgctaacgctgaactctatctgcacctttgcactcaacttgtcagttttcctagtgatctcacacactagtgctctaaccattcgcgttgctggagtcgtcaaggattgggtggttgttttagtatcggcccttctctttgcagatacaaagttgacagtcataaatttatttggttatggcatagccattgctggtgtggcggcatacaataatcac

SEQ ID NO: 209967 - DNA, 410 bp, Gossypium hirsutum
cttcggtcccaatcctaccccatctaagaaatctgtccttaccaatctgatacaggagattgaaccactggatgttagccttattcaaaaagatgtaccccccacaactgtgggtgccatgaaaaggactatctcgggaatgttgggtttacttccatctgataggtttcaagtctttatcgaggcactatgggaacctctctccaaattgttggtttcttctatgatgactgcttatacattgagaaatgctgaatataggctttgccttgaacggaaccttggttgtgaaggagatttggaaaatcaaacttcagaaaaggcaaacttcgatttacaagagatgttattggacagtacaaaaataaatgaattttcagagaaaaatgatttgtcctctgaatctgaaa

SEQ ID NO: 209968 - DNA, 431 bp, Gossypium hirsutum
gatttctcgatttttttcgattccatttttgcaatctctatctctaggttttaggtcatggacaaaaaaggggacgattagctgaaagaaagaaaaaaagcaaaaacaatggcgtcgtcaagaggaggaggaagccaacaagtgatcagaacgggggatatggagaagatgagcttacatcagctcatagcagtcaaagaacaagcagatattgaagtcaatctcttacaagacagtcttaataacatacgcgccgtcaccggccgcctcgagaacgcctacgccgttctccacgacctttccctccgccctcaagggaagaaaatgttggttcctctcactgcttccctctatgttcccggcacactcgacgatgccgataacgttctcggtgatattggcactggatacttcgttgagaaaacaatggc

SEQ ID NO: 209969 - DNA, 356 bp, Gossypium hirsutum
cttaggtcccaatcctaccccatctaagaaatctgtccttaccaatctgatacaggagattgaaccactggatgttagccttattcaaaaagatgtaccccccacaactgtgggtgccatgaaaaggactatctcgggaatgttgggtttacttccatctgataggtttcaagtctttatcgaggcactatgggaacctctctccaaattgttggattcttctatgatgactggctatacatcgagaaatgctgaatataggctatgccttgaacggaaccttgtttgtgaaggagatttgtgacatcaaacttcagaaaaagcaaactttgatttacaagagatgttattggaca

SEQ ID NO: 209970 - DNA, 291 bp, Gossypium hirsutum
cttcccaatgcttaaagctcaacaagatgcacatattgaaaaaggctctcgaggaggggttggtatactgacaactcttgtgataaacaacagacagtgtatagggactttggacagacgagctgatattaaggcaattagcgcaggtttacaagagaccacaaagcctgcaatacttttaactgaagatgtacaaactaacgagtgcttagaaaaaaatggtgtttgctgtcaggacaagagtggcaacataactgcatgcacggataccttgcggagaagagtgtgcga

SEQ ID NO: 209971 - DNA, 420 bp, Gossypium hirsutum
cccacgcgtccgcatttgtacaccagcttagaccaaagtgaaatcagaacagaatgagctaagtttctcggagcaatgcaccaactgcgagaaggaggcagtgaatgtatcactggggaacctattgacgtatccatttgtgagagaagcagtggtgaagaaaacagtggccctgaaaggtgcacattacgatttcgtgaatgggaagtttgatctgtggaatctggatttcaagatttcacccactttagcaatatgaggatgcatgcagcatttttttcgactgatcaaagctcttctatttgcttctagtcaaactaaatgcctgccttcagcttttatgtttcttcatgcgcattgctaatcacaaagaataaaagtagtgctggtgttcctatcttgggtcatttaaataattta

SEQ ID NO: 209972 - DNA, 388 bp, Gossypium hirsutum
atcattttctctcatccttctgatttcacgcctgtgtgtacgacggaactggggaagatggcggcttacctgccggagtttgaaaaacgaggggttaagcttctaggtttctcttgcgatgatgtgcagtcacacaaggagtggatcaaagatgttgaagcctacacgcctgggtgcaaggtggcatacccaatcgtggcagatcccaagagagggatcattaagcaacttaacatggtggacccaaatgaaaaagactcttcagggaacgagctcccatctagagctctgcatatcgtgggctctgataacaagataaagctgagcattctgtatgcagcaaccacagggcgaaacatggatgaagtgatgcgggcagtggactcac

SEQ ID NO: 209973 - DNA, 331 bp, Gossypium hirsutum
atcattttctctcatccttcttatttcacgcctgtgtgtacgacggaactggggaggatggcggcttacctgccggagtttgaaaaacgaggggttaagcttctaggtttctcttgcgatgatgtgcagtcacacaaggagtggatcaaagatgttgaagcctacacgcctgggtgcaaggtggcatacccaatcgtggcagatcccaatagagggatcattaagcaacttaacatggtggacccaaatgaaaaagactcttcagggaacgagctcccatctagagctctgcatatcgtgggctctgataacaagataaagctgagcattc

SEQ ID NO: 209974 - DNA, 318 bp, Gossypium hirsutum
atcattttctctcatccttctgatttttttcctgtctgtacgacggaacggggggggatggaggcttacctgccggagtttgaaaaaccaggggttaagcttctaggtttatcttgctatgattagcaatctcacaatgagtggatcaaagattttgaatcctacactgcctggattcaaggtggcctactcaatcgtgtcacattccaatatagtgatcattaagcaacttaacatgttagaccctaatgaaaaacacttttcatggaacgagctcacatctagagcttttgatatcgtgggctttgataacaagat

SEQ ID NO: 209975 - DNA, 374 bp, Gossypium hirsutum
gtaagagtagtggatctgttgtccgtcacattctacagcaatagcaaaaggtgaacatcattgatattgatcctaaaggtggaaggagaatcacatcaaacggtcagcgtgatctggaccaagtagctggaaggattgcggttgccatctgagaaattttaagagagctgttgccgaaggctgtgttaatcaattttcgtgttggtatatccgctacgtgggaattttttttttttaaattttaattttagaaaccaatgtggttggtgtttaactatgaccatgaattttgaattctaatggaagattgaatggtgaagttgcccttctgcatgtttacagctttcattctcaaaaagaaaaaatataaaaag

SEQ ID NO: 209976 - DNA, 272 bp, Gossypium hirsutum
acgctatggatgttccgttctgcggagtctactatctcaacttcgtcagattagtatgggggacaggggacggtatggtaacagagtgtgctagcaatgatattagctttgtttagcgagtcctcagggtagatacgagctggctcgcgatcgccattaacggataactttcccacacataggcacattgcgcacacgacagatccgagagaatgattcaggggggtgtgttttaaaatactaagctgggcttgcttgccaatatcacttat

SEQ ID NO: 209977 - DNA, 471 bp, Gossypium hirsutum
aattccggggcacgacgccacgcgtacgcccacgcatccgcttgaattgtagtatgatgtccaccatgatttgtatcatccatgtggggagtctgtccagggtgcagatcattcacataatcttaatggcattcttcaactgactgaattgagtgaccccgtatatgctgaagcatatgtgactgtccattactatgatattcgtcttgatgacactgatatcaatcaaaccaatgaaactcttcacaacttgcgcttggacttgtctaccatgtgcgatctcgaaacttgttgagcgtacacataactataccgtcgctcctgcttctagcgagctgataaacgctaacatcaacgtgtcttcaactgagactggtgtcatatttgtcaatatcttttacgagacttcacatgtgctcgaaagaactgatgttgttcttaatgacattcatctcgatatattggactaca

SEQ ID NO: 209978 - DNA, 418 bp, Gossypium hirsutum
cccacgcgtccgcccacgcgtccggcggcgaggtgccgattatcatcgaggccacacctatgcaagagggcatgcgggacatgttgtgcacgctgcaactgtgttccaccggggacagccggtaaccaagaaatgtgtccttgctatgctagcttgaccacccacggtggccgacgcaagtgcccttgagtgttaaccgacaatcggaacgaatctttctcttttgatgttgttatgaaattaataaacgtatgcatggtttagttaagaataattctaaaaaaaaaaaaaaaaagtgtcctttgtaaagcacgaatcattttacttaatcactagttttttttagcgatattatatgatgtatgatttcttattttgagtttgaatatataataaataaataatcgaaattttcttt

SEQ ID NO: 209979 - DNA, 419 bp, Gossypium hirsutum
  unsure (1)..(419): unsure at all n locations
gccatgggagccacaaatgcattttgccgattgacaatcggtaatggaccaccccggcaaaccaaggtcgtgaaccacagcactactcccgagtggaaagaaggattcacatgggcttttgatgtgcccccaaagggacaaaaactccatatcatatgcaaaagtaaaaatacttttgggaagacaacattaggaagggtgactattcagatcgacaaagtcgtaacagagggagtatatagtggtttattcagcctgaatcatgatagcaacaaagatgggtcttccagaacgcttgaaatcgagataatttggtccaacaggacagnaaatgatgaaaacatatgaaaggcgtgacatanctcattcttacaagcaccataatgaatcangtgaggacaatatatangagtttggtt

SEQ ID NO: 209980 - DNA, 417 bp, Gossypium hirsutum
cccacgcgtccgcccacgcgtccgcccacgcgtccggggagtcggagttggagtaggagtagtaggagtaggagtaggagtaggagtaggagtcgaagcagaagcagaagcaggagctggtcacgtggtcgtagccgcagctacagccgtagtcctggtcgagggcggagccgaagccatagccgtggccgccgcagtcgaagccgtagtcacagctatgagcggaaggatgttgcaaagcgggcatttgattctcctcctggttccaacgaacataacttgcaacagaaggatgttgcgaagcgagcatttgattctcctcctccttccaacgaacagaactttgagcagaaggatgttgcaaagcatgcatctgattcacctggtgcacaaggcaattcagtgcctgaaaataat

SEQ ID NO: 209981 - DNA, 389 bp, Gossypium hirsutum
cccacgcgtccgggtagatccgaggaagaggaagaaggatataggaagccaagttatggtagatccgaggaagaggcagaaggatataggaagccaagttatggtagatccgaggaagaaggatatggccgcaagaaacatggcgatgacgacagtgatgatgatgatgaagagaagcgtcaccaccaccgctataaggcccaccaccataagcgccatgatgactatgacgactagtcagactggccgttccctctacaaatggaaatctgcagtaatagctattaaataaatgatcgaggcatgccacctttgatcgtttcttctaccatttacgagtgcttattgtgtgtgtgtcagtgtttgatcgtcaataaaatgcccgaaca

SEQ ID NO: 209982 - DNA, 357 bp, Gossypium hirsutum
cccacgcgtccgagtttatgctggttctccgatcgtgttttctgcaaacagatatcgagttggcgaatcaacccccaaggtcatgctttatggcatctcttgaggggtttcaattcatattttgcaaacacgtttttaatgttctgtcctgctcagcaacggggatgggcgccgaacgtcgcttatcttatgggcattctcccgtatgtgaagactgagaaaccgaagacacaatgacaatcggggggggaactctgaaatataagattcctttccccgctatgggaggtaatcaagaaaagcagtgaacaaagcctcaaggattatttattcattgaagtttgttgtcaggatctc

SEQ ID NO: 209983 - DNA, 316 bp, Gossypium hirsutum
ccacgcgtccgaaaaactgctcagcaacagtcggacaggtggggaatgttggggtgaaccagaaaagtttgggtagagcctgatctaaatgttggctaggtaagcgtcctgtgtaagaggagtagttatgaaccctgtagaccatccccatgggggtggtgaagggagggctcctattggtagaaaaatacccgcaaccccttggggttatcctgcacttggaagaataagtataaaagggggtacttttagtgataatttgattcttcgtcgactgagtaaatatgatagaatatatctttcttcgtctttacga

SEQ ID NO: 209984 - DNA, 314 bp, Gossypium hirsutum
agccacgagccacgccacccgtcatacattatgctagttcttttataacagtctattgcaaacagatatcggggttggggcatcaaccccccaggtcaatctttattgcatctcttgataggtttcaattcatatttttcaaacacatttttaaagatctgtcacgctaaacaacctggatgggcgcctaaagtctcttatcttataggcattctcccctatgtgaacatttagaaaccgaaaacacaatgacaatcgaggggagaactctcaaatataatttttctttttcccgtttttggaaggaatttaag

SEQ ID NO: 209985 - DNA, 414 bp, Gossypium hirsutum
caattaagacggtggcgtagaggaaaatgttcaggaaccagtacgatacagacgttaccacatggagtcctgcggggcggttgttccaagtggaatacgcgatggaagctgtgaagcaaggttcagccgcgatcggacttcgatctaagacccatgtagttttgggttgcgtcaacaaggctaactccgagttgtcttctcaccagaaaaagattttcaaagtcgacgaccacatcggcgttgccatcgccggtctcaccgctgacggccgcgtcctttctcggtatatgagaaacgagtgtattaactacaacttcacgtatgaatcgccacttcctgttggcagacttgtcgtccaacttgccgataaagctcaagtctgcacccaacgctcttggaaacgaccttatgggg

SEQ ID NO: 209986 - DNA, 417 bp, Gossypium hirsutum
  unsure (1)..(417): unsure at all n locations
cccacgcgtccgcccacgcgtccgcccacgcgtccgcccacgcgtccgattcattcactcatccctttcttctcttctttcaactcaaagaaaactcccaagtaatattagaatcatgggtgttgtcacttataactatgagtctacctctccagtcgcccctgccaggcttttcaaagctttttctcttgaagctgacaaggtttggcccaaggctgctcctcaggcagtcaagagcgttgaggttgaagctaatcctggccctggaagtatcgtaaagatcaactttgctgaaggccttccattccaatatatgaagcaccagattggaggacatgacgacaagaatttgtcatacagttatagtttgatcgaaggtggacctttggggacaagctngagaaatcagctatgaca

SEQ ID NO: 209987 - DNA, 385 bp, Gossypium hirsutum
gagcaacaaaacagataaacattggatttccaagatgcaaatccagaaggaagaacaggcacgttccagtcttcctggtgaaagcacaatccgggtgataattcatgggcatcatccaagccaaggaacgtctagtgacagattgggaaagctcgtgtatttgcctgactcacttcaagacctcttcaatctagcagagaagaaatttggaaagagagggagcactattcttatggctgatggctcaaaagttgaagaactgaatgttctgagagagaatgatcacttattcgttgtttaaagattaaagtaacttttggcttggtatccatacattgatctgcttaagagatgatgctaaatgtgtaataagttatgcgtcaat

SEQ ID NO: 209988 - DNA, 419 bp, Gossypium hirsutum
cccacgcgtccggttgattttctgcagcataaaacaatgcaaatgatgtatgacataatttacaaggcattggtggaaactggacttgagaatagatatgagcctcatgattttttaaatttcttctgtcttggcaatcgagaagtaggagattctttggttgctagagatgccactgcatcaagtactcctcaggtaaatagaccttttcagctctctttaatattccagtcttgctcatccatgagaaaatatgaaccaaatgttggtaacacaggcacttgctaagaagaaccggcgctttatgatttacatccactctaaaggtatgatagtggatgatgagtatgtcataataggatccgcttacataaaccagcgctcaatggaaggcactagagacactgaaatagcaatgg

SEQ ID NO: 209989 - DNA, 397 bp, Gossypium hirsutum
cgcataccaaaccctagcgcctttatttagtgttgaaaatctcgagcacaagggcggccggtgaactcgcctgtacttacgccgcgttgattctccatgacgatggaatctcaatcaccggcgagaagattgctacattggtgaaggcagcgaacttgagcgtcgaatcttactggccaagccttttcgccaagctcctcgagaaagtcaacgtcgatgatctcatcaccagcgttggctccggtggaggtgctgcccctgttgccgatgatgctgcttatggtgcagctagcggtggtgctgctgcagctgccccggctgttgaggagaaaaaggaataagagaaggaagagagtgatgattacatgggattcagcttgtttgactagacacaatt

SEQ ID NO: 209990 - DNA, 291 bp, Gossypium hirsutum
aagtaaaataatcttgctaacaagctaaactaaaatgccttgccaaagagaaagcggagtgtggtcgaataaaatgttagcatactcaaattttttttccagtagacaagtttgtttatgtgcaggtgagcaatggtgcaattttactgctttgtatcgacagttccattgcatttctcttttagcatattccaggatgccttctctcgatgtttaacatgggcttagacgatgtaaggattgatgtcatttatatttgtaaggatggtgaaatctttatatgattcatga

SEQ ID NO: 209991 - DNA, 378 bp, Gossypium hirsutum
gcctggtcggcgctcctgcttgcggtgatgttatgaagttgcaaatcaaaatcgacgaggagtccggcaaaatcgttgatgcttgctttaaaaccttcggttgtggctcggccattgcctcttcttctgttgctactgaatgggtgaaagggaaaagcatggacgaagtgcttactattaaaaacacggagatcgcgaaacatctatcacttccaccagttaagctgcactgcagtatgcttgctgaagatgcaattaaggcagctgtgaaagatgctgaagctaaacgtggcaaaatgaatggtagttccaaggctgctgatgcctaatgtctgtggatttgctaaggaaagaactctggaaactttgattatcatc

SEQ ID NO: 209992 - DNA, 406 bp, Gossypium hirsutum
gaccaatcccctcgagtttatgaacaagcttttagagtctatgcgggtaacctggcatggggtgtggataatactcgattggaacaaattttcagtgaacatggtaaagtattggaggctcgtgtagtctatgacagggagaccggccgttcgcgcggtttctgttttgtgactatgtcctcggagactgaactgaatgatgccattgctgctctcgatggacagagtctggatggaagagcactaagagtaaatgttgcagagcaaaaaccaaggcgaagcccctcttgagctgaaatgattatagattaagactatatgttgctgatggctttttatttcatatttgccctttcctatttgtatttcttttcattttattaacagttgcgaagctttgtaaata

SEQ ID NO: 209993 - DNA, 392 bp, Gossypium hirsutum
gatcaattcacgaagaacagttattttaatagttcatggcatattgctcgaagctgctttttgatgctttttggtggaacactcgcattctttatggttttaacagagtacatccttgtttctataacaagcgcagttacagtgacaatagctggggttgtgaaggaggctgtcaccatattggttgccgtattttacttgcatgatgagtttacgtggttaaaaggtgctggactcctcactatcatggttggtgtcagtttattcaactggtacaaatacctaaagctgcagaagggcaaactagaagaagatgaagcggcaatagcgctcacagctaatcatgccgctaagtatgtcatccttgacgagatggaggattaagatgatgt

SEQ ID NO: 209994 - DNA, 257 bp, Gossypium hirsutum
ggttgaggcacacaatttcaacccaccaatttacgccttgaccctacatttgatgtttgcttccaagatggggttccctcctgatgaaaatttgatcaaggaaagcgaggaaaagctaggcaaagttctggatatttatgaggagaggctgtcaaagaacaagtacttggccggtgatttcttcagccttgctgatctgagccacctaccatttactcaatacttggtgggtcaaaagggaagggaaatacatgata

SEQ ID NO: 209995 - DNA, 447 bp, Gossypium hirsutum
cttaaccatttcccaaatctcctccctcctcttctttagcgtccttttcatttgcgctcatgcagcgcgctttgaaatccgcaatgagtgctcctacaccgtctgggcagcagcctctcctggtggtggccgtcgcctagaccctcggcaaagttggaccatcgatgtgcctgctggcactgctatggctcgtatttggggtcgaaccaattgcaatttcgatgccagtggtaggggtcattgccaaaccggtgattgtggtggactccttcaatgcaaaggttggggtgtacctccaaacaccctggctgaatatgcacttaaccaatttggaaacatggatttctacgacatttccttagttgatgggtttaacatccccatggtgtttgtccaactaatggcggttgtcacaacattcggtgcactgcagacatcaacggacaa

SEQ ID NO: 209996 - DNA, 345 bp, Gossypium hirsutum
ccagttctaaaatagtttatgatgaatacaaccatgaacgttttcctcctggtgaccccagcaagcgggcatttgcctattttgtcctgacaggtggtaggtttgtgtacgcatctgttatccgtctgctcatcctcaagcttgtcctgagcatgtcagccagtaaggatgttcttgcactggcttctctcgaggttgatctctccagcattgaacctggcagcaccgtaactgttaaatggcgtggaaagccagtcttcatcacgcgccgaactgacgaggatatcaagttagcgaacagagttgatctagggtctcttcgtgatccacaggaggatgcagcaa

SEQ ID NO: 209997 - DNA, 374 bp, Gossypium hirsutum
ataactcttcgaccattcaagctagaagacgccgatgatttcctcttgtttgcaggcgacgatcaagtcaccaattaccttcgatggcaaacactgagctcaaagcaagaagctctggatcacatcaaggatgtatgtattccccatccatggcgtcgatccatatgcaacgacaactgttcgatcggcttcatttcgatctttccgttctccggggaagaagacaggttcaaggctaatattggattcggtgttgcagtcaagtattggggacatgggattgcaacgaaagcagtgaaaatggcagtgcctcagttctttgttgacttcccagatgtggtaaggcttgaagcatttattgatgcacaaaattt

SEQ ID NO: 209998 - DNA, 407 bp, Gossypium hirsutum
gccgaagatggatactctggtgtcgaagtcagagttactcccatgcgtactgagaggattatcagagccactcgtacccaaaatgttctgggcgagaaagggaggaggattagggaactgacctctgttgttcaaaagcgattcaagttccctgaaaatagcgtggagctttacgctgagaaggtcaataacagaggcctttgtgccattgctcaggctgagtcccttcgctataagctcctcggaggtctcgccgtccgtagggcctgctatggtgtgcttagatttgtcatggagagtggagccaagggttgcgatgttattgtagtggaaagctaagggcacaacgtgccaaatccatgaaagttcgaagacggatacatgattttcttctggtcacccagtga

SEQ ID NO: 209999 - DNA, 422 bp, Gossypium hirsutum
gtttgtgagagcttctaatacaccagctataaagatgtatgagaagcttggatatgtaatatacagaagggtgctacgctattattccggagaggaagatgggctagatatgaggaaagcattatctagagatgttgaaaagaaatcaatcataccccttaaacggccagtgacacctgacgaattggagtatgattagatccacttcctatggaacttctccctgctattttttattgtgttgcttcagaacattttcatgtttttgcagagatgggatatcagagagctttaggtatgccaaacatgtggacaagaaaatgttcttagtaatgaacacatttaatgttttcagtgtggttgtgacctttatctttcattgtaccttggatttgtataactcttggattatgcttttatac

SEQ ID NO: 210000 - DNA, 444 bp, Gossypium hirsutum
  unsure (1)..(444): unsure at all n locations
cccacgcgtccgtgccttatttttagcaattacttcccttgttttaggctcaacaatagccagtgatgaatttgatcctgtgcttgacatctcaggtcaagagctccgaacaggcattgactactacattttgccggtaatccgcggtagaggtggtggcctcactctagccagcactggcaacgagacctgcccacttgatgttgttcaagagcagcaggaggtgtcaaacggtctcccattaacattttcacctgtgaatgtcactcaaggcgttgtacgtgtatccactgatctaaacatcaagttctctgctgcttcaatttgtgtccagaccactctctggacactgcacttcgatgaatcggtacaaaagtatatagtaacaaccggtggagttgaaggtaacccanggcgtgaaactctgagcaactggtttaaaat

SEQ ID NO: 210001 - DNA, 407 bp, Gossypium hirsutum
cgcctacaagaacgtgatcggcgctcgccgtgcctcttggcggatcgtttcctccatcgagcagaaagaggaaggacgtggcaacgccgaccacgtctctgtcatccgtgagtacagggccaagatcgaggccgaattgtccgagatttgcgccggaattttgaagcttctcgacgagaagctcgttccggccgccgggaccggtgattccaaggtcttttacctgaagatgaagggagattaccataggtacttggctgagttcaagactggcgatgacaggaaagcggctgccgagaatacgctcactgcgtataaatctgctcaggacattgcgaatgcagagctggccccaactcatcctattcgattaggattggctctcaacttttccgtcttctactatg

SEQ ID NO: 210002 - DNA, 411 bp, Gossypium hirsutum
cccacgcgtccgcccacgcgtccgctaaaaaccctttcactaaaaattgaagatgcagtcaatgaaggatgctgctgcctctgctaaggccggcatggagaaggccaaggcctccatgcaggaaaaggtggaccaaatgaagacaagggaccctaatgagaaagagatggcgagggaaaggaaagaagagagacaagaagatgcagagctgaggaaacaagaggcccgccatcataacgccacggctggccatgctggtggtggtggtattggtggtactggctacaccacagctgggtacaacagaggggatactggtggctatggcggtaccggtggacatgacaaccgtgggtaccccaccgcaggtagtgggtatgatacaggcaggcaagatgacctcagcagtat

SEQ ID NO: 210003 - DNA, 382 bp, Gossypium hirsutum
tgaagttacatataatgtttccataatcaattaggcgacactaaaccctctctgccggcctgctcccttactccattgtggtaagtaaaatggcgacggttccaggacagttgatttgggagatcgtgaagagaaacaactgtttcttggtgaaggagttcggtcgaggcaccgccggcattcagttcagtaaggagagcaacaatctctacaatcttaactcttacaagcactctggtcttgctaacaagaagactgtaactgttcagcctggtgggaaggatcaatcagtgttacttgccaccacaaagactaagaagcagaacaaacctgcaagtgtgcttcataaatcttgtatgagaaaagagtttcctaggatggc

SEQ ID NO: 210004 - DNA, 398 bp, Gossypium hirsutum
cccacgcgtccgagcaaatataccctgaaaaccctttcactaaatattgaagatgcagtcaatgaaggatgctgctgcctctgctaaggccggcatggagaaggccaaggcctccatgcaggaaaaggtggaccaaatgaagacaagagaccctaatgagaaagagatggcgagggaaaggaaagaagagagacaagaagatgcagagctgaggaaacaagaggcccgccatcataacgccacagctggccatgctggtggtggtggtattggtggcactggctacaccacagctgggtacaacataggcgacactggtggctatggcggtaccggtggacatgacaacccggggtaccccaccgcaggtagtgggtatgatacaagcaggcaagatg

SEQ ID NO: 210005 - DNA, 427 bp, Gossypium hirsutum
gctttcgccaagaagacgccgaggcttttcttgctcaggttcgattacggagaagggagctgagaagtaatgctaaagtcgtgccgattacacttgatcaggtatactcactgaaggttgaaggaattgcatttcgttttctaccggatccaattcaaataaagaatgcactagagctgaaatctggtgacatcaaaagtgggttcgatggagttccagttttccagtctgacctccttgttgtgaggaagaaaaacaagcgttactgcccaatatatttcaataaggaagatattgaaaaagaactttcaaaggtttcaagggcatcgagaggacctggtgtttctcagcaaatcatgtattcatttcatccaatatgttggagcaggttggaagcttggaagacgttcttgagaaaatggagatg

SEQ ID NO: 210006 - DNA, 444 bp, Gossypium hirsutum
gtgacttcaccgccggaaacggtaccggaggtgaatccatctacggatccaagttcgctgacgggggcttcatcaagaagcacactggtcccggtattctctcaatggctaacgctggtcccggaactaacggatctcagttcttcatttgcacggctaagactgagtggctcgacggaaagcacgttgtgtttggacaagttgttgaaggcatggatgtggtgaaagccattgagaaagttgggtctagcagtggaagaacttccaagcccgttgttgttgctgactgcggacagctctcttagagaagaaaaagagaactatgtgttaagttgggatgttgtctaatgtctagaatatttaatgtctgtcatttagactcttttatggtgctgtttttatcgtcactgcgtttggggggttttcaggaactttgctttatgt

SEQ ID NO: 210007 - DNA, 417 bp, Gossypium hirsutum
cggacgcgtgggcggacgcgtgggcggacgcgtgggcggacgcgtgggaaaaaactggagacctttaaaagctcttcttctaaaaccctactcccacttcccaaatatcaaaagcgatttgttttctcttcttattcaaatggctccttctttatcattggcacttcctttgcaatccaagaagatttcatgcacaaggcagcagctttccaatatcatatatgtcgtgtttctaattacacttcttgctggctctagttttgccactaggcccggcaaaaccataatttgtggacgatacagtttccatgaccgtgttcccgagaaagttctgagacgggcttttcgattccaaaggacaggatgtttaaacctcttttccccaaaagggattcccctatacccacccttttgggt

SEQ ID NO: 210008 - DNA, 437 bp, Gossypium hirsutum
cccacgcgtccgttcagaacaatggatgcattatcgtatgcttccccaggacttgagggaacgggtgaggcgttatgaccaatacaagtggttggaaacacgtggtgttgatgaagagaacttggtccagagcctcccaaaggatctgaggagagatattaagaggcacctctgtctggctttggttagaagggttcctctgtttgagagtatggatgagagattgcttgatgccatttgtgaacggctgaaaccatgcctgtttactgagagcacctacatagtccgagagggggatcctgttgatgagatgctattcattattcgtggccgtcttgagagtgttacaacagattgtggaaggagtgtgtttttcaaccgtaatttgctgaaagaaggagatttttgtggagaggaacttttactttggcattgga

SEQ ID NO: 210009 - DNA, 255 bp, Gossypium hirsutum
gccacgcgtacagacacatattcattctggaccctgtctctaaagatcgtagaagcaatggaggaagggtgctgatgactttgctaagggcgtcatggggaaagatatcgtctgcatgcaaggaaaggtggaccaaatgaagacaagagacccttatgtgatagatatggcgagggaaacgaaacgaagagagacagaagatgcactgctgatggaacaagaggcccaccatcatatcgcctcaacttaccatgc

SEQ ID NO: 210010 - DNA, 415 bp, Gossypium hirsutum
cccacgcgtccgcccacgcgtccgcccacgcgtccgggtggacccacaaaggaaaagggcggggatgggattacattagagatgggtctgcattatacaaagatatgaaccgtttagaggcctacaacaaagggcttgcaacatgggctaattgggtcgacaccaatgtcgatcaaaccaagaccaaggtcttcttccagggaatttcccctacccactacgagggtagggagtggaaccaaccaaaaaagagttgttatggagaacaagagccactatccggtaccacataccaagcaggggctccaccagctgcttccattgtgaacaaaatattggggtcgatgaacaaaccgggttacttgcttgatattacgacgttttcacaggtgagaaaaagagctcaatctttgac

SEQ ID NO: 210011 - DNA, 354 bp, Gossypium hirsutum
cactaacataccacacaacagccttttgattagcctctttctatttgtcaaaaatgggagacgtcagcagtttctgcaacttctcttctgcttttcatcttcggtttttgcttgcgaggcgcctttggtgattatgggggaggatggcaaggtggccatgctacattctatgggggcggtgatgcatttgtcacaatgggaggcgcttgtggatatggtaacttatatagccaaggttatgggaccaacactgcagcacttatcactgctttgatcaacaatggccttaactgtggttcttgttatgaaatgaggtgtgttagcgacctccaatggtgcctgcctggatccatt

SEQ ID NO: 210012 - DNA, 328 bp, Gossypium hirsutum
cccacgcgtacggaaagatgtcatcgtgttatcacgcttttgcagaatggtgctgggggggtgaattgttcacagccatgcttctgccaagccccattcggaggcaccaaatggagtggctttgggcgtgaactaggggaatggggacttgaaagttacttgagtgtaaaacaggtaacagagtatgtctcacatgaacaatgggcgtggtaccatcctccaaagcattgaacttcaacatggaaatacaaataatatttactgctctaccaaaaataacggtgattaagtgtgctgagagccaatttgatcttgagtatgtatgttt

SEQ ID NO: 210013 - DNA, 394 bp, Gossypium hirsutum
aatacaccgttgcgacgacgaatggtcgcgttgctgcgtttccggtgaaaatgcccatcagatggccactaatggaaaggcagggaacatactatggcacacaaggtcagctgataaaggtcatcgcctggagttactttagcaaaagggttgtatcatatggattacgggtctcagtggttcaagaaagagcacattggcatgcgcgctgcgccatgccttgaattcaaagggaaagttaactcacatccttgatggtgatcatgttcggcatggcctaaaccgcgaccttacttttaaagctgaagatcgggcatagaacattcgaatgattggagaggtggcaaagctcttcgttgatgctggcatcatctgcattgtcagtgtgatatct

SEQ ID NO: 210014 - DNA, 396 bp, Gossypium hirsutum
cacacacttgcggagcacactgatgcggctgttattatagacaatgaagctatgtatgacggttgcaggcgctcatttgacattgagcgacccacttacaccaatcttaaccgactggtttcccaggtgatctcctctttgactgcttcacttaagttcgatggtgccttgaacgtggatgtaacagaattccagaccaacttggtcccttacccaagaatacacttcatgctttcttcatacgctccagtcatctccgctgagaaggcttaccatgagcagctatcagttgctgaaatcaccaatagtgcctttgagccctcatctatgatggccaagtgtgatcctcgccatggcaagtatatggcttgcttgttgatgtaccgcggtgatgtt

SEQ ID NO: 210015 - DNA, 443 bp, Gossypium hirsutum
cccacgcgtccgcccacgcggccgatttgatgttaagacggtcgttagaaacatttatattctcttctgcagaagtgagttacaagtagccggcgacaatgaggagataatggatttggttgatccatcaactccattgcctccatggttcacagaggaagatcttgatgtctatgcaacttcatatcaaaattctggtttccgaaatgcactgcaagttccctacaggtgcattcaattggattgtggtataaccaacccaaaagtgatagctccatcattgctgataatgggggagaaggattatgttatgaaatttccaggaatggaagattacatgaggaaagggatagtgaagcagtttatgcctaatctggacatcactttcatgccagaagggaatcactttgttcaaaaacaacttccagagcacgtgaatgagc

SEQ ID NO: 210016 - DNA, 444 bp, Gossypium hirsutum
cccacgcgtccgctccgcccatcgtctgctctcgccaaaagacacccaaagacaccactttgaaacccggaaatgtcggacgaggagcatcatttcgagtccaaggccgacgccggcgcttccaaaacctaccctcagcaggccggcaccatccgcaagaacggttacatcgtcataaaaaatcgcccctgcaaggttgttgaagtttccacctccaagaccgggaagcatggtcatgcgaagtgtcactttgttggaatcgatatcttcactgccaagaagctcgaagatattgttccttcttcccacaattgtgatgttccgcatgtcaatcgtactgactaccagttgattgacatttctgaggatggatttgtgagtttgctgactgagagtggagacactaaggatgatctgaggctcccaactgatgagaacttattg

SEQ ID NO: 210017 - DNA, 283 bp, Gossypium hirsutum
tcgcagaaacgttatcgacctggaagttttaaccttaccaatgtcatctcatccacggggaggtgtattctgacacagtaccataaaccatgcatgttcttctgtcaaaatagttgcatgacatgcctttgtgttccttcagcgtattaagggaacaaacaagtttgcccttgctacaacaactgtaaaaccaaggaaggaggccctaaatgcccttatattactcaaaaaaagacctctcttttttcttttttacattaataatccctataaatattcctat

SEQ ID NO: 210018 - DNA, 440 bp, Gossypium hirsutum
ggaacctgcagatgctgcaaagtattgtgaggaaaacaaggtgcaaagtgctcttccaaagatcatcaagactggtttctctactattaatctcatatatttcttcacagcaggaccagatgacgttaaatgctggcaaattagacggcaatccaaggctcctcaagctgcaggagccattcatactgattttgagagaggatttatatgtgctgaggtcatgaaatttgaagatctgaaggagcttggcagtgagtcagctgtcaaggctgctggaaaatataggcaggaagggaaaacttatgtggtccaagacggagacataatattctttaagttcaatgtttccggaggcgggaagaagtgaaatgagactctctggtgctgggttcggacttacatccctggattatcaaatccggacgcattttgatcccatc

SEQ ID NO: 210019 - DNA, 437 bp, Gossypium hirsutum
gtctgggtgcaggataatgtgagttggggatggggttttggaattccagccattgctatggcgatagctgttgtatttttcttttcaggtactcgtttgtaccgcaaccaaaagcctggaggcagccctctcacacgcctctgtcaggttgtggtagcctccttcaggaaatgccgagtggccatccctgctgataagtctctcctgtatgagaccacggatgctgaatctaatatcaagggaagccggaaggtcgagcacacagaagatcttagtttcttcgacaaagcggctgtggaaaccgaatcagacgaaaaaaagggtacagtaaactcatggagactttgcacagttactcaagtagaggagctaaaagctgtaattcgcttgcttcccatatgggccaccgggatcatctttgctgcagtctacagtca

SEQ ID NO: 210020 - DNA, 351 bp, Gossypium hirsutum
ctccaaccctcatgataaggaatcaacaattgcgagcttgaaagaatggttagcagatccagcgattggaagcaatgccttattaaggttgattgctggaatcgttttcatgcatgaagaagattatattgaagctcttaaacacaccaatgctggtggcaccatggaacttcatgcattgaatgtgcaaatcttcattaagatgcaccggtcagattatgcagagagacaactgagggtcatgcagcagattgatgaggaccatacactgactcaacttgcaaatgcatggttgaatctagcagtgggtggttcaaagatacaagaagcttatctgatctttcaagattt

SEQ ID NO: 210021 - DNA, 318 bp, Gossypium hirsutum
tcggcctggtcaacctagaccaccttaccttgatgggtcagcaccaggtgactttggggtgcagggattaagactaggtgaggtccctgagaacctagagaggtacaaagaatctgagttgatttactgcagatgggctatgcttgctgttccaggtatattggtaccagaggcctcagggttaggaaactgtgtaaaagctcatgaatgggcagctatttcaggtggccaaaccacttacttagggaacccagtcctatggggttcccttcttaccatctttgtcattgaattcttatctatctgtcttcgttgagc

SEQ ID NO: 210022 - DNA, 310 bp, Gossypium hirsutum
gtcaatctcgaacaatattcgtcaaatgacttgatgcatcactcgatgaggatacggggaggaattccttgcaagaacactttggttcctgtggagagatttctagggtggctataccaacagatcgggattccggtgctgtgaaaggttttgcgtacttggatttcaaagatgagggtagtttgaacaaagctctagaacttgatggatcaacacttaataatcaatccttgttcgtggatgaggcaaaacctaaaggcgattttggcagtggaagacgtggtggtaagagttttggatggagtggagg

SEQ ID NO: 210023 - DNA, 433 bp, Gossypium hirsutum
ctggttttgctttcactgttaacgggtgggtccaatcttacggatctcgctgtgttaagccaccaatcatctatggtgatgttagccgccccaagccaatgactgttttctggtcatcaactgctcaaagcatgactcaacgcccaatgaagggaatgcttactggccctgttaccattcttaactggtcctttgtcagaaatgatcagcccagattcgagacttgctaccagattgccttggccatcaaggatgaagtggaggatcttgagaaggccggtatcaacgttatccaaattgacgaagctgctttgagagaagggttgcctcttcgaaagtccgagcacgccttttacttgaaatgggctgtccactcctttaggatcaccaactgtggtgtccaggacaccactcagatccacacccacatgtg

SEQ ID NO: 210024 - DNA, 445 bp, Gossypium hirsutum
cccacgcgtccgcacggatctctagctcgtgccgggaaggtgagaggccaaactcctaaaggggccaagcaagacaagaagaagaagccccgtggccgcgcttacaagcggatgcaatacaaccgacgcttcgtcacagcagtggttggatttggcaaaaagaggggacctaactcatctgagaagtaagagatctatgtaggtgaagaaggcaagaagccttgttgaaagctttgatggattttaagtctttgttttcttttgataatgtttttatgatattggtttcaaggattggattgaactgccattttgtttgctagatattatgtgatattgttatcaattatcttaatttttggtttactatgagtttcgattcctcttcatccatgctgtaattgacttgccgatccccatcctgcattcactggcgaaactaatt

SEQ ID NO: 210025 - DNA, 452 bp, Gossypium hirsutum
atcattttcttggatttattgataacaaggtagatgaggtttcacacacatttgacgagcatgctccagcaccagccaagcaagtgggtaacctggcccacgatttggtccaaaaggcaacccaaaaggctcagaaactagtagaggaggctcgaaccaatggagcacgaggggctttgcactacgctgcagctgagtacaagaacttggcgttggtaagctcgaccaagttgcgggttaaactgaacagcaacttgactttcaactcactgacagaaaacgttgttcccaaagcagctaatttgtgtgagaaatacaacagttggttaaaggagaagagcgagaaacgatatcctgtggttgggtatttaccatcgattccacgtgatgccgttgggaagcctgttaatgaagctgaacgaaaagagaaagcaaacgcggatgatcataaa

SEQ ID NO: 210026 - DNA, 320 bp, Gossypium hirsutum
catattcgtccgcgacattaccatcttttttaaggaggaactaatcattaactctccgaagggcatctatggtcgttgtgccagtttttacattgcatggggtcctcgtataaccattcattatgtgaccaacattttcattcatggacttaacatccattacttcatgcatggaggtaatgctattgtgagggacttcccacgtcattactgttggcgaaccttatcatattgggattgtgtgtctattttctgtggtagtctttttttgtgtggattatatacttcttgtataatctcatttattgttttttttgatt

SEQ ID NO: 210027 - DNA, 280 bp, Gossypium hirsutum
cccacgcgtccgtgccttatttttagcaattacttcccttgttttaggctcaacaatggcgcagtgatgaatttgatcctgtgcttgacatctcaggtcaagagctccgaacaggcattgactactacattttgccggtaatccgcggtagaggtggtggcctcactctagccagcactggcaaccaaacctggccacttgatgttgttcaagaacagcatgaggggtcaaacgggcttccattaacattttcacctgggaaaggtaactcaaggcgttg

SEQ ID NO: 210028 - DNA, 351 bp, Gossypium hirsutum
cccacgcgtccgcccacgcgtccgggttgaggagcctggtgaaaacctctcatatggggatgaagatgaagaggaggaaagttatgaaggttgctccaaagtcaatgatgaagatgaaactgaagatggcttttttgtaccagatggatatctctcggaagatgagggtgtacaagttgacaggatggaatctgatgttccagttcaggatatccaaagttcccatatcagcaagcaagatgggcggaatgaggagtttagtgcattgcttctgcaacagaagtgtctaaacaatataactgagcatgcactaaggaaaaatcaagtgcttgttatattaaatttgtttca

SEQ ID NO: 210029 - DNA, 435 bp, Gossypium hirsutum
cccacgcgtccgcccacgcgtccgcccacgcgtccgttccccaaggttttttttttttaatcatctctttgagttgatcttttagtgtcggttgactcgtaatcttgttgttctcaaggctggaaccttttacacgaatgacaaaggtttttcccaacgctagttttaccatcggtgatgccatctcggagaaacagccaccgcagcataagctgttaccggcgggtgaagcaaggtcgataattacatggatggcaataagggtgagatccttctcatggatgccagtggcaaccctctcctcactatccgccgcaagaaaatgagcctcggtgatagttggctggttttcgagggagaatccatggagaagccccgactttgcgttaagaaatcagtgaatatcttaagcaagtgcttggcttacgttagctt

SEQ ID NO: 210030 - DNA, 349 bp, Gossypium hirsutum
ggtatatcaattttaacatatgcaccatcaaatgcagtatggtgggcatcttactcaggtgctcaaagacttgtttggggaggcattggatgttacttaaaaggcggcggggatgaaacaattcggcctgattcaaagacggtaatggcggttcaaggagcgagtgcggcaatggcaggtgggatatcggcattgatcacaatgccactcgatactatcaagacccggttacaggtcttagacggagaagagaaccggctgcgcggaccgacaatcgggcaaaccgtgaggatatttgttaaagaaggaggatggcttgcttgttatagagggttgggaccaatgtggg

SEQ ID NO: 210031 - DNA, 437 bp, Gossypium hirsutum
ccataacaagggatggaaaacacacgccatccgtctcaccactaaaccccaactattgtttatcatggcttcctcaactttctcccctgcagctctttcgcagctatgctccggcaagagtggcatgttctgcccatcacaagcgtttcttgtgaaaccaacgaggacccatttggtcaaaaacgaaaagggaatgaggatcacatgccaggccactagcatccccgctgatagagtgccagacatgggcaagaggcagctcatgaatctgcttctgttgggagctatttcactcccctcaggtttcatgttggttccttatgcagcattctttgtcccatctgggggacggggtaccggtggtggcaccgttgccaaggacgcaatcggaaacgatgtaattgctgaagaatggctcaagactcatgggcctgggg

SEQ ID NO: 210032 - DNA, 325 bp, Gossypium hirsutum
gtgattacattggtgtccaagcttcgaagcatgctacctatgtgccacacactgctgggaggtactcaattaagcgtttcatgaacgctcaatgcccaattgttgaaaggcttacaaactcacttatgatgcatggccgaaacaatgggaagaagcttatggcagtcatgattgtgaagcatgccatggatattatttattctttgactgatcagaacccaaattaagtcattggtgatgctattattaacagtgggccacctgaagatgctactcgaattgggtcttcttgtgttgttaaggcgtcaggttgttgatttttttt

SEQ ID NO: 210033 - DNA, 412 bp, Gossypium hirsutum
cccacgcgtccgcccacgcgtccgggcacggcggcgaatatgaacctctgttccaagtgttgccgtgacctccgtgccggggaggagcaagctgccaaggcgaaagctgccatggagaaatccctcagcgttaatacgaagcaggaagatgtcgttgacgagactgtgaagcctgttcttgagcttcctcatgtgggttcctcatcgacggtggtcgagatacaaccggctgctattgtctccgatgataaaccggcggaatccaaggcggcgaacaggtgctttatctgcagaaagaaggttggattgaccgggttcaagtgcaagtgcggaagtacattctgcggcgagcatcgttacccggaaaaacatgagtgctcctttgatttcaagggtactggacgtgatgcga

SEQ ID NO: 210034 - DNA, 345 bp, Gossypium hirsutum
ttcttgagggatgcaaagaacgctgcatcttttattttagatgatcccaataatactggccgcggggttcaacttgctgcacgcaaagagcaatcatcacttcgggctgtcatcaagtgcattgaagagtacaaactcgaggctgacttttcacctgaaaacctcaagaaacgccttgagcagctagagaagaccaagactgataagagaaaaccacgtgtcgtccctgctaacaagcgaacgctgtgtaataaatggggtcccatgcctccctgctaaacctggcccctttaccaatgcatatgtcttatttttttcccggacccttcttcatttttaaaagct

SEQ ID NO: 210035 - DNA, 329 bp, Gossypium hirsutum
cccacgcgtccgggcagatggtatattgggtcacccattcaggcgcctcttttggaggcctgcaatcttccgtgaatgggcagcatccccccctctcatggattggctcgaatcccccactgcccacatcttcaagttcaacgtcccaggatacaataaggaggatataaaagtgcagatacaagatgggaatattatgcatataaaaggagagggtattaaagaggagagtcacacgaaagatactgtttggcatgttgcggagagagggacagggaaagctgaattttctcagaaaattgaattgccagaaaatgtgaagattgagc

SEQ ID NO: 210036 - DNA, 447 bp, Gossypium hirsutum
gaagttattgatgccatgaaggctgccttagagagtgcttgccccaacactgtttcgtgcgctgatattctcgctattgcatctgagcaatctgtcagcaccctggcaggcggtccttcatgggcagttccactaggaagaagggatgggttcacagcaaaccggacactcgccaactcaaacttgccaggtttcaacaatactctcgaccgattaaagaacaggtttagcaatgtggggcttaacaccagcattgatctagtagccttgtctggtgctcacacatttggcagagctcagtgtttaacttttaccagtcgattgtacaattttacgggagtgggtgatacagatccgaccttgaacaccacatacttggaagaactacgccaaatatgcccacagggtggaaatagtagtgtgttgacaaatcttgatcccacaaca

SEQ ID NO: 210037 - DNA, 447 bp, Gossypium hirsutum
agcttcttcccttcagaaaacttcgactgaagctgctccaagattaaagaagcttcaatttataatactctgccccttaaactagcaagcctgatctgctgcataatcgtctaaagaaaatttgatggggataaataagttgctgtgttggtttgcagttttcttctttttgttgggtttctctgcttgcacttcgatttcggatggtgttttcgactctctcacttctactggaaggcacctccttcaagctaagaaagcttgccctgtgaactttgagtttctgaactacacaattatcacaagccaatgcaaaggaccaaagtatccgcctcaaaagtgttgttctgcattcaggggaattgcttgtccttatgcagaacagatcaacgacttgacgactgaatgcgcttcaactatgttcagcttcattaatctttacgggaa

SEQ ID NO: 210038 - DNA, 382 bp, Gossypium hirsutum
cccacgcgtccggggtcaagtacttgtcgagccttctagcccaaaagaccactgcggttcgcattgcttcaggccaacaagtcctaaatattggcaactatgtcgtccgggtaaagattggcactccgggtcagctcatgttcatggtattggacactagcaatgatgtggcttgggtcccatgctccggctgcaccaggtgctcagccaccactttctcacccaacacttcttccacctatggttcgttggattgcggtttgccccaatgcgcccaggtccatgggctgtcgtgcccggctacggggtctgcggcttgctcttttaaccaatcctacggtggagattcatcattttcggccaacttgggtcgagattcctt

SEQ ID NO: 210039 - DNA, 431 bp, Gossypium hirsutum
  unsure (1)..(431): unsure at all n locations
cccacgcgtccgttcagctcgtatactctcccgtgctctagagatgtgtgacaacaagataaaagcagaaactctgattgttgaaggaaatcctaaggataagttatgtgaaattagcgaggaaatgaaagttgacctcctttttgttggcaaccgtggccttggcaggattcaaagagcattcttgggaagtgtaagtgactattgtgcacactacgcanaatgtccagtcctgattgttaagccaccgaaagagatggccggccagtaaaagcaaggattaaaaatgttgacattgaacctggatttaataattaaattttattggttcatggtatcgtccgttttaagtccggtaacttttttataccaaaacaaggttgtcttgagtttgacacctattcatatatatacccatatataccaaggtt

SEQ ID NO: 210040 - DNA, 488 bp, Gossypium hirsutum
gggagaacaggcagtggtaaatcaactctcatacaaacacttttccggatcgttgaacctgcagcagggcacatcataatcgatggtgtaaacatctcatcgatcgggttgcatgatttgcgttcacgactcagcatcatccctcaagagcctaccatgtttgaagggactatacgaagcaacctggaccctcttgaagaatacacagatgaacagatttgggaggcattggataaatgccaacttggggatggagttcgaaacaaggccggccggctcgattcttcagttagtgagaatggagagaattggagcatggggcaaaggcagttggtgtgccttgggcgtgttctattgaagaaaagtaacatcttagtgctcgacgaagctaccgcatcggtggatacagccaccgacaacctaatacagacgacgttaagggagcacttctccgattgtacggtcataacaatcgctcaccgaataac

SEQ ID NO: 210041 - DNA, 423 bp, Gossypium hirsutum
atccaatcctttgaaaaaacattacctgggagacaaggctgcatcataacggggcagctgggacggaggtcagataaactgaatgtccaggaatggcgatggtgataacgtgattatgttgacgaatgattagacatcatcaatatcttgacggacaccatgcaacagatataactacttctgtataaacgtctcatgggcagcttagtttggctgaagcaaggtcgtatggataatgcataaccactgctcaactacgcggtattacgatcataagctctaggaaactcataagtgcactattttcttgtagggctatttgatatcacatgcttgattgtgtgcttgcaactcccgaatgtacatggctttgcatatgaatgtactgtcattgatcatacactgtaccaacacaggtcattt

SEQ ID NO: 210042 - DNA, 490 bp, Gossypium hirsutum
cttcaatccctgcaaagaacattacctgtttgacatggctggatcataacagggcactgggtcaaaggtcagagaaactaaatgtccacgtttctgatgttaataatgtgattatttggggtaatcattcatcatctcaatatcctgatgtcaaccatgcaactgttatgactccatctggagaaaagccgcttcgcgagcttgttaaggatgatgcatggttgaatggagaattcataaccactgtccaacaacgcggtgctgcaatcatcaaagctaggaaactctcaagtgcactatctgctgctagtgctgcttgcgatcacattcgtgattgggtccttggaactcccgagggtacatgggttatcatgggggtttactctgatggttcatacaatgcaccagctggcgtcatctattctttccctgcaacttgtgagaatggagaatggacaattgtccaaggactggcaattgatgaattatc

SEQ ID NO: 210043 - DNA, 490 bp, Gossypium hirsutum
ctttgaattggctagcttttggtttgaatggtgctgagatcgttttcaacccatcagccacggtcggtgaacttagtgaaccaatgtggcccattgaggcacgtaacgcttcaatagcaaacagttactttgttgggtcaatcaatcgtgtagggactgagattttccccaacccattcacctcaggggatggaaagccacaacatccagattttggccatttctatggatctagtcatttttcagcacctgatgcttcctgcacaccatcactctcccgttttaaggatggactgatgatctcagatatggatcttaacctctgtaggcaaccacaacagtggcgacatcttatccgaacaagtccagattttcgcttcccactacactccagtggacagccaactcattcccaccggcaaattcgccaccgtcaaaggaaccccttacgatttcctcaaacctcacacggtgggaagccgaatcaaca

SEQ ID NO: 210044 - DNA, 386 bp, Gossypium hirsutum
ggattatgattcgtcgtataacgagctactaggatggataactactatgcgggagtacgtaccggggactatgattgagttacagacaagaccatattacgacccggacgaccaattacagccaaggaaaagaatttttcatcggatgttctggacgtttgatccatatgtgcgggcattttcctactgcaaactgtttgtgcaggtggataggacctcgctatatgaataatatacacagatcctacttcttgtggttgctcaagacagcaatagaaacatgcttccgatagcagttgccatcgtagataaagagaacttgaaatcttgagaatttttccttaccaatctgtggaggtatattattagcaacgataatatttgca

SEQ ID NO: 210045 - DNA, 359 bp, Gossypium hirsutum
tttatctgcttatagatttttttctctatgttagtcttacttcactcagtttgttggtagctacaaatttcaatttttcatttcactgggtttggaagggttaaactcttgcagggcatagaaagaccaaaagaacctggtttgaagtctttgcgtactgctagacaactcctggagggaatggtgataacagtggagcctggatgctatttcattgatgcattgttggttccagctatggaaagcgcaaacacttcaaagttcttcaattgtgaaatagtggacaaatttaaaaattttggtggagttcgaatagaaagtgatgtgcttgtaacggccaacggtagcaagaacatgac

SEQ ID NO: 210046 - DNA, 419 bp, Gossypium hirsutum
cttcttctcaaggccagacgacgacatggggaggagacctgcaaggtgttatcgccaaatgaagaacaagccatacccaaaatctcgatattgccgtggtgttccggatcctaagatcagaatttatgatgttgggatgaagaaaaaaggtgttgacgagttccctttctgtgtccatcttgtcagttgggagaaagagaatgtctcaagtgaggcgttggaggctgctcgcattgcctgcaacaagtacatggccaaatttgctggaaaggatgcgttccatttgagggtaagggttcatcccttccatgttctgcggatcaacaagatgctttcatgtgctggtgctgataggcttcagactggaatgaggggtgcttttgggaagcctcagggaacatgtgcaagagttgacattg

SEQ ID NO: 210047 - DNA, 482 bp, Gossypium hirsutum
cccacgcgtccggttgatatactggatgatgggtatcgttggcgcaaatatgggcaaaaagtagtgagaggaaatcctaatcctcggagttattataagtgcacaaatgccggttgtcctgttagaaaacacgttgagagggcatctcatgatccgaaagccgttataaccacatacgagggaaaacacaatcacgatgtgccaactgcaaaaactggtagtcatgatacagcaggaccagtagcaatgtgtgggccatcaagggttagatcagaagaaaatgatgccattagccttgatcttggtgttggtattagttccgttcccgaacatgcttcaaatgagcaacaacaattggattctgaactggtccaaagccgcccacaagctggtggttcaagtttcaaatttgttcaaccaactatgatggcatattacggtgctctaaatggcagcatgaatcaatatgtttctagagaaaa

SEQ ID NO: 210048 - DNA, 462 bp, Gossypium hirsutum
caaaagcatgtagggagaagttgcgtagggataggctaaatgacaagtttatggagctgggtgctattttggaacctggaaggcctcccaaaacagacaagtctgctattttggtggatgctgttcgaatggtgacccagctacgagatgaagcccaaaaaatgaaggattcaaattcaagtctccaggaaaggattaaagagttaaaggcggagaagaatgagcttcgtgaggaaaagcagaggctgaaagccgagaaggaaaagctggagcagcaactcaaaaccatgaatgcacaacctagcttcatgcctcctgcgccagcaatccctgctgcatttgctgctgctgcccaaggtcaagctcctgggaacaagttggttcctttctttggttatccaggagtggcaatgtggcaattcatgccacctgcagcagtggatacctcacaggatcatgtac

SEQ ID NO: 210049 - DNA, 488 bp, Gossypium hirsutum
ggaaaagattaagttgccagcttttttgtcaagttaagcacactcaatcctcaaggggctgctgcagaaagaagcaagtaagcgtctgggttgtggaaaaggaggtagtgaggagatcaaacgccatacatggttcaaggccattaactggaagaaattagaggctcaggaggttaggccgagttttctccctgatgttgcaggaaaccactgcgtatctaattttgaggagtgctggactagcatgccggttattgattctccagttgccagtcctacattcggtgagaatccctttaaggggttcacatatgtgaggcctgtcgccttatttcttcagagaaatgcttgatgttcgatggctgtgctatctagcttctctcctttagtttatagaaacaggtaactatatatgaactatatatttatgcttttggacttgtttaaaacgactctgctttctgcatttcgtgttgcagctgatgtta

SEQ ID NO: 210050 - DNA, 363 bp, Gossypium hirsutum
cccacgcgtccgcggatctgagatttcagttgggcagttgcaaggaactgatgtcaggcatggaggtcgccaaagatcaagaactagtagacggaactgttgcacaggagtctggaaaatccatgccgtcatctcaacaggaggaggcagttgtaaagaaaaaatacggagggattatgcccaagaagcctccacttatctctaaggaccatgaacgtgcctactttgactctgcagactgggcacttggaaagcaaggtgttgagaagcccaaaggtccacttcaagccctccgtcccaaattgcagcctacacaacaacaaacacgatataggaagtctccatatgctccatcagatgtcg

SEQ ID NO: 210051 - DNA, 424 bp, Gossypium hirsutum
cccacgcgtccggacatctagctaagcttatcctctcgtcttctcacatcatggccatgcttagagctttcagcacaagaagaaaccgtgatggctatgaaaggttacttcttgaaaccgaagttgaggagcctgtaatttccagcaatggtcaattcgaagcacagttgaagagagctagaagtgtgccagctcgagtttttggcttatccagaaagtttaacggccccgaactggggttgccggagaagtgtcaagagaaatcttcgacaatgaccaactccaacaaaaagggcagcaagtccaagactattcacccacttttcagcctatttgatggtcgtcgtaagaagaaaactacagctaaaccagagtttgctagatatattgagtatctcaaagaaagagggatgtgggacatgaa

SEQ ID NO: 210052 - DNA, 495 bp, Gossypium hirsutum
cggacgcgtgggcggacgcgtgggcttctccagtgaccaaaaaagcttcattgtctcttctatcggaaaccccatggctgctcttaagctagtttgtgctctagtgttgtgcatgttggtggttgagcccattgccacaaccaccataacatgcggcgatgtgacaagcaaagtggccggttgcttatcatacttgcagaacggagggaacgtgccgaaggcttgctgcgacgggatccggtccctgaacaacatggctcgaaccacccctgaccgccaaaccgtgtgtgggtgcttgcaagctgccgctaaggctgtcaaaattaaaagcaacttggctgagaccctcccagccaaatgtagtgtcaacatcccttacaagatcagcacttccactaactgcaaaaatgtgaagtgagatggatgaagagagggttttgcagcaacttgcaggagataaaatatatgattaaaaagaagaagaagaagaatgaa

SEQ ID NO: 210053 - DNA, 497 bp, Gossypium hirsutum
  unsure (1)..(497): unsure at all n locations
cccacgcgtccgaaaagagaaagaaaaaagaaaaaaaaaaggttcagatttcttcgccggtaaaaaacccggaggcgtttctccggcgaggcgttagggtgtagcttccaagtagcatgaaaagtcatcgtcgtcatcgaaaagttgcgacggtgaagaatgattataagcaactagatcgatttgagtcaggtgaaggagataagatgaagaagcaaagatttaagaggaaattgttgaggtacgaagagttaccggattatttgaaagataacgagttcatcttgaattattaccgatgcgaatggccattgaaggacattttattaagcgttttctcattgcacaacgaaacgataaatatctggacgcatttggcagggtttttaatattcgttggattaacggtgttcagttccatggaggattttggagatggaagtttgatcaccagtttttccaaagctcaagtatcangacccgtgatgatgatgatg

SEQ ID NO: 210054 - DNA, 469 bp, Gossypium hirsutum
gcgcccacgcgtccgcccacgcgtccggtttcctggtacgacaacgaatggggttacagttctcgtgtggttgatttgatcgttcacatggcatccaccaaagcatgttgaagtttcttcagggccagtgaagaagttgtgtttctgatctaaagaatatgaggtgtttgagagaagcttcttgttatatggaataaaaaacccaatgattttaccccttcttgcatgtttacatttctggttttgaaggtgtagtgaacaagtttaccagtttgatgttatgaagtaaaatggcgtttatacattcgaaaaaaatataattaaacgtttttattttgttaatctaaaccttatttatcttaatagattagtctggtgttttatttttcgatggattttctgttttcatttccattgaagattttagatattgaagtttgggggtgcctttttttggggttttaatttt

SEQ ID NO: 210055 - DNA, 360 bp, Gossypium hirsutum
gaggcgcactcttaaccattaattattctgcttagctggcacatgctgttaacgggggccttggtgttgtgtttagacttcccgagccgctcaacgaacacgtccctaaccttacctaccctgactacaattagaacgctggtgtcctagaccttgagattactgccggacctgctattatctttcatccccgaagagaggacatgcctcactcaccacctgagggccgagttcctgatgctaccaatggtggtgatcacctgaggcaggtttttagtgctcatttctgtcttagcaaccaatacaattacaatctttatagtggccacactttggcaaggtgccaaaaagagaggtccg

SEQ ID NO: 210056 - DNA, 489 bp, Gossypium hirsutum
attccggaacttccttgttgactggacctacggctattattgctcaagtcaatcttgctattggtgcaacaggggttgtaagtcaagaatgcaagactgtagtttcagaatacggagaaacaataattgacttgctattatcgaaggaccaaccactgaaagtttgctcacaaataggtttgtgttcatttgatggaactcgagatgtaagtatgggaattgaaagtgttgtgaatgagaatgctggaaaagcctctggtaatgtccatgatgcaatgtgttctgtttgtgagatggcagtcatatgggtgcaaagccaacttaaacagaaccagactcaggagcgtatacttgattacgtcaatgagctctgtgaccggttgcctagtccaatgggagaatcagttgttgattgtaacagcctatcttctatgcctagtgtcgccttcacaaatcgtgggaagatacttgagcttacccctgagcagt

SEQ ID NO: 210057 - DNA, 497 bp, Gossypium hirsutum
gggagatcactgattgcaaacacttgctgcttagtgaatcgtgtcactggagtcaaaactaatggaacaaaaaatttcattgtcattgatggcagtatggctgaacttatccgtcctagtctttatgacgcttaccaacacatagaactggtttctcctacacctcctgatgcagacgtctctacctttgatgttgtcggacctgtctgtgaatctgcagatttcttgggaaaagagagagaacttccaaccccagctaaggggaccggcctggtggtgcatgatgcacgtgcttactgcatgagcatggcatcaacatacaatctcaagatgcgccctcctgagtactgcgtcgaagaagatggatcggtgaccaaaatccggcatggggagacatttgaagaccacattcgttttttcgagggtctgtgatttgaacaaaacaagtgtccattttgaggcttgaaattggatattgtttttgcaaaattcatgga

SEQ ID NO: 210058 - DNA, 206 bp, Gossypium hirsutum
cacaccctatcattataaaggtagcaactatcatcctcggaatggatgcatcacatgggtgtgcccctcagcctgatgtgcctacaacaactgcggtggttaactccaggcaatggccattgatttcccgctatatgtgcataatccgtacacagtcttcgaagcttgaaatgatagattctctttttaaaccagttttatgacaa

SEQ ID NO: 210059 - DNA, 363 bp, Gossypium hirsutum
gttttctactcacacggacgggagggagactagaaaaggaagacaacgatggtgtctctgaagttacagaagcggctcgccgctagcgtcctgaagtgtggccgtggcaaggtttggcttgatcctaatgaaatcaatgaaatctccatggccaactccaggcagaatgttaggaaacttgttaaggatggttttatcatccggaagcctaccaagattcactcccgatctcgtgcacgcagaatgaaagaggccaagagaaagggtcgtcattcttgctatggtaagaggaaaggtaccagggaggcaagattgcctacaaagattctttggatgaggagaatgcgagtactaaggcgtttg

SEQ ID NO: 210060 - DNA, 485 bp, Gossypium hirsutum
gcagaggccgcggctttcacttcccttctctcacctcttacagaagccagaagtcagtttagtagcaatggcgtatgctgcgatgaagcctaccaagccgggtttggaggagccccaagagcagattcacaagatccggatcactctctcctctaagaatgtgaaaaacctagaaaaagtttgtgctgatttggttcgcggtgcaaaggataagagactgagggttaagggaccagtaagaatgcccaccaaggttcttcacatcacgaccaggaagtcttcctgtggtgaaggaacaaacacatgggatcggtttgagctccgtgttcacaagcgagttattgacctattcagctcccctgacgtggtgaagcagatcacatctatcaccattgaacccggtgttgaagtagaagtcaccattgcagattcttaaatgtgccttactgctgctttttggcctcacaaggtttttagtttatttg

SEQ ID NO: 210061 - DNA, 388 bp, Gossypium hirsutum
  unsure (1)..(388): unsure at all n locations
ctctttgacctcatcctgcgaactatctgaatatcaagagcttgctggacttgacctgccaaactggggctgatatgataaagggaaagacacccgaagagattcgcaagaccttcaacatcaagaacgatttcacccccgaagaagaagaagaggttaggaaggagaatcaatgggcattcgagtgataagaaaagcctttaatttaatgttgatattattatangttctatgcttttctcgctagggttttcaagttggggaaaaaaattaaagaacattggctntctttttggctaattttgtatatgcattagtgtcttctattctagaggatatttaatatgaaactctccctnctctattatcataatataattagaaattc

SEQ ID NO: 210062 - DNA, 356 bp, Gossypium hirsutum
cccacgcgtccggtgttatacacattcgaccttgttcaccacatacttggaagaactacgccaaagatgcccactgggtggaaatagaagagcgatgacaaatcttgatccaacaacacctgatggtttcgacaataactactttacgaaactacaagataatcgaggctcgcttcgaagtgaacagaatttattttcgactgagggtgctgatacaattgaaattgtgaaatggtttagtagtaatcaaacagctttctttaaaaagctttgtggaatctatcatcagaatgggacatataaatcctctaacaggtgcggtaggagtaactagatcaaattgccgcgccttgaat

SEQ ID NO: 210063 - DNA, 304 bp, Gossypium hirsutum
actatgttaatattaaaagctcgttggacttgcctgccaactggggctatgtggaaaagtaaagacaccccaggagattcccaagaccttcgacatcaagaacgatttcaccccccaagaaaaatatgaagttaagacggagaatcaatgggcattctagtgataggagagcctttcaatctaatgatgatattattataggttctaagctgtacacgcctgggtttcaaggttgggaaaaaacataaaaacattggctattgcttggcttattttgttatatgccattacagccttctattct

SEQ ID NO: 210064 - DNA, 418 bp, Gossypium hirsutum
gagagagagaaacacatagagggagaaatggtttctctgaagctacataagcagctctgggtgagcggtctaaagtgaggaaaaggaaaggtttggctcgatcctaatgaagtcaacgagatctctatggccaactgccggcagaacataaggaagttggataaagatggttttatcatcatgaagccgaccaagatttaatgtcgatcttgtgctcgtcgcatgaaggaagtccagagaaagggacgtcactctggatatggtaagcccaagggttcaagggaggcaatgttgcccacaaagatcttatggatgagaatgaagcatgtacttagacgcctactccgcatgtacatggtattaaatataaatggcatgcacatgtaccatgacatgtacatgaaagtcaagggtaatg

SEQ ID NO: 210065 - DNA, 382 bp, Gossypium hirsutum
ctctttgacctgatactgcgaactgtccgaatatcaaaagcttggtgggcttgacctgccaaactggggctgatatgataaatggaaagacaccccaggagattcgcaagaccttcaacatcaagaacgatttcaccccctatgaagaagaggaggttaggaaggagaatcaatgggcatttgacagatatgaaagcctttaaatttaacgttgatatcattatagaggctatgcttttctcgctaggttttcaagatggggaaaaaaattaagaacattggctttcttttagcttataatgttatatgcattactgtcttctattctagaggatatttcatatgtacttctcccctcctctagtatcataatatcattaga

SEQ ID NO: 210066 - DNA, 398 bp, Gossypium hirsutum
cccacgcgtccgggagcagagaagggccgatccattatgtctaagcgaggaaggggaggtagtgcggggaacaagttcagaatgtcgctgggtttaccggtggcggctacggtgaactgcgcggacaacactggggccaagaacctctacatcatctctgtcaaaggaatcaaagggcgtctcaacaggctcccatcggcttgtgtcggtgacatggtcatggccaccgtaaaaaaaggaaagcccgatttgaggaagaaagtgttgcccgccgtcatcgtccgacaacgcaaaccttggcgtagaaaggacggcgtctacatgtacttcgaagataatgctggtgtcattgtcaatcccaagggagaaatgaaaggatctgctatcactggtcccat

SEQ ID NO: 210067 - DNA, 463 bp, Gossypium hirsutum
  unsure (1)..(463): unsure at all n locations
cccacgcgtccgcccacgcgtacggaaacaccatcaaagcttgcaagtttcaataatggatgaatctggggagtacccaaaggagtactacaccagcaacggcaaccccaggagactgacttcaacatcctcatcttcttcgtcaacgacgagcgttcacgttaccgccttggatggcctcgtcaacgtcaactacctcttcaccatcgacgtctttgtgggcactttctttggccactccgggccaacacagtctcgagaaccgagccccctgcgacgccggcattgacgtagctaaaaagctcttgggcttcgagggcgtctccttcagcttattacttttctcctccctggnggctcagggactaaagctcgccatcaatttgttgaacagcaaagatgtggatgaagctttcagggcacacattaaccttaaagtatcgaggtttgggatgatgggctc

SEQ ID NO: 210068 - DNA, 445 bp, Gossypium hirsutum
gcagccgcagccagcaagcagcagtagcaacagcaggagcggaagaatgtctcacaggaaatttgagcacccaaggcatggttcccttggatttcttccaaggaagcgagcctctcgtcacagaggaaaagtgaaggcattcccaaaggatgaccctaccaaaccttgcaagctcactgcctttctggggtacaaggctggtatgacacacattgtcagagaggtcgaaaaacccggatctaagcttcacaagaaggagacatgtgaagctgttacaatcattgaaacccctcctatggtgattgttggggtggttggatatgtgaagacaccacgtggccttcgctccttgaacaccgtctgggctcagcatctgagtgaggaagtcaagcgccggttctacaagcactggtgcaagtccaagaagaaggcttttgtcaagtac

SEQ ID NO: 210069 - DNA, 369 bp, Gossypium hirsutum
aaaaagggccgaggcacgcgttcgctatgaagtgcacagtgttcacaccatggtttggaagtgcatcgttcattctttcaagaagtacactttgcatgaggatgttggggctgatgattactattgtaggttcgagtataaagctgctaccggtgcctttactcctgaccgagttgctgtgtattgcaaatgtgagatgccttacaacccttatgatctcatggtgcaatgtgagggctgcaaggactggtatcatcccgcttgtgtggacatgacaattgatgaatcaaaaatgttggatcacctttgttgttccgaatgttctgaggatgatccgaaaatgatcacaaaacggatttcattcatcac

SEQ ID NO: 210070 - DNA, 371 bp, Gossypium hirsutum
gaccgatccaaaccctgatgaccctcttgttccggagattgctcacatgtataagactgatcgggcaaagtatgaagccactgctcgtagctggacccagaagtatgccatgggatgacagttgttggtgtgtaatatgtatcagctttcttatgttgccaactgtgtcgaaccattttatgttttcttttggggaagggagggggtgttttttcttaaaggaatttgtcattgtgctttggatatgggaagatatggacattctttttatttattccgcgctttataacttgtgtgaaacccttgtttcgttctcgaagtcgctgtgaaaccctttgtttcgttcaatgtaacaaaaaagtctttggttc

SEQ ID NO: 210071 - DNA, 364 bp, Gossypium hirsutum
cccacgcgtccgcagactcccgcaaaaccctcacgacaaaagaattctcttttctattttgcaccactctcctgcaaaaatgtttcgatccgttgctagatcggccgccggtaagaacctcctccgacgaggatatgcaaccgccgtacctgaacggaaagtcgctgtcttgggcgcagctggagggatcggccaacccttggctctcctcatgaagcttaaccctcttgtttctcaactggctctctatgatatcgctaacactcccggtgttgccgctgatgtcagccacatcaactctagatctgaggttgccggatacgttggtgaagagcaattggggaaagctttggagggatgtgat

SEQ ID NO: 210072 - DNA, 486 bp, Gossypium hirsutum
caagacggagctttgccgctttagtggtgccaagatataccctgggaaaggcatcacagaagttcggggtgaaacccatggcttcctcttttccaattcagaatgcaggaggtacttccacaaccgcctgaagccatcaaaacttacatggacggccatgtacaggaagcaacacatgaaggacattgcccaagaacctgtgaagaataggagacctactgcaaagaagccatactgcagatccattgtgggtgccaccttataggttattcagaagaagaggagtgagaaaccctaagttcgtgatgcagccagggaagctgctatccgagaaatcaaggaaaggatcaagaagactaaggatgaaaagaatgcaaagaaggcagatgtagcatcgaagcaacagaagacacaaggcatgggtaaccctccaaagggtggtgcactcaaaggtcccaagcttggtggtggtggtggaaagcgata

SEQ ID NO: 210073 - DNA, 480 bp, Gossypium hirsutum
atcgtgaatccctacactaccctagaggcttccatcttcaaagctgtgactgaggccttcattaataaagctgctggtaggaacatcaccagggtggctggtgtggccccatttgaggtatgtttcagctcaagaaacattgtagggacacgtttaggagcagcggtgccatcaatagacctcgtgttgcagaacgagaatactttttggaggatttttggagcaaactcgatggtcaagtttagctgggaagtgacgtgtcttgggttcgtgaatggtggctcgaacccacaaacttccattgttattggagggtaccaattggaggacacttttcttcagtttgatttggcaacttcaaagctggggttcagctctacccttttgggtaggcaaactacttgcgccaatttcaacttcacatctaatgcttagatggcatacggcagaaataaattttacaaattataatgttgtgag

SEQ ID NO: 210074 - DNA, 309 bp, Gossypium hirsutum
cccacacatacgtagactcccgcataaccctgaccacaaatgactgccattttatacttgggggcactctcccgcaaaaatgtgccggtgcgccgctagatctgtcagggggagcaacctacgccgacccggatatacaaccggcgtacctgagcggaaagtcgctgtcttgggcacagctggagggatcggacgacccttggctatgctcacgaagctgaaccctgctgtttctcaactgggtctctatgatatcgctgacactcccagtggtgccgctgatgtcagccacattaactttagatctga

SEQ ID NO: 210075 - DNA, 457 bp, Gossypium hirsutum
gtttgcaaaagaggtgacacccgcaaatggaaggctgggacccgaatacgaagtcgacgctaacacagatcccgctactgacgacgaatgcgggtcccagagacggagcggcatggactcagcggctgaaggaggagcataaggctttgatcgcctacacgcagatgaataagtccaacgacaacgattggttacggatatccgcagccaatccggaagggactcgttggaccgggaagtgttggtacgtccataaccttctcaaatacgaatgcgatctccagtttgatatccgcgctacttatccggtcactgctgccgagctcgagctgaccgaactcgatggccagactcagaagatgtacagaggagggaagatttgtctgaccgtgcattttaagccactctgggcaaagaaatgttctaggtttggaatagcacatgcactgtgtttggg

SEQ ID NO: 210076 - DNA, 486 bp, Gossypium hirsutum
cttgtcaggcttctgggcttctgtgtggatcagcaagaacagttgcttgtttatgaatttatgcccaacagcagccttgatgttgtcctctttgatccaaagaaacgtgcacaactcaattggagcaaacgtttaaacattattaatggaattgcaaggggaattctttatctacacgaggattcacgacttaggatcatacatagggacctgaaggctagtaacgtgttgctagattttgacatgaacccgaaaatctcagattttggaatggcaagaatctttgctggagcggacagtgaagctaatacagcacgtatagtcggaacatatggatatattgctccggagtacgccatggagggattgtattcaatcaagtccgatgttttcagctttggagtactcttgcttgagataattacaggcagaaggaatgcaaggttcaatcaaaagaaacatgcccaaacccttgttgcatatgca

SEQ ID NO: 210077 - DNA, 345 bp, Gossypium hirsutum
gcggcaaagggccaacaacttccacaactaattactctcaaagcaattcatcctattccacttgaaaatgtgacattggatggggaagcacttactttggagcccatgcttttaattatgaagaacttgaggaagccactgacaatttcaatccttctaaacaactcggagaaggaggattcggcactgtttattatggcgtactcagggatgggcgagtcgtatcggagaagcacttatacgagaacaatattaagcgtgtcgatcattacatgaacgagatcgaaatactcactcgcatgcttcatacaaacctcatgaagctctatggatgtacctcgagac

SEQ ID NO: 210078 - DNA, 480 bp, Gossypium hirsutum
ggaaattacaatggcaagaagggtttcgagaggcaggggagtcggcgtattgttcgatgaagaaggcgttttcctcgatggtgtttataatccgggagctccatagctatactctgcaaatgcgagagcttttgttttatgaagatttacaagggattctcgttagagttcaaaaagagatgcacgcttcattcgtttggttgttccaacaggtcttttctcatacacccactttgatggtctacgtgatgatcctattagcgaattattcggttcattcaatgggaagcaacgccgctctggcagcaaccgccgctgcgaatccgacgccggggtcttatgttgctgtggttgacgttcaagatcagaaggattccaacttcgattcttcgtcgataaagtcattttcagtgtcgtcatcgagcgggaaaaccgcttccatcggggggaacaacggcggcggtggaaaagtccggtctg

SEQ ID NO: 210079 - DNA, 403 bp, Gossypium hirsutum
cccacgcgtccgggattatctggaagatacccaggtttgatgtcattgaggagcgttgatctttggccagctagttggatggcagttgcctggtacccaatatatcacattcccatgggaaggaccataaaggacttgtccacatgcttccttacttaccacactctatcatcttctttccaagatatggacccggagaatgagattgagggtggcgaaaggaagggaaaggaaggggagtgcatctcccttccaccattcgggatggccacatacaagatgcaaggggaagtgtgggcctcgggcaattcaagacgggaccaagagaggctagtgtcgcttttaagcgtggcagattcgtggctaaagcaactttagggcccacatcatgacttcaactact

SEQ ID NO: 210080 - DNA, 491 bp, Gossypium hirsutum
cccacgcgtactcccacgcgttcgttcacgcgtccgtgattcgtgaggggctacactgtgacccatgcttttcaggaagagcaattgccatgcctaaaatgcttattgatggtgctgtaaagtatgaagatggtacccctgcaactgaagctcagatgtggaaagatgtggagacatttttgtcatgggcggcaaaaccagaaatggaagaaaggaagctgatgggatttaaatggatatttgcattgtcattggccttgcttcaagctgcttactaccgacacttgaggagctcggttctcaaatctagcaggctgggacttgatgttgtgaactagcctactgctccccaagattgtcgatttttagagatatgattcggcaataattgcttatcacgatgttctacgttctgccatgaccaacgtggagggtgagtcttttttatagagctgagaagaaataagctggtcgacacacatgcattaaat

SEQ ID NO: 210081 - DNA, 468 bp, Gossypium hirsutum
  unsure (1)..(468): unsure at all n locations
ctaacacagatcccgctactgacgacgaaggcgggtcccagagacggagcggcatggactcagcggctgaaggaggagtataaggctttgatcgcctacacgcagatgaataagtccaacgacaacgattggttccggatatccgcagccaatccggaagggactcgttggaccggcaagtgttggtacgtccataaccttctcaaatacgaattcgatctccagtttgatatccccgttacttatccggccactgctcccgagctcgagttgcccgaactcgatggcaagactcagaagatgtacagaggagggaagatttgtctgaccgtgcatttcaagccactttgggcaaaaaattgtcctaggtttggaatagcacatgcactgtgtttgggacttgccccatggcttgctgcagagattccgattctcgtcgattccgggatgatcaagcataangatgat

SEQ ID NO: 210082 - DNA, 364 bp, Gossypium hirsutum
ctggaactatctggggaaccgttgttgctacatggtatgatgtgcctcgtgttgagagaagtgttgccatacctgggcttgtaagaacgctaaagatgatgggaaattatggaatgacatttgctgcaattgggggagtctatattggtgttgagcaactgttgcagaattataggatgaagagagactttgtcaatggtgctgttggtggtttcgtggctggggcttccattctcggtttcaaagggaggagcatctcaacagctatttctgccggatcagcactggcattcacctctgcggtgattgatgctggaggtcagactacaaggctggacacagggaaggagtattacccatacac

SEQ ID NO: 210083 - DNA, 457 bp, Gossypium hirsutum
  unsure (1)..(457): unsure at all n locations
cgcggcggtatacgttaacaagccctcccttcttctttttccgacaaaaaacatgagcgcggagcgcgaagggttgctttactaaataatataatgcacgttagcgctttaattttcaataacgggcggatcttgaagaaacaaaccgagcctaaagtaacagcctattacgtttttcaggcccctttacttgatattctattaataaagcactagcacccctatatagtaaaggtattctgctatcaattaaaccgaaagcaaaaatccatcgcgtttcgtatacatcgagacttgtagcttgattctttagtcattccatactgtttagaattgcaggaaatcacncgactcttcctatttctcaatgatatcctacgatcaagacaattcccgttaaactttttcatttcatagaagtgcattcttattcctacatagcaaattgcatttccta

SEQ ID NO: 210084 - DNA, 504 bp, Gossypium hirsutum
tctgaacccaagccaccgatgtatgaaccaccaaagaaggaaaagtccgaaccaaagccaccagtgtatacacctccaaagaaagagaagcctgaaccaaaaccatcagtttatgaaccaccaaagaaggaaaagcctgagcctaagccaccactttatacaccaccaaagaaagagaagcctgaacccaagccaccagtgtatgaaccaccaaagaaggaaaaccctgagcctaagccaccagtttatacaccaccaaagaaagagaagcttgaacctaagccaccagtgtatgaaccgccaaagaaggaaaagcccgagccaaagccaccagtttatgcacctccaaagaaagaaaaaccagaacccaaaccaccagtttatcagcctccgaagaagccaccggtttatgagcctaaaccaccaaagccaccggtttacacaccaccaaagaaagagaagctgaacccatattaataatattattattaataatgaacatta

SEQ ID NO: 210085 - DNA, 411 bp, Gossypium hirsutum
cccacgcgtgcgcaaatcctctcgttacattctggatgcaatatgggaaaagatggagatgttgccctcttctttggattgtcaggtacgggtaagaccactttgtctaccgatcacaacaggtatctgatcggtgatgacgagcattgttggagtgacaatggtgtgtcgaacatcgaaggtggttgctatgccaagtgtattgatctttcaagggagaaggagcctgatatctggaatgccattaagtttggaactgtgttggaaaatgttgttttcgatgaacatacgagagaggtggtttatggtgacaaatcagttacagagaatactcgtgcgggctatccgatcgaatacattccaaatgctaagataccattgctttgagcttctaaaattgtttgaacacat

SEQ ID NO: 210086 - DNA, 376 bp, Gossypium hirsutum
cccacgcgtccgcccacgcgtccgctcacccaaagtgacatgattgctctttcagctgcacacaccgttggattctctcattgcagcaagttttcaaaccggatatacaatttcagccgtcaaagtgcagtagacccgacattgaaccaagcatatgcgacccaactacaacaaatgtgtcctaaaaatgttgatcccagaatagccattaacatggaccctaacacaccacgtgcattcgacaatgtttactacaagaacttgcaacaaggcaagggattgttcacttccgaccaaggtttgttcaccgacaagagatcgaaaccagtcgtagacgcttgggcggctaattcgaatacatttaactccgctttca

SEQ ID NO: 210087 - DNA, 297 bp, Gossypium hirsutum
cgtccggccagcgtcggaccagcgtccgctcaccctaagtgacatgatggctctgtgagctgcacacaccgtgggattctctcattgcggcaaggtgtgaaaccggatatacaataccagcctgccaagtgcaagctacccgcacattgaaccaagcatatgcgacccaacatacagcacatgtgctctaaaaatgctcattccaggacagccctggacatggaccctaacacaccacaggccatcaagcatgtctactacaaggacttgctacaaggcaaggcatcgttcactcat

SEQ ID NO: 210088 - DNA, 215 bp, Gossypium hirsutum
agcagtagctgcagcagcatctattggttacattggtgtaggaactgttgagttcctattgggtgaaagaggttccttctacttcatggaaatgaacactagaattcaggtggagcatcctgttactgaaatgatttcctttgttgacttgaatgaagaacaaattcctgtagctatgggagaaaaactgcgcttcaaacaggaagatattgtgc

SEQ ID NO: 210089 - DNA, 439 bp, Gossypium hirsutum
gaaagcacaaatggaatggctgatcatttattgtatgaagtttttaagacctcactaatcagccttaaacttttgagttcataatgaatgaaatgaacccccggatgaagagaaaatctcccctcccttttactaaaccatggggagtcccgagtagtttaccgggcaaatttagttgtcgtgacgatacctttcttagtggaagattggaaaagacttctcttcatcacgagactgatcggatccgccgtagacacccgagaaacccccacaaggcaggctaaaagagtaagaggacaacaagcaaagagttatgctttcatttctttgttgagattgaaataaagttatttaaaaaagggggtaggtataatgcacgcaagccaagtcaagaaaaggacttccttacttttatttcatagtagtcttaatgactagt

SEQ ID NO: 210090 - DNA, 444 bp, Gossypium hirsutum
cggacgcgtgggccagaatttaatattaaggttctagttgctgctgctgtagccttcaagggtgttgggggtatcctttttatctttggaagcactatcggtgcttatcttctggctctgcaacaggtcattattactcctatattgtacgacttctacaactatgacacggaaaagaaagaatttggcctacttttttcaaagttctcacagaacttggcattgctgggagcattactcttcttcatcggcatgaagaactcaatccccaggagacaactcaagataaaggctcctaaaaccaaaacagtttgaaggaggaacatctggtaaaccaagggtctattgttcaatctctacgttttccttgtatcaaggctttgttcttcaatgtttaggggggaaaaaaggcatactactttcattttgatacttgtaactact

SEQ ID NO: 210091 - DNA, 364 bp, Gossypium hirsutum
ctctagtgttgtgcatgttggtgcgtgagcccattgccacaaccaccataacatggggggatgtgacaagcaaagtggccggttgcttatcatacttgcagaacggagggaacgtgccgaaggcttgctgcgacgggatccggtccctgaacaacatggctcgaaccacccctgaccgccaaaccgtgtgtgggtgcttgcaagctgccgctaaggctgtcaaaataaaaggcaactgggttgaaaccctcccagccaaagtgtagggaaacatcctttacaagaacagcacttccactaactgcaaaaatgtgaagtgagatggatgaagagagggttttgcagcagcttgcaggatataaaa

SEQ ID NO: 210092 - DNA, 446 bp, Gossypium hirsutum
agcagtagctgcagcagcatctattggttacattggtgtaggaactgttgagttcctattggatgaaagaggttccttctacttcatggaaatgaacactagaattcaggtggagcatcctgtaactgaaatgatttcctctgttgacttgattgaagaacaaattcgtgtagctatgggagaaaaactgcgctacaaacaggaagatattgtgctcagagggcattccattgaatgtcgtatcaatgcagaagatgcatttaaagggttcagacccggaccaaggaaaataacatcgtacttgccatctggaggcccatttgttcgaatggatagccatgtttattctgattatgtagttcctccaagctatgattcattacttggaaagcttatcgtatgggctccaacaaaggaaaaagcaattgagcgcatgaaaagggctt

SEQ ID NO: 210093 - DNA, 422 bp, Gossypium hirsutum
gaaagcacaaatggaatggctgatcatttattgtatgaagtttttaagacctgactaatcaggccctgagcccttgagttgataaggaacgaggtgaaccccaccatgaagagaaaatctcccctaccttttactaaaccatggcgagtcccgagtggtctaccgggccaatgtaattgacgtgacgattcctgtcttatgggaagatcggaaaagacttctcttcatcaccagactgatcggaaccgccgcacacacccgataaacccccacacggggggctaaaagagttagaggacaacaagcaaagagttatgctttcatttctttcgtgagattgaaataaaccatatttaaaaaagggggtatgtataatgcacgccggccaaggcaagaaaaggactttctttcttttatttcat

SEQ ID NO: 210094 - DNA, 413 bp, Gossypium hirsutum
agaaatggatgtaaaattgagagacgaacaagccagaaggcaaagaggtctagccagcaaggttaatgcagttgatggtgctaggaaagctaaagttagtgaacgtgctaatcgagcagttcctgcccccgaagcaaatgcagagattcaagcaaacttagataaatggagagtaatgacacaaacaaatgcaaaaagcaagagtgagaaattcccacctccccatcaagatggagctgttgggcatccattagatgcttcacataaagggcctctatctttttccgcaactgacactactttcggctcatcaattttcaactctaagtcatcggaatctgctaaaaatcctggacctgtcgtcggttcttcgagaagaaagaaaaccaataaagacccccaaagggctccgt

SEQ ID NO: 210095 - DNA, 377 bp, Gossypium hirsutum
gacgcacgcgttcgcccacgcgttcgcccacgcgtccgctcacccaaagtgacatgattgctctttcagctgcacacaccgttggattctctcattgcagcacgttttcaaaccggatatacaatttcagccgtcaaagtgcagtatacccgacattgaaccaagcatatgcgacccaactacaacaaatgtgtcctaaaaatgttgatcccagaatagccattaacatggaccctaacacaccacgtgcattcgacaatgtttactacaagaacttgcaacaaggcaagggattgttcacttccgaccaggttttgttcaccgacaagagatcgaaaccagtcgtagacgcttgggcggctaattcgaatacattt

SEQ ID NO: 210096 - DNA, 384 bp, Gossypium hirsutum
ggttggactgagaggacttacaagcaagaggcacatgaagatcgtgctgagatggatgagagggagacaaaacttacaagggaggtaacgatcatgaaatttatgaatcggagagaacagtaggacacacagttacaagtcctggtgatacagtgaagcagggcaaagctctcttcttaagcaacccttgaacgataccgcttttcttcttggtattaccgagttgtatcgagtggtttatgggaaaaaatatgtggcaagccgggtgctggctcaagtatgtagtttttatattattcaggaatagttcaaagtgggtaaattttgggtatttagaacttgcagaaaaaatgggtataacatgattctcttttactatcattt

SEQ ID NO: 210097 - DNA, 395 bp, Gossypium hirsutum
  unsure (1)..(395): unsure at all n locations
ctaaacaccaccaccaccaccaacgccgaacctccaccctctgatccacataacccttttaacaactaccccaaacaggcttcccctttcggtggcgcagcaccttctgtagctgttgctggcggtggtgttggacttgaagggttggatcaacggttgttggcgacggtgtcacctagagttcatagaaggcattcagctgattttatggaaacacctcatttcttaaggtcttgcggtctttgtagacgtcgccttgttcctggccgtgacatctacatgtataggggtgatacagcattttgcagcttagagtgcangcaacagcagatgaaccaagatgaaaaaaaggataaatgttcattaccatccaaaaaacaggcggcggcttttct

SEQ ID NO: 210098 - DNA, 379 bp, Gossypium hirsutum
tttcttcctattcttttactactttcttgcccagacagcggggaggctcaacacttgggaatcattaacaacagggatcgcccaacaggcaaaaggtgtaatagcccccaaagagaaaactccattcataacttttgtcctaggtggccctggtagtggaaaagggactcagtgtataaagatagttgagacatttggattcgcacatttgagtgcaggagatttgttgagaagggaaatagcttctaagagtgcagatggtgccatgattcttaacacacttaaagaaggaaaaattcgcccgtcacacgtgacagtcaaactgatacaaaagagatggtattaagttacaatcacaaaattctcattgatggctttc

SEQ ID NO: 210099 - DNA, 287 bp, Gossypium hirsutum
tttttctttgaaccctaaaataacaccattatgctggacgcgctttaatagttactattcatttcccttcacattatcctataaagccttcttacgttgcatctatgaccaaagacttacatcccaacatcaacagccatggaagcataagacttgatttccccaaagtacaatggatccctgcactaaccattttcaaggctttgctctttaactaataactgctgaccgatccaaaccctgataaccctcttgttccagaaattgcttacatgtatcacaccgat

SEQ ID NO: 210100 - DNA, 282 bp, Gossypium hirsutum
gaccgatccaaaccctgatgaccctcttgtttctgagattgctcacatgtataaaactgagctgggctagtatgaagccactgctcgtatctggacccataaatatgccatgggatgacagatgttggtgtgtaatatgtatcagctttcttatgttgccaactgtgtggaaccattttatgttttctttttgggaagggagggggtgtttttttttaaaggaaattgtcattgtgctttggatatgggaagatatggacattctttttatttattccgcgc

SEQ ID NO: 210101 - DNA, 414 bp, Gossypium hirsutum
cccacatccatcttatataatcccaatttccttttctattaaaaacccagtttttttcttcacccaaattaagacacccagatcctcaaaacccaaaaagaaaccatgaaaaaccaatcgaaaatgctcacgatcgggctagtatcagcctggtactcttccaacataggtgtcttgttgttaaacaagtatttactaagcaattacggcttcaaatacccaatcttcttaaccatgtgtcacatgacagcttgttctttgttaagctacatcgcaattgcatggatgaagatggtttcaatgcagaccattcgatctaaggttcagtttttcaagatcacgactttgagtttagtcttttgcgtgtccgttgtgtttgggaatatttctttaaagtatttgccggtgagtttc

SEQ ID NO: 210102 - DNA, 333 bp, Gossypium hirsutum
ctatgatgtgcagagtgctcacaccattgaagggaagtgcatcgttcattctttcaagaactacactaagcttgaggatgttggggctgaggattactattgtaggttcgagtataaagctgctaccggtgcctttactcctgaccgagttgctgtgtattgcaaatgtgagatgccttacaaccctgatgatctcatggtgcaatgtgagggctgcaaggactggtatcatcccgcttgtgtggacatgacaattgaggaagcaaaaatgttggatcactttgtttgttccgaatgttctgaggatgatctgaaaagatcacaaaacggatt

SEQ ID NO: 210103 - DNA, 448 bp, Gossypium hirsutum
cattggtgtaccgttccccaagagccaacccatgaggatttactctagtttatggaatgctgatgattgggccacaaggggtgggttagtgaaaactgattgggcaaaagcacctttcacagcttattacaggaacttcattgccaatgcttgtgtctggtcaggaagaagttcatcatgcgctaaaactaactcggtctccgccggtgcatgggaaacaaacgaacttgatgcaccaggaagaagaagattaagatgggttcaaaaatatttcatgatttataactattgtactgatttgaaacgtttccctcaaggtgttccaccagagtgtaaacgcccaaggttctaaaatcaaacctctcctcctttccatgtaatatattctttttttcactactttcttactatgtattcaagttgcactcaacttgatgcttggggatgg

SEQ ID NO: 210104 - DNA, 295 bp, Gossypium hirsutum
gcggaccgatccaaaccctgatgaccctgttgtttctgagattgctcacatgtataagactgagggggcggagtatgaagccactgctcgtagctggacccacaagtatgccatgggatgacagctgttggtgtgttatatgtatcagctttcttatgttgccaactgtgtcgaaccattatatgtttccttttggtgaagggagggggtgtctttccataaaggaatttgacaatgatctctgcatattggaagaaatggacattctttttatttattacgggctttataactt

SEQ ID NO: 210105 - DNA, 194 bp, Gossypium hirsutum
gccacggaaaaagctggcgtaaaaaacacctgtgagaataactcacggggtaaaaagcagagcgttcaaaagaatagtgcatgtctcaatgacttcgacagatacaagatcaggttggccaccatcaaaaaagctggagttgtgaggcacagagcctcgctaagattgaaaaaggaaaatgcgccttgaagaga

SEQ ID NO: 210106 - DNA, 446 bp, Gossypium hirsutum
  unsure (1)..(446): unsure at all n locations
ctgcgattaaaggaacgcttaatgtactgacagctgccaaagagcttggtgttaaacgtgtggtggttacgtcttcaatctcctccatgtggccctgcccaaactggccagctgataaaatcagaacagaggattgctggactgatattgagtattgcaagcaaaatgaattatggtatccaatttccaaaacactagctgagaaggctgcatgggaattttccaaggagaaaggtctggatgtggtggttgtgaatccgggcaccgtgatgggtcctaatattcctccaaaccttaatgctagcatggtaatgttgttacgccttctgcaaggcagcacagagacatatcaggactntttcattggatccgtccatttcaaagatgttgcgttagcacacattttggtatatgagaacacatcagcaacagggaggcacatgtgc

SEQ ID NO: 210107 - DNA, 367 bp, Gossypium hirsutum
gccatctctaaactgcacttcagaggtggttctagcccacacaagaggagaaaacatttttccgagttcaatctattggcttgttgatgttcaagatgttgcatatgcacatattcaagcatttgagattccttcagctactggcagatattgcttagtggaaagagttgtagagtttccggagattctgaagaccttgaatgagctttatcctactttgggactcgaaagaaaatgtgaagaacatgacgaccctcttaagcgtatataccaggtgtcccaggagaaagcaaaaacgttgggtctcagcttcactccttgggaaaggagtctccaggaaactgttgaaagcttgaaggagaaagga

SEQ ID NO: 210108 - DNA, 417 bp, Gossypium hirsutum
  unsure (1)..(417): unsure at all n locations
cacgcatacggccacgcgatgggattggcctggtcgggattcaacagatgcagcatgcttgtcctgaatgcagaggctcaattgagatcnccagagaccgccatagatgcccacagtgtnnngggaacacggttactcaggaaaagaaggtgctgggagcccatattgacaaaggaatgagagaaggtcacaaaattacatttgagggacaagctgatgaggctccaaatacaataactggagacattgtttatgtattggaacaaaagaaacaccccctatctgagttgagatttggggacgaactctatgttgtccacaaacacactttgacagaggctctatgtgggtgtcaggtggacctaactcaactagactgcaggcatttcttaatttaattaaaaccaatcgaggtcg

SEQ ID NO: 210109 - DNA, 432 bp, Gossypium hirsutum
atttgagaaaattgcttctactcttatgccagaaaaagattggtccattcgcattgctgcaatgcagagagttgaaggccttgtttctggaggtgctgctgattatccatgtttccggggacttttgaagcagcttgttggcccactaagtgcacagttatcagatagaaggtcaagcattgtgaagcaggcttgccatttattgtgcttcttatcaaaggagttcttgggagaattcgagtcatgtgctgagatgttcatcccagtccttttcaagttggttgtgattactgtgcttgtaattgcagagtctgcagataattgcataaaaatgatgttgcataactgcaaagttgcctgcgtgctttcccgcatagctgattgtgcaaagaatgaccgtaatgctgtactccgtgccaggtgctgtgaata

SEQ ID NO: 210110 - DNA, 432 bp, Gossypium hirsutum
ttccaattcaaggaagttgagggctcagaggaaataatcgaggctgaccttgtcctgctagccatggggttccttggccctgagtcgacactggcggaaaaattaggtgtggagcaagacaatcgatcaaacttaaaggcagagtatggccgcttcacgaccaatgtggatggagtctttgcagctggagattgtcgacgcggtcagtcgttagtcgtgtgggcaatctcagaaggaaggcaagctgctgcacaagtcgacaaatacctgactaaggaagataaggacacaagtgtagagggtgagaaccaagatttcgtcaagcggcaccaagaccttccccaaaagcagcaaactgtcatgaaatagatgatccatcagattgttattgcttgcgacattgggctgaaatggaacccgaatccaatacat

SEQ ID NO: 210111 - DNA, 210 bp, Gossypium hirsutum
gaagttcatcatatttgaaaaagctagtaatagacatggggtattcatttcttagaaagaactgcagggggccttcagttgcactaaacattcctcacatcaatctcattgaagttggaatgatatactatgtctagtgtagtgtggattatgccaagaacctgaaactgttggttcatattattattattattattattattatccaac

SEQ ID NO: 210112 - DNA, 378 bp, Gossypium hirsutum
cccacgcgtccgcccacgcgtccgcccacgcgtccgcaaacactgccttgaaggaaagcaactccgagagtttcgactgttctcagatctaaacgacaacgtttccagatccacaatggcttctacattcagcggcgatgaaacggctccgttcttcggctttctcggcgccgccgccgctcttgtcttctcttgtatgggagctgcatatgggaccgctaagagcggtgtcggtgtggcatctatgggtgtgatgaggccagaattggtgatgaaatcgattgtacccgttgttatggctggtgtcttgggtatttacgggttgattattgctgtcattattagtaccgggatcaatcctaaggcaaaatcgtatta

SEQ ID NO: 210113 - DNA, 377 bp, Gossypium hirsutum
tcggccacgcgtacgcccacgcgttcgctcacccaaagtgacatgattgctctttcagctgcacacaccgttggattctctcattgcagcaagttttcaaaccggatatacaatttcagccgtcaaagtgcagaagacccgacattgaaccaagcatatgcgacccaactacaacaaatgtgtcctaaaaatgttgatcccagaatagccattaacatggaccctaacacaccacgtgcattcgacaatgcttactacaagaactttgaacaaggcaagggattgttcactttcgaccaggggttgttcaccgacaagagatcgaaaccagtcgtagacgcttgggcggcttattcgaatacaattaactccgcttt

SEQ ID NO: 210114 - DNA, 411 bp, Gossypium hirsutum
tgcattttgaagcatgccatatcagattagctcccgtttatatagcattgttgcggggtatgggggacaataacgaggcaaagaactatagctacagcctcgaggtgggtgggaacgggaggaagctgatttggcacggggtgcctaggagcataagggacagtcaccggaagattcgtgatagtttcgatggtctcattatccaacgcaacatggctttgttcttctcaaggggagaccggaaagaattgaagcttagagtgacaggaacgatatggaaagagcatggacggggttgtgcctgtaaatatggcctcattctgttttgtagtgatcccaagcaatatataagagtatctttctagaaacttcatgggacttttggacatgtattatttggtttgtagaagg

SEQ ID NO: 210115 - DNA, 434 bp, Gossypium hirsutum
cccatgcatacaaggcatcgaagcatggcgtcgtagggttgacgaagaggggggccgtggagttaggtgagcatggaactagagttaattgcatttcacctcacgcaactgtgaccccattgttccaaacaacactggggttgctcgataagaagaagggagaggagatgattgcggcttcagctgtgttgaaaggcaccgtattggaacctgaagattttgcacatgcagcactgtatttggcaagcgatgaggctaaattcatcagtggtgttaacgtgcctgtcgatggagggtataatctcagcaatcagtcatggaagatgggatttgcagcacttttttggataaatcaacaagtcctctattttaagctttgaacaatattttctttaatagggaaaattaaaattacccaaaattaaagtacctgt

SEQ ID NO: 210116 - DNA, 249 bp, Gossypium hirsutum
ggtgatgatgatgatgatgatgatggacctcgagaggcagatttggagggaagagttgagaaatacattggtgtgaaagtgaaggtttcctttaccgggcaaggtgagacacaatcaatgaagcaattatcaggaggacagaaaactgttgtagcccttacattaattttcgcgattcaacgatgtgatccggctccattttatctttttgatgagatagatgcagctctggatcctcaataccggact

SEQ ID NO: 210117 - DNA, 354 bp, Gossypium hirsutum
tgagagctcagacacgattgataatgttaaggccaagatccaggataaggaaggaatcccagcagaccagcagaggctgatttttgctgggaagcaacttgaagatgggaggacccttgcagattacaacatccagaaggaatccactttgcacctggtccttcgcctccgcggtggttttaagtgttgtgccgaacacctgtccagttattgttgatgttttaagtttgttatgcttgtgggtcgtatgctgatgtgagctggccactatgcaggggaagcttacaagtaaaaataattgctttttataaacgcttttagttgttttttaggtttgaataagttcgtttttgc

SEQ ID NO: 210118 - DNA, 446 bp, Gossypium hirsutum
gccgcaagcgtcacacaccaagcgcatgtctgtagttgcaaggctgagggagctgaatacactggggggtcatgttgaatcagttgtgaagctgaagggacttgatatcgatactattcagcagcattacacagcttaaagctaaagccaccgcagatgatgacgatatgcattttaatttgagacaaacaaaggatcattcatgatcttccctcccttgctacaaagaaaatgttgatgatgaacaaggcctatggagtacggcctatgttatgagaaaaaaaataatgaaacaggaatttgtattatggtaagtattctaagatggtataggttatgtatgttatgatctctttcggaacacgggataagctagtatagggaagggaaagaagtgttttaccttttttataactgcaaaataacaacaggctttcaattaataa

SEQ ID NO: 210119 - DNA, 380 bp, Gossypium hirsutum
cccacgcgtccgcccacgcgttcgagaatgtccaaggacagtttcctgcgctgatatcgtgtctctttctgctagagatggcattgtcttgcttggaggaccacgcattgagatgaaaaccggtcggaaagatagcaagagaagttaccttccagaggtagaaattaccatccccaaccacaatgattcaatggagttggtgctttcacgctttcaatccattggcatcgacacccaaggagtagtagctttactaggagctcactccgtaggtcgagttcattgtgtaaacttagtacacagactctaccccacagttgatccgacattggaacctgactatgccgaatccttaaagggaggtgtccgacacccgaccc

SEQ ID NO: 210120 - DNA, 434 bp, Gossypium hirsutum
  unsure (1)..(434): unsure at all n locations
ggagacaattgtttgcaggcttgagcataaattacattaagattgttccttcagttgcagtgggattcgcggcatatgacatgatgaaggtttggcttcggattccaccccgacagaaactacaggcagaatcatctggataaacagagatggatttacaatgggttgcaaccaaaatccgaaagaacttggtggtagcattatatgaactaagaaaagtttagcaaccaaaaactagtttcctcaattcattgtgattctttttttctattgagattgttatgttttattgtgggatgcatataaaataccttgtttcccaaaaaaattcatgcttggattttcattatggttggctggagtatagttcttgccnaaaaaaaacttttagaacaaaaaaactttttttactatataaaaaaaaaattataatt

SEQ ID NO: 210121 - DNA, 439 bp, Gossypium hirsutum
caacgcctcctgtatacccaagtcctcccgttgtgaagccacctccagtggagaccccttgtccaccaccaccacctgtgctatatccaccacccccggcacagcaaacatgccccattgacactctcaagctaggcgcatgtgttgatgtgttaggtggcttagtgcacattggtatcggcagcagcgccaaggacacatgttgcccagtgcttcaagggttgctagacttggatgctgctatctgtctttgtaccacaatcaaggccaagcttttaaacatcaatatcataataccaattggccttcaggtcctcatcgactgtggcaagactccacctccaggattccagtgtccagcataaggatagtacccctttttggacaataacatcatgttcatctcatgacaagaagttataattgtcgaaaatttcga

SEQ ID NO: 210122 - DNA, 429 bp, Gossypium hirsutum
cggacgcgtgggttgaaaccgcagtgaaagaggcacttgagtggcttgatgacaaccagagggccgagaaggaagactacgaggagaagctcaaggaggtagaggcagtatgcaacccaatcatcacagctgtgtaccaaagatctggtggagccccaggtggtggatcaactgaagaagatgatgattctcatgatgaactttaaaaaactggtaatgacattttgattgctgaaacaagcaaagcaaagcaaagggtgagaaggatgagagcataggtaggtgagatgaagatatacaggaatttttctccatggtagaagttaaaaaagggagaattatatccccccttgttcggatgttatttttgggggaatgaataccgtttaacggatattatttttttggtttcaaaaaaagcattctttt

SEQ ID NO: 210123 - DNA, 389 bp, Gossypium hirsutum
cccacgcgtccgaggaaatccatcattggtgattttctactctctcggatccctcccctgcgaaacccttggtttctctttggtggaacactatccaaacttacatgaaaaaagcaggcagaagcgatgctcgtattgttttagcaaatcaagtcaccgataggaactattccatcagaaaaattctgaaaaaatctcaagtttccttgttggctaaacgagttcactccgaacccgatggattgacttttgttcttacagccaaagacgtggctgtcgaaggcttttgcacgagcaactgtggattccatgaaccctaaagaaaagtccgcgtttgtatgggttggaaactcggagactcaatgcccaggtcaatgcgcaccgtcaaa

SEQ ID NO: 210124 - DNA, 450 bp, Gossypium hirsutum
cagaggcgttccccaaattacagtttgcttcgacattgatgctaatggcatcttgaatgtctctgccgaggacaagactactggccagaagaacaagtttaccataacaaatgataagggtcggttgtcgaaggaagaaatcgagaagatggttcaagaagccgagaagtacaagtccgaggatgaggagcacaagaagaaggttgaagccaagaattcattggagaactatgcctacaacatgaggaatactatcaaggatgagaagattggttcaaagcttgacccggctgacaagaagaagattgaagatgccattgatggagcaatccaatggttggatggcaaccagctagccgaggctgatgaattcgaggataagatgaaggagctcgagagcatctgcaatcctatcattgccaagatgtaccaaggtgcatgggctgacat

SEQ ID NO: 210125 - DNA, 341 bp, Gossypium hirsutum
cccacgcgttcgctaccacacacttgctaatatttctacttggagtggccgctctaaccactccctctttgggtacccatgagtcctcccaactctgggaagccctctacttctgtttataagcctcctaaagtgaaacccccaccttatgaacataagccacctgtctatgaacctccaaagatggaaaaacctgaacctaaaccaccagtttatacaccaccaaagatagagatgccagatcccaagccaccattatgtgaatcaccaaaaaaggaaaagcccgaaccatagccaccagtttatacacctccaaagaaagagaatgcttgacacaaacc

SEQ ID NO: 210126 - DNA, 436 bp, Gossypium hirsutum
gccattcatgatgcatatttcaatgctgtttttcatgggataaaaaatcggagattcatgggttcaaaggctgaggacgtcatacggtctctgttgaaagagtacctcaatgtttctgaaaaacaaggtcaactttcaagtgccttagaaagtagtgagaaaagaatattaaccggtgaagagaaagatacatgcacaaccaatgcacataatgatggagagagctcgcgccaagagcctgaaaaatgttcttcagaaaatgatggaaaagagatccaaaatcaacttcaggaaagttccacatccaaagatggaaattcttcggtgccacaattcaaaaatgttgttgctattgttgatcctccacgtatgggacttcatcccactgtgatcaaagtgttaagaactcatgctccattacgcaggcttgtgtata

SEQ ID NO: 210127 - DNA, 366 bp, Gossypium hirsutum
cacgcgtccggccacgcgtacggctatgttcgtgctggcgagccccgagaggcttacactctcaccaactgcctgggcgaacatggtgtgcaaccaaacgttgtgatctttacaacatgtgcattaaagggtgacgcactgcgtggccaaatgaatcatgcactgctgcgctttatgagaaaatgtgccatatcagctttaccctcaaactgactacttttgagacacctatatggggatatggtgaagctaaacagcccttgaaaggtcgataaccttcttcggattatggcataaacgggtatttttgcttataggagcaccatacagcttcttgctgatgcttggcgagccatcgttttacta

SEQ ID NO: 210128 - DNA, 451 bp, Gossypium hirsutum
ccactcttcaatttcaagcctcaagagctctctggtatccctcctgaagttgtcaagaaacttattccggagcatgcttgcaagcagaatttattcatggcactgcacacttagcaaccattccaagtttcttgggttcctactagcaaatctgaggccatttgatctgtatcaacataagcaaaagatccctgacccgacttgcagcatcgatgtagtgaaagaagtgttagagaacaagtgagtagaagggaggagaggcaaggctttgaatgctggtgaagctgttttgctgttcattttgtggatgcaattattataagtagtatcaacttgtgttcttaatgtatatgcattggtgatccatagtaatattagaatggtgagaagctatatatgtattttaccatctgctggtaagttttcgtcctgtatctcagctttcttcttc

SEQ ID NO: 210129 - DNA, 374 bp, Gossypium hirsutum
attccttaatttttacagaagatcggcggtttaatcgcagagaatcaaccatgtttaacaggcttttcgggaaacccaagcaggaagcaaatgctctaaccacgttagacaaattaaacgagattaacaaggcatttgagtacatgcttgctggcgagggcctgaggtgcgtgattcgcatggatgcataaggattggctggccatggatgaagggctttttgttaagtatatgtgcattttaagggaataaataatgtaatataatctacatcgctgtgctagctgtaatggtaaacatttatcttatcatgcaaaaaaaagaagtataaacttgtgttcttaatggatatgcattggcgatccataaaaata

SEQ ID NO: 210130 - DNA, 463 bp, Gossypium hirsutum
tcgcccacgcgttcgcccacgcgtgcggcttcgagttcttttaggtgattttctgttagggctggttggtaggtgatggctccaagtcaacctaaaactggcctttctgtgggcttaaacaaaggacatgttgttaccaagaaggaattggctccccacccttctaatagaaaggggaaaactagcaagagagtccactttgtgaggagcctaattcgggaggttgctggtttcgctccgtatgagaagaggataactgaacttctcaaagttgggaaagataagcgtgctttgaaggtggcgaagagaaagctaggcactcacaagcgggccaagaagaagcgtgaggagatgtctagcgttctccgcaagatgaggtcagctggaggtggatagaaaaagaagtgagttgcccttcgattgtgcttaaagcaagtatttagtcttttagatttggtaaatt

SEQ ID NO: 210131 - DNA, 449 bp, Gossypium hirsutum
gtgatgggtcctcgtactattcaacatgaaactgtggtttccgaggctgcagctgcccctgcaccagcaactacttccagtagtttagctggcactgattcatgcagcatccactacaaggcattccaggattgcctgaatagctatggaagcgaactcagcaagtgtcagttctacatggatatgttgactgagtgcaggaagaacacagggtccatgttgggtgcctaaaagtttattcaccattttccttgttatgctattgaaattgtcagcttcggacttgcgctgagatttacccttgtttttctttggttgattgatgaagctgaactcttccataaatctctatgaataaaaaacactctttgagtgatactgttttttaattggtgaacctttgttatcgctaatcaatctcaatatcatttgtactctttcagtaaatg

SEQ ID NO: 210132 - DNA, 454 bp, Gossypium hirsutum
aaatgaacaagcagctaggtttgccaatggaggtgcatatcccccagacttaagccttatgagccaaggctcgtcattatggccagaactatgtgtttggtcttctaaccggttatcgtgatcctcctgctggtatctcgattcgagaaggtctgcattataacccttactttcctggcggtgcaatagctatgccgaaaatgcttaacgatggtgctattgaatatgaagatggtactccagctacagaggcccaaatggggaaagatgtggtgacatttttatcatgggcagctgaaccggaaatggaagagagaaaactgatggggtttaagtggatatttgtgctatcacttgcacttcttcaagcagcttattaccggcgtttgaaatggtcagttttgaaatcccgaaaactggtgcttgatgttgtcacttgattcccttctgttta

SEQ ID NO: 210133 - DNA, 417 bp, Gossypium hirsutum
cccacgcgttcgcggacgcgtgggcaaccacagggcgaaacatggatgaagtgatgcgggcggtggactcactgcagaagacatcgcagtacaaagtggcgacaccggcgaactggaaacaaggggagccggtagtgatttcgccatcggtgcccaacgaggaagccaaaaaaatgttccctcaaggttttgagaccaaaaacctcccatcagggaaggattacctgcgcttcactaacgtctgaattacatatatgatggctaagaacttttgtactgcaacacttgtctttcaagttttactatgtaagcaccgcttgcaatttcggttaaataataataaaaaagttgtacttggttgaaaaaaaattaaaataaccaaccttttctttctctttcattgcatgttaaaatttt

SEQ ID NO: 210134 - DNA, 456 bp, Gossypium hirsutum
acttgaccaaggtcaagcatggcaaatcactgcagcctctggaaccacacaagcccgaatgggggctcgaaccaaatgcaatttcgatgcctccgggaaaggctcatgcgagacaggcgactgcggtggagtcctcgaatgcaagggatacggtaaagctcccaacacactagccgaatacgcaatcgaccaatttgagcaccaagacttcattgacatctccaacatcgatggctttaatgttcctatggagtttagctccaactccccagggtgcactagggttatcaagtgtacggccgacattgtcggacaatgcccgaaccagttgaaggttcccggaggttgtaacgggccttgcccagtgttcaaaactgaagaacattgctgtaattctgggaactgtcaacctaccgacttctcgaggtttttcaaggagaggtgccccgatgctta

SEQ ID NO: 210135 - DNA, 445 bp, Gossypium hirsutum
tctagagcggggtagcatcaatattgatatgggtgaagaggtgaaggctcttggagcatgggcaagcccttctagccgcaaggtagagctggctttgcgggggaaaggtgttacatatgactacatagaagaagacttgagtaacaagagctgtttgcttttgcaatacatctcggttcatacgaaagtcccagttgttcttcacaacgggaaagcaattgccgagtcgattgttatacatgaatacattgaggaaacttggaaaacctatcccatcttgccacaagatcctaacgacaaagccatggctcgattctggatcaatatcattgatggcaagtgctcgtgtgccattacgaaagttgcatttagccctgaagaagagagagagaatgcagtggaagaagcttgtgagtgtttgaaaacactttaaagggcactgaat

SEQ ID NO: 210136 - DNA, 279 bp, Gossypium hirsutum
tgccgttggaccgtttaagaccaaatgctgctcactcatatcgggtttggctgatctcgagggtgatgttgggctttgcactgctataaaagctcatgggttagtggttaacctagacgttcctgtttgattgtctttgctcctcaaatgctgcgaaaagcaaatgcactgcttgttacaagatgagcttaagcaatggttgggagtttcttttacgaagatttatttctctgagcgtgttaaatgcggtgaactgatatgccaagggttcgcataaat

SEQ ID NO: 210137 - DNA, 294 bp, Gossypium hirsutum
gtggtgcagccgtattctacttgcgttttgctgtaacactgcagaacatctttcctacaagtggtgccgcagaacatatgcttcctcagcatttcattgtcattttatgcaggccactcatatgattttggtaattgcagcactcacgcttatcataatttacactgaagcttgtcgccggcttgatctaaccattgtgggatctctagttggtgaacattttttgatatctccccagacagggtacccacaggaactcttcaaagtgacttcatgacacagcttgtttgctat

SEQ ID NO: 210138 - DNA, 458 bp, Gossypium hirsutum
  unsure (1)..(458): unsure at all n locations
cgaagacgatctatattcacgtaagatgtccttgaataagtgtgctccattggttgtagcatctccaaataaaatacaatcatcggcaaatagaaggtgggaaatcggtggaccgcttctacaaccttaacacctttgaaaaacttctcatttgttgcaagtcttaataagcccgaaagaccttgtccacataaaagaaagagaaacaggcttagaggatcgccctgtctaagacctattgtgggtagaaacttttatccaatatgcccattaatgaccactgaataagaaacagtcgttacacatttcataagagcatcaacccatttttgatcaaatcccatttgtatcattatctctcttataaaattccattcgaccatatcatatgctntactcatgttgagcttaattgccatatatcctttcttccctgatctcttatgttttaacatatg

SEQ ID NO: 210139 - DNA, 389 bp, Gossypium hirsutum
agcttgtcttactgtttctagagcagtgccggtgccaggggagagcgtagtgcgcatggcggtggatcaagtcaacatccaaccagttggtgagggtgaatggagtgatattcaggcaacagaggcaagaatagctgatgtgagagagatagccccagagacagaaggaagcagccatgacatttgcgtcgataaccaagcaatcgataagcaccacgagcaatgagcaagctctttccgccagccttgagaaagcattccataatacagatgcttacgatcatagggaactcacgtgatttgggcttatatcttcaagctgctgattttaagctcaataaggagtatattataagctggaacatcccatcccatggaccatgtttgta

SEQ ID NO: 210140 - DNA, 414 bp, Gossypium hirsutum
aaaagaaacaggttacaccaccaaagagatctaatcagaagcaaacaaatgagggccagcgatcatttgatagggttactaaacttcttaacatttttgttatcaacagtaatcctgggtggcggaatatggctaagcagcagagccaacaacatcgattgtctcaagttcttacagtggccattgatagtcatcggagccgaaatcatggtggtttccttggcgggtttcgccggcgcctgttataggaacactttcttgatgtggctttacctcttcgccatgttcttcatcatcgctgcgctcgtcgggttcataatctttgcctacgcggtgactgataaagggtctggtcgcccggtgatgaacaaaggttacttggagtattacttgcgggactactcggggtggctc

SEQ ID NO: 210141 - DNA, 399 bp, Gossypium hirsutum
caaaattctcaaggacctgaagaaagaattttgttgcaatggcaccgttgtccaggacccagaattaggaaaggttattcaacttcaaggagatcagaggaagaacgtctccactttccttgttcaggctggtattgtgaagaaggatagcatcaaaatccacggcttttaagtctcggctacgagagtttccaggagacttaaaaggtctatcatcttctaagccggaagagctacccgatgaagtattagttatttaggtggtgtcatattatctataatgttagtctgatactctgatatattgcatcctatgtttcttgtgctgtcaactctttaagctatatgtgatgttgaatgacaatgataaccgttgcatattatacataaatagttgtc

SEQ ID NO: 210142 - DNA, 439 bp, Gossypium hirsutum
cccacgcgtccgggaggatttgtgactcattgtggatggaattcaaccttggaaggcgtgtgtgctggtgtgcctatggtcacttggccaatatttgcagagcagttctacaatgaaaagttggtgactcaagtcttgaagattggagtggccgttggtgttcagaaatgggtgagactggagggagattttgtggaaaggggagccattgaaaaggcagtgaaggagatcatgaagagtgatagagcagaagcaatgagaaacaaagccaaagcactggccgaaacagcaaaaaaagctgttgaaaaaggagggtcttcttactctgatttggatgctctgattgaagaaataagcttacattctcattaaatccatagacatttcatattgtcggttggttcttcaacttcatgcatgttttgctttactggtaaat

SEQ ID NO: 210143 - DNA, 453 bp, Gossypium hirsutum
gccaccagtttatgcacctccaaagaaagaaaaaccagaacccaaaccaccagtttataagcgctccaaagaagccaccagtgtatgagcctaagccaccaaagccaccggtttacacaccaccaaagaaagagaagccagaacctaaaccaccggtacatgagtctcccaagaaaccaccatatggtcactatccaggacaccctccactggggaagcctcaatagagagatcccatcggctagccatcccaagaactgagctactatggctatatggataaattagtatctatacaataaaagttgcttcctactcatgttctatgttcttgtatgttcttgtatgttatgtaggaatgttttcttttactagcgagaatgcttatggcagtactcattggaatgtctattctatgtcttcttatttttcaatgagcaatattctgatttc

SEQ ID NO: 210144 - DNA, 420 bp, Gossypium hirsutum
ctcgtatcctccatcggctggtgcgtttcgtggggacgttaggtcgtatttggaccctatgataggccacttagcatgggctagaacacccttgcttgccaacatttacacttacttcagctattcaggcaatccaagggatatctcacttccatatgctcttttcacatccccttcacctgttgtatgggatcaaggacgtggataccaaaacctattcgatgcaatgttggattcattatactcggctctcgagaaagccggacagggagggctcgaagttgtggtatcagaaagtggatggccttcagccggtgggttcgggacatcgatcgataacgcggccacttatctatcgaacttaataagacatgtgcaaggaggtaccccaaagaggccaggataagccatagagacata

SEQ ID NO: 210145 - DNA, 273 bp, Gossypium hirsutum
cccacgcgtccggaagaatctaacgttcgaattaatgggcttgtcgcataggcacacaaagttcctgaagaaagatggattatgcatgatggtacaccatggcccggtgataacaccagagatcatccaggaatgatccagggtttcttaggccatagtgggggccttgatgctgagggcaatgagctgtcaaagttgggttatgtttctcgtgaaaagagtccaggctttcaacaccataagaaagctggtgctatgaatgcactcggtcga

SEQ ID NO: 210146 - DNA, 144 bp, Gossypium hirsutum
gaacgcttttttcgttcgctatgtgctgactggatgcgtactcgcgtgatcgatcaatggacgggggaattgcgtgaatgacgagaccggcctaacctaaagtaaaggctcttccctctctggatggcgaatcttgattgactg

SEQ ID NO: 210147 - DNA, 344 bp, Gossypium hirsutum
cccacgcgtccgatttgtcccaatctctggatttgagggtgataacatgattgagaggtcgaccaaccttgactggtacaagggtcccactctccttgaggctcttgaccagatcaatgagcccaagaggccttcagacaagccactccggctcccacttcaggatgtctacaagattggtggcattggaactgtccctgttggtcgtgttgagactggtgtccttaagcctggtatggtagtgaccttttgcccctctggtctgaccactgaagttaagtctgttgagatgcaccatgaagctctctctgaggctctccctggtgacaatgttggattcaacg

SEQ ID NO: 210148 - DNA, 337 bp, Gossypium hirsutum
ggctagtttaagggtgctcttgtgtttctttctctttactgcaagttctgtcaacattgggtgcagccgtagtctgcaaaaagatcatatcgccttgtttgtctttggggattcagtgtatgatcctggaaataataactacatcgacacgattgctcgggcaaattattatccatatggtgaaaccttcttcaaataccccactgggaggttttctgatggtcggttaattccagactttattgccgagtatgcaaatttaccactaattccaccatatcttcaacctgggaatcatgaagttactactggggtcaactttgctttaactggagct

SEQ ID NO: 210149 - DNA, 356 bp, Gossypium hirsutum
acgtgattaacacatttctgggggactgaattcggccctgagttcaaaggataccgggagggggattcataacctactgcctttccgcacatttgtatcaccgtggatgacatgtatgaggcatgtggaagatttcagagacttggagtagagtttgtctaagaaccacacgatagctatgcatgtatcaaggatgcccctcgttactggattgaaatctccgatttgaatggaatttgtgcaatacttggcaatggagcttaagctagtgcttacccagggtcatgcgacaaggatatggtatatgtagggggttgcgaccactgtcatgattatagagtgataacgcatgatat

SEQ ID NO: 210150 - DNA, 398 bp, Gossypium hirsutum
caacatcccggcggcctctttcggcatctctactatgatcggcgttacggtatggatacggatttacgaccgtttaatagttccatggctccaaaagtacaccaaaaaggaaggaggaatcacattactgcaaaagatgagtataggcatggttctcgccataatcaccatggttatatccgccattgttgaagatagaagaagagccttagctttgagtaaccccatcggcatagattcaaagaaacaatcctttttttaattgcaacaatgggggtaaatccctaacttacaataataagacttttcgaaacattcacattaattggtttaatcgaattttactacaaacagttccctgaaaacatgagaagcattgctggatcattcacttttat

SEQ ID NO: 210151 - DNA, 450 bp, Gossypium hirsutum
  unsure (1)..(450): unsure at all n locations
gatataacaaaccgtgcaggcctggaactcattgcagtactcttgataagctatatgctggggagcagaagctttataaggaagtgaaggaggaagaaaccaccaaattggagcgtgaaaggaaattgatgttgcttcaaaagcaagacgaaaaccatgactggagcaagacagagaagatccaatcaagcgttgagaatctggataatgtcctaagacacctgcaaaattcaataagcacgtactgttcgtctatattggagatcatcgatgaggaactttacccccagctggagacattaatatccgggctgatggagatgtggaaaatgatgtacaaatgtcatcgagttcagaaccttatttcacagcagttgaatcatgtgactgatatangcattgacctgaccaccgactctgatcgttaagctacagatcagcttgaaactg

SEQ ID NO: 210152 - DNA, 412 bp, Gossypium hirsutum
caaaaagcgcttctcttttcctcatgaattatttcccaagttacccggttgaaaccgaagcttgcaaagagcattcagcacgactagctgacatgatcggcacctgcttcaaagcagcagggagtatgatgccaaactttttagcagtcaacttctacatgaggagtgatggaggcggtgttttctatgatttggatagcatgaatggccaaagattatgtggatgtaatacaattgctgcttgccaggctggagcaccatttggatcttgcaagaacattacaatgccttcttcaagtccaatgaccaatactgccggaagcttttctggatctgttcaattctcgaaatccgcttcaacaatctattatcctaatcaattcgctatcgggttcttttctattccatggat

SEQ ID NO: 210153 - DNA, 420 bp, Gossypium hirsutum
ctttgtttgaaaccttcatgatcttagtaagcacaggtcgagtaatagccgacgcaggaagcatgacttctgacctcgcgaagggctcagatgcagttggatcagtctttgctatattggatcgatacactagaattgaacccgaagaccctgacggttacaaacccgaaaagatgacaggccatgtagaacttcgcgacatagacttcgcgtaccccgcccgaccagatattattatctttaaaggcttctcactcaaaattgaagcaggtaaatcaacagcattggtaggacaaagcgggtcgggtaagtcaaccatcatcggattaattgagagattctatgatcctcttgagggagcaggaaagattgatggtagagatataaggtcataccaccttatgtcgctaaggaaacaca

SEQ ID NO: 210154 - DNA, 446 bp, Gossypium hirsutum
aaaatcccaaaatagatatcccaaacgtttagccatttccagtaaaaccccaaaacagatttccccaattctctacatttcccctaatccctaaatttcccccaaaatccctaagtttttttaatagttcttcgtttaagtaaagtccttatatttaaaaaaaattcaatttttttcaggtattagggaaagcgattcggccaggtatttcagcatctagagtttctgtcaatgttggagaagagcgttgaaggaatagcttcagatcctaaagtgcacactttcgaggaggttgccaaccacaacaaaaccaaagattgttggctaattatttctgggaaggtttatgatgtaactccgttcatggatgatcatcccggaggtgatgaagttttgctgtcagctactggttactaccattggcttgctgctgtttacttttttta

SEQ ID NO: 210155 - DNA, 330 bp, Gossypium hirsutum
ctcgtttaggccttcaggaacattcctggagttgaggatgccaatgtggagaggcttaatcgtttgaaactcgcccctggtggacaccttgtgcgattcattatttgtaccaaatcatcttacgagaagcttgactcagtttatggaacattcgaaaagcccttacaaaagaagaatgggtatgttatggctcgcactaagatagtaaatgctgatatgggtaggatcattaactacgattaggtacaatgagtgctgaatcctaataagatagataacaatatggcacctttgaagaagaaaccaatgaaaaacttgatgctatgctgg

SEQ ID NO: 210156 - DNA, 224 bp, Gossypium hirsutum
gtggagttgatggtgtgaaggtcgatgtgcaaaacattatcgagacacttggtgctggacacggtggtagagtatctcttacccgcagatacgttcaggcccttgaagcgtcaatttcccgaaacttcccggacaatggatgcatagcatgcatgtgccataacactgatggaatctacagcaccaagcataccgctgttgttagagcttctgatgactttaat

SEQ ID NO: 210157 - DNA, 290 bp, Gossypium hirsutum
attaaaacaggggaagaaaagcagcgtactttgtgaagaattgaaggtttttggatactgggcaagcccttacaggtacatggcacagcttgctttgaagttgtaaggtgtttcttatgagtacactaatgaggatatgcttggcaacaagagcgatttgctcttgaaatacaatgcggttcataagaaaggcccggttcttcttgacaacgggaaaccaattgtagagactcttgttatacttgaatgcattgaggaaacttggaagcataatccctatttggcacaag

SEQ ID NO: 210158 - DNA, 316 bp, Gossypium hirsutum
gagcgtaagggtttagagaagaatatggcggtcaaaaggaagacccccgtcaagtcccgaaacccacatctcattcgtggcgtcggaaagtattccaggtctaagatgtaccacaagcgtgggctttgggcaatcaaggccaaaaacggcggagtttttccccgccatgaccccaaacctaaagcccccgtcgccgtcgccgtcgagaaaccccccaagatttaccctgctgaggatgtcaagaagacccttcttaacaagcgcaagcctaagtccaccaagctgagaactagcattacgcctgggacggtgctga

SEQ ID NO: 210159 - DNA, 441 bp, Gossypium hirsutum
cgaaaaagcactctgctttattatcaatttttctttttgcatttttttccactgaaaaaattctattcgttggaattgaaaacggggacggaatttataggctaactatctttttattaacatggaagttgacgccgatggaaatgggaccattgatttcccggaattccttaacctgatggcaagaaagatgaaagataccgactcagaagaggaacttaaagaagcattcagggtgttcgacaaggaccagaatggtttcatatctgctgccgagctccgtcatgtcatgacaaatcttggtgaaaagcttacagatgaggaagttgatgagatgatccgtgaagctgatgttgatggtgatgggcagatcaactacgatgagttcgtcaaggtcatgatggccaagtaagaacctctctgtctaaccataatcgagcc

SEQ ID NO: 210160 - DNA, 447 bp, Gossypium hirsutum
gccaactgaaaagaatagctcgaccaatgtactcgaatcctcctgttcatggggcaagaattgtcgccaacattgttggggattcagctctcttcaaggaatggaatgctgagatggaaatgatggcagggagaatcaagaatgtgagacataaattgtttgatagtctttcttccaaagataaaagtgggaaggattggtctttcgttcttaagcagatcgggatgttttcgttcacaggcttaaacaaagctcagtgcgataatatgacaaacaagtggcatgtttatatgaccaaagatggaaggatatcacttgcaggattatctttggctaagtgtgaatatctagcagacgccatcattgactcataccacaatgtgagttaacaagataatgaaaaattttactaaaaaaaacatgttgtgataatgtgtttaaactgag

SEQ ID NO: 210161 - DNA, 434 bp, Gossypium hirsutum
caccatggatgaagtgaagctctttgggttttggccaagtccttttagtaaaagggtcatttgggcattaaagcataaaaggcgtggaatatgaatacattgaagaagatctgccttataataagagtgatctgttgttgcagtacaacccagttcataaaaagatcccagtgctcggtcatggaggaaagccaattgcagagtcattggttattctggaatatatagatgaagtgtggccacataatcctttgttgccaaaagatgcttacgagagatccgtatctagattttgggccaaattcattgaggaaaagactcaaccaatgtgggaattctttcgtaaattccgtgaagaacagcaaaaggcaatcgagaacaactatgaaattctgaggacgattgaggaacatggtcttggagacaaaaagttc

SEQ ID NO: 210162 - DNA, 423 bp, Gossypium hirsutum
cccacgcgtacgcccacgcgttcgcccacgcgtacgcccacgcgtccggtctaccacacacttgctaatattgctacttggagtggtggctctcgccactccctcttttggtacctatgagtctcccaactatgggaagccccctactcctgtttataaacctcctaaggtgaaacccccaccttatgaacatcctgtttataaacctcctaaggtgaaacccccaccttatgaacataagccccctgtctatgaaccaccaaagaaggaaaagcctgagcctaagccaccactttatacacctccaaagaaagagaagcctggacccaaaccaccagtatatgaacctccaaagaaagaaaagcctgagcctaagccaccagtttatacaccaccaaagaaagagaagcctgagcccaaacc

SEQ ID NO: 210163 - DNA, 312 bp, Gossypium hirsutum
caatggtcatggttatggcgatcgctacaactgatgctcaaagcatttgcaacatgccagcttcaggtgtgatggcatgcaaaccagcagtgacccgccctaacccttcggcggccacgttaacttgctgctccgtcctttcccacgctgacatgcgttgcctttgctcatataagaactccaagctcttgccttcccttggtatggacccaaaccttgccatgaaattgcctagcttgtgcatgctttctcatctggaaattggtaggtcctggttctcatatttgatctcaaatgtgagggaaaatcatg

SEQ ID NO: 210164 - DNA, 262 bp, Gossypium hirsutum
gtggatccaccatgttcaaagacttccacagaaggttgcagcgggatctgaaaaagattgttgatgctggagtacttgcgtctgatactcggcttggtggggaagtaaaagcacatcctgtggaagttaatgtagttagtcatcctatccaaagatttgcggtatggtttggaggttctgtacttgcatcaacgcctgaattttttgcggcatgtcacacaaaagcggaatattaggaatatggagccagcatttgccgtac

SEQ ID NO: 210165 - DNA, 400 bp, Gossypium hirsutum
tggctgaaaacccgagaaaaatttaagtgactccatatttccttcacagtagggcacagttggaagacgtggttgctatcttcttctccttggccacatctcatacatcgatcctcagtcatcacttttctcaacttcagattggagaaagtggggatgtaatttcacgctattttcgacactgtaattttgatttttgagggcatgtgtaaattccacaatttcctgtagaaacttttagtattggtctgtaaataaaaactaggatctatattagcctcctgtaatagtttataggcactccttactgaaaagtctccagttgcctcccttctccacacttggaagtcttcattggttgactttgaaagcggaatctgcaatattttcctagcaatat

SEQ ID NO: 210166 - DNA, 468 bp, Gossypium hirsutum
ctgaaagctaaaaaggaaacatggtttttttttgagttagtgaaacaatcatggccgacaccttgcttttcacctgcctgctattatttcttgctgccatgcaaggcgtccatgcagtcgactatgccatcaacgacaacaccggcaacagtggcggcggtgttcgtttccgaaccgaaatcggagcccaaagcagcctccaaaccatgtcatccgccacagacttcatctgggacatcttccaacaaaccaacccatccgacaggaaaaacgtcccgaaagtaacactgttcatcgaaaacggcgacggcgtagcctttgccatcaacaacgaaatccatgttaacgccaattacctaggaaactacacaagcgacctgaggaaggaattcaacggggtgctttaccatgaaatgacgcatatttggcagtggaacgggaacggtcaaacccctggggggttgattg

SEQ ID NO: 210167 - DNA, 412 bp, Gossypium hirsutum
aactctaatcaaggaaaacatattgatgcaaattaccaatgcttcacaaatgatcaaactagaaaaagatccacatgctgcatttgcattgatcattgatggaaagactcttgcctatgccttggaggatgatatgaaacagcaattcttaggcttagcagttttatgtgcatctgttatttgctgtcgtgtatctcccaagcagaaggcgctagtgacaagattagtaaaagaagggaccgggaaaaccaccttagcaattggtgatggtgcaaacgatgtcggaatgattcaagaagctgacattggagttggcatcagtggtgtggaaggcatgcaggctgtaatggccagtgacttctctgttgcccaattttgtttcttggaaaggcttctcgttgtccatggacac

SEQ ID NO: 210168 - DNA, 331 bp, Gossypium hirsutum
gatttgaccttttgagaaaaatcctgtgagaatccactctctccataggttcttcaagcagaccctacgatggcggacgacgactataatgatatggacatgggatatgaggatgagccaccagagcctgagattgaagaaggagctgaggaggatttggaaaacaataacaacgatgatgttcctctagaacctatcgaaaccgaagacaaagtagaccaagatgctgaagacaaaactactcgtaaaacatcaaagtatatgaccaaatacgagcgtgctagaatcttgggtacccgagccttgcaaatcagtatgaatgcacctgtta

SEQ ID NO: 210169 - DNA, 300 bp, Gossypium hirsutum
gagcgtaagggtttagagaagaatatggcgtgcaaatttgtgacccccgtcaagtcccggaacccagagctcattcgtggcgtcctaaagtattccaggtctaagatgtaccacaagcgtgggctttgggcattcaaggccaaaaacggcggatttttcccccgccatgaccccaaacctaatgcccccgccgccgctgccggcgtgaaacccgacgagacataccctgatgcggatgtctagaagccccttttgaacaagcgcaagcctaagcccaccaagctgagagctaacattacg

SEQ ID NO: 210170 - DNA, 376 bp, Gossypium hirsutum
tcgcccacgcgtccgcccacgcgtccgcaaggtttggcccattgctgctcctcaggcagtcaagagtgttgaggttgaagctaatcctggccctggaagtatcgtaaagatcaactttgctgaaggccttccattccaatatatgaagcaccagattggaggacatgacgacaagaatttgtcatacagttatagtttgatcgaaggtggacctttgggggacaagcttgagaaaatcagctatgacaacaagtttgaggcagctgcaggtggaagaagcctttgcaagagctcgatgaaattttacactgttggcgactatgtgatcactgaagatgagatcaaggctcaaatcaaagggagtgaaggagtttac

SEQ ID NO: 210171 - DNA, 390 bp, Gossypium hirsutum
aaaaaattgaaacaagaccttcctggccacgcagatgaggtttttgctgttgattggagtccagacggtgagaaagttgcctcaggcggtaaggatagggtgttgaagttgtggatgggctaaaagcctacagataaatggagcctaaagagcatatcccatcaagttgaaatataaacatgtggcgtttgcatcaatggcaacaccatatatttatctgataggatcagtgatacgtgcaactgcaatgaaccaggattgattggtaggaacctttatgtgtgacattgcagttatgcagccatttatcacggctttcaagatttctgagtgtataacaatatatactagcttgacgaaacattgcaaactgatgtaatatcttttttg

SEQ ID NO: 210172 - DNA, 341 bp, Gossypium hirsutum
atcggtatcctctaattttaaacctaagagttttaagttaacgaagcatttgggtcgtttcgaagtaatggaaacttcacgaaaagtaaagaagggagccggaggaaggaaaggcggtggcccgaagaagaagcccgtttcaaggtccgtcaaagccggtctccagttccccgttggtaggatcggccgttatttgaagaaaggaaggtattcacagcgggtcggaaccggagccccagtttacttggctgcagttcttgagtacttggcggctgaagttttggaattggctgggaacgcttcacgtgacaacaagaaaaacaggatcattccaaggcacg

SEQ ID NO: 210173 - DNA, 389 bp, Gossypium hirsutum
tgttctcctttttttctctatttgaacaagcatgggtttaggccataaaatcaggaccggatatgcgaagctcatctttctttcgagactggctcgtcagtctcatgatgctaagactcttccagcattgccctgccaaatcatgaagcaagatggagatagactacgatcccttgcactctttggggcaggggtctcagggcttttgggttgtgctaccatagcttattctgatgaggctgagcatggtttggcggttcctaactatccttggcctcatcaaggcatactaagctcatatgaccatgcttctatgcgtaggggtcaccaggtctaccaacaagtctgtgcttcttgtcattcaatgtctctaatctcatttcgagatc

SEQ ID NO: 210174 - DNA, 456 bp, Gossypium hirsutum
ggaatttcgattagtgaacatagagtggatttactccacctggattggaatataacaacccctccccccaacgttatatagctataacgagggctgcctttctctctctaccgcctgtgtctatctcctgtcaagtgtactccctgccacgcaactctcacagcaactgtaactgtgtgacgaaaccctcgacccaggtatccggtatgtagaagtctcgaaccctggcatcaaagaaagtcactttcagtatggaatgcctcactcaatgaggaagtatattcattacatttgtaagctctctatgtagcgattgaacccatgcttgttatcaaaaatttcgttctcctttggaggtgatcctcctcttcagaggaaatctcatggtggtcagaatgagcgcttgtgggggaagcaaggagagtaatcttctatttgtgaaactatatttcttat

SEQ ID NO: 210175 - DNA, 434 bp, Gossypium hirsutum
cccacgcgtccgggaaaagaagcctcgaagagagaggagggattgacaatgtgaagactcctgatgttcatactttttttcaacacttgattacgtttgggattgttaacgaagaggagttggagctttataggaagcttgttattggctctgcttggaggaaacaaatgcctaagcttgcagtttcgcttggcctcggtgataaaatgcctgacatgattgaagaattgatcagtaaaggacaacagcttgatgcagttcatttcacttatgaagtcagcctcgttgacaggttcccccctgtggccctgctaaaagctttcttgaaggatgcaaagaaggcagcttcatctattttggaagatcccaataatgccggccgggctgcgcaacttgctgcacgcaaagagcaatcagcacttcgggcagtcatg

SEQ ID NO: 210176 - DNA, 333 bp, Gossypium hirsutum
catcgatatgtcaagcaacaaattcgaaggttcaattcctgaaacagttggaaaccttatttctctccaggtgctcaacttttctcacaaccacttaaccggtcatattccttcctcattggggaatttggtagcacttgagtcgctagatctttcttgcaacgagcttgttggggagattccttcggagttgactggtttgaattttcttgaagtgttaaacctgtcagagaaccagctcgttgggctcatacctcaaggaaaacaattcaacacctttcttaacgatttctacgcagcaatatatgactgtgtgggtttcccgtttaaaaa

SEQ ID NO: 210177 - DNA, 401 bp, Gossypium hirsutum
aaggagttgatagagaggcactgtggaggtgtcagaggtgtatgggacaatttacttgcagtaatacctggaggttcatctgttccacttttacccaagcacatatgtgatgatgtcttgatggattacgatgcactcaaggctgtccagtcaggactgggaactgctgcagtaattgtgatggataaatcaactgatgttgtagatgcaatcgcaaggctttcatacttctacaagcatgagagttgtggacagtgcacaccctgcatggaagggactggatggctctggatgatcatggaaagattgaaagttgggaatgcaaagttggaagagattgacatgcttcaggaggtgaccaagcacattgaagggcacacaatttgcgctttgggtgatgc

SEQ ID NO: 210178 - DNA, 395 bp, Gossypium hirsutum
aaacgatgagttgcataggaacgtgctgggcggaagcttggtggtcttagggtcgagaactcgtattggctcaatgaggagtcatcttacaaatactttgaagtcatcttagtggtgcctgcacacaacactatccgatatgacccaggcatgaactggatctgcaatgtggatcacacgcacaggttacgtccatgactgacctctgctggcatgaaatacaggggtcttctaggcaaggggcacttgcaccagacggctcgacctttgaggaggagcccctggaagagaaacatcacactctgacattcggcgctgccgctgatcccctggaccgaacttggtgattttgttgctgctatcttggcttcattactattgtaggttttataaca

SEQ ID NO: 210179 - DNA, 371 bp, Gossypium hirsutum
gccatgactgagatgaatggtgctttttgttcaactaggcctatgcgcatagggccggctactaacaagaagactggtgctgcacagcaatatccagcagcttcatcgcacgggactcagaacgagaatgatccaaataatacgactatatttgttggtaatttggattctaacgtgactgaagaccatttgagagaggtcttcagcccatatggtcagttggtgcatgtgaagattccacaaaacatgcgttgtggatttgttcactttgctgataagagttgtgctgaagaagcactccgaatactgaacgggactcagttgggtggacaacagattcggcttttatggggtcggaacacatcaaacaa

SEQ ID NO: 210180 - DNA, 413 bp, Gossypium hirsutum
atggcccatactgcaacacggaaaattcgacggtaggatgctgaacactgagaaaagacccagggcactctcgaaaaagatgttccatggattcagacccaaaaccacaccgaggacacactgaagtactcgttagccgtctaagtaacatattagcgcgagtagctaggaagttccacgagatcttccaaactgtaattttgatttttgagggtatatcgagaagccatagttttctatagaagtccttgtagtcaatttgtaaagcataagctctaggatcatatgcaatattttgtaatagtttataggagctgcgtactgtgaactcccccgatgcttcgacacttcaaacttgaaagtcttcgtgtggtttttcagccagcgagatactgagaatcatctctgttaca

SEQ ID NO: 210181 - DNA, 396 bp, Gossypium hirsutum
cgcagtgtactagtgaataggaaaagcggattgatattactaatgacagatggaggttgaggatagaacatgttcggtgcctcgcccttgtctccttcgccggagactcaaaatgataggaatcctatcgataaagaagaggcataggcatcgcctctcgatccaatccgtcttccctggcctccccaacacactcttgatacgaaataaacctcccgccatagagaagagatctaaagtctgggtcccctcgatcacccttcccttgaacctgaactggtcgagagagatgaacccgcaccacattttttaaccttcgaaccgaaacccccaactagagatgtaattccataacctaaacaactcagttgagagctccgtgactggttcaaggga

SEQ ID NO: 210182 - DNA, 400 bp, Gossypium hirsutum
cccacgcgtccgattcgctagcggagagcatcatcgttattttggattgaagactgaaacgagagggattattgagttcgagtgcagaagtgagagagaatatgatatgtggactcaaggtgtgtcgaggcttcttttgattgctgctgaaactgaaaggaagcacagaagacaaagttcaactacatggcctcctggtggccagaatttggacttagattaactcatctgccttgcttttaagctagattggttacagggagctcaatgcaaagcaatgggcgaaccattctagccaagacaaatatctgtgaacattttgagctgatggtgcaatcaaaaagctgtgactgtaacctttttttgtagagtgagagagtggaactagttacttagggat

SEQ ID NO: 210183 - DNA, 351 bp, Gossypium hirsutum
ccgacacgtactctcagcctttcttggtttacctacaggaatccatgccgccggcctatgcgaggggccacacatacaaccctgctaaactaccatcacaaaaggcaccaaaggtctccatatgccgacttgcctaccataacaagccagagattcccgttattctactgggaactatttcgtgggcatactacggggtagtattgacaatttttgtgaccctacactcctgcgtgatgcacccattctttaaaccacatttattgagagaagattcaagggtctgggcactgatattcttggcccatgacgcggcatcatttgttgtatacacagcacacaattacttct

SEQ ID NO: 210184 - DNA, 454 bp, Gossypium hirsutum
gcttactgagttcactcgtttccggagctgacgtcactctcccggccgccggcagattttctgcatcgacattttggacggacatgattaaatacaaagccacatggtacactgctgtccccacgatacaccagatcatattggaccgccatgagagcaatcccgaacgtccacggtaccccaagctaaggttcattagaagctgcagtgcatcattggcaccgagtatattagaacggctagaggcggcatttgacgcaccagtgctcgaggcttacgccatgacagaggcgtctcaccttatgacatcgaacccgttactaaacaatggcccacataaagctgggtcggttgggaaaccggttggtcaagaaatggcgattttgaatgaacaaagggagattcagccaccttattctaatggggagggttgtattatgggattgaatgtaac

SEQ ID NO: 210185 - DNA, 399 bp, Gossypium hirsutum
atccgcgccacactcttcaggaagctcatcaaccatggcggaacagaccgagaaagcatttttgaagcagcccaaagtgtttttaagctctaagaaaactggtaaagggaagagaccaggaaagggagggaaccgcttctggaagagcattggtttgggattcaagacccctcgtgaagctattgaaggaacttacatcgataagaaatgccctttcactggccctgtttcagtcaggggccgcatcttagctggtacttgccatagtgccaagatgatgaggacaatcattgttcgactgaactatcttcattatatcaagaaataccaaaggtactagaagaggcattcaaacatttctgctcacatttcttcaatgcttcttgtgaaggaagggga

SEQ ID NO: 210186 - DNA, 408 bp, Gossypium hirsutum
gttgatgatgactgacatacaagacgattttaacctttgtgggctaagtagccaagttccttactatgattatgctcttgatttgattttggatgttgaatcttctcacggagatatgtttacggaggagcaaaacgaattagttgaatctgcggcagagatgctttatggtctgattcattctcgatacatattgacaggcaaagggattgccgctatgcttgacaagtacaagaactacgattttggaagatgccctagagtttactgctgcggacaaccatgtcttccagtcggtcaatcggatattcctcgatcaagcaccgtaaaaatatactgccctcgatgcgaagatatcttctacccacgctccaagtaccaaggcaacaccgacggtgcctatttttt

SEQ ID NO: 210187 - DNA, 432 bp, Gossypium hirsutum
tcgccgccattcattctcagcatctttaggttacctactggaatgaatcccgccggtcttgcaatggcagacacagaaaaccctgctgaactaccatcagaaaaagctccaaaggttttcatccgccgacttgcttacctcaacaagccagagattcccgttatcctactcggaactatagctgcagcagccaacggtgtaatatttccaatttttggtatcctaatttccagcgtaatcgacgcattctttaaaccacatgaattgagagaagattcaaggttctgggcactgatattcttggcccttggcgcggcagcatttgtggtatgttcagcacaaaattacttccttttcatcgctggaagtaaattaatccaacgaatcacatccatttgttttgagaaaaaggtccccatggaactttggtgg

SEQ ID NO: 210188 - DNA, 391 bp, Gossypium hirsutum
agagtcgccctttggtgtttttctaattcaatcagtgaggtgaagaaaaatgtcttgctgtggtggaaactgcggttgcggctccggttgcaagtgcggcggcggcggcggctgcggctgcggcggttgcaagatgtaccctgagatgaactttgctgagcaaaccacaactgagacacttgttcttggcgtggcaccccggaaagtgaactttgatggagctgaaatggaaactggggctgaaaatggctgcaaatgtggagataactgcacttgcaacccttgcaattgtaaatgaggggaaaaaaaaaaccgaagcatattatggaagctgatctaaataatatatgatgtatttgggtttttattattagaataaagcagccatggt

SEQ ID NO: 210189 - DNA, 330 bp, Gossypium hirsutum
tcgcccacgcgtccggataaataagcgtttgtctcagatttttgaagatggcccgtaccaagcagacagcccgtaagtcgactggtgggaaggctccaaggaagcaacttgctaccaaggctgcccgtaaatctgccccaaccaccggtggtgtgaagaagcctcatcgctaccgtcctggaactgttgctcttcgtgaaattcgaaagtaccaaaagagtactgagcttcttatcaggaaattgcctttccagaggcttgttcgtgaaattgcccaggacttcaagactgatttgcgtttcagaagcaagcctgttttacttttcaaga

SEQ ID NO: 210190 - DNA, 402 bp, Gossypium hirsutum
ctattcttacaaaaaagaaaagaaaaattacagtgaaaatggcaacccttaaagttccagctcatgtacctgccccttctgaggatgctgagcaacttcgtaaagcttttgaaggatggggtacaaatgagcaattgattatcgacattttggctcacaggaatgcagctcagcgcaatttgattcgtaaaacttatcgtgaagcttatggggaagatctccttaagtctttggatgaggaactttcaagtgactttgagcgagctgtggtgctgtttactttggaccctgcagagcgtgatgcatttctggctcatgaagctacaaagaggttcacatcaagccattgggttctcatggaaattgcttgcactaggtcttcacatgaactgttcaatgtga

SEQ ID NO: 210191 - DNA, 397 bp, Gossypium hirsutum
ccaagatatgatcaatgtacttgagctgtggacattggaccatagattttcctgaatggcttaacctaatggcaagggagatgaatgatactgattccgaggaagaacttaaagaggctttcagggtgtttgacaaggaccagaatggtttcatatctgctgctgagcttcgccatgtcatgacaaatctcggtgagaagcttacagatgaggaagttgatgagatgatccgtgaagctgatgttgatggtgatgggcagatcaactatgaggagttcgccaaagtcatgatggccaaataaggataaaaaatgggtaaaaaggggaacaagtcagataactttgctaaaatacttatttatatcaatatggcatctatgttttatgttactacctt

SEQ ID NO: 210192 - DNA, 264 bp, Gossypium hirsutum
gaacaagggaggctcaatggagctcctatcttggtatttgagatagctcagttccatgtcggggatgtggtaactagcatgcataaagcatcttttattccgggtggtggagaatgtgttctttatggaactgtcatggggagcttgggggcgtatgcttccgacacttcccgtgatgatgttgacttcttttcgcacctagagatgcatatgaggcatgaacaccctcccttgtgccgacgaatatcatatggcttacatatc

SEQ ID NO: 210193 - DNA, 398 bp, Gossypium hirsutum
cccacgcgtccgcccacgcgtccgtgttgacctcccaaccttgactgaaaaggacaaggaagatatcttggaatggggagttccgaaccaaattgacatgattgctctttcttttgttcgaaaaggatcagacctcgtggaggttcggaagctgcttggaaagcatgctaagaatattcttctaatgtcgaaggttgaaaatcaagaaggggtagcaaattttgatgacatccttacaaattcagatgcatttatggtggcacgaggtgaccttggaatggagattcccattgaaaagatatttctggcacagaaggtgatgatttacaagtgtaacatccaaggaaaacctgttgtcactgcaacacagatgttggaatccatgataaagtctcccc

SEQ ID NO: 210194 - DNA, 422 bp, Gossypium hirsutum
cccacgcgtccgcgataccagggagaggaggtgaacatgacactggcaaggtcggaggcaaagatacttcgtgagaagatatcagacaagcagtacagtgatgaggaggtcatcaggattgtaacaacacggagtaaggcacagttaaatgctactctgaatcattacaatactgcatttgggaatgctatcaacaaggatttgaaggccgaccctgaagacgaattcctcaaattgctgagagctgcaatcaagtgcttgactgtccctgagaaatattttgagaaggtgctacgtcaagcaatcaataagctgggaacagatgaatgggctcttactagagtggtcgccactcgggcggaggtagacatggtgcgtattaaggaggaatatcagcgaagaaacagtgtgaccctggaaaa

SEQ ID NO: 210195 - DNA, 373 bp, Gossypium hirsutum
ctcgctcacgtgttgtggatgataagagtaaggcccgtttttgttacatttggtcgagtcaacagagttgagccagtctcacttggagagcttggcatacccaggaatgatgttgctgataactgctctggagttttcagagatttattcattaatcagatgaacctccttgatcgggcagtgaagatggtagctgaattatatgaacctgtggagcagaactatgtacgtaagcacgccttatagcaagccaaagccttgggaattgaggttagagaagctgcaacaagggtcttcttaaacacttgacgatcgtactcttcgaacgtgaaccttgtcgatgagaactccttacggaatgatgagaaacagc

SEQ ID NO: 210196 - DNA, 390 bp, Gossypium hirsutum
cccacgcgtccgcccacgcgtccgctttcaaaacacttctccagtgaccaaaaaagcttcattgtctcttctatcgaaaaccccatggctgctcttaagctagtttgtgctctagtgttgtgcatgttggtggttgagcccattgccacaaccaccataacatgcggcgatgtgacaagcaaagtggccggttgcttatcatacttgcagaacggagggaacgtcccgaaggcttgctgcgacgggatccggtccctgaacaacatggctcgaaccacccctgaccgccaaaccgtgtgtggtggctggcaagctgccgctaaggctgtcaaaattaaaggcaacttggctgagaccctcccagccaaatgtagtgtcaacatcccttac

SEQ ID NO: 210197 - DNA, 351 bp, Gossypium hirsutum
ctcgttaaggccttcaggaacattcctggagttgaggttgccaatgtggagaggcttaatcttttgaaactcgcccctggtggacaccttgggcgattcattatttggaccaaatcagcttacgagaagcttgactcagtttatggatcattcgagaagccatcagagaagaagaaagggtatgttttgcctcgttctaagatggtgaatgctgatttgggtaggatcattaactccgatgaggtacaatcagtggtgaagcctattaagaaggagatcaaaagggcacctttgaagaagaatccaatgaaaaacttgaatgctatgctgaagttgaacccttatgctaag

SEQ ID NO: 210198 - DNA, 427 bp, Gossypium hirsutum
  unsure (1)..(427): unsure at all n locations
ttcttttctttcaactcaaagtcccaagtagtattagaatcatgggtgttgtcacttataactatgactctacctcccctgtcgctcccgccaggcttttcaaggccttcgttcttgaagctgacaaggtctggcccatagctgcccctcatgcaatcaagagtattgaggttgaagctaatcctggccctggaagtatcgtaaagatcaactttgttgaaggccttccattccaatatatgaagcaccagattggaggacatgatgaaaacaaattttcatacagttacagattgattgaaggtgggcccttgngggacaagcttgagaaaatcaactacgagaataagtttgaggcatctgtaggtggaggaagtgtgtgcaagacctcgatgaaatttacacttttgtgactatgtaacactga

SEQ ID NO: 210199 - DNA, 393 bp, Gossypium hirsutum
cttttctttggtcagcttgacttgttttcattattggattctgaatattgcttggtttgatatttcacgtactctgttttggctatgatgcacttgttttctcaaacaaaagttgattggcagtgtatattatgttgtttattggtatactcaagcaacaagttgagtttcgataagttattgccacgatgacggaaatagttgggccaaggttgtacagttgctgcaattgcagaaaccaagttgcccttcacgacgatgttatatccaagtcttttcaggggagaaacggtcgagcttttttattctcccacgcaatgaacgtgatggtgggtcctaaggaggatagacaactgatgactgttctttacacagtggctgatgtttacttgt

SEQ ID NO: 210200 - DNA, 338 bp, Gossypium hirsutum
atttcttcaattgatttttctctcattgtcccccattttctttcttcatattttcaagcggctatgtctttcagaggaacaaatgcatcatctggcatgggagtggctgatcacagcaaaagcacttacctggagctgcaaagaaagaaagtgtttcgatacgtggtctttaagatcaatgagaagaaaaaggaggattgcaagattataaacccttacaatttatggatgatgtggtcaccgtctgtttcaaggatccgtgccaagatgctgtatgcaacatccaaggaaaggttcataagcgaattaaagggcattcattatgaaatccaggcaac

SEQ ID NO: 210201 - DNA, 256 bp, Gossypium hirsutum
cccacgcgtccgcccacgcgtccgggttcttgcattggaagatctgcagctcaacactaatgggtgctccctggatgctatacgcgagaagtataagcaacagaagttcaaaatgtggtaccatggataccttcccggaaaggggtggatcaatctttttaagaagaagaagaaagctgatttaatggtctaaaaccattccccttttggaaaatggatctggtcccaatatttaaaaatattacctttttttttt

SEQ ID NO: 210202 - DNA, 145 bp, Gossypium hirsutum
gaaattcagcagcaaattggtgaggtgaatgagatcttcaaagatctcgcagtgctagtacatgagcaagggactatgaatggtgaccttgggacttatattcaaaattcaccggcttgccctttaccgggttaaatccaacctg

SEQ ID NO: 210203 - DNA, 404 bp, Gossypium hirsutum
tgaggaattttacagatgctgtgatcaattactgaaagaagatggacttttcgttctacagttcatatctatcccagaggagctttccaaagaaatccagcaaacagctggttttcttaaggaatatatattccctggtggaaccctgctttctttggataggaatttatcagccatggctgctgcaacaagattcagtgtggagcatgtggaaaacataggaatgagttattaccacacactaagatggtggagaaaacttttcctggaaaacacaagcaaagttctggctttggggttcgacgagaagttcatgcggacatgggaatactatttcgattactgtgctgctggttttaagacaggaacccttatagattaccacgttgcattttcgcgagctg

SEQ ID NO: 210204 - DNA, 393 bp, Gossypium hirsutum
  unsure (1)..(393): unsure at all n locations
gaagatgtagtattgttggatttctggccaagtccttttgggatgagagtgaggattgctctggcggagaaagagataaaatacgagtacaaggaagaagatttgaggaacaagagtgatttgcttctgaagatgaaccctgttcataagaaaatccctgttctaatctataatggaaaacctgtttgtgagtccctcattcaggttcaatacattgatgagatttggccgcataaatctcccctactccctactgatccttaccaaagagccatcgctaggttttggggtgattttgttgacaacaagatatatgatctaggaaggaaattatggaccacanagggagaagaacaagaagcagcanagaaagagttcattgagtgccctgaa

SEQ ID NO: 210205 - DNA, 386 bp, Gossypium hirsutum
cccacgcgtccgatatttcttagtgtgttttggatcgggaggttagaggtttatcatcaatggcggatactgagacgtttgcatttcaagctgagatcaatcagcttcttagtttgattatcaacactttctacagcaacaaggagatcttccttcgtgagcttatcagtaacgcctctgatgctttggataagatcaggttcgagagcttgacagacaagagcaagcttgatgcacagcctgagctcttcattcatattgttccagacaagaccaataacactctatcaatcattgatagtggtattggtatgaccaaagctgatttggtgaacaatcttggtacaatcgcaagatctggtactaaggagtttatggaagcactg

SEQ ID NO: 210206 - DNA, 362 bp, Gossypium hirsutum
cccacgcgtccgcttcagactcgatctttcactttcattgatgaatgtgttgaaggtgtacttagattgacaaagtccgatttccgtgagcctgtgaacatcggaagtgatgagatggttagcatgaacgagatggcggagattgtgcttagctttgaagataaaaagcttccgatccaccatatccctggtccagagggtgtccgtggtcgtaattcagacaatacattgatcaaagaaaaacttggttgggcccctacaatgaggttgaaggatgggctgagaattacatatttctggatcaaggaacagattgagaaagagaaggctcaagcattgatctatctgttattgatcatcta

SEQ ID NO: 210207 - DNA, 432 bp, Gossypium hirsutum
  unsure (1)..(432): unsure at all n locations
aagcggatggccttcagctggtgggttcgggacgtcggttgataacgcagccacttatctatcaaacttgattaaacatgtccaaaaaggtaccccaaagaggccaggaaaagctatagagacatatttgtttgcattgtttgatgaaaaccaaaaatcgggtccagagctagagagacactttgggttatttttaccaaacaagcagccaaaatatcagctccgttttggtgggggaaggcattgggatattgcttctaatgaatataatgcaacatttcctcttaaatatgatatgtaaaaatctgcaaagcttgtggaatttggggagttatgtctttctattgagttntctcttttattatcctatgtatttttcgtttaaataaggagaactctcatggngttaattttgattgtatttttatcatc

SEQ ID NO: 210208 - DNA, 367 bp, Gossypium hirsutum
cccacgcgtccgggggaagacacgtggaatgggagctggacgcaagttgaggacccacaggaggaggcaacggtgggccgataaggcatacaaaaaatccaaccttggaaatgaatggaagaagccatttgctggttcttcccatgccaaaggcattgtccttgagaagataggtattgaagctaagcagccgaactctgctattaggaagtgtgctagagttcaattgatcaagaatgggaagaagattgcggcattcgtcccaaatgatggttgcttaaactacattgaagagaatgatgaggtgttgattgccggatttggacgaaagggtcatgctgtgggtgatattcctggtgttaggttc

SEQ ID NO: 210209 - DNA, 309 bp, Gossypium hirsutum
ctaaggtccagagagccgtttgcatgatttccaactcaaccagcgttgctgaggtgttctgccgcattgaccacaagtttgatctcatgtatgccaagcgtgcctttgttcactggtacgtgggtgagggtatggaagaaggagaattctcggaagctcgtgaggaccttgctgcacctgagaagtattatgaagaagtcggtgctgagtcaggcgagggtgatgaggaaggtgaagatgagtactaaataagtaatgtttgagtggagggcttgcattttgctacccaatgatttgattccttttatc

SEQ ID NO: 210210 - DNA, 395 bp, Gossypium hirsutum
cgatattgtcaagggtggtaaattgaaggagcttccaccgtacgaccctgattggtactatataagagctgcttccatggcaaggaaaatctacttgaggggaggtcttggtgttggtgctttcaggaggatatatggaggagccaagaggaacggtagccgcccacgccatttctgcaagagcagtgggtctattgctcgtcatattctccagcaattgcagaatgtgaacatcgtcgatcttgataccgaaggtggtaggaaaatcacatcgaatggccaacgggatctcgatcaagttgctggaaggattgcagttaccctctgagaaatttcactatatggattgagttaagaaaaattagtttgtttgcaagattactgttttatgagat

SEQ ID NO: 210211 - DNA, 290 bp, Gossypium hirsutum
gccccagtccttgactgccacacttcacactttgctgttaagtttgctgagcttttgaccaagattgacaggcgatctggtaaggagcttgagaaggaacccaagttcttgaagaacggtgatgctggtatgattaagatgattcctaccaagcccatggttgtggagaccttctctgagtacccacccctgggtcgttttgctgtgagggacatgcgtcagaccgtggctgttggtgttatcaagagtgtcgagaagaaagacccaaccggtgccaaagtcaccaagtc

SEQ ID NO: 210212 - DNA, 392 bp, Gossypium hirsutum
gtttgatgttattatcaaaagttggccaatttgatccaccaaagcataatactattcatcagcgtggagtttttgcatgcaagacgtgtgataaacggttttcatcttttcaagcactcggcggccaccgtgctagccacaaaaaaccgaggtttacggacgcggacctaccggcttcacctaaaaagcctaaaacacatgagtgttcgatttgtggactcgaatttccgatcggtcaagctcttggaggtcatatgaggaaacatagagttgtttcgaatgaaggaatggtggtgactcggccggtgacggagaaattgaacggcgatgacgctgataatgatggtggtttgtgccttgatctgaaattggcgccttgtggaattgatttg

SEQ ID NO: 210213 - DNA, 355 bp, Gossypium hirsutum
  unsure (1)..(355): unsure at all n locations
tttgaaatggtatcacctcctgtttcccccaagtccagtcaggaggattcagcaggaagaaagagtgggtctcgttatcaaaagataagctcacgtttgagatccgacacggtgttcgttgttccagcagggcatcctttcgttacagttgcttcaagaaacaataatctagagattctatgctttgaggtcaacatagaaaacaacgttaggtaccttcttgcaggggaggggaattatgttcagcaattcgagaaggaagcanaggaactggcattcaagagcaaggaagaagaggtggataggatctttggtaaccaagatgaggagttctttttccttggaccaaagcaac

SEQ ID NO: 210214 - DNA, 392 bp, Gossypium hirsutum
cccacgcgtccggaatgatagggaccacatggccgacccactatcatgttctcttagaccaggttgggttttcagctgatgatctgcaggagcttgttcattctctatcctacgtgtatcaaaggagcaccacagccatatctgttgtggcccctatttgctacgctcatttggcagcttcacagttggggcaatttatgaagtttgaggatgcttcagagacatcatcgagccatggtggggtgactgctccgggagcaatttctgttcctcagcttcccaggttgaaggataatgtcagcagctccatgttcttctgctgaaaaccgttgaaccatctttttgtatagggcttttggattttggctaccaaaaactgtttatgctgcttt

SEQ ID NO: 210215 - DNA, 391 bp, Gossypium hirsutum
cccacgcgtccggcagcttgtgtttggggattaaaattatgaagagggtttcctttgttgccttgcgtgtggtggcactcgcggtggtgctgatttcgggtgaaagtcgcacggcggaggcagtgacatgtaatcccgtggagcttgccccctgctcgccggcgcttacgtcgtccttgccttcattaagcgcttgttgcagcaagctgaaggcgcagcagccatgcctctgtggatacattaataacccatctcttaaacagtatgtcaacagtcctaacgctaaaaaggttgcttcgacttgtggagtcccatatcctaagcgttaaatgttgcttaatggtgtatctactatctactggcagcaaataagtgattctttttgctgtca

SEQ ID NO: 210216 - DNA, 398 bp, Gossypium hirsutum
ggaaaatggggaaacagccggtgaagatgagggcggtggtatacgctttgtcgccgtttcaacagaagattatgggtgggctgtggaaggatctgccgggcaagatctctcacaaggtttccgagaattggatcagcgctactcttctccttgctcctctcgttggaacgtacacatatgtccagaacttcaaagaaaaggagaaattggaacacaggtattaaaaacctcaggaagcgtccctttttatcagagtaactctgagcctttacgttttagatgcaaatttattgtggtccggtccaatgatgaaccatgttttttgtttgggatctgattagtatctgactgtttgagttggtgttttgttattcatatggaataaatgaatatggaac

SEQ ID NO: 210217 - DNA, 326 bp, Gossypium hirsutum
aaacaaatgatggctttgcttatatcgttttgttagactacacagtggctaactcgtccatcgggaccggaaatctcatcttgacaaggccgaaatacaacagcacattgtcgattcttcgactcggcatcgatggaaacctgagggtttttacctactatgacaacggttgattcacaggcatgggaagagactttcactctcttctctagggactcaatatggggcactgaatgcgaactgccggagaggtgtgggaactttggactctgtgaggagaaccaatgcgttgcttgcccgtcaacaaacggattactcggttggag

SEQ ID NO: 210218 - DNA, 330 bp, Gossypium hirsutum
cggacgcgtgggcttcaggcaaataattcctaacctggtatagtttgagagccactacacaagaagtgagggttgtgaaggtattcatggatatcttgaatgcagacccggcatcgcttgctgagcaactggtggacacgttctcggattgtatctggagcaaaaaatcgtctgtggtgcctgctggtctttgtatgaagctttggcattgatgtaagtgggtggtatatggtagagctataagatggaagtagtttttgagtgcaaaccttgtcaaggtttgtattagcataattctttagacccataacttatattcatcattttctt

SEQ ID NO: 210219 - DNA, 388 bp, Gossypium hirsutum
atggaaggcgatcaagagatttggtcagcttcactttctggttataaaattgccgtggtcctactcaacaggggtcctgttcgttattctacaacagctcgttgggatgacattggtctagaccccaagactgtggttcaagccagagacctttgggagcacaaaacactgaagacaacatttgtgggcaatttgacagcaacattgagaccgcattcatgcaaactgtatgtattgaagccaattgcttaaaaccatcatgtttttaggctttttgccactattcccttgaagttgcagtcatcatttataccctgtaattctagatgtgccatggaattattatttatttctttttaagatcagtacatgaatttagtcattaata

SEQ ID NO: 210220 - DNA, 403 bp, Gossypium hirsutum
gaatttttagagaaggcaaaggcacgtgcattgaaacgtagtgttggcgatccatttgtagcaggcattgaacaaggtcctcagattgattcagaacagtttgaaaagatcatgaggtacataagatcaggtgttgaaagtggagcaactctagaaaccggaggggagaggataggggacaagggcttctatattcaacccacagttttctccaacgtgaaggaggacatgttgattgcaaaggatgagatatttggtccagttcagtctatcctgaaattcaaggacatcaacgaggttattcggagggcaaatacgacgtcatatggactggcagcgggtgtgtttacgcaggacatagacacagcaaacaccttgacacgagcactgaaagtgggggaaa

SEQ ID NO: 210221 - DNA, 415 bp, Gossypium hirsutum
tcttattatatataaaccctacggttctcgttttttctcttagctcaatacagatatttggtctgtttggaggattttaatcttactgagtgcatctgttgcagttaggtgcagggaaaagagcgatggcggcagttcccggacagttgatttgggaggtagtgaagaagaacaattgctttttggtgaggcagtttggaagaggaactgctagccttcagttcagcaaagaacccaacaatctctacaacctccactcctacaaacactctgggttggcaaacaagaaaacagtcaccattcaaagtgggggcaaagaccagtctgtgctgctagcaaccaccaaggctaagaagcagaacaagccttcggccttgcttcacaagtccctcatgaaaaaggagttccccaggat

SEQ ID NO: 210222 - DNA, 393 bp, Gossypium hirsutum
caaggctgctcctcaggcagtcaagagcgttgaggttgaagctaatcctggccctggaagtgtcgtaaagatcaactttgctgaaggccttccattccaatatatgaagcaccagattggaggacatgacgacaagaatttgtcatacagttatagtttgatcgaaggtggacctttgggggacaagcttgagaaaatcagctatgacaacaagtttgaggcagctgcaggtggaggaagcctttgcaagagctcgatgaaattttacactgttggcgactatgtgatcactgaagatgaaatcaaggctcaaatcaaagggagtgaaggagtttacaaggctgttgaagcttacctcttggctaaccccgatgcctgcaactaaaatatatg

SEQ ID NO: 210223 - DNA, 402 bp, Gossypium hirsutum
cccacgcgtccgggctgctcctcaggcagtcaagagcgttgaggttgaagctaatcctggccctggaagtatcgtaaagatcaactttgctgaaggccttccattccaatatatgaagcaccagattggaggacatgacgacaagaatttgtcatacagttatagtttgatcgaaggtggacctttgggggacaagcttgagaaaatcagctatgacaacaagtttgaggcagctgcaggtggaggaagcctttgcaagagctcgatgaaattttacactgttggcgactatgtgatcactgaagatgaaatcaaggctcaaatcaaagggagtgaaggagtttacaaggctgttgaagcttacctcttggctaaccccgatgcctgcaactaagatatatg

SEQ ID NO: 210224 - DNA, 240 bp, Gossypium hirsutum
gtcattggcaaacctgtgattgtgggggactacatgaatgcaggggttggggagttcctcccaacaccctggctgagtattctcttaaccaatttggagacatggacttgtacgtcatttgcttaattgatgggagtatgatactcaaggggtatggctgaactgaaggggcttgtcacaacatgatgagcactgtccacatcacccgacaatgcgcgaggtaggttagagctcactggc

SEQ ID NO: 210225 - DNA, 394 bp, Gossypium hirsutum
cccacgcgtccgcccacgcgtccgcccacgcgtccgtggaagaggatgcatttaggccagtcttgcaccactatgatggccccaagtttcgtctcgagctttcagttcctgagacgttggatctattagacctttgtgaacaagcaggctctccataagccaaaagttatctgagtgcaaatgtgctagggttaagggcataaggctgcctgcttttcacagattttccatagagcgcaagctgtgggttaaagaccagttggtgaatcaactcatgaaaagtgggaaatggcgttagccagctgaataaaattgcgtttgtgtcttgtgaaagatactttttgtaaacttttgcattatattcttatgtattaaaaatcctatatagatagac

SEQ ID NO: 210226 - DNA, 408 bp, Gossypium hirsutum
ctcaaagaacaatggagccctgcactaaccatttccaaggttctgctctcaatctgctcgttgctgaccgatccaaaccctgatgaccctcttgttccggagattgctcacatgtataagactgatcgggccaagtatgaagccactgctcgtagctggacccagaagtatgccatgggatgacagtggttggtgtgtaatacctatcagctttcttatgtgttttggggaaggaagggggtgttttttcttaaagtaacttgtcattgtgctttggatatgggaaagatatggaacattctttttatttatttcgtgctttataacttgtgtgaaacccttgtttcgttcaatgtcaaagttgctgtggaaccccttgtttcgttcaatgtaacaaaaaagtcttta

SEQ ID NO: 210227 - DNA, 396 bp, Gossypium hirsutum
  unsure (1)..(396): unsure at all n locations
caaattttgatttgaatgcaaatatagcatgtcccgtttgcaactgggggatttctattacatggctgaagatatcattgatgatatggatgaagacgactatggtagagctggtggagacatggatgcccatgaatatgacatgctgaccaaggtgactgatacatcttctggtcaagcacggaaggggaaggacattcagggaattccatgggaaagattgaacataaccagggaagattatagattgacaaggcttgaacagtataagaattatgagaatatcccggcctctggtgatgctgttgacaaggaatgcaaacagatggaaaaaggtgggaactactatgagttcttncacaacactagattagttaagccgacaatcctccattt

SEQ ID NO: 210228 - DNA, 240 bp, Gossypium hirsutum
cccaaagaacaaaggtgccctgcactaaccatatttatggggctgctctcaaactgcgcggtgcggaccgatacaaaccctgttgaccctcttgttccggagatagctcacatgtataaaactgatcgggccaacagtgaaaccactgttcttagctgtacccagaagttttccctgtgatgacactggtttttgtgaaatacccatcacactttttatgtgttttgaagaaagaagggg

SEQ ID NO: 210229 - DNA, 404 bp, Gossypium hirsutum
caaatcttgatcccacaacacctgatggtttcgacaataactacttcacgaatctacaagttaatcgaggcttgcttcgaagtgatcagaatttattttcgactgagggtgctgatacaattgaaattgtgaataggtttagtagtaatcaaacagctttctttgaaagctttgtggaatctcatcagaatgggaaatataagccctttaacaggtacggaaggagaaattagatcaaattgccgcgccgtgaattcagcaactatcagatccaactcagatgctgctctcgtcagctcaatataatatttgctgaactgaaggctaagaaaaatgggcagaagagaagctattttcctactcaaaatcaaaacgaataatatattgtaactctttaatgccta

SEQ ID NO: 210230 - DNA, 374 bp, Gossypium hirsutum
gccgaagtgaaacccgatattccattgctcaataatcgtatatatgacacaaaatttgagtcccaattttacatgatttctgacacaaacaagcgtgtatatgcaatgggtgattgttatccagcctcttcacaacttccaaagggtgaatactcactgcgactgtacttaaggcatgacaatgtccagtacttataaaaaatgaagcaattagttctgtttctggaaaggaatttggaggaaaaggacattattccattgaactttttctctgaaccacatggccccgtgatggggaatggtacctttaaatattctattttggttccagggataaaggaatcactttatttaagtccaccaaacaaagataa

SEQ ID NO: 210231 - DNA, 372 bp, Gossypium hirsutum
ccaatttacagtggaccctttcgacgactccgatgtctcgtcggacgacagctctgattttgattcacccgaaaaagcaacattcttgtcgaggttcatatgcaaaggactgagaactcaggatcccccgagattgtccataagaattgatgaagatcctaaagcttccacctcaaccagcaagaaacaagggttccatgtaagcattgatccatggaaactaataaatcttagtagggacaaagctcttctagctgctgataaggctagacaaaggcttatgatacaaaagccagcagtggagcttaatgcattgaagccactaccactagaaacaaaacatggcccattaatgaaccctgaaagaatatg

SEQ ID NO: 210232 - DNA, 231 bp, Gossypium hirsutum
gcgattatggctgagtttcgtgatggtgcaacccgtgttcttatcacaacagatgtttgggccagggggctcgatgttcaacaggtgtccctggtgataaattatgaccttccaaataatcgagagctttacatccacaggattggtcgttcaggtcgctttggacgaaagggtgttgccattaactttgtaaaaagtgatgacatcaagattctgcgagatatagagcat

SEQ ID NO: 210233 - DNA, 422 bp, Gossypium hirsutum
gtcaatgtaagtcatatgattcatgatttatcattcgggccaaaatatcctggactccacaacccacttgatggtacagtgcggattttgcatgaaacaagtggaacattcaagtattacataaagattgtccctactgagtacagatatatctggaaagaagttttgcctacaaatcagttttctgtctctgaatacttttcccctatgaaggagtatgataggagttggccagctgtttactttttgtatgatttgtcaccaatcactgtgacaataaaagaagagcgccgaagctttctccattttatcactcgactttgtgctgtcttgggagggacattcgctttaacaggaatgctacatcgttggatgtataggcttattgaagaagtgactaaagcaagcggtgtgcgtgcata

SEQ ID NO: 210234 - DNA, 382 bp, Gossypium hirsutum
cccacgcgttcgaaaacagggcatttccattaaaccaacaacaacaacaaaaaaccaaacacccagagttaaccaaaagagaaaatggtcaccaaagtctacattgtatactattccatgtatggacatgttgagaaactggcccaagagatgaagaaaggagctgaatctgtcgagggagtggaagtcaaactttggcaggtagcagaaacactaccagaagaagttcttgggaaaatgggagcaccaccaaagacagatgcccctatcataacaccagatgagctgacggaggcagatggtgtgctatttgggtttccaactagatttgggatgatggctgcacagtttaaagcattcatggatgcaactggtggtctat

SEQ ID NO: 210235 - DNA, 441 bp, Gossypium hirsutum
gctagggatgcaattctgagccgcaaattcgaccaggtgcgtgtgaacattccgaatggtgagatggttggtcatactggagatatccaggctactgttgtggcatgcaaggccgctgatgaagctgtcaagatgatcattgatgccatagagcaagttggtggaatatatgttgtgaccgctgaccatggcaatgctgaggacatggtgaagaggaataagtccgggcaacctctttatgacaagagtggcaagctccaaatcctacttcccacacttgtcagcctgtgcctattgcaatcggaggtccaggattggcagcaggcgttagattcaagaatgatgttccggatggcggacttgcgaatgtggctgcaactgtcatgaacctccatggttatgtaactccaaatgactatgagccaacactcattgaagtag

SEQ ID NO: 210236 - DNA, 375 bp, Gossypium hirsutum
  unsure (1)..(375): unsure at all n locations
gcgcaaaagcgaacatcaaggacctctttgtcatgcagaagcacggggacaatgnagacgtggagggcggagatgaacacagatcaggtaaacacgtacgtgaactgaacggaaggctgaacaagtgcggggtgaacaatcctcgcttcgacgtaggagtgaaggagatcgagggttggactgccaggctgcttccatcaagacagcttgggtacatagagctgacaacatcagctggaataatggaccatgaagaagccagaagaaagaatggaggggggaaagtacttgggttcttctattgaggggatttcattagaaataaaacctttatgaattatgacgttttcctttaaacctcgtaggtagcaaggc

SEQ ID NO: 210237 - DNA, 375 bp, Gossypium hirsutum
  unsure (1)..(375): unsure at all n locations
cccacgcgtncgcctctctcttgcctcatccatttttggtgatactgaagtcaatgtttatgggaaagtcccgttgatgcacttgtggtacaaaacccgggcacacccttctgaactgactgccggcttctataacacggcctcaagaaatggctatgaagcagttgcagagatgtttgcaaggaattcatgcaaaatcaacttgcctggaatggacctgtcagatgagcaccagccacacgatgctctttctagccctgaatcattacttgcacaaatccgaacaacgtgcaacaagcaccgggttgaggttgccgggcagaacctggcccctggagctcctggtggtataaagcaaattaagaaaaatatgtt

SEQ ID NO: 210238 - DNA, 439 bp, Gossypium hirsutum
gggtcgcccacgcgtccgttaacaatccctaatttattgtcagtacgaaaagaaacctttgattatttaattcccgtttgcgtaatctttttgggaaatcggtagcaaaaaaatgtcgtcgtcggggaggaagatcacccttaagagctcggacggggaatcattcgaggttgatgaagcggcggcgttggagtcgcagacgattaagcatatgatcgaggacgattgcgctgataacgggataccgttgcctaatgttacgagcaagatcttagcgaaggtgatcgagtactgcaagaaacacgtcgaggctgctaagacagacgatcgatccgccgatgacgagctcaagagttgggacgctgactttgtcaaagtcgatcaaaccactctctttgatctcattctgggcagcgaactatttgaacatcaaagggtt

SEQ ID NO: 210239 - DNA, 404 bp, Gossypium hirsutum
cggacgcgtgggcggacgcgtgggcacaacctctttggtggcccaagtgttgttagcgtgtcgcgaaccgatggtccatataacttggcgggtacgcggacggcgcctggtccgtcatgtggggatgttcttctagtgatgcagaacgagcccgagctaatgtttgagaccctgaagcaccgagcggaagaattttgtggacaggaccatggttatgaaggcacgcatgctgctgtagatagcaccattgctcgctcttttcacaacatgccttatattgtagcggcatccccttgatcgctgactggcatgaataacaatggcttgtactatttgcatgaaggaaactacaatgctgctgtcgattctggaggtagtgaagacgagcacgggtactattgcta

SEQ ID NO: 210240 - DNA, 434 bp, Gossypium hirsutum
aaccctacggtggccatgatagctcaggctaatatcacaagcagcgataacaattcatcagtgccatttagcaccatatttgcccttgatgatatcttaaagactggtcctgaggataactcagaggtgatcggaaatgctcaggggcttgggatcctcatagccgatacaaatacaacaaacctgctctggtactgggactttggatttatcacgggtaagttcaacggcagctctataagcatgttttcaaggaatccgacaacagtgacggtacgtgagctttcggtggtcggagggagaggaaaatttatgatggccaaagggtttgcacaacttaaggattactcacgtaatgacaccactataattgcggagcttaatgtaactgttattcattactagaggttgaaaaaggggggtgggggctcatg

SEQ ID NO: 210241 - DNA, 263 bp, Gossypium hirsutum
cccacgcgtccgcgcaacctgaacttacctccattgcatgggctcttatcgcattagcactttctcgagtgacgataatgggtggttttggtttgtttttggagcctgctggcctccctcgaggccgcctaacattgtcaccatcagctgcaatgattggtttcactgcctttggcattttgggagccattagcattgcatgaaattctttgtcctgttctttgttatgatccataagcactctcaaatctgtggcttctccc

SEQ ID NO: 210242 - DNA, 354 bp, Gossypium hirsutum
aaaaaacaatactacaaacaaaaggtttgccttttctaaatggatccaagacttacctacggcttgcgtgcgacatttatagcatggtctatatccgtcacctatcattcaactacactggccgtctgttttacaacatcttatcatgggtaaacccaggcgatacccaacttaaacgccttgcaacacatacccctttcaccagctgccgttatagcaaataggcccgtactgatcgccctttccaacagttgcacagcctgaatgtcaaatggcacgcgctctgttactgcgcattaaactcggcggttttggtggttacgctcatcgtgaccccttcacttttcagctccc

SEQ ID NO: 210243 - DNA, 306 bp, Gossypium hirsutum
atgatgattcgcttcaaactgacttttggcatcaaccttcttatgaaccttcttccctagcaggaagttcaatggatcgaaactatcaacccaggcagcaagccccgcttatacctgacaattttagttctttggatcaggttatttcagcattgagagaggcaggacttgaatcatccaatttaatacttggtgttgacttcactaagagcaatgaatggacagggcggtattcattcaacagaagaagccttcatgctattgggagctcacctaatccttatgagcaagcaatatctataattg

SEQ ID NO: 210244 - DNA, 446 bp, Gossypium hirsutum
  unsure (1)..(446): unsure at all n locations
agcaatctcagccgctattctaaacctgatttttcatggtattgagggagtgttgtcttttctaaagagccgatcttctaagcttccattttccatgtattcataaaccagacatccatactcagggcaggcacctatgagcagaaccaggtgtggatgtctcatgcagcttanaacctcaacctacataacaaatttatttaatacaaatgaaaggaaggaagaaggacagataagttctgccactataaacacatgaaggtaagaccatactctttatctcccctctatttggctagagaaattgctgtggacatcatatttggtggttttctaagtggcaaggcttttaaaggcttttataagtcattaccatcttaaattataagactatgaacaagtttaaaagaagctataaaaggaacatttctataatttaaaatgaa

SEQ ID NO: 210245 - DNA, 447 bp, Gossypium hirsutum
  unsure (1)..(447): unsure at all n locations
cccacgcgtccgcccacgcgtccgcccacgcgtccgggaagagaagtccaattaggaaaacttggcctgcctacacattcagaggtcgacatgcgaatcatagcacttcaccatgatcctgacttatggggagatgatgttaatcttttcaagccagagaggtttgctgaagggatagcgaaagctactaagtacaatgcagctgcatttatgccttttggattgggacctccatcttgcgttggcatgagctttgcaatcactgaggcgaaaactgcacttatgttcacgcacctgcactacgtcttacactcaagccacaacatgggatgcagntgttgtttcattcactacattatgatgcttaaaattctaggttgttggtccccaatatagtaatatatagtaaaatgtggatgatactgtactttgcaaccattcgatgat

SEQ ID NO: 210246 - DNA, 359 bp, Gossypium hirsutum
gtttctcgatctggcactttaacatatgaagttgtttttcaaacaactgcacttgggttggggcaaacaacctgcgtaggaattggtggacatccttttaatgggaccaactttggtgattgtgtgaccaaattccttgctgatcctcacacagaaggtattattctaattggtgagataggaagcacagcagaagaagatgctgctgcactaataaaggaaagggggactgaaaagcccattgttgccttcattgctggacttactgctcctccaagacggcgtatgggtcatgcaggagctatagtatcaaggggcaagggtactgcacaagacaaaatcaagactctaaaggaagc

SEQ ID NO: 210247 - DNA, 418 bp, Gossypium hirsutum
cgtccggcttttttgcccataaaaaatttgaaataggtctataaggccagttgttgaagaagaagcaggtcaatggcgaaggagttggaaggattcaatttcgagcaaaggcatggaaaggcgagggtgagagtgggcagagtttggaggagcaaagatggatgccgccacttcatggtcgaatggaatgttaacatcagcttgctttccaattgcgttgccgcttatgtccgcgatgacaactctgacatcgtcgctactgacaccatgaaaaacactgtttatatcaaagcaaaagaatgttcagaacaactttcagcaaaggagtttgctattctacttggcaagcactttacatcattttatccacaggttgttactgcaatagtaaagatagtggaaaagccatgggaacgca

SEQ ID NO: 210248 - DNA, 416 bp, Gossypium hirsutum
gcaaacacttttcactatctaatccatggctggcaccataagcaccctatgggtgggcttgggcttgtgattccacctgcagaagctgctatactagctataatgttttggaacttgtatgggattttattcactatctccacaagacctgcattatttggaggtggactaattggatatgtgatatatgatatgatacattactatgtgcaccatggccagcctaccaaacaatctatcaaaaaacttaagaaatatcacttgaaccatcactttaggattcaaaacaagggctttggcataactacaacattgtgggacagagtttttggaaccctttctaagaccaaagcagacaagagtggatagatgatgatgatgagtctgacaagcatcacatgattgcaccctgtgat

SEQ ID NO: 210249 - DNA, 399 bp, Gossypium hirsutum
  unsure (1)..(399): unsure at all n locations
cccacgcgtccgcccacgcgtccgcccacgcgtccgggaagccgtccatcaaaaaggaaaccaagtggaggcattgaatcactccgtgcaatcccatggatctttgcatggactcaaacaagatttcatttacctgtgtggcttggctttggggctgcatttaagcacgtcattcagaaggatataaagaatctccacatgctccaggagatgcacaaccaatggcctttctttagggtcacaatggacttaattgaaatggtatttgccaagggagaccctggaatcgctgccttatatgacaagctgctagtgtcaaaagaactctggccctttggagagaacttgagagctaactatgaagacactaaacgacttgttctccangttgctggacac

SEQ ID NO: 210250 - DNA, 367 bp, Gossypium hirsutum
cggacgcgtgggatgggaagccccctgctcctgttcataatcctcctaagctgaaaccgccaccgtatgaacataaacctccggtctatgaaccaccaaagaaggagaagcctgaacctaagccaccagtttatacacttccaaagaaagataagcctgaaccgaaaccaccagtatatgaacctccaaagaaggaaaaacctgagcctaaaccaccagtttatacaccaccaaagaaagaaaagcatgaacccaagccaccgatgtatgaaccaccaaagaaggaaaagcctgagcctaaaccgccaggttatgtacctcccaagaaagaaaaaccagaacccaaaccaccagtttataagccttc

SEQ ID NO: 210251 - DNA, 438 bp, Gossypium hirsutum
  unsure (1)..(438): unsure at all n locations
caagggtgagaaactctgtgacctgtgcagcatcactgtcaacaagaatgctgtatttggtgacagcagtgccttggcacctggaggagtacgaattggtacccctgccatgacttcgagaggtttggtcgagaaagacttcgaacagataggtgagttcctccaccgagcggtgaccatcaccttggacatccaaaagcagtacggaaagctcttgaaggacttcaacaaaagtttggagaacaacaaggagatcgaaaagctgaaagccgatgtcgaaaagtttgcatcctcatttgacatgccgggtttcaagatgtccgaaatgaagtacaagaattagatcttatagatatttatggttttattcatgcttattgctgntattatcggcatatgtgtcatctggaaaattgcctctgctgatttccaaggagt

SEQ ID NO: 210252 - DNA, 308 bp, Gossypium hirsutum
agctcaactgatttgcaatgggagatgtttcatgcaaaagacccaccattactcacgtcatcttggacatggatggtctcttactcgacacagagaagttctacactgaagtccaggaaaccattcttgctagattcaataaaacttttgattggtctcttaaggcaaaaatgatgggaatgaaagcaatagaagcagctcgagtctttgttgaggagactgggatcagtgattctctttcagctgaggatttccttgtagaaagggagtcgatgctgcagagtttgtttccaactagtgagctcatg

SEQ ID NO: 210253 - DNA, 242 bp, Gossypium hirsutum
gtgatattgatttgtacaagcaatcaagaggtgttggtgatccagaacttcttgcatgagagaccgtgtttagtgtgagtgaaatagaagcactttatgagcttttgaagaagataacacagggtggtctagatgatgggctgatcgacacggcctgggatgtttgatacctctgatctggttctataagagatgtacaccgttttgtgagcccagagcttatgcttggagatgactaacta

SEQ ID NO: 210254 - DNA, 392 bp, Gossypium hirsutum
catctgtttggccaagtacacaagatggtactttacaaactgtgacactaaatgttgaggaaacaagtgatggctttgcttattacgttttgttagactacacagtggctaacttgtccagcggggccggaaatctcatcttgacaaggccgaaatacaacagcacattgtcgattcttcgactcgggatcgatggaaacctgagggtttttacctactatgacaaggttgatttacaggcatgggaagagactttcactctcttctctaaggactcaatatggggcactgaatgcgaactaccggagaggtgtgggaactttggactctgtgaagagaaccaatgcgttgcttgcccgtcaccaaacggattactcggttggagccggaat

SEQ ID NO: 210255 - DNA, 418 bp, Gossypium hirsutum
cccacgcgtccgaagaaattgagaaagcaacatcgagcatctatcctttacaaaatgtgttgattcgtaaaggcaaaattttgaaggctccgaagtttgatcttggaaagttgatggaggttcatggtgattactcggaagatgttggtgtgaaaatagagaggcctgctgatgaaacaatggctgaggctgccccggaggtcattggagcttgaatgaaacaccccttgaatttgtgtgttcttttctttctgatttcaacagatttgatgattttgtttaaaactaggagaaattttccatggttttgatttgatctctaagatatggttttgcaaattgatattgaattagacaatcttgtgtattagaaagtcatactctctctatatatgaaaattattatatatttaacgac

SEQ ID NO: 210256 - DNA, 425 bp, Gossypium hirsutum
gtgatattgatttgtacaagcaatcaagaggtcttgttgatccagaacttcttgcgggagagaccgtttttagtgtaagtgaaatagaagcactttatgagcttttcaagaagataagcagtgctgttatagatgatgggctgatcaacaaggactttgttttttcatagttctcattttgttatataagtgatatcttttgttttgtttgtcaagtttttcggcttgatgatcactcctcatcttgagttgggtctttccatctcatctttgtaggatttaagtttatttatattactatttgacaggaggagttccaattggcgttattcaaaacaaacaaaaaagagagtttgtttgctgatcgggtatttgaacttgtttgatacaaaagcataaaggaaattttatggtttgaaaaagtt

SEQ ID NO: 210257 - DNA, 449 bp, Gossypium hirsutum
cgctttcgcttaaaaatggcaatgattcctaccatctttggcaacaacaggcgcagcagcctcttcgacccgttttcgttggacttgtgggatccctccaaggagttcgatttcccaacagtcacatcgtttccttcactttcccgagaaaactccgctttcgtcaacacgcgcgtggactggaaggagacaccggaggcacacgtgttcaaggcggacctcccgggggtgaagaaagaggaggtgaaggtggagatcgaaggcgatagggttctccaaatcagcggagagaggcacgtggagaatgaagagaggaacgacacgtggcatcgagtggagcggagcagcgggaagttctcgcggaggttcacgttgccggagaatgtgagaatgggcgacgtgaaagctttcatggaaaatggggttcttactattacttgtcctaaaag

SEQ ID NO: 210258 - DNA, 434 bp, Gossypium hirsutum
ctcttccaaaaaattttccccagggagtgaaaaggaacaaaaaatcttctactcaagaaaagagagaaagatcttccttagcgaaactatttgcaggaaaatcaaaaagaacagggatgagttattacaatcaacaacagcctccagttggtgttcctcctactcaaggttatccaccggaaggatatccgaaggatgcttatccaccaccgggatatcctccacaaggatatcctcaaggttatcctcctcaaggatatcctcctccttacgcccctcaatatcctgctcagcctcctcctcagcaacagcaaagtactggtttcttagaaagctcgttggctgctctgtgctgttgttgcctgctggatgcttgcttttgaaaatccaactatgccaaatgcctcaaatgttgaaaaatcaaatgttcttac

SEQ ID NO: 210259 - DNA, 404 bp, Gossypium hirsutum
ccgatttccttcaaggatctctaaaggccaagcctccaacagagagaaaatacaaatggagtcttcaggaccttcaaggaggacttgtttcatccaagaagatgatggattggcttccattgtagatatggaggctggatattcaggaagccattaccaaaaggttaaccaaaatgggtttctttcaagacctctttgttactctagaaagagtagtttgaggaatctatcttctttttcttcgtcatcttcttctggttcagtttcttctccgaggcctgctcgcttttatgatgccagatttgaagacgttcatcaaccctatttcttggatgtttgctttctttgcaagaagcctcttgggtgtaaccgtgacatcttcatgtacagaggggacacacctt

SEQ ID NO: 210260 - DNA, 432 bp, Gossypium hirsutum
  unsure (1)..(432): unsure at all n locations
gtgcaagattgattgcgaagtacngaccaacaatgccagttctctcagttgtcatccctcgccttaagacaaaccaattgaagtggagcttcagtggggcctttgaggcaaggcaatccctcatcgtcagaggtcttttccccatgcttgctgatccccgacatcctgcggagtctacaagtgcatcgaatgagtcagttttgaaggttgcacttgaccatgggaaggctgccggagttattaaatcacatgatcgagtcgttgtttgccaaaacgtcggggatgcttctgtggtgaagattatagagctcgaagattaaactaatgttactttctctgctttgggattatttttggaatctgatttgtgaaagcgatgaatgactatatatagcacctgtggggtattggctccacgctttggtggatttg

SEQ ID NO: 210261 - DNA, 337 bp, Gossypium hirsutum
ggaacggaaaccgcggggcgacccacgcgaccgggcagaccaacaaaaacgagaaatttttcgcataggagaagcgaggaatcacgggggggcacgggatggggacacaaggccgcgacgagggcagaagaccataactgtcctcataaacaatggaggggacaccagcgaagaagagacgcaagaaggaccggacaacgggaaaaagacaaggaactacactgccggggcggaggcaatacataatggagaaagcaagggctggacaaccaaggaatgtcgtgaggaagagctcactgaagcaagcgagacggcaacaggagcgaagaaggaccgc

SEQ ID NO: 210262 - DNA, 320 bp, Gossypium hirsutum
  unsure (1)..(320): unsure at all n locations
cccgatcgtaaagagtcacgaaggtggctttccgtacagcgatcggtttcgtagtgatgggattcgtcggattcttcgtcaagctcatctttattcctattaacaacatcatcgttggctccgcttangaattgcangctcgtagaaattggtgggggatatgaccagttggcgtagttgcagattctcatagaaaatgaatgttagaatgcagcacgtgggggctgtccctcttcccttctcattttacattttattagttgaaccaatagtcttgaatctaaagtaaactctcttggaatttctttgaacaatttgta

SEQ ID NO: 210263 - DNA, 433 bp, Gossypium hirsutum
  unsure (1)..(433): unsure at all n locations
cccacgcgtccgcagttcaccaagactcttgacaagaacctcgcaacaagtctgttcaagttgctcctcaagtacaggccagaggacaaagtggccaagaaggaacgtctcttgaaaaaggcccaggccgaggctgaaggaaaagcccccgagtctaagaaaccaattgttgtgaaatacggtcttaaccatgttacttaccttatcgagcagaacaaggctcaattggttgttattgctcatgatgtggatcccatagagttggtagtgtggcttccagctttgtgcaggaaaatggaggtcccatattgcattgttaagggaaaatcacgtttgggatcgattgtccacaagaaaactgcttccgtcttgtgtttgaccacggttaagaatgaggataagctggaattcagcanagtactcgaggcaatca

SEQ ID NO: 210264 - DNA, 400 bp, Gossypium hirsutum
gtccgggcttctaaggggaaacccccaccttatgaactatagccacctgtctatgaacctccaacgagaggaaaagcctgaacataagccacctgtctatgaacctccaaagaaagaaaaacctgaacccaagccaccgatgtatgaaccaccaaagaaggaaaaggccgaaccaaagccaccactttatacacctccaaagaaagagaagcctgaaccaaaaccatcagtatatgaaccaccaaagaaggaaaagcctgagcctaagccaccagtttatacaccaccaaagaaagagaagcctgaacccacgccaccagtgtgtgaaccaccaaagaaagaaaagcctgagcctaaaccaccagtttatacaccacccaaaaaagagaagcttgaacct

SEQ ID NO: 210265 - DNA, 454 bp, Gossypium hirsutum
cccacgcgtccgcccacgcgtccgtccctgctgagatgatcaagtgtgtggaagttttcaaaggattttatgaaacaaaaacaaagcacagaaagcttacatggatatactcgctgggaacttgccacattaatggcaagtttgaacacaaaactattgaacttattgtttctacttatcaggctgctgtcctactgctcttcaatgcttctgatcggctgagctattcagagattatggctcagttgaacttgacccatgaagacttggttagattactgcattcgctgtcatgtgccaagtataagatactaagtaaagagccaaacacaaaaaccatctcccagagtgactacttcgagttcaactctaagttcaccgacaaattgaggaggattaagattcctctccctcctgtggatgaaaagaaaaaaagttgttgaagatgttgata

SEQ ID NO: 210266 - DNA, 436 bp, Gossypium hirsutum
cccacgcgtccgcatgattaaaatctgcaagatgcttggtttggcagctcttgtagaggtgcgtgatgagagggaaatggaccgcgttcttggtatataggggattgaacttattggtatcaataatcgtaaccttgaaacatttgaggtagatatcagtaacacaaagaagcttcttgaaggagagcgtggccagatgattcgcaagaaagatataattgttgttggagaatcggggctttttactcctgatgatgttgcttatgtccaagaagcgggtgttaaagcagttttggttggggagtcgatagtgaagcaaagcgaccctggaaaaagaataagtggactttttggtaaagacatttcgttatgagttcacacagggaaaagtggactctggatgtgtgcttccgagacttcatttacaattactaca

SEQ ID NO: 210267 - DNA, 424 bp, Gossypium hirsutum
attggtgctcttagtttgcttcaacctcagcatctgtgtccctggatcttacactggaactatgaatccacctcaaagacaggttgcgtcagcacgaaatgcaaataatatgccaggaaaatccaagtcagtgctatcacaagagaatgatatggaaattgacccatggacacttttggaagacggagcaggatcaggtccatcttcaagtagcactgcagccattggaggcagtgacaatgctaatcttcgagcttcaagttggctcaagggggctgtaagagtgagacagacagacccgtcgtatattggtgctgtggatgatgatagctgattttaggttcaactatgtttttagatttggtcttaaggaatagcaaggcccctcacaacaggtaaattaaagcgttatttgttgtgcaca

SEQ ID NO: 210268 - DNA, 430 bp, Gossypium hirsutum; identical to SEQ ID NO: 195101

SEQ ID NO: 210269 - DNA, 394 bp, Gossypium hirsutum
ctttctttaatcattgtttgtttttcttaggtgcgttaatagtttcaaccccacaagatgttgcactgagtgatgctcgtagaggagttagaatgttctctaaagttcaagttcctattttgggattaatagagaacatgagctgcttcaagtgtccacactgtggtgaaccttcgttcatctttggtgctggtggagcccgtaaaacaacagctgagatgggtttgcaacttgttggtgagatacccattgaattggacattaggaaaggctgtgacaaaggcatgccgatagtggtatcagcacctgattccgctgtctccaaggcttaccatgatgtagctcaaactgttgtcatgagacttgaggatctggcaaaggcatgaaactactc

SEQ ID NO: 210270 - DNA, 404 bp, Gossypium hirsutum
cattgatggagcaatccaatggttggatggcaaccagctagccgaggctgatgaattcgaggataagatgaaggagctcgagagcatctgcaatcctatcattgccaagatgtaccaaggtgcaggggctgacatgggtggtggcatggacgaggatgccccacctaccggtggcagcggtgctggacctaagatagaagaagtcgactaaatcaaatattaagatagtattttgccgatgtttaacagcttctgctggtgctatattttatgttttcagcaacctatgttttgatgtattgaaaaaatctggtttatttttgggaacattaccatcttaagtaactaatgttccccgttttaagaattatatcaacttctctatattaatgtttagttttatc

SEQ ID NO: 210271 - DNA, 441 bp, Gossypium hirsutum
caagggtccaaagactggtcttaagacaccatttcgaaatgggttgttgtggcacattgcgggggatgttctaaagttggccaaggatggtttggaaagaaggggcttcaaggaatccgggttcttgaatgaggtggcagaggtggttcgtacaggtgtaacaccagctgagaagcttttggaattgtataatgggaagtggggacaatctgttgaccctgttttcgaagaactcctctactgagggattttatgtattttcagggctctttttgaggagggaatcaaattcttaaaatcttagtgctgtcatgcaacatctttcgttgtaattcgctaaggaacctcggatcatctttagacttcaaaaacttcctactaccgaatgcttttttttcttttatgtgattttgttagaggaataaacgatgctgtaactga

SEQ ID NO: 210272 - DNA, 406 bp, Gossypium hirsutum
ccaaatttggttgccttgaaaaaaatagtcactccaaaagctattaaacattaccagggccaaatttttgaccctaaccagaaaggaccctaacaagggccaacttcccaaaaaccgtgccaaccgttcttcaactcttttctttacacacaacacctccttgggaccgccttatcgtgttttggttgataccaacttcatcaatttctccatccagaacaaattggatctggagaaaggaatgatggactgcttatatgcaaaatgcactccttgcatcacagattgtgtgatggctgagcttgaaaaattgggccaaaagtaccgtgtagctttgaggattgctaacgatcctcgttttgaaagattgccatgtgttcatcaaggaacctatgctgatgactgt

SEQ ID NO: 210273 - DNA, 420 bp, Gossypium hirsutum
gcgtgcggttgcttgggacgaggtcaggaggtagtcagctgaggctgatcttaggcttagacttgaaatagaatataatgatcctttcgtgtctaaaccgccaagaaagcgacgggactgaatagcgtcagatatatgcctgctgggcagctggccagaaacattgagaaaatgtctgatgaagctgctgtggagattgcttttatgcaactcaagaagatccttccagaggcatgtgccccgattcagaatcttgtttctcgatggggcacatatgtgaacacactatgctcctatagctatgattgagtaggcatgtcccatgatcttgatgatatgctaagaaagccctgggtaacatattctttgcgggggaggccacccagatgagctatccacggtccattcatggtggcattt

SEQ ID NO: 210274 - DNA, 433 bp, Gossypium hirsutum
aaatgagccgaggaagtggaggcggctacgatcgtcatatcacaatcttctctcccgaaggtcgtcttttgcaagtggagtatgcgtttaaggcaggtaaagcagctggaatcacgtcgattggtgttcgaggcaaagactctgtctgcgttgttactcagaagaaagttcccgacaagctattggatcagactagtgtcactcatcttttccctattaccaaattccttggattgttggctactggcatgacagctgatgcaaggaccttggtccaacaagcaaggaatgaaacggccgagtttcggttcagatatggatatgagatgcctgttgatgtattgtctaaatggattgctgacaaatcacaggtttatactcaacatgcttatatgagacctcttggaggtgatgctatggttttgggtattga

SEQ ID NO: 210275 - DNA, 417 bp, Gossypium hirsutum
cttgcaacatatatcgagcctgggaagtgtttacatgggacggttggcagtccattttacatagcgcccgaagttttggttgggggatataatcaggctgctgatatttggagtgctggggtgattctatacatacttcttagcgggacaccaccattttggggtaagactaagtcaaggatatttgatgctgtgagggcagctgatttgcaattcccgtcagatccttgggatcggatttctgattctgcaaagaatttagtcaggggaatgctcaatacggatccctctcaaaagttcactgcactgcaagttttacatcatttatggatgaagtacgatgaatcttgccctgaagaatcaagtgagtttgtataccacagtcatggaaagttggaggttcatagtggctcattt

SEQ ID NO: 210276 - DNA, 396 bp, Gossypium hirsutum
gaataaaattatattgcactttgacaaggtgtgttggcctactgtggcttttttgggagttggtgctgacacatcttatcattgcagctactttctaaaccttcataaggcgacaggacattctggcctcggatatatgcctgctgggcagctggccagagacattgagaaaatgtctgatgaagctgctgtggagtttgcttttatgcaactcaagaagatccttccagaggcatgtgccccgattcagtatcttgtttctcgatggggcacagatgtgaacacactaggctcctatagctatgatgcagtaggcatgtcccatgatctgtatgagaggctaagagtgccagtggataacatattctttgcgggggaggcaaaccagatgagcta

SEQ ID NO: 210277 - DNA, 435 bp, Gossypium hirsutum
acggaactggcgagcagacattgagtcgagatatataccggctgggacatcggtttgactttggcagaatgctgtcttgttatttcactacagctggttgttatttcagtactctggtaacagggctcaccggctatgtgttcctttatgggcgcctctatcttgtactcagtggccttgaacaaggattgagtggggaaccagcaattcgtgataataagcctcttcaagtggctcttgcttctcaatcttttggtcaaattggatttttgatggcactacccatgttgatggaaattggcttggaaaggggtttccgaactgcattgagtgaatttatattaatgcaactgcaactggcaccagtatttttcacattttctcttggaacaaaaacccattattatggaaggacattgctttatggaggtgcta

SEQ ID NO: 210278 - DNA, 433 bp, Gossypium hirsutum
accgaatcagacgacataaagggtacagtaaactcatggagactttgcacagttactcaagtggaggagctaaaagctgtaattcgcttgcttcccatatgggccaccgggatcatctttgctgcagtctacagtcagatgagcaatttatttgtgttgcaaggcgaaagaatgaatacgcacgttggcaattctacgttcaagatcccaccagcatcgctttcgatattcgacaccctcagtgtgatcttttgggtgccaatctatgacagaatcattgtcccagtgacgagaaaattcaccggtcacaagaacggcctaactcaacttcaacggatgggcattggcctcttcatatcaatatttgccatggtagttgcagcgattctggaactcgaacgactccgggaagtgaggaggcacaattactatg

SEQ ID NO: 210279 - DNA, 437 bp, Gossypium hirsutum
cgggactacgcaaaggtagaacaccatagaaacttcgcttactttctcataaaccttgattttgctacgaaaaataagaacccggaatagcggaaatcggttcgtgttccgctttcaaagtaagttgtctttgcccaagtgtgaactgcagacgactctccagtggttccattccttcttactttacttttgggtcaacccaacccgaatgggaataagagggtcagccaaacagcgggcagctccactttgtacattttgtgaggcagaccaatcaggtttagaaaagggaggggaacttctcaccgaagcgaatgaggcagtaggaatgaaggaggcgggaagctaccgcttctagaatgcaagcttatccttgactttttttagagaaaaaaaaaaaggtttttggatgaagtaattggagtgacaaatggtta

SEQ ID NO: 210280 - DNA, 387 bp, Gossypium hirsutum
acgatccattttgttctgcaacatacgaattaaaagaaaaagtttgaaacccggaaatgtcggacgaggaacaccattttgaatccaaagccgacgccggtgccttcaaaacctacccacaacaggccggaaccattcgtaagaatggttacatcgtcataaaaaaccgtccctgcaaggttgttgaagtttcgacctccaagactgggaagcatggtcatgctaagtgtcactttgttggaattgacatcttcaccgccaagaagctggaagatattgttccctcttcccacaactgtgatgttccacatgttaatcgtactgactaccacgtgatcgacatttctgaggatggatttgggagtttgctgaccgaaaggtggagac

SEQ ID NO: 210281 - DNA, 439 bp, Gossypium hirsutum
  unsure (1)..(439): unsure at all n locations
gaaaaagagctgagtgaaaatcggaaaaaatatgctaagctgaaagaagagcttcttttgactccttcagaacttgcaaggatgaaagaagaagcatttcagtctaataagcataataatgctcataatgatactgctggaccacttatacggcacgaaatttctcatgaagatcaccctttgagccttggtaaggctagtgtctggcatcaatactttgagcatacggaaatcgcagaacacatcgaccgtgatttgcaacgcacacatcctgaaatgaaattcttctcaggagaatcatcattcggcaggaaacacagggaatcaatgaggaatgttcttctcctattttcgaaactcaatcccgccatccgttatgtccaatgcatgaatgacgtcttggcaccattatactatgtatntagcactgatacagatg

SEQ ID NO: 210282 - DNA, 423 bp, Gossypium hirsutum
cattagcatcaaaatcactccagctttctttatcactgaaaaatgtcttgctgtggtggaaactgtggctgcggtactggctgcaagtgtggcagtggctgtggaggatgcaagatgtatccagacctgaacgctgccgagatgaccacaactgagactctggttcttggtgtagcaccccagaaagcacactttgagggagctgagatggaattcggggctgagaacggctgcaagtgtggagacaactgcacctgcaacccttgcaattgtaaatgattagagaccaaagccaaagctccctggaagcagaggcgcctttgtctttaagaaataatatgttttgttgtttatgtgtttttagaataaagtagccatggcttgtcgtacgttttgcctgttgccgccacggttacttggtgc

SEQ ID NO: 210283 - DNA, 202 bp, Gossypium hirsutum
  unsure (1)..(202): unsure at all n locations
gacccacgcgttcgctaatgacccgtttaacctcattcttgacgaaaaagagggccctttcgaggtgtctaggggaggcaccctcaaantccaggagaaagatgggattgattatgcagccgtcacagttcaacttcctggtggggagcgagagcacttcctgttcaccatcaagcaataggttgcatcatgcaaaccagat

SEQ ID NO: 210284 - DNA, 445 bp, Gossypium hirsutum
cccacgcgtccgcccacgcgtccgaccaaatttatattttcccatatgcatagatagaatacataaatgcaagcatggaagtgactcttcaacatatgacactgaaggaaggtatatgccaatgaactttgagagtatttttagcaagtacgctcgaactgtgccggacaagttaacactgggggaactatggcacatgactgaggctaatcgaaactcatatgatttcattggctggataatatcaaaaggagaatgggtacttttgtatataattgccaaggatgaaaatggttatctaacaaaagaagcagtaaggggatgttttgatgggagtttgtttgagtatattgccaaaatgaaaggtggcaaggttcactgactgacgttgctgtgttaaaatatatgtgttggttttgggtgatcaaataaagcttgaattaaa

SEQ ID NO: 210285 - DNA, 381 bp, Gossypium hirsutum
cccacgcgtccgcaaaaaccctagttattaatcgagggaagcagaaagcctatacccatgactgtaaaacgtcggactggtggccgcaacaagcatggccgcggccatgtcaaattcattcgctgttctaactgtggcacatgctggcccaaggataagtcaattaagacgttactcgcgaggaacattgtggaacaagctgctgttagagatgtccaagaagcctgcgtccatgacactctatactttgcctaagctgcatgagaagatgcaatactgcgtctctggtgcgatccactaccacgttgtgagagtgcgatcccgcaccgataggaggaaaagtgacccacccgcccgcttcatcatacgcagggatgatat

SEQ ID NO: 210286 - DNA, 416 bp, Gossypium hirsutum
ggttcgttaagacaatggctaccatcagaatagctcttcgtaacgtccaccgcatcgttaatacctccgccgttgccggccgtacaacgaccgttttcaggccacagtatggttgggtttcaacatatttttcaactaatattagtaacactcagccattaaacatcgatctttctaacgaagaaagcaaaaggcgtctttataacagattgttgtataggagcaaacaaagagggtttctggagctggatttggttttgggaaaatgggttgaagaacatatccattccatggatgaaaatggaattaaagctcttgttaatgtcctcgatttggaaaaccccgacctttggaaatggctaaccggtcaagaacaaccacccgaagcagtgaccgttaatcctgtcttctctgca

SEQ ID NO: 210287 - DNA, 432 bp, Gossypium hirsutum
tagctcagttggtcttcaaatccttaagggccaaacgtgggtgcctgttaagcctattccaaatgcactcgtcatcaacatcggtgacactctagaagtacttacaaatggaaaatacaagagtgtggagcatagagcagtaactcacaaagagagagaccgcctttcaatcgtcactttctatgctccaagctatgaaatagaacttggtccaatggcagaactggtggatgagaagaatccatgcagatacagaagttacaatcatggagagtacagtaaacattacgtaaccaacaagttgcaaggcaaaagaaccctggatttcgcaaagatccaatccaagacctcgaattaacaaggattccactttggtcttcccccccccccactaaaacactattcttgtactatttaactgtagaaatgagc

SEQ ID NO: 210288 - DNA, 315 bp, Gossypium hirsutum
cccacgcgtccggcatggtggaacctgcaaagaatgtgggtacatagaaggacaacatccttcttctttgccttcattgattgcatagtgagacaattgggattgtctcaaacgacatttactctcacggccaaggtcgtcacagacgatgtctcgaagatgtaccagcaagagatcatggatttcgggagcacttccaccatgtttactgttatatcaacgttggcaatgctgaatcttttcagcttaattggggtagtagttaaggtgtttatggggggattagagtgtaaggacatggaaaaagttggtatc

SEQ ID NO: 210289 - DNA, 360 bp, Gossypium hirsutum
cagaaagctctatccattttgctacggctggttgaaccagatcaccgtcaaatagctgaactaaattttcgaatatgtatgtgtttggaaattggctcaaagccccaagaagcagttccatactgtcagaaagccatatcagtttgcaagtctcggctggagaggctcagaaatgaagtaaacaattctttagaatcagcatcatctgtcgctgcttctgaattggataatggtgtacaacagtcctcaaatggctatcaaactgtttcatctgtcaaagataaagaagcagaaatcaacacacttgctggtcttgctgaagacctggaaaagaagcttgaagatctacaacagctggtc

SEQ ID NO: 210290 - DNA, 434 bp, Gossypium hirsutum
aaggaattgggatggctgttgtagaggagctggcaacactgggggcaacagtttacacatgcagcctgaaccaacatcagctgaatgaatgcttgaaagaatggaagatgaagggttttcaagttttcggatccgtatgtgatgcaacgtctccggctcaaagggaagccctcatcaataatgttttctccatgtttaatgcccaacttaacatcctcataaacaatgtggggacaaacgattggaaaccaactgcggaatatacaaatacagaactttcgactttgttgagtaccaatttcgaatcggcttaccacttctcccaactagcttatccccttctcaaagcatcgggacgtggaagcaattgttttgtatcttgtgtcgccggtgtattctcaatcaatgttggatctatctatggatcaactaaa

SEQ ID NO: 210291 - DNA, 437 bp, Gossypium hirsutum
cttggctctgctaatcggcacttgagatctttaaacaggaagaaaatggggttcattatggaatttgcagagaatctggtgttgaggttaatggaggacccaaaagagagggatagaaaattcagagaacacgtttactctatgaaggatcgatgcgcaaaaaccaaggagatgtggagttatccactgcggccttatgggttttggacatttgagcgccacaatgctcagctacgttgggatcctcacattagccaagttctcggccgaaaggatccttatgatgaccttcttcaagacaggtatgcgtcttcctccaaacgaaactgaggaatcagatgccattagcagatggttgggagcttgatctacaaatgggaagtggacattgaaacccttgttactgtgtggttgaatttattgtcaattgtgctaca

SEQ ID NO: 210292 - DNA, 427 bp, Gossypium hirsutum
gtgcattctagccccgacccacctcccgaaacgtacgatttcgtcgtacggccgagcattgaaggccaggtcatgaacttctacgtgttgaaacggcccggcgtcgattttttcctggaagaaataagcaagaaacacgaagtggtggttttcacggcggggctcaagcaatatgcttcccaggtcttggataagctcgacccgaagggcttaatatcccaccggctttatcgggattcttgcaaggaactgaacgggaagttcgttaaagacttgtctgaaatggggagggatttagggagaattgtcatcgtcgacgataacccaaacgcttactctctgcaaccagagaacgccgtccctatacggccatttgtggaggatagtcacgacagggagctggagaaattggttcaattctttcagt

SEQ ID NO: 210293 - DNA, 440 bp, Gossypium hirsutum
gctatagggttttggtagacaaggaaaaaagaagaaaagaatggcaaagtgtttcaacgtgggtcagaagcagaagagagcccaaatagcggagagaaaaagattaattcatggtgaccctgcaactaagaagctaaagaacaaatcccaatcactctccgtctctggaaaacgcaaacgcaagcttctcaaaaaatggcgcagggagcaaaaggaggttatagagaagggtttggtgactatggaagatgtggaaatggtggctgctgaaggtacaactgaagatggaggcacatgccaagatgccaccatcaaagtgccaacaaagttccccatgaagaagaatttgaagctcaaacgcattaatcgaaaagggaaaaagaaaggtggtagttcaaaggctgggattgaagctgcttcagtggattccatgatagaat

SEQ ID NO: 210294 - DNA, 401 bp, Gossypium hirsutum
gtggattcccgctcgatttatgttggtaatgtagactatgcatgtacacctgaggaagtacaacagcattttcaatcctgtggaacagtgaacagagttacaattttgaccgataagtttggtcaacctaaaggatttgcttacgttgaatttgttgaagttgatgctgttcaaaatgctctactgttaaatgaatcagaattgcatgggcgccagttgaaggtctcggctaagcgaacaaatattcctggaatgaaacaatatcgaggaaggcctttcaatccttacttccgctcccgaaggcctttcatgcctgctttttatcctccctatggctatgggagggttccaaggttcatgcgggccatgagataccgggcgtatttagatgggtcacacat

SEQ ID NO: 210295 - DNA, 294 bp, Gossypium hirsutum
  unsure (1)..(294): unsure at all n locations
gcgccggtcagcgtacgcgcttcaaggccttcgtcgtcttcggtgacggaaatggacacgttggactcggtgtcaaatgtagcaaagaagttgcgacggctataagaggggcgatcatattggctaacttgtcagtgataccggttagaagaggttactggggaaataagatcggaaaaccccatactgttccatgcaaggttaccgggaaatgtgggtccgtcaccgttaggatggtgccggctcctagaggtgctggtattgtggctgctanggttcccaaaaaggtgcttc

SEQ ID NO: 210296 - DNA, 432 bp, Gossypium hirsutum
ggaagctggagtgatctccaagccatctctcttcagtcttttaagctccgcttttgctaaaatcaaatcagtttctcccctaaatttactgaaattttatagcaagactccttatttctccgatgtcgatcttcgaatacaacgggagtgccctaatagccatggtaggcaagaactgcttcgccattgccagcgatcggagactcggagttcaactccaaactatcgccaccgatttccagaggatttataaagtccacgatcgcctcttcctcggtctctccggcctcgccaccgatgctcaaaccttgtatcaaaggcttgtctttcggcacaaactgtatcagctaagagaagaaagagacatgaaacctgagacttttgctaaccttgtttctgcgattctttacgagaaaaggtttggtccatact

SEQ ID NO: 210297 - DNA, 377 bp, Gossypium hirsutum
cccacgcgtacggacacgcgttcgcccacgcgtacgatgagagcaaggttgggcacatttttgtggttgggaactttggagaactgtttgagatagttctatattttcttgggctggttgacaagttcttctatctctcaggcatatatgacatggagctcactatttgtgatgctgttatggagaactctttgttagtggctattggacatattgagatagatctatcagaagcactcgataaggcacctcgcccttctttttaagccattgatccatacttaagatatggacccattggagagataagacacatctttagggcttctgaaaagcgcacacctcaagggctttccctagctttgctgaagcttact

SEQ ID NO: 210298 - DNA, 334 bp, Gossypium hirsutum
gctcgatctttaaatatttttgaagtttttcttccacagctcttgctttatccaaatccttcagaccctctaaatggggatgcagcatcattaatgatgaaggatcgaaagcaatatgatcaaaaaggaaaagaatactgtgagcgatatgcaaagaaagaagacatcacgaaatccgcagctgacaaggaaactgatgatgaggatgacatcactgatgaagatactggatctagtgatgatgaaattgctggacatgcacatccataaccaccttggaagaatctatcttttaccaattatacacttgataaaagcgatgatgaaccccctt

SEQ ID NO: 210299 - DNA, 416 bp, Gossypium hirsutum
cccacgcgtccggaaaaatggaggtgctgacatgaatcccgtggatatcgaatatgtcaagagatgtacgtttttggttgcatctgggatttttgatggatatgatgtacctcatcagccatcgaatataaatattcgttctaagaagctcttctgttttctgatggttgttgatgaagtatctctcaaatttattaaagaaaatgtgaccgtcaggaaggataaagataaggggatgtgggtaggcttatggcgtcttatcccattgaagcatcaaccttatgatgagcccagaaggaatgggaaggtttccaagattttaacccacaggttattcccccaagcacagtacagcatttggattgatggtaaaatggagctgatagttgatccattgcttatttcttgaaagatac

SEQ ID NO: 210300 - DNA, 323 bp, Gossypium hirsutum
caaattttatgtaaagcttgaatggatctatttcattctcagaaacctacggaaaccccggtcttgcattatctgaagattttgaaataaaggagattgaggtacgcccggctatctttctctttctccattctacaaccatgtcactgttttggttgcttcatgaattcatatttggcttgtttataatcttatcatatagatgcttcattaacttaatccttatatcacagatgtggggctttgtatatggatcaaaatatgatgaaatacttggtttaagtagaacagaaatgcctggaatttgcccgtgggtaaacacc

SEQ ID NO: 210301 - DNA, 288 bp, Gossypium hirsutum
accacgcgtccgccactcgtccgtccacgcgttcgatagtccctaaatccccaggattgttcttcaacgaaaacatgtcgcccttgttgatgaagatggctgagaggtggccctggagttactctcatgtcggagttgaactgcctttggatcatataaactcggcatttctaaaaaagactggcgacctcagttgcgcacataacatggaagctcttttgcatatacttgacgggtaccatgcaaaaggtcatacattcgtgctttccaatggaaaggaccctgctt

SEQ ID NO: 210302 - DNA, 393 bp, Gossypium hirsutum
gaaaaaagcggtcagacaaagagagaaacgggtagacagagagagcaacaatggcaacgttggccactttgggaactacttcactccttcggtttcagaaagcagaccccctaacggcaagcccatctccacatcttctgggttctctctcttctcaactcagtggcatcaaactctcctgcaacctccctgacgtggcacctctcaaatccatatcctcacctttcactccttctctccagcctgttgctcgcagagtatgccctttcactggaaagaaggcaaacaaagctaacaaagtatccttctcgaaccacaagacaaagaaattgcagtttgtcaatctccaatacaagaaagtttggtgggaagctggtaaacgctatgtaaaac

SEQ ID NO: 210303 - DNA, 438 bp, Gossypium hirsutum
cccacgcgtccggaaaaatggaagagctgactttcatcccgtggatactgagtctgtcaagggatgtaagttttggtttgcatttacgatctttgatagatatgatgaacctcactatccatcgaatataaatattcgttctaagaacctctgacgctatctgatggtggcagatcaactatctctaaaacttattaaagaaaatgtgaccgctttgaaggatataaatcagggtatgtgggcaggcttatggcgtcttatcccattgaagcatcaacctgctgatgagcctagaatgactgagcaggaacccacaattttgaccatcaggttatttctccacgcacagcacatgctgaagattgatcgtcacatggaaacgatacttgatccactgattattcttgaaacatacttatggagcgatatgcatacttt

SEQ ID NO: 210304 - DNA, 439 bp, Gossypium hirsutum
  unsure (1)..(439): unsure at all n locations
ggtgaaaagaagtggcctggatggcctggagagagtgtgtttcgaatgttggttcccgcgcaaaaggtcggtggtataatcggacgaaaaggggaattcataaaaaaaatagttgaggagacgagagcacgtatcaagatacttgatggtcctccagggacgacagaaagagctgtaatggtatctgccaaggctgggaatgaggtacgagatggagaggaacgacggtgccgatgagttgttgggtgaaatctttgatgatgaagagcctgcgttggaggagattaaggaagcgtttgatgttttcgacgataacaaagatgggtttatcgatgcgacggagctgcaaagggtgctcatttgcctangcgtgaaaaggaagatggtgaccgtggatgagtgtaagaagatgataacgatggctgatacggatggagat

SEQ ID NO: 210305 - DNA, 351 bp, Gossypium hirsutum
ggttgtttgagggatcataacattgatgaccttaaggagttaccaaaaggaaagtggttttgttgcacggattgcaatagaatccattctgctttacagaaattggtcattcgtggggaggagcagcttcctgattcatctctggctgttgtgaagaagaagcatgtagaaagtagtttagggagcaaggccaaacttgatataagatggagggttctcagcgggaaaatgacatctttagatgacaccagagtaacgctatcaaaggctgttgcgatcttccatgagcgctttgatcctataagtgactctggatcgagtagaggtgatcttatcccatcaatggtttat

SEQ ID NO: 210306 - DNA, 346 bp, Gossypium hirsutum
gtgacaagcactctgccatagaaggaagtcggaaactagagcacagtgaggagttgaagtgcctagataaagctgccatagtcactgatgttgaaaccaaaagtggggacttctcaaatccttggaggctttgcactgtaacacaagtggaggaattgaaaatcttgatccgcatgtttcccatatgggttactggaattgttttctctgctgtatatgctcaaatgtcaactatgtttgtggaacaagggatgatgatggacacaaaaattggttctttcactattcctcctgcttttctctcaacttttgaaggtattagtgttattttttggggtcccatcta

SEQ ID NO: 210307 - DNA, 393 bp, Gossypium hirsutum
cttctatctttattttctcgcctgtgacgagaagccgacgctaccatggttcacgtcagtttctaccgcaactatgggaagacctttaagaagccacgacgtccgtatgagaaggaacgattggatgctgagttgaggcttgtaggagagtatgggctccgatgtaagagggagctgtggagggttcagtatgctttgagccgcatccgtaatgctgctagggaccttctcactcttgatgagaagaaccctcgtcgtatttttgaaggtgaagcccttcttcgtaggatgaacagatatggacttttggatgagagccagaacaagctcgattattgtgttggctttgactgttgaaaaacttccttgaacgtccgtttgcaaacgctcgtg

SEQ ID NO: 210308 - DNA, 360 bp, Gossypium hirsutum
ccggggtggaactacccggtcgaccgactcttatatacctttgactgaacctttttaatagccttttttttacgaacctaagccaggaaaaacatcgggctatatcacctacaaagaaaaagaaacctgaacccaaaccacccatgtatgaaccttcaaaaaagcctacaatgtacgaacctaaaccaccaaaaccaccggtttatacacctccaaagaaagaaaaaccagaacccaagccaccaatgtatgaaccttccatcaacccaccaatatatgagcccaaaccacctaagctaccagtttatgcaccaccaaaggaagaaaacgcccaataatgagaacagatgaaatggaatt

SEQ ID NO: 210309 - DNA, 280 bp, Gossypium hirsutum
ccatctctggcgttcttgacaggtttgccgccatgggtattgacacccctggagtcgttgccctcctaggagctcacagtgtcggcagaactcactgtgtgaagctggtgcatcgtttgtacccagaggttgaccctgccctcaaccccgaccatgttccacacatactccataaatgccctgatcagatcccagaccccaaggccgtccagtatgtgagaaacgaccgtgggacacccatggttgtggataacaactactacaggaacatactgggaca

SEQ ID NO: 210310 - DNA, 118 bp, Gossypium hirsutum
ctcctacttaaaagcaaagtccaggagagttgcgtttgcacaaagatatttttgagcttaacctacccaaatcttgtgctataacattttcaaatggaaaggataacccgatgaattt

SEQ ID NO: 210311 - DNA, 449 bp, Gossypium hirsutum
cccacgcgttcggtgacctttgtcccctctggtctgaccactgaagttaagtctgttgagatgcaccatgaagccctctctgaggctctccctggtgacaatgttggattcaatgtcaagaacgttgctgttaaggatctcaagcgtggcttcgttgcttcaaactctaaggatgatcctgcaaaggaggctgccagcttcacctctcacgtcatcatcatgaaccaccctgtgcagattggaaacggatatgccccagtccttgactgccatacctcccacattgctgtgaaactttccgaattgctgaccaagatcgacaggcgatctggaaaggagcttgagaaggagcccaacttcttgaagaatggtgatgcagggatgataaagatgggtcccaccaagcctatggttgtggagactttctctgagtacccaccacttggacg

SEQ ID NO: 210312 - DNA, 450 bp, Gossypium hirsutum
ctcatgacccgtttaacctacacccttgacgaaatcgagggccctttcgaggtatctaccgatggcaccctcaaattcgaggagaaagatgggattgattatgctgccgtcacagttcagcttcctggtggtgagcgtgtgcctttcctgttcaccatcaagcaattggttgcatcaggcaaacctgatagctttggaggagacttccttgtaccatcctaccgtggctcatctttcttggacccaaagggaaggggtggctcaaccggttacgataatgcagtggccttgcctgctggaggaagaggggatgaggaagagctagccaaggagaacaacaagagtgctgcatcttcatcagggaaaatcaccttgagcgtcacaaagagcaagccggagaccggtgaagttatcggtgtgttcgagagccttcagccatctgacactgac

SEQ ID NO: 210313 - DNA, 361 bp, Gossypium hirsutum
cccaattttagtggcaacagatgtggccgctcgtggtcttgatataccccatgtagctcacgtggtcaactttgatctccctaatgacattgatgattacgtccatcggattggaaggacagggcgtgccggtaaaacaggattggcaactgctttctttaacgaaggcaatttgtcaatggcaaggccactagctgagctaatgcaagaagcaaatcaagaggtacctgcatggcttacccgatatgcatcccgggctccttacggtggtaataaaaaccgacgatatggaggaggaggagggcgttttggtgggcgtgatttcagaaaggagggttcagttggtaggaacctacatcac

SEQ ID NO: 210314 - DNA, 438 bp, Gossypium hirsutum
gatacttgatatgctattagcgaaggatgaaccgaagaaaatctgctcacaaattggtctatgcttatttgatggaactcaaggtgtaagtatggggattgaaagcattgtgaatgagaatgctggaaaagcctctggcagtttacgcgatgctatgtgttctacatgtgagatggcagttatatggatgcaaaaccagcttaagcagaaccagacagaggaccatataattgactatgtcaatgagctctgtgatcgattgcctagtccaatgggagaatcaagtattgactgtaaaagtctatcttctatgcccagcgtctctttcacaattgctggaaagttatttgagctccgtcctgagcagtatgtcatgaaagtgggcgagggagatggggctcaatgcattagtggattcactgctctggatgtaccacc

SEQ ID NO: 210315 - DNA, 409 bp, Gossypium hirsutum
accaaagttattgctgatggcggttatgagaagatctttcggacaacatttgagactgttcctgaggaactgcttctgaagacatatgcttgctacttgtccacctccgctggtcctgttattggagttttatatatgtcaacccataagcttggtttttgcagagacagacctctggcttatcaagttggtgatcagactcaatatagctattataaggtggttattccattacaccagctgagggcagtgaattcatcagctagcaaagccaacccagctgagaaatacatccagattatatcggttgacaaccatgaattctggttcatggggttcgtacactacgacagcgcagttaaaaatcttcaaagagcattgcagtcccgtggctcatgatgtgatgtta

SEQ ID NO: 210316 - DNA, 412 bp, Gossypium hirsutum
tgcattgctgctgcaacaagatggatgccactacccctaaatactcgaaggctaggtatgatgaaatcgggaacgaagtctcttcctacttgaagaacgtgggatacaaccctgacacgattccatttgctcccatctctggttttgagggtgacaacatgattgagaggtctaccaacttggactggtacaaaggccctactcttcttgaggctctcgaccacatcaatgagcccacgaggccttcagacaagcctttacgtctcccacttcaggatgtgtacaagactggtggcataggaactgtaccagttggtcgtgatgaaaccggtgtctacaaacctgttatggttgcgacatttggccctattggtctgacaaccgaagataaaccaattgagatgcaccatga

SEQ ID NO: 210317 - DNA, 290 bp, Gossypium hirsutum
cgctttgctgctgcaacaaaatgtatgccactacccctaaatgctctaaaggttggtatggggaaattgtaaacgacatctcttcctacttgaagaacgtgtgcttcagccctgacaagattacatttgctcccatctctgtttttgatggtgacaacatgatgcataggtctaccatcttggactggtacagaggccctacactgctcgaagctcttgaccacatcaatgagcccaaaaagccttcagacaagccttttcggctcccacttcatgatgtgtacaagatt

SEQ ID NO: 210318 - DNA, 451 bp, Gossypium hirsutum
ctcaattacacccaaacaagcaaagaagtccaagatagatatcatgggccgtggagttagcagcggtgggggacagagttctttgggttacctttttgggagtggagaatcccccaaacccaccccgaaacatgtcagtcctagcactggcaccgtcaatgaagttcctcagacacagaatgaggttgtcaaggaaaccccaccaccagctgttgtccctaaggatattcctgcaggcattcctgggaacaatgcaaacaattatttccgtgctgatggccagaactgtggcaactttcttacgtatcatgctcacattcagatgatgttaacaaagctgtcacatagaaacattgatgaagaattgttttatacatgatttatctgaaggatcggcctacaacaaaggttcatgcagcacctggcggaggatcttccctggaataccttt

SEQ ID NO: 210319 - DNA, 449 bp, Gossypium hirsutum
gtgataaccatcgagaactcacgttcagatgaaaagctcctttctgtattccgggaaggagtgaagtatggtgctggaatcggccctggtgtctatgacatccactctcccagaataccatcaaccgaagagattgctgaccgaattaacaagatgcttgctgtgcttgagacaaacatcttgtgggttaacccagactgtggtctcaagactcgcaagtatgccgaggtgaagccagccctgaacaacatggttgcagctgccaagctgctccgcacccaacttgcgagtgccaagtgagaggcatatccaaggtcggacatcatcctttatatcgaaaatgatccaaaggaaatttggcttaaatcatttgaataactgtgtgtggaaagatttgtaagcgtatcatatgcccctctttgagggcaaatggtttccctttctttttt

SEQ ID NO: 210320 - DNA, 455 bp, Gossypium hirsutum
cgcaccatgtgcaccatacttgctatgacaagatacaaggatgcgatttacatgaaggtgaatgggggaaagtctgtaccattgtccattggagttatgtgcatgatggaaaggctaaaaaggcaaaggaagtagtggaagcagtagaccctgataagaatttggtcactttcagagtgatcgaaggagatctaatggaagagtataagagctttgtaatcacgattcaagtttcgcccaagagcgagggtagtggcagcgtagtgcactgtactttggaatactagaagctgcacggtgggattgatcatcctgagactctgctgcacttcgttcaagatgtatctaaagacattgacggccacctcacccaagcaagttaagcagtatcacatgatgctatcgttgccgatacttgaagcactattcatctatttaatgaataaagtgacaac

SEQ ID NO: 210321 - DNA, 421 bp, Gossypium hirsutum
caaggctagcagtgtggaggagattgatgaggagaggcttgatagggtgtttaggaccaacatctattcccaattcttcctgtccaggcatgctctgaagtacatgaaagaaggcagctccataatcaatactacatccgtaaatgcatataaagggaatgacaagctacttgattacacagcaaccaagggtgcaattgtggctttcactagaggcctttcacaacagctggtgaaccgaggcgtacgtgtgaataccgtagcacccgggcccatatggactccattgataccagcatcatttgatgaagaagaaaccgctcagtttggagctcaagttccaatgaaaagacctgggcagcccagcgaggttgcaccatgctttgtgttccttgcatgtaaccactgctccttctacatg

SEQ ID NO: 210322 - DNA, 441 bp, Gossypium hirsutum
gggaatgctggctctgcgattggaatactatcgaaggatggtgtcgtcttggttggtgaaaagaaagttacttccaagcttcttcaaacctccacatttacggaaaagatgtccaagatggatgatcatgttgcttgtgccgtggcgggaataatgtctgatgcaaatatcctaatcaacactgctagggtgcaagctcaacgatacacatatgcttaccaagagccaatgcccgttgaacagttggttcaatctctctgtgatacaaagcagggttatacccagtttggtggtctccgcccattcggtgtttcatttctttttgcaggatgggacaagaactatggattccaactttacatgagtgatcctagtggtaactacagtggatggaaagctgcagctattggtgcaaataatcaagcagctcagtcaatgttg

SEQ ID NO: 210323 - DNA, 309 bp, Gossypium hirsutum; identical to SEQ ID NO: 194319

SEQ ID NO: 210324 - DNA, 397 bp, Gossypium hirsutum
tgtgccaccgtcagcgtactatcattcgggtggttggaggctaaatcctaatttatacgaggaaggcaaggtgtgccttagccttctaaacacatggacaggcaagggaaacgaagtttgggatccatcgtcttcaagcatccttcaagtcctagtttcactgcaagggttagtgctaaatgctaagccatatttcaacgaagctgggtatgataagcacgttgggacagccgaaggagagaaaaattcgttggcgtacaacgagaatactttcttactcaactgcaagtcaatgatgtatctaatgcggaagcccccgaaagactttgaacaacttatcaaagagcatttcagacaacgcgggtattacatacttaaagcctgtgatgcatacatg

SEQ ID NO: 210325 - DNA, 418 bp, Gossypium hirsutum
agcaaagcacatattttccaacaggtaaacaaaattaattattcaataaataaaaaccctaagtaattttggtggaaatgtcgggtaaaggagcgaaagggttgattacggctggcaaatccgccaaagacaaagataaggacaagaagaaacccatctctcgctcatctcgtgctggtctccagttcccggtgggtcgtgtccaccgtctgttgaagacaagagttaatgcacatggaagggttggagcaacagctgctgtatatactgctgccatactggagtacctgactgcagaggtgctagaactggcaggtaacgcaagcaaggatctgaaggttaagcgtataacgcctaggcatttgcagcttgcaattcggggtgacgaagaacttgataccttgatcaagggaaccat

SEQ ID NO: 210326 - DNA, 436 bp, Gossypium hirsutum
  unsure (1)..(436): unsure at all n locations
gaaaacatttccttagagcataaaagaaaatttacgaacatgccgggtgtcaatcctgaaattgagttcccagccattgagttccgttcatcggatttgaagcgaggaaccgaagggtggaaccgtttgtgcaagagggttcaacgggcttgtgagactttcggttgtttcgaggtggtatacgaaaaggtatccacgaaacttctagaggatgcgtttgggttgatgaaagaaatggttgagctcccagtggagacgaagcagaagaataatattcccatgccttaccatggttgggttggaccttgcaagcaggtttctgtgttgtatgaaggcttttgagttggagatgccttcaactatgactctgttaaaagttttgctcaacttatgtggnctaatggtcacccacacttttttgacactattataccct

SEQ ID NO: 210327 - DNA, 438 bp, Gossypium hirsutum
cggacgcgtgggggcttcttggctaacaaccaagccccattgcttgtcaacttgtacccctatttcagctacgatgacaacaacgttatcgatctaccatacgcactcttcactgctccaaaccctgttgtggaggatccccccttgcggtacagtaacctgttcgataccatcttggatgcagtttactccgccctgcagaaggctggtgggggttctttggagattgtaatatcggaaagtggatggcctaccgctcgaggtacgaaaagggcagcaccaagtattgaaaattcaagaacctataaccagaacttgatcaaccacgtgaaaaaagggacgcctaagaagcctggaaagcctatataaacgtatatttttgccatgtttgatgagaataccaaaacgggcgaaggaatcgaaaaacactggggactt

SEQ ID NO: 210328 - DNA, 452 bp, Gossypium hirsutum
cccacgcgtccgcccacgcgtccgattacgtttcataaagaaataatcatctttttttaacttatttatctttactactaaggttttttttttttttaattttatttgggtcctgctattatatattataaacaaaactcctataatggctacatcctcgggttcatcagcaacacaaatcaactcaggctcagaagaagcattaatggacgaaaggaaaaggaaacgaatgatatcgaacagggaatcagcaaggagatcaaggatgaggaaacaaaagcatttagatgatctaatgactcagttgactcagttgcagaaacaaaaccatgagatcatcacaaacataaacttcaccacacaacacctcttgaatgttgagtcagagaactcggtgcttagagctcaactcaatgaactcactcataggttacagtccttgaatgaaatca

SEQ ID NO: 210329 - DNA, 454 bp, Gossypium hirsutum
tgcgatgacatgcagagctgttgtataggtctctttttcccctgctatttgtttggaaagaatgcagaatttttgggttcgggtactctagtcggatcctgcatcacccatttcattctttgggcccttgtcaacactctctgctgcgtcttaactcaaggcttctatttggctttacctggatttggatgctttatctcttgttatccttgtggctatcggagggcacttcgctccagatacaatttgcaggaagcaccttgtggggactttgctactcactttttctgccatctttgtgccatttgtcaagagtacagggagattcgtgaaagggcagaggaccctaaaccccctgatcttaatctggctgtcgtaactgcaccagacgtccagacaatggaatcatcacatctctagtaatgaggtgctattactttggaattttgtttct

SEQ ID NO: 210330 - DNA, 452 bp, Gossypium hirsutum
ggcacttctgaagagcagcggaagaagcattggcgagaatcaaggtccatgagttgagacagaaatcaaaaactgagcttttggctcagttgaaagatctcaaagctgagctcgctcttcttcgtgttgccaaagttaccggtggtgcacctaacaagctttccaagataaaggtggtgaggttgtcaattgctcaggtgttgacagtgatctcacagaagcagaaggctgcactgagggaggcatataagaagaagaagttcttgccccttgatctccgtccaaagaagaccagagccatcaagagaaggcttaccaagcatcaggcatcgcttgagacagaacgtgaaaagaagaaggaaatgtacttccccatgaagaagtatgccattaaggtgtaggataagatatttaagattctattttgaaatcccgttgtgtttacttatttg

SEQ ID NO: 210331 - DNA, 422 bp, Gossypium hirsutum
gatggaattcacctacagaactccaatgatgtgctaattcatagcagtgatctcgcctgtggagatgactgtgtttccatacaaacaggatgctcaaatgtatacatacacaatgtgaactgtggaccagggcatggaataagcattggaagcttaggaagggataatactaaagcctgtgtctcaaacatcactgtcagggatatcgttatgcataacacaatgaatggtgtcagaattaagacatggcagggtggatcgggatctgttcagggggttctgttctcaaacattcaagtttccgaggtccaacttccaattgtgatcgatcagttctactgcgacaaaaggaaatgttcgaacgaaacagctgcagtcgctctatcaggaatcacctatgaaaaaataagaggaacatacac

SEQ ID NO: 210332 - DNA, 455 bp, Gossypium hirsutum
gttatcgatctaccatacgcactcttcactgttccaaaccctgttgtggaggatccccccttgcggtacagtaacctgttcgatgccatcttggatgcagtttactccgccctggagaaggctggtgggggttctttggagattgtaatatcggaaagtggatggcctaccgctggaggtaggaaaagggcagcaacaagtattgaaaattcaagaacctataaccagaacttgatcaaccacgtgaaaaaagggacgcctaagaagcctggaaagcctatagaaacgtatatttttgccatgtttgatgagaataccaaaacgggcgaagaaatcgaaaaacactggggactttttcttccaaataggcagcctaaataccaaataaattttaactaaatagctgcacagaatctgtagatgaagggcatttcaaccatgctagctattctact

SEQ ID NO: 210333 - DNA, 433 bp, Gossypium hirsutum
aaaaaaccagacatggcttccaacactgttgcatccgctgctcttcttcttaccttgaacttgttgttcttcactttggttagctctacctacgtgccttgcccaccaccaccaaagagccacaagcctacccacaaaagcccaccctcggcacctgaacagccaggcacttgccccagagatgcactgaaactaggcgtttgtgctgatttgttgggctcagtgcgcgttgttgttggaccgtcgaggaccaaatgctgctctctcatttcgggtttggctgatctcgatgctgctgtttgcctttgcactgctattaaagctaatgtgttgggggttaacctaaacgttcctgtttcattgtctttgctcctcaattcctgcgaaaagcaaatgcctgctggttacaaatgtgcttaaactcattttcact

SEQ ID NO: 210334 - DNA, 427 bp, Gossypium hirsutum
cccacgcgtccgcattaccaaatcaaagccaaaactagtggttgttgaacttaaaacactgttctgttctccccctttcctcttggtgtccggcttcagttccatctatttgtccatggatcttacacctcagcaacttatccagttcaacggctccgacccatccaagcccatctacgttgcaatcaatggtcgcatctacgatgtcaccgccggcaaatccttctacggtcctggtggtgcctacgccatgttcgccggcaaagatgccagcagagctcttgcaaagatgagcaagaacgaagaagatgtctgtcccaaccttgacggcctctctgaaaaggagatggatgtccttaacgattgggtcaagaaatttgaagctaagtaccctgttgtcgggcgcgtcgtctcttgaaaatttgca

SEQ ID NO: 210335 - DNA, 379 bp, Gossypium hirsutum
gcgggattacccgctgagtttaagcatatcaataagcgggggaaacgaaacttaccacgagtccactattcacggctagcgaaccgggaaaagccgagcttgagaatcggacgccatcggcgtccgaattgtaatctgcagaagctgcctcagcgacggaccggtcccaagtccactgtaaaggggcgccgtagagggtgagagccccatcttgcccccaccctgtcgcaccaagaggcgctgactacgagtcgggttgattggtaatgcagccctaatcgggcggtcaattgcgtccaatgctaaatacaggcgaaagaccgatatcgaacatgcaccacgaggtgaagaatcgactatgaatccataacaaataaat

SEQ ID NO: 210336 - DNA, 383 bp, Gossypium hirsutum
gggcctttgggggataagcttgaaaaaattagctatgagaacaagtttgaggcagctgcaggtggaggaagtatttgcaagagctcaatgaaattctacactgttggcgataatgttatcactgaagacgaaatcaaggctctcattaaagggagtgaaggagtttacaagcctgttgaagcttacctcttggctaatcccgaagcctgcaactaggatataagttgctttaaattcttatgcttgcttttaaagaggggtttgattttaatgttgtgcttttgatattttctttttcatcttaaaacctatattgtcttctggttgttcagtaagaatgatggtggtggtgatcgaactttgatcatctttgatatataatg

SEQ ID NO: 210337 - DNA, 324 bp, Gossypium hirsutum
cccacgcgtccgctccaccatcacccccaaaaaacaaagcaaattgtagaagatggcaacacaagcacttgtatcatcgtctcttacctactcagtggagactgcaaggcagattcttggagctaaacgacaaattgggtcttcaaggaaaggatcctttgttgttaaggcagcttcgactccacccgttaagcaaggagctgatagacctttatggtttgcatctaaacaaagcctttcatacttggatggcagccttccaggtgattatggatttgaccccttgggactctcagaccctgaaggtccaagaaggttcatcga

SEQ ID NO: 210338 - DNA, 370 bp, Gossypium hirsutum
agattctacatatatttgcagcagttgcgtatgcagagattctaattcgtgcttgtatttgaggccaaaacgaaactggaattgttttcttgaataccctgatttaattctaaacgtgtttcagtgtaaacacaaaaggggcattcttgtgtgccaaggaagcagcaaacatgctgaacccgcgcagaggaggtcggatcatactgctgtcatcatcaatggctgctgcactgaagccaggattcggtgcatacgcatcatcgaatgcagctatagaggcaatggtgaaaatactagcaaaggaactcaaaggaactggtatcactgcgaattgcgtggcaccaatgccgattgcgacagagatgttctt

SEQ ID NO: 210339 - DNA, 418 bp, Gossypium hirsutum
cccacgcgtccgaaaaaaaaaaaaaaaagggaaagcaagtttttatggctccccaagacaaaaatgcgagcaaaaccttgaagaaagctaacggtactggaagtacgagcagccaagaggtgcatttcaggggagtaaggaagaggccatggggtaggtacgctgccgaaatcaaagatcccggcaagaaaagccgcgtttggcttggtactttcgatacggctgaggaagctgccagagcctacgacgcggcggcgcgtgagtttcgtggacctaaggctaagaccaacttccctttaccggatgaaaccaactgttacaagggccagaaccagcagagccctagccaaagcagcacggtggaggaatctggaagcccaacggtggagcgtggagtcaacaccttgtccggggcagt

SEQ ID NO: 210340 - DNA, 429 bp, Gossypium hirsutum
cgaagagcggtgtcggggtggcatcgatgggagtgatgaggccggagctggtgatgaaatcgatcgtgcccgttgttatggctggagttttaggtatttatgggttgattattgcggttattatcagcactgggattaacccaaaggccaaatcttactacctgttcgatggctatgctcatctttcctctggtctcgcttgtggcctcgccggtctctctgccggtatggccattggaatcgtcggcgatgctggagttagagccaatgcccaacaaccaaagctttttgttggaatgattcttattctcatttttgctgaggctttggctctctatggactcattgtcggtatcattctctcttcccgggctggtcaatcccgagcagaatagagtgcaaagttccgaaacttgggtcattgctagt

SEQ ID NO: 210341 - DNA, 431 bp, Gossypium hirsutum
gaggaactgaagttggagaaagaaagcttggcgatggatctttctcgatgtaccgaaaacctggagataaccaagtctaaattacacgaaaccgaattgcttctaacagaagctaaatctcaattggcttctgctcagaaatcaaacagcttggctgagacacagcttaagtgcatggcagagtcgtatagatcactcgaaacgcatgcagaggagttagcgactgagctgaacattttccgggtaaaaaccgaaacttttgaaaatgagcttcaagatgaaaagaaaggtcatcatgatgctttagctagatgtaaagaacttgaagagcatttgcaaagcaaggaaatctgctcggtttgttcttcagcagccaatgttgaccgcacgagcaagcaggagaaagattagcagctgcggcagagaaatta

SEQ ID NO: 210342 - DNA, 373 bp, Gossypium hirsutum
gcgagctttccggattctattatccgtatgggaaatctaaggcctataactggtacaggaggagaattttgaccgcatgggcgccccgtgaagccaacctctataagatccaactcacatgctgctatttgcagctcaatgtagtgtttgctgagcccaacgctaacaaaaatgggcggaaaggaacctcttttactactaaaaatcaatactgctcatacattgtaactctttgatgccttctatacaactctacgtcttttgttttgtagccctaatcgggcggttaattccgtccgaggcttaataccggcgatagaccgatagcgaacaaataccaacaggggaagaatcgacaaggatatcattacat

SEQ ID NO: 210343 - DNA, 315 bp, Gossypium hirsutum
gagaaagggagctgataagctctttatgatggtgtataacctagcgttagagacataccctggagggtcgaagcacgagccgaatcaccactaattgcttgatggtgtctccactgtgtgtagaacagagtggcacatctaagataggagatttcagacctgaatgagactaccgaaagacgtgccaaaagagtgccagaatcctttgttcataccataatctatgatccaatcttgatacacgtcgtgagagatgtgtcggataacacccatgcaaagcctaaacacacctataatcctatcgtgattaacaag

SEQ ID NO: 210344 - DNA, 422 bp, Gossypium hirsutum
gggggtgccactgtcaacaacctcctaatgcaaattcaggcggacttgctgggaagttctgtggtcagaccacctgacatagaaacaaccgctctcggagctgcatatgctgctggaatagctgtaggagtgtggaaagaagaggagctttttgcttcgggacaaattatcaaaaccgcatccatattctccccaaaatcaagtgtagaatggaggaagaagaaggtggattcttggtgcaaagctgttgaaagaacgtttggcttggctgatcttgaaatgtgatacaacagttattttcggtttcgacttcctggtgaccattgtctcggcttttgtagatgttttattttatttttgaatttacagacaaaacccatgcttatattcaactgaataaaatgctgactgtattactctgg

SEQ ID NO: 210345 - DNA, 366 bp, Gossypium hirsutum
cccacgcgtccggggaacgatgtctgtcccattcctggaactaccaagatcgaaaacttcaatcagaacattggagctttgtccgtgaaattaacacccgaagagatggcagagctagaatccattgcttcagcagattcagtgaagggagaccgatatggtggcactgtcgcaacctactatgaatcggatactcctcccttgtcttcatggaaaccttaaatgagagcatacttgttcaaatcaatacaatcttcaagatgagttatggacctaatgtaaggcctctactttgtttttagaataaattttctgtgagatttaataataaaacggcttttggtgaaaaaaaagtttcccttttaa

SEQ ID NO: 210346 - DNA, 412 bp, Gossypium hirsutum
cggacgcgtgggctagccaatgcttgcgatgtgagccattttggcttcttccaaaggtcaagcgttcgggagtttatcgtctttgtttctcgaaccgtcgccaaacgaacccctcccggtcagcgccagtccgtccagcacgaagagtacaacgtacattcttacaacagaaatggactttgtgcaattggatttatggatgatcactaccctgttcgaagtgctttttcgcttctgaaccaggtgatagatgaatatcagaaaaactttggggaatcatggagaactgcacaagctgatagcactgaaccttgggcctatttggataatgctttgaccaaatttcaggacccagctgaggcagattaattattggaaattcagagggaagtggatgagactaaaatcattc

SEQ ID NO: 210347 - DNA, 452 bp, Gossypium hirsutum
gaagcaatccgatgtttctgacatcaaaagatttgtacaattaattaaagacttgagagacaaggaattggtcctgctcagaacgaaacaaagggcaaagaggccaaaatcaatgataccaacgataaaattaaagatgctttttattatacggatacaaggcacaaatgacatgcatccaaaaactaaaaagatcctatacaacctgagattgaggaaagttttcagtggagtgcttgtgaaagccactgacggtgttatacacatgctgcataaggaggatccatatgttacttatggataccctaaccttaacaatgtgaatgagctggcttacaagaagggctatgcactgattgacaagaaagcaaatcctcagaccgataataacatcattgaacaaacattgggaaagcattgcatcatatgcattgtagatatcatacatgaaa

SEQ ID NO: 210348 - DNA, 446 bp, Gossypium hirsutum
  unsure (1)..(446): unsure at all n locations
actgcaattaaaatcccagaattacttaaacaacaatggctacctatgaaggtaaagttttcactgaagaacaagaagctttggtggtcaagtcatggactgtaatgaagaagaatgcagctgaattgggtcttaaattcttcttgaagatatttgagattgcaccatcagccaagaaactattctcattcttgagagactcaaatgttccattggagcaaaacacaaagctgaagccccatgccatgtctgtctttgtcatgacatgtgaatctgcagttcaactgcgtaaagcaggcaaagttacagtgagggaatcaaatttgaagaaattaggagctacccattttaagtatggggtagttgatgaacattttgaggtaacaaaanttgctcttttggagaccataaaagaagcagtaccagatatgtggtcagatgagatg

SEQ ID NO: 210349 - DNA, 423 bp, Gossypium hirsutum
cccacgcgtccgaaacaatagatcaggtgaacgtgttgctagcgactcaaggaagcgtaatccttccgactttgcattatggaaggctgcaaagccaggtgagccatcttgggacagcccttggggacctggacgacctgggtggcacatataatgtagtgcactgagtgcacattatttaagcttcaaacttgacattcatggcggtgggcttgatttgatttttcctcaccatgaaaatgaaattgctcaaagttgtgctgcatgctaagagagcgacgtaagttattggatgcacaatgggcatgttactaataacaatgagaagatgtcaaaatctgtgcgttactttttcacaattcgtcagattactgagagatatcatacactggctgtgcgatacttcttgataaatgcacacta

SEQ ID NO: 210350 - DNA, 380 bp, Gossypium hirsutum
gagatttaactgaaatttggagcattgacatgaaagggaaagcaaatggtgcagtggagacctgtctggaaagtgaagcctcatttcgttcaatgcgtatgtttatgaacttttcagacccatttttggcaaggaggtttaatgcaaatgtttgcacatgggcatttggtatgaatttgtttgatctacatgaatggagaaggaaaaacttaaccatgctctatcgaaattacttgcaactgggacttaagaggtcattgtggaagggaggaagcttgcccataggttggattaccttctacaaccagactgtggctttagaaaagagatggcatacccttgggctaggttataactcagatgttccacggggtgatatt

SEQ ID NO: 210351 - DNA, 364 bp, Gossypium hirsutum
gccacgcgtacgaattcatactcatttaacccctttcattatcgtcccaatcactacagggatctttattactgaaaaatgtgttgctgtggcgtaaactgtggttgcgggactggctgcacgagtggcagatgctcgagaggatgcaggatgatcccagacctgaacgttgcctagatgaccacacctgagactctggttcttggtgtatctccccacatagctcactttgagggagctgagatggaattcggggcgtggaacggttgaaagtgtggagacaactgcacctgccacccttgcaattgtgaatgattagagaccaaagccaaagcttcctgtgagcagagacgcctatgtcttt

SEQ ID NO: 210352 - DNA, 413 bp, Gossypium hirsutum
  unsure (1)..(413): unsure at all n locations
aaaaaccctgttctggaaacaactcaggaaaataaataaataaataaataaataaaacgacgacgaagaagaagaagaagatgttccgtgatgtttcaagctgcaacacctacaactatggcgatgccttgtattgggactcccgttatattcaagaanctggtggtgcctttgactggtaccaacgttactcttctcttcgcccttttgttcgtcgctatgtccctacttcctctcgtgttctcatggtcggctgtggaaatgcccttatgtcggaggatatggtcaaggatggatatgaagacattatgaacattgatatttcctcagtggcttttgaaatgatgggaaggaaatatgagtttgttcctcagctgaaatacatgcaaatggatgtcagggatatgagtttt

SEQ ID NO: 210353 - DNA, 455 bp, Gossypium hirsutum
ctttgttcaaattgacggtacactgaacaagctatccacgctgagggaatatgttgatgacacagaggactacattaatataatgctcgatgacaaacagaaccatctccttcaaatgggagtcatgctaacaacggcaacccttgtcatcagtgcttttatcgtagttgcaggtatctttggcatgaacatccatatcgagctattcgatgaagataaagcagggatgccagagtttctgtggacaattggaggtggtgctgccggctcgatattcctttatgtaatagctatcgcatggtgtaagtacaagcggttattagagtaagtcttctgagaccgtactgtatatcgcattgaaaaaaataagatgacattgaaacatctattgtataaacttttccagaatgttggacacgataagcttatattttactgcctctatagtcgactga

SEQ ID NO: 210354 - DNA, 425 bp, Gossypium hirsutum
agagagagaaacacagagagggagaaatggtttctctgaagctacagaagcggctctccgcgagcgttctaaagtgtggaaaaggaaaggtttggctcgatcctaatgaagtcaacgagatctctatggccaactcccggcagaacataaggaagttggttaaagatggttttatcatcaggaagccaaccaagattcactctccatctcgtgctcgtcgcatgaaggaagccaagagaaagggacgtcactctggatatggtaagcgcaagggtacaagggaggcaagggtgcccacaaagatcttatggatgagaaggatgcgtgttcttagacgcctactccgcaagtacaggggaatcaaagaagattgacaagcacatgtaccatgtacatgtacatgaaaagtaaagggtattgtgttt

SEQ ID NO: 210355 - DNA, 308 bp, Gossypium hirsutum
gtatcaggtgctcgctgtgttggaactctgttgtacgagatgaagcgtcgtgggaaggactgtcgctttggagtgatctcaatgtgcataggaactggaatgggggcagcagctgtttttgaaaggggagactgtgttgatgaactctgcaatgcttgagctgtcaaaaactaaggatgctccatagatatgcttgttgctaccttacaatttgtattaaatatatgacttttcattttcccatgattagatagttgtttgtgagttgtcaaagctttcattttgaaaaatcaaaataaagtttacat

SEQ ID NO: 210356 - DNA, 394 bp, Gossypium hirsutum
gtttgaattcagaggataaataccccaagggcttggttgttgcatttgcattgaagaacatttcaggtggggacgctgcagagaaaaatggttctgatgaacctgcaaaggatggtgctactgagaagaatgaagagaagactgcagaaaatgacgaagataacaaagataagggtgatgataaacaacctggtgtgggtaacgaaacggagaacaaaaagtccgtccagaaatgatgaggggaacagaacataaaaacactgcatctgttttcaaagacgatatgaatgttgttttacgggaagatttgaaggaggccttccaaaaatttggcactgtgaagtttgttgacttcaaagctgttgaggagaagggttacattcggtttgatgaa

SEQ ID NO: 210357 - DNA, 393 bp, Gossypium hirsutum
cccacgcgtccggtgttctgggaccttggttctaaaacgaaaagaatacaagatctgtccaatcaatgggttcaatgtatgctgctgttcttttccttggtatccaaaacgcttcttctgtgcaacctgttgtggcggtcgaaaggacagtcttttatagagaaagagctgctggaatgtactctgcaatgccatatgccattgcacaggtgttaatagagataccatatatttttgttcaagcttctgtgtatggccttatagtctatgctatgatcggattcgaatggacggttgctaagttcttctggtatctcttcttcatgttcttcaccttactttacttcaccttctacggcatgatggctgttgctgtcacaccaaatcattaca

SEQ ID NO: 210358 - DNA, 360 bp, Gossypium hirsutum
aacacgggtaggtgggactcttgtatgaatgtgcaccaatgagctttattgtggaacaagctggtgggaaaggatctgatggacatcaaagaatccttgatatccaacccgttgagatccatcaacgtgtaccactttatattggaagccaagaagaggtggagaaactggagaagtatttggcttgaataagatgcaaatgaaaaaagggtagtatttttgtttatggatataaagaaatacactttatgttgtaattcaaaatgaagacgaacttgtccttgttctgtaaattttatgggaatctttttcgtggcaatggcagcactttaagaaggtcattgtatgaccccttggttt

SEQ ID NO: 210359 - DNA, 317 bp, Gossypium hirsutum
acgcaagtgaagagatatcaggaaagaaaattaaagtcgggttgctttcgggtttttgagcttggttcgtaaaatttggtgtataagtaacacaatgactagcattatggatgcagagcgtgacaagtatagcatgattaatttcgaagagacggagttacgtttaggattacccacaggcattgaaaatgataatgaaaccgccaaaaataatgggaaaagagggtattcggatatggttgatttgaagcttaacctttcaacaacaaaggaagcatccgtggatgaagctgagaagatgaaagagaaaaaacact

SEQ ID NO: 210360 - DNA, 399 bp, Gossypium hirsutum
ttcttggttgatccacgcgttcggatccattgtgggtgccaccttagaggttatccagaagaagaggagtgagaaacccgaagttcgtgatgcagccagggaagctgctctccgagaaatcaaggaaaggatcaagaagactaatgatgaaaagaaggcaaagaaggcagaagtagcagcgaagcaacagaagacacaaggcaagggtaaccctccaaagggtggtgcacccaaaggtcccaagcttggtggtggtggtggaaagcgataactttacccagttattatctgtttttacataggtagtatgttgattttgaaggcatttgtatggactgaatggccatcggccgcgtatctttttttgctttttatgcgttatcattaaaccttgaactc

SEQ ID NO: 210361 - DNA, 293 bp, Gossypium hirsutum
cccacgcgtccgagagaatcagagccgcagctgccgccgtcgccatggtgaagtttcttaaaccaaacaaggcagttatcgtcctccagggccgatacgctggccgcaaagccgtcattgtcagatctttcgacgatggcacacgtgaccgcgcctatggccattgtttggttgcagggataaagaagtattcaagcaaggttatccgcaaggactccgcgaagaaaaccgccaagaagtcacgcggcaagtgctttatcaagctcgtcaattacccaacactgatgcccacg

SEQ ID NO: 210362 - DNA, 226 bp, Gossypium hirsutum
atccatgcgttcggtacatggaactctacgagtggaagaaggttgacctgtcagatgcagcccagaaggaacgggtgaatcagatgattgaagactgcgagccatttgagggagagcctctcttggatgccaagtgctttaagtgatagaatatgttcttaattttacttttttatatttctggtacctttttgcatgtcaggttttatttatagatcgctgcttt

SEQ ID NO: 210363 - DNA, 301 bp, Gossypium hirsutum
tggggccttcgcgtccgtggtcagcacaccaagactactggtcgcagagggaagactgtcggtgtgtctaagaagcgttgaaggcttcatatatattttggaaaaattgatgtagtcttgcagagtgttcatttccttgaatgtaagcactgtttgcacgaagacaaattttggatgtgatttttttttgttgtttcttgacaagtggtaagactgtagtagtgttgggtctttatcggttgctattaggaatacttgctttactgaatatttttagattaaatgtttttaatttggtttg

SEQ ID NO: 210364 - DNA, 452 bp, Gossypium hirsutum
tcggccgattgccccatcacctacatcaaccacttcatcgtgctcgtccacgtcatcgacggctggtgcagcttcaccttgttcaaagcagacaatattggatgccgcagccgctatttccgagggcaaaaacgacgtcgttaacgagatcctgacccgattagctcaagctgctaactcaaaaggtagctcagaacagaggttgatggagtgcatgctatcagctcttaaatcgagggttaactcggttgaaaacccaccaccggtggccgagttgttcagcaaagaacacgctgcttcaactcagttgctttatgatctgtcttccttgctttaaacttgggttcttggctgctaatcaggcgtatcctgcatgccactttagacaaaccaagctataaaaaagatcaaggtggtggatttagattatggggtaggggggcagacatgaa

SEQ ID NO: 210365 - DNA, 397 bp, Gossypium hirsutum
  unsure (1)..(397): unsure at all n locations
cccacgcgtccggggggttctgttctttaacattcaagtttctgaggtccaacttccaattgtgatcgatcagttctactgtgacaaaaggaaatgttcgaacgaaacagctgcagtcgctctatcaggaatcacctatgaaaaaataagaggaacatacacagtaaaacctgtccacttcgcctgcagcgatagccttccatgtataggtgtaaccttatctgccattgaactaaaaccagtgcaggaacattactacctctacgatccattctgttggcanactttcggagagttgaccacccctcctgttcccccaatcagttgtttacaaattgggaagccaacaaataacagagtccaatctgatcatgatgtgtgctgagcattagtgtag

SEQ ID NO: 210366 - DNA, 421 bp, Gossypium hirsutum
cccacgcgtccgcaggtttacgatgtggcaaaatttttggaagaccatcctggtggcgacgaagtgttattatcagcaacagggaaggatgccacagatgattttgaggatgttggacacagtgatagtgcacgagacatgatggatcaatactatgtcggagagatcgacatctcaactatccccaagaagacgacatataaacccccgaaccagccacactataatcaagacaagacatccgagttcatcatcaagctccttcagttcttagttccccttgccatcttgtgtttagccgttggtattcatcactacaccaaatcgtcttaaaattaatcgagattgtgttacaatgacggaaaaaccttgcgtttcatttatgctttattttctatgaaaaggctcaaataatcttaag

SEQ ID NO: 210367 - DNA, 317 bp, Gossypium hirsutum
aaaaaatgtgtgcgtcggaaagaaccttgagacggccggaaaatcgagttcctacaccggagaccgatttcagatcggcgttcgaggtactcgacgcggatcgcgacgggaagataagcagagacgatttaagaagattttacgccggattttcatacggcttcgaagatgccgactaaatgatcgggacgatgatttcattagcggatttaaacagcgacggattcgtggagtacgacgagttctagcgcgttttatgagggtataataacagaaagaaggtttcaagttacggtgtaatggaagatgttttcaag

SEQ ID NO: 210368 - DNA, 288 bp, Gossypium hirsutum
  unsure (1)..(288): unsure at all n locations
cccacgcgtccgattgggaccaaaaggttcagaatgtcacaaggcagcagtgataggagacacaataggggatccactgaaagacacttcaggtccatcactcaacatcctcatcaagctcatggctgttgaatctttggtctttgctcctttcttcgccgctcatggaggctntctttttaaattcatctaaatttcaagcttcttttaacaataaatacatacatgcatatatatatatatatcaaccggtagagttgttagttagaggatatggggaacttttgt

SEQ ID NO: 210369 - DNA, 277 bp, Gossypium hirsutum
gaggtattggaactgtccctgttggtcgtgttgaaactggtgtcctcaaacccggtatgggtgttacttttggtcctactggtctgaccactgaagtttagtctgttgagatgcaccatgaatccctcccggaagccttccctggtgacaatgttgggttcaacgttaagaacgttgctgttaaggatcttaaacgtggttttgttgctttaaactccaaggattatccggcctatgaagctgccaactttactcttacatggtatcatttataacc

SEQ ID NO: 210370 - DNA, 347 bp, Gossypium hirsutum
tcgcccacgcgtccgcccacgcgtccgcccaaacatgagccgacatcccatagtgaaatgggctcagagattggatgacgtcttcataactattgagcttcctgatgctcaggacgtgaagcttaaactagatcccgaaggaaaattcttcttctctgccaaaagtggagcggacaaaatcccctatgaagttgatttggatctgcatgacaaagttgacgttgatggaagcaaggctagtgttggaaatagaaatatctgttaccttgtgaaaaaggccgagagcaagtggtggagcagattactgaagcaggaagggagacctcctgtgttcttgaaaagtgatt

SEQ ID NO: 210371 - DNA, 292 bp, Gossypium hirsutum
gctgtttggccttcagtgtatactgcaatggcttttatggatcaatttgataaagacagtgatgggatgattgagaacgaagggttccctgaccaaacctacgatgcatggcctgttgatggtgtgagtgcatacagtggtgggctatgggtggcagccctccaagctactgcatctattgctcatcaagtaggtgatgatgaagctgctgcctattttcataccaagtatcaaaaggcaaaatctgtatatgcaacattgtggaatgggttctacttcaactacgacaaca

SEQ ID NO: 210372 - DNA, 347 bp, Gossypium hirsutum
  unsure (1)..(347): unsure at all n locations
gttgttcagaaggatgtaaaaaataatgttgtatttgtgtcaagaaattatttctcgttggacaaaagaaggcgtgtgtttcgtgttggctctttgaagtggtttagtgggtcacctcctaaccatattgatcagctccaatgcaaggtcagacatggtcctggcttttataactgcaattttaaaatggagcatggtgaagatggcaatgacgatattgcggttgcccagttatctgaggatgatcaaggtcttgccgctgggcagtttgcagccttctatgagagacaaacctgcttaggttctggtgtgatattggagtcctgggatgatcngggatttcccgt

SEQ ID NO: 210373 - DNA, 354 bp, Gossypium hirsutum
caccacaagaggaaaaagaagagcttgatgcaagggcaaagcaaggggagactgtggttcctggtgggactcgtgggaaaagcttggatgctcagattaacctagctgaagggaggcacaaaggaggggaaacaaggaagcaacaactaggaactgaagggtaccaagaaatgggacgcaaaggtggtctgagcaactctgatatgtctggtggtgaacgtgcagctgatgaaggtgtcaccatagatgaatccaagttcagaaccaaaaactaaatatcatctcccacgacagaaccctagctactctttttttatatatagaccctaataatggatggttggtttagggttt

SEQ ID NO: 210374 - DNA, 364 bp, Gossypium hirsutum
cccacgcgtccgcccacgcgtccgtggccgggaaattcaacggcgtaggtacggttagcggtatcctcacggccaaagacgtcgccgtcgatgggttctgcatgaggtgcgggactcacgggtcgaaccgggttggtcgggttcgaggtacttttatctgggttggaaactcggagactcaatgtcctggtcaatgcgcctggccatttcaccagcctatttatggtccccaaactccaccgttgggggctcccaatggagacgttgggattgacggaatgatcatcatcttggtcacccctttggcttacactgttaccaacccgtttaacaacggtgatttcaggggcccgttgacgcgcct

SEQ ID NO: 210375 - DNA, 436 bp, Gossypium hirsutum
gcgtcgacggcggttgggagtaaatcaaggtctcaatcgccattgatatgaccttgatcggcggctcgtatcctccatcggctggtgcgtttcgtggggacgttaggtcgtatttggaccctatcataggccacttagcatgggctagaacacccttgcttgccaacatttacacttactttagctattcaggcaatccaagggatatctcactttcatatgctcttttcacatccccttcacctgttggatgggatcaaggacgtggataccaaaacctattcgatgcaatggtggattcattatactcggctctcgaaaaagccggacagggagggctcgaagttgtgggatcagaaagtggatgggcttcagccggggggttcgggacatcgatcgataacgcggccacttatttatcgaacttaataagaca

SEQ ID NO: 210376 - DNA, 446 bp, Gossypium hirsutum
ttcggaagagttgtgtgattattgaattgtagattgtaattgttggtgctttactgcactctttgctccatgatattgctgctttcttctttcaggcatttgcagatgaaattggcataccttttttggaaaccagtgcaaaagatgccacaaatgttgaacaagctttcatggccatggctgcctctgtcaaagatagaatggcaagccaaccaacggcaaacaatgcaaagcctccaacagtacacatccgaggtcagcctgttgcacagcagagtggctgctgctcttcctaatgtaaaggttaatgatgtattaggaagctatctttcttatgcagaattgctgcctttcgtggcatgtaagattacttgtttcttaactccataggtttaatgaacttattatttcttcggacccgacctcattagaagatctaattcatt

SEQ ID NO: 210377 - DNA, 380 bp, Gossypium hirsutum
caaggtgttgccgatgagctgattccattgatgcaagaacgattccctgagcttggactccttaaagaagattacattgagatgacttggattgaatctatattgttctggaaccaactttcaaatgaaacatcggagattttactcgataggagcaataggaattcccttgttcctctttcatacaaatcaaaatctgattacgtaaggaaaccaatgccagaaatagcattacaagggctatggtcccgacttctcgaggtcaacgaaacaagcacagcagttgtaaacatcatatcttacggaggaaaaatggacgaaatcccagagacagaaactccattccctcatcggaaaggcaccttatacaagataaacta

SEQ ID NO: 210378 - DNA, 451 bp, Gossypium hirsutum
gaaagatagatacgctttgaaatatgtttatgcatggcatgcaataacaggatactggggaggagttaaacctggaattactgaaatggaacactatgaaccaaagttagtatatcctgtttcatcaccaggggttcggtcaaatgattattccgatgttttgcagtccattactatcaatggtgttggtttagtgaaaccagagaaagcttttgagttctataatgatcttcattcatatttggcatctgctggtattgatggtgttaaagttgatgttcaaagcattcttgaaactcttggagctggccatggtgggaagagtaaaactcactagaaaataccatcaggcattagaggcttcaatatctagcactttccatgacaatgcaattattgcttgtatgagtcacaacactgatcctttatatagggcaaagagcacagctgt

SEQ ID NO: 210379 - DNA, 393 bp, Gossypium hirsutum
ggcgtttggatccgacgagttaatctctgtcgccttcgccatctccgaagcagcttatgtcacccctcaaattcaaggagaagtggacgtttcaaacgtgatcaaagcaaaaatcgcttctcacccttattatcctcgtttgcttgaagcttatattgattgccagaaggtcggagctactccggagattgcgaggatattagacgaaattctgatggagaccgatgttaacaagcgggatatcctgccaacctgcttgggagccgatcctgagctcgatgagttcatggaaacttactgcgatatgttggtgaaatacaagtctgatatttcaaggccttttgatgaagcgaccacttttcctaaacaagatcgagatgcagctttgaaatc

SEQ ID NO: 210380 - DNA, 375 bp, Gossypium hirsutum
cgcgtccgacatgggctatgaagaaagccaaagtggtaacgcactatggcttcattcctctggtgatcattatcggcatgaactctgaacccaagccccaactttatcaattgctaagccctgtctgattcagttgcttatttcttaaccacccacatcttggtttaactatgtaatttgcttgttgcctatctgtcgaaactacatggtattatgttaggcatatgctttatatgatgttgactgttctattctatgtgcttgagaatacattttatgtaattcgaatcttatttgagtttctcaatattttcttttactcaaaaaaaaaatatctttaatttttctatttctcttttattatatatctaattt

SEQ ID NO: 210381 - DNA, 313 bp, Gossypium hirsutum
ccaaatcggagccaagttctgggaagttgtttgtgctgagcatggcatagatgcaactgggcgttaccaaggagacttggatcttcaacttgagcgaatcaatgtctactacaatgaagccagttgtggtagattcgttcctcgtgctgttctcatggatcttgaacctggaaccatggacagcatcagatctggccccgtcggtcagatttttagaccagataacttcgtttttggtcagtctggtgctggtaacaactgggctaagggccattacactgaaggtgctgagttaatcgactccgtacttgat

SEQ ID NO: 210382 - DNA, 371 bp, Gossypium hirsutum
gcgcccacgcgttcgcccagttcactaagctgtgtagcacgaagagcatcttgaccgtcaatggcggctttccagggcctgagattcgggttcgcagaggggacacagtttttgtcaacgtccacaatcaaggaaaccatgctgtatccctcaagtgggagggcgttaagggttcaattgatggttcgaatgagttgattcagccagggagaaacttcacttacaagatagagttaaagggtggaataggaactctatggtggcacgccaccagtgcttgggctgcggcaaccgtgcacggggcctttgtcatttttgcggcagcgaatgaagactatcctttttccgcacctactttttgaccaaacaat

SEQ ID NO: 210383 - DNA, 411 bp, Gossypium hirsutum
cggacgcgtgggtgattacccagttgacaaggtctctcgctatgtttctgatgatggtgctgctatgttaacttttgaagaactgtacgagacatcagagtttgccaggaaatgggtacctttctgcaagaaataacgttaagctctgggctccagaatggtattttacatggaagattgactagccgaaggataaagttcaaccatcatttcttaaagatcatagagctttgaaggtaagggtcagtttggttgtgctatatcactacatataaaaatttttcatcatgtttgcttctttgtttctgttacagatagaagatgaagactttgaagtttgagttagcgggcttgttgcaagacacagaaagttccttgaagaaggatggattatgcaggatgggacgccat

SEQ ID NO: 210384 - DNA, 419 bp, Gossypium hirsutum
cccacgcgttcgcccacgcgtccggttcgaatcactggcggtatgaaggtgaaagctgatagggatgagtcttccccttatgcagccatgcttgcagcacaagatgtttctcaacgctgcaaggagttgggtattactgcccttcatataaagctccgagctactggaggaaacaagacgaagacccctggtcctggtgctcagtctgcacttagagcccttgctcgttcaggcatgaaaattggtcgaatagaggatgttactcccattcccactgatagtactcgtagaaagggtggcagacgtggaagaaggctgtgattctttgctttatatcaattactcactcagctactactgctgtggtgcttggagttttcttttgtaaacaagtttctttacattcaagtgtgttttgc

SEQ ID NO: 210385 - DNA, 325 bp, Gossypium hirsutum
tagagcacctcgtttacacgtgcgccaatgtttttcagggaagtctatcatgcaatcaaaagaattgatctttttgagaaatcgatgtcttactccattactttgaaggaacaaaacaagagaacaatagcctgacaaatggttcggtccgattcgggtgccgtttaggcaagatccgaatcgaacccatcattgatttgagatattgatagggtgaatacccggtctattcaatgctaggcataatgagtataaggacctcaaaaatgctcttttcgtcctatgaatcttaaggggtatgaagtttcatgtttgattttttaat

SEQ ID NO: 210386 - DNA, 297 bp, Gossypium hirsutum
cccacgcgtccggtgaaccaaaaagactttagcttttcgcttctagagagaccatgtgggcttaccaggatctcatatacggtgacgagcttctttctgactcattcccctacaaggaaatagagaatgggatgctgtgggaagttgagggaaagtgggttgtgcaaggagctattgatgttgacattggtgccaatcctttagccgaagatgctgatgaggatgaaggtgttgatgaccaatctgtgaaggttgttgacattgttgacactttcatgcttcaggagcaaccccctt

SEQ ID NO: 210387 - DNA, 449 bp, Gossypium hirsutum
cccacgcgtccgatcacttcgtgtaacagttcaaggtgaagttattgaacaatcatttggagaggagcacttgtgcttcaggacgcttcaacgttttactgctgctacacttgagcatggaatgcatccccctgtctcaccaaatccagaatggcgtgcactcatggatgaaatggcagtagttgcaacaaaggaataccgttctgtagtcttccaggaacctcgctttgttgaatacttccgcctagcaacaccagaattggagtatggtcggatgaatattggaagccgtccatcaaaaaggaaaccaagtggaggcattgaatcactccgtgcaaatcccatggatctttgcatggactcaaacaagatttcatttaccctgtgtggctttgcctttggggcttgcattttaagcacgtcaattcagaaggatataaagaaatctc

SEQ ID NO: 210388 - DNA, 308 bp, Gossypium hirsutum
gacaatttatggttaacaactggatggaacccaaaatgagtggggttggtgcaaacaaaagctcggtgcaaatgccattcttgccgtgtcccttgctgtttgcaaagctggagctgaagtcaagaaactttccctttacaagcacattgctaaccttgccggtaacagcaagatggttcttcctgtccctgctttcaatggcatcaatggtggttcacatgcaggaaacaaacttgctatgcaggagttcatgattcttcctgtaggagcatcatccttttaggaggccatgaaaatgggtgttgaag

SEQ ID NO: 210389 - DNA, 376 bp, Gossypium hirsutum
gccacgcgtccgcccggatagaatctggatatgttggactgaaggatgttaacactggtataaaagacaacaagatgcaaagcttttttcttgcagagacgctgaaatatctttatcttcttttctcaccacctactgtcatcccattggatgagtgggtattcaacacagaagcgcaccctttgcggatagttaaccgcaatgatgcaaatcttgcagcattggaagggcaacataaaccctggatcaaaatacgaagcaggaaaactggtcgattgggtggtaattaggatttgtttccagcttattgttccttgctgaactatgagattttaatcctcaaatagacgacaagcctgacgttataacgatatca

SEQ ID NO: 210390 - DNA, 343 bp, Gossypium hirsutum
cccacgcgttcgctttggcaacaagagcgatttgcttttgaaatacaatccggctcataagagagtcccggttcttcttcacaacgggaaaccaattgtagagtctcttgttatacttgaatacattgaggaaacttggaagcataatccctatttgccacaagatccttatgacaaagctaccgctcgattctggatcaagttcatcgacgaaaagtgctttcctaccctttggctagctgcatggagcgccgagaatgagcgagaaaaagtgaccaatgaagcttgcgagtatctgaaaacgcttgaaagtgcccttaatggaaagaaattctttggtgga

SEQ ID NO: 210391 - DNA, 245 bp, Gossypium hirsutum
cccacgcgtacgtgcaacctgaacacacctccattgcatgggctcttatcgcattaccactttctcgagtgacgataatgggtgggtttggtttgtatttggagcctgctggcctccctcgaggccgcctaacattgtcaccatcatctgcaatgattggggtcactgcctctggcattatgggagccattagcatcgcatgaaataccttgtcctgttctttgttatgatccataagcactctt

SEQ ID NO: 210392 - DNA, 419 bp, Gossypium hirsutum
gccagcttcacctctcaggtcatcatcatgaaccaccctgggcagattggaaacggatatgccccagtccttgactgccatacctcccacattgctgtgaagttttctgaattgctgaccaagatcgacaggcgatctggaaaggagcttgagaaggagcccaagttcttgaagaatggtgatgcagggatgataaagatggttcccaccaagcctatggttgtggagactttctctgagtacccaccccttggacggtttgctgtcagggacatgcgtcagactgtggctgttggtgtcatcaagagcgttgagaagaaggatccaaccggtgctaaggtcaccaaatctgctgccaagaagaaatgagattgcatttgatagtatcaaagccttttgattttggtttctatgtagtc

SEQ ID NO: 210393 - DNA, 419 bp, Gossypium hirsutum
ataaaaaggggtacattcatagaattccgaagtgggatgctcaacgtatctccaattggacgaaactgcagccaagaagaaagggatgaatttgaaaagtatgacaaggttcacaacatacgcccaaaaatggtttcggtgcttcgagaaaagtttgctcaccttaacttgacattctcaattggaggacaaataagctttgatggttgggacaaaacatactgcttgagataccttgaagaatttcaagagattcatttctttggtgacaaaacttacgagggagggaatgatcatgaaatttatgaatcagagagaacagagggacacacagttaccagccctgatgatacagtggagcagtgcaaagctcttttcatgagcaattgaaacttccctctcgtataccatttaaattt

SEQ ID NO: 210394 - DNA, 404 bp, Gossypium hirsutum
ggggaatgcaaacggaagacaggacggagctaacggcggtgtcgacgatctatccggaagatccaatggcggcgaggccgttgttcctggagccgctgcagttggaattcgcgtgccatcgtctgattcaatggtgaatactccgccgcagagccctgggcggtctcgatccccgcttttattcgctcctcaggttcctgtagctcccttaccaagggctgatggccattcctttttcaaccaaacttggcggcatgattctcctgtggttgctgatagtccgtcagagaaaggaatccctgtcatcattacatggaattatggtggtaatgacgtggccgttgaaggttcttgggacaattggagatcaaggaagatgctgcagacatctggtaaggaccact

SEQ ID NO: 210395 - DNA, 283 bp, Gossypium hirsutum
gttgattggcttcattatcttaggaggtgaagccattatgagctacaagtcattgccactgaagaaggaagttaagaaagtcatacatcttgtgctccatgccactgctctgattctaggcattattggaatctatacggcattcaagaatcataatgagagttcaatacctaatctctacagcgtgcattcttggcttgggattggaatcattaccctttatggcattcagtggatatatgggtttctcatattcttctaccctggagggtcgaccggacta

SEQ ID NO: 210396 - DNA, 212 bp, Gossypium hirsutum
cccacgcgtccggttggctaagaagcatggatgtagccctgcacaattagcacttgcctgggttcttcatcaaggggacgatgtagcaccgattcccggaacaaccaagataaagaatctcgatagtaacagtgattcactaaaagtaaagctcacagaagaagatttgaaagaaatatctaatgcggtcccgataaatgaagtagctggtg

SEQ ID NO: 210397 - DNA, 420 bp, Gossypium hirsutum
ctcgacttttctgcatctccttgatccccgaccagcagtcccgcttgaaaatggcagcaaaatatattattggttctgctgtggcatcatttgctgttgcttatgtaattgataaactcgttgctgatgagaagatttttggagggactacaccccacactgtttccaacaaggaatggtgggaagaaactgacaagaaatttcaggcatggccacgcactgccggtccacctgtggtgatgaatcccatcagccgccagaatttcattgttaagtcgggttctgaatgacgtaatatttgcttgcattgtagtcgaagtgtcagtttgattttacattcgctgtgaagaaattgttgtattacacttgtgttaatccggctttgcatttaagagtagctcttgcgtcctaaatatgtct

SEQ ID NO: 210398 - DNA, 358 bp, Gossypium hirsutum
atttttactctctgtgttggaaatgcttggggagaagctgcattgcttttagccgctggtgcaacaggaaatcgttctgctcttccttcgtcgacaataatgattaggcagccaattgctagatttcaaggtcaagcaacagatgttgaccttgcaagaaaggaagtaaagaatgtgaaaacagagttggttaaactctatgccaaacatatgggaaaatcaactgagcagattgaagaagatataaggcgcccaaaatattttagccctagtgaagcagttgaatatggcatcatagataacgtattgtacaatgaaaggagcagtgaagacagtggtgtggtttttaaccttaaaa

SEQ ID NO: 210399 - DNA, 359 bp, Gossypium hirsutum
gagcgatagcagcttctatggagaatgcaaaagaatctattaaaacaactgaagatgataaagtatcattcacaactgaggaagaaccatgcttgactaagaagcctgcatatcctcctctacctgaagaacctaagggtgacaggaacctcttatgtagggttggagtccgacttcctgatgggcgcagggtacagagaaattttctccgaactgatccaatacagctactgtggtcattctgctattctcaacttggtgaagctgaatcaaagccattccgcctgactcaaccgatttcgagaagctccgaaatctctggattatgatagcatattatcattttaggagtcgggact

SEQ ID NO: 210400 - DNA, 427 bp, Gossypium hirsutum
tcgcccacgcgtccgaacgggccctggactatattatgtggacagtgaagggggaaggttaaaaggaatgcgtttctctgttggatctggttcaccatatgcttatggtgtgctggataatggctatcggtatgatatgtctgttgaagaggctgcagagttggccagaagagctatttatcatgccacattccgagatggagccagtggtggtgttgccagcgtttactacgtgggaccaaatgggtggaagaagctatctggtgatgatgttggagaacttcactataaatactattcagtgatgccaagcacagtggaacaggaaatggttgaaagaagtgggggataaatgggatctactcaacctaggccaagttgataagatggattaaatgggatttattcttatttacaatgaatactt

SEQ ID NO: 210401 - DNA, 388 bp, Gossypium hirsutum
gcgattcacccatggtttaagggtattgaatgggacaagttatatcaaatgaaagctgcatttattcctgaagtcaatgatgagttggatacgcaaaatttcgagaagtttgaagaggttgacaaccaaattccatctgcagcaaaatcaggtccatggagaaagatgctttcatccaaagatataaactttatgggttacacatacaagaacgtcgaaattgtaaataataatcagttacccggcatcgctgaattgaagaagaagagctcaaaacccaagagaccttccatcaaatccctttttggtaagatattttcactattgttaagtttgggacactgcaagcaatgaatgttaatgttttgaaatcggtagcatatcaatc

SEQ ID NO: 210402 - DNA, 203 bp, Gossypium hirsutum
  unsure (1)..(203): unsure at all n locations
cccacgcgtccgaaagataaggatgctgaaccaacagaatttgaggagtctattgcgcaggcattcttcgatttggagaataccaatcaagatctgaaaagtgaccttaaagatctctatattaattcagcagtccaaattgatgtttctgggagccggaaaagctgtgntatccatgtcccgtatagattgaggaaagcttt

SEQ ID NO: 210403 - DNA, 244 bp, Gossypium hirsutum
ccgacgcaaaagaacaatcatgaaacggaaggaaaagaaatcgaggaggcaacagctaacacatactctgtgcagaatgagaccaatcaagaggtgaaaagcgtgcaggctgacaagtatgatcatggagaggtgcaaaacgatcatggtgacaacccaaaagatgtcggtatgaaaatacagaagggagcggaggaaacaatggccaaggctcatgcaaaggttgtgagggaccgaaaaaaga

SEQ ID NO: 210404 - DNA, 313 bp, Gossypium hirsutum
ctaaaagcttgcttgatagtgatctccaagatggtaactacatatcagctaagggcaagaaagtagtagtcatcggtggaggtgacactggtacagattgcattgggacatctatccggcatggatgtagcagcattgtaaatcttgagttgcttcctcagccaccgcagacaagagctcctggcaatccttggccacagtggcctcgcatattccgtgtagactatgggcaccaagaagctgctaccaaatttggaaaagacccaagatcctatgaggttttgactaagaggtttataggagatgataatgg

SEQ ID NO: 210405 - DNA, 408 bp, Gossypium hirsutum
gcatttgttgcaggaaacgatgctggccgtgcatacaatacttttccaaagatgggagatgtgtgggttcctgataatatatttgagttgaaaccaacaatccgaaacttctttgagaatacatccatggtgcagcttgaccatcgtatccttgcaactaccactttaatctccatttgcggtttatggtggtcaaccaaaaagctcgacatccatccagctattcgaactttggttggagccacgtttggcatggctgctcttcaggtaaccctaggtgtatcaacacttttatcatatgtgcctgtttcacttggcactgaacatcaggcaggggccttaacccttttaacactgatgctacttctcaatcacactgtgaggaggccatcaatgtcacttttgaaa

SEQ ID NO: 210406 - DNA, 231 bp, Gossypium hirsutum
ttcacgcgttcgtccacgcgtacgaccacgcgtgggagctgtgtaaggtgagggataagcgaggctatggagcaaaagataagccgggaggagataaggagggacacctggaaggggttacatacagcgacagacgaggggatgggcgttactccatatcaaacggtgaagatgagactgataagctgtgggagatacggaaaatgtcctccgatacctcttgaagtttag

SEQ ID NO: 210407 - DNA, 121 bp, Gossypium hirsutum
gctacgcgtgttaagatctctactgatgctttaatcaaagaaaagaacccacctggtgccggtgatatgctcacaccccttgttgttgggatcttttttggcgtgaaaactctctctggtg

SEQ ID NO: 210408 - DNA, 326 bp, Gossypium hirsutum
ggttgttgaatgcttgattagaagggatgtttatgatggaatgagtgaagaattggcttgcagaaacaccgttgcgtgcataacaggtattgtgccaaagaccatatcaacaaagggtatgctagctgtatacaactcattgatcgaggaaggcaaaaagcgatttgagggcgcttacattgcctcatattatacttgcatggaaatcctatatgagtgttactaaaatattgcgagtggaagcgagattcacagtgatgttttggctgggcgcccgttttattaaaaggagggcctacctgcctttcctatgggtgaaattgatc

SEQ ID NO: 210409 - DNA, 273 bp, Gossypium hirsutum
gacccacgcgtgcgctggacaggtttgactgaatgggtattgtttctcctcgggacgttgccctactaggagcggtggagatcggtagaactcattgtgtgaatctggagcatcgtttgtacccataggtataccctgctcttaaccccgaccatgtttcacacatactccataattactcttgtcaaatgccagacccgaactcctgtcagtttgtgataaaaaaccgtactactcttatgtatttgtataacaactattactggaacatac

SEQ ID NO: 210410 - DNA, 416 bp, Gossypium hirsutum
gtggcgccgcaatcctcttgtcgaaccgtcgttccgagaggaggcgtgccaagtatcgtcttgtgcatgttgttcgaacccataaaggtgcagatgataaagcctatcgatgcgtgttcgaagaagaagacaaagaaggcaatgttgggatatctttatctaaagatctcatggctattgctggagaggctttaaaatctaacattaccactattggtcctttagttctttcagcatctgagcaactcctatttcttctcacactcattgggcgttaaatctttaatcccaagtggaagccatatatttcagacttcaagcaagcgtttgaacacttctgtatccatgctggtggacgagcagtcatagatgaactgcaaaagaacctgcaactttcaacagagcacgtagaggca

SEQ ID NO: 210411 - DNA, 410 bp, Gossypium hirsutum
cccacgcgtccgggatgggacgactgattcaagggtgccaatttgtaaccatgcgcacctgcttcgagttcgaacgggacgcgattaaattgcttatcaagctttaccagaaacctgtggttccggtaggcctgttgcctccgttgttatcactgccatcaaacgaggataacaaatgggaagctataaaaagctggcttgacagccaaggagagaaatcggttctctatattgctcttggcagtgaagtgaatctaagtgaagagtccatgcaccaattggcatttgggatagagaaatccaacttgcccttcatttgggtggtaaggaaaccgccagtgggtgaagggcagatgaatgacataattcctccagggttcgaaaaacgagtgtctaacaagggcttagtg

SEQ ID NO: 210412 - DNA, 379 bp, Gossypium hirsutum
atctccagttccaacagtgacattttctttgaataccaagtataaatccttcactttttctattgatggctgaggttaaagggaaatgggtcaagcttaaccagaatggaactggtcctggagccagaagctcacacgccataaccattgtgggacaaaaggcgtatgtctttggaggtgagttcaccccaagagtcccggttgacaacaagctctacgtatttgatctcaataacttaacatggtctgttgccgatgtaactggcgatgtgccgcctccacgtgttggtgtcacaatggccactgttagtgaaaccatctatgtatttggtggtagggattctgcacacaaggagcttgatgagttatattctttgat

SEQ ID NO: 210413 - DNA, 424 bp, Gossypium hirsutum
ctcttatcaaaaaagaacacagtaatggctatttctttgaaatctacagcagcgggattggtccagttaaagaaccacaatacccattctccgtctcgctttccttcattcaaacccttagtttcaactaagagattcactccaatggctgctcttgctacttctcaaactcttggcatttctgaaaccttctctaaattgaaaaatcaaggcaaagttgcattcatcccctacatcacagctggtgatcccgacctttcaacaacagcagaggctcttaaggtgcttgattcatgtggctcggacataattgaactaggtgtaccatattctgatcctctggctgacggtcctgtgatccaggctgcggctacgcgttctttgcaagaggaaccaacttgatgcaatctttcgatgttgaaga

SEQ ID NO: 210414 - DNA, 286 bp, Gossypium hirsutum
cccacgcgttcggcagaatttacatccagaggtggtgctagtggatccggaaagactagcttggcacataaaatggaaaatattgttggtcgtgaagtagtttccctcgaaagctattttaaaccagagcaagttaaggatttcaaatacgatgactttaactctctcgatttgcctttgctttctaaggagtggaaacattgttttcaaaatcattggaagcaataaactctcgttcccagcatctgttgacaacttcggagcaatcagtatcccatgtaatgcc

SEQ ID NO: 210415 - DNA, 348 bp, Gossypium hirsutum
aagggatgccattgacacaaagaaccaagctgattccgttgtctaccacactgagaagcagctgaaagagcttggagacaaggttcctggtccagtcaaagagaaagttgaggcaaagttacaagaactcaatgatgcacttgcaggggactcaacacaagggatgaaggatgccatggctgcactcaaccaagaagttatgcaactaggccagtcactttacaaccaacctggtgccggaggcagcattgcaggacctgcagttggtggtgaaaccgtgccttcatattcatcacacaagggtcctgaaggggatgtaattgatgcagatttcactgacagcatgtg

SEQ ID NO: 210416 - DNA, 330 bp, Gossypium hirsutum
gaaacactaccattcccaccaagaaggagcaggtgttttcaacttactctgataaccaacccggggtcttgatccaagtttatgagggtgagagagctcgaacccgggacaacaatttgttgggtaaattcgagctctctggcattccaccagcacccagaggcgttccccaaattacattttgcttcgacattgatgctaatggtatcttgaatgtctctgctgaggacaagactactggccagaagaacaagattacgatcacaaacgacaagggtcccttgtctaatgtagaaatcgagaagatggttcaagaagcgtataagtaca

SEQ ID NO: 210417 - DNA, 421 bp, Gossypium hirsutum
acagcacccaattccatggccacctcttccccacgtgaggataatgtctacatggcgaagctcgccgagcaagccgagcgctacgaggagatggtgaagttcatggagaccgtcgtctccgtcgtaccctcctccgacgagctctccgtcgaggaaaggaaccttctctctgtcgcatacaagaacgtcatcggcgcccgacgcgcctcctggaggatcgtttcctccatcgagcagaaggaggaagaacgcggcatcgccgaccatgtctccgtcatccgtgagtacagggccaacatcgaggctgagttgtccgagatttgcgccggattcttgaagcttctcgacgagaagctcgttccggcagctaagaccgtggattacagggtcttttatctgaaaatgaagggagattaccata

SEQ ID NO: 210418 - DNA, 448 bp, Gossypium hirsutum
ctcatcctcagtttcatcggatacgagacaaccatctctagccaggcttccgtttgtggatgcattcttggcaaaggcgaagaacaataaaagtcttttatcaaacaggaagatttattcgcgtagatctaccattttgcccgaattcgttgatcaaactgtacggatttacaatgggaaaaattttgttcgctgcaagatcactgaaggcaaggttggtcataagtttggcgagtttgccttaactcgtaaaagaaaacatttgaggagcaaggctgagcctgcaaaaaagaagggcaaaaaataagcatttgcaaccaaagatcacatctcatttcgagagagtggtgattcatgagaaatatgggctgaaaggaaagcaatgaaacaaggaagaaaatggttttgaagtctaatttttttggttaaaggatgtaggatttggttt

SEQ ID NO: 210419 - DNA, 338 bp, Gossypium hirsutum
ctaagccaccggtttatacaccaccaaagaaagaaaaaccagaacccaaaccaccagtttattagcctccgaagaagccaccagtttatgagcctaaaccaccaaaaccaccagtttatgtaccaccaaagaaagagaaaccaggacccaagccaccagttgatgaacatccaaagaaaccaccgtatggtcactatccaggacaccctccattggggaagcctcaatagagagatcccatcggctagccatcccaagaactgagctactatggctatatagataaattagtatctatacaataagagtttcttcctactcaggatctattctcttgt

SEQ ID NO: 210420 - DNA, 240 bp, Gossypium hirsutum
cgtggttcaagggctttgcttaatttcccgcatcggatcggtgacaatgagcctgaacctgttagagttaaggctaaacgtggggcaacaaatgattcggtttcgttcaatggttcatttcccaagaaaacgagaagcttggaagctaacaaggctgagttgaccactgtgtttcaattgggtctattgcaggttggggaacaattattggtgaatgaaaaattatcacaacttttaaaa

SEQ ID NO: 210421 - DNA, 448 bp, Gossypium hirsutum
ctctctcggtgctcccgtcgtatatgactatccatctcttagatattcttattgtgactgccgtggtatcgtgaagaccgctgggtaagggaacttcttgcttggtcacacatgtgtatgctgcctttccagactttggatacaaagccgtttcttgggttgaagatcgattcacttttgaaccgccaaagaagcagcctcttctttaggctgcgaccggatcgctcgcggattgcatgcgctgccacaccagagacagagggtaaggtatgtgaaataggacagaaacaactagccctacctagtgacaaagcagtcacaggtgaatcaaaatatgctgaacttggagccgattatcttgatacggtctacaccgtgatcgggcttgacgaagagctaggaatcactgtggtagaggacaatggccaaagcatatcaactgtcatga

SEQ ID NO: 210422 - DNA, 431 bp, Gossypium hirsutum
ccacgcgtccgaccataggtacttggctgagttcaagactggagatgaccggaaagccgctgctgagaatacgctctctgcgtataaatctgctcaggacattgcagtttccgagctcgctccaactcatcctattcgtttgggattggctctgaacttttctgtcttctactatgagatcttgaattctccggaccgcgcttgcagtcttgcaaaacaggcttttgacgaagccatctcggagcttgatactctcggagaggattcatacaaagacagcactctgataatgcaacttcttcgtgataaccttactttgtggacctcggatatgcaggaggatggaacggaggaaatcaaagaagcctccaaacctgaggatgagaaacaacagtaaaatccgtaatcttcgagttagtattttacttctc

SEQ ID NO: 210423 - DNA, 445 bp, Gossypium hirsutum
gtccgaggcattgggagttctttgtcaagcagtacaaaaggaaagaggagtgagagagacagagatggaaagggacttggtagagaggttttacctagaaatggaactaataagattggtcgacccgcatccaatgtgaagggggaaaggaaactaaaaataaagcctaagcagaaaatgactcaactatctgtttctgtgaacggcattcttggtgagatgtcagagcaccccaaaccatcaacctccatatcaaagtcaaatgagataactatcaataataatgccaaagaaaaagatgattttggcctggatgtactggatgacttgcagctaccaggacaagatttgggttcatggttaaacattgatgatgatggattacaagatcatgatttcatgggccttgaaattcccatggatgatctttctgacttgaatatga

SEQ ID NO: 210424 - DNA, 442 bp, Gossypium hirsutum
cgcgggtgaccacgcgtccggtgagagcatcgatggcctcttcagcatcatcaggaagggctgccacagagacaaagcctttctctgttcttttcgcttgcttaggcaacatctgccggagcccagctgctgaaggtgtctttagagatattgtgaaaaagaaaggccttgactccaagtttaacattgactctgctggcaccattaattaccatgagggaaatttggcagacccaagaatgagggcagcctcaaaaaggcgtgacattgagataacatctatttcaaggccaatccggccatcggactttagagattttgatcttattattgcaatggacaagcgaaatagagaggatatattagaggctttcaataggtggaaatcaagagacaaactccccgctgatgcctataaaaaagttagactgatgtgctctta

SEQ ID NO: 210425 - DNA, 379 bp, Gossypium hirsutum
  unsure (1)..(379): unsure at all n locations
cccacgcgtccggggagtatctctgagtccagacgatgaatctttgtatataggaatatgggacagaacgtatgcaagtttgctgcaatacaacaaaagacacacgtatgcatacttagattcgtacttgtgataatgttaaactgcgtgctgttgtagttatggagccctcttttgtgttctgttttgtttgtgtagggtgatttgaatgaagatcaaatattctatgacagtagaataagtgtatgttgtgtaagaactttgctagaaaggtgcgtgtacagtacaatctcatcctttaaatcatatgctatttgtatgattgattttctgttcttaaatgtaagttaataatagagtaaaattaacttgcttggnt

SEQ ID NO: 210426 - DNA, 455 bp, Gossypium hirsutum
ggaaattatggaccacaaagggagaagaacaagaagcagcaaagaaagagttcattgagtgcctgaaattgttggaaggagagcttggaaataaggcttattttggtggggagaatcttggttacgttgatgttgtgttggttccattttacagttggttttatgcctatgaaaagtgtgggaattttagcattgaaacagagtgccccaagttgattgcatgggctaaaaggtgcatggagaaagacactgtttccaagtccctgcctgatcaagacaaaatctatgactttgttttgcatttgaagaaagtgttcggaattgagtaaaatattgtgcttacaatacatttcaagactcgcctaatatctatgtttcttaaataaatgggcacttcgttgtgccttgaatgttgatttgaattttgttttgttttaaggagtggattaattata

SEQ ID NO: 210427 - DNA, 454 bp, Gossypium hirsutum
  unsure (1)..(454): unsure at all n locations
catattagatgatccttttgatgatcctccccagttgtctgagttgattcctggtgcttctcctgaaggaaaaccaaaggatgaggttgatgatgatgttcggcttgaagatgattgggttcccatggatgaacaactaggtgcttcggagcttgaggaggttctccgtgcaaaggatgcccattcgagagcagttgtacttgaaagtattggggatattcctgatgctgaaattaagcctcctgagaatgttctatttgtttgtaaattgaatccagttactgaagtgagtgcttattttgtattcagtgttggcaataagtgtgtgtacgtgtattcattgatttgtttcacttattttgactttgattggagaagtttatcagagaggactgacaaggataagttggctgagaacatgcgggtgctttcatttntacagcattttactatt

SEQ ID NO: 210428 - DNA, 445 bp, Gossypium hirsutum
cccacgcgtccggaaattacaggcctcaatattacgccgaaagttttgatcaaaccaagaaacggcgagactactatcattatacacgcgaggaaatctctccattgtggcatgatggacttaaatttctgttcgtgactgatggaacgctcagaatacattattatacgcctttgtttgatggtgtggttgttggaactgaagatgtgctaataacaccgttcacttgtgatcgaacttgttctggtgatgctgttgtagctggtattatgaggaaactgaccacttaccctgagatctttgaaaatcaagatgtcttagagagacagctccgcttcgcagttgcagcaggaattatatcacaatggacaattggtgctgtgagaggttttcctaccgagagtgctacacaaaatctgaaagaacaggtttatgtaccttcaat

SEQ ID NO: 210429 - DNA, 400 bp, Gossypium hirsutum
caactggtgaccaagctactcgcaagagggaaatagctgccttcttagcccaaacttcccatgaaactactggtggggcaaggtgggctgcaccggatggtccttatgcatggggatactgctacaatagggaatggaatcccccttcatcttattgcgcttcggatccaaattacccttgtgctcctggtaaacaatattttggccggcgtcccatgcaactttcttggaactacaactacgggcagtgtggaaaggccatatgggtcgacttgttaaacaacccagacctgctatcaagtgatcccacaatttccttcaagtctgcgatatggttttggatgactccacaatcaccgaagccatcttgccacattgtgatcatcggagcatgatcacc

SEQ ID NO: 210430 - DNA, 429 bp, Gossypium hirsutum
agtgtacggccgacattgtcggacaatgcccgaaccagttgaaggttcccggaggttgtaacgggccttgcccagtgttcaaaactgaagaacattgctgtaattctgggaactgtcaacctaccgacttctcgaggtttttcaaggagaggtgccccgatgcttatagttacccaaaggatgacccaacaagcttgtttacatgccccacagggactaattacaaggttattttctgcccatgaagagtatttgggatggttttaagtcctttctatacacaaattagtaggtttatatcaataaatggaataaactcgaatgctatttgagcacatttcttgatgtgcatatgttctgatttgtaataatagtgtttgtcatgaatgaaaatttggagtctctatgggtttcgttttgtgttcatca

SEQ ID NO: 210431 - DNA, 453 bp, Gossypium hirsutum
  unsure (1)..(453): unsure at all n locations
cccacgcgtccggttgcttaccctctcgatgtcatccgcagaagaatgcaaatggtaggatggaaagatgctgcatcagttgtcactggtgatgggaggaataaggctcctcttgagtatactggcatgatcgatgcattcaggaaaactgttaggcacgagggctttggagcattatacaagggtctggtccctaattctgtgaaggttgtaccttcaatagctattgcgttcgtgacatatgaggtggtgaaagacattttaggagttgaaatcagaatatcagactaaaccggtaccaattctactcaatgtttttagggatgtgtgctatttttgtaggtaaaggggatatagagtaagataaactagggaacaaccttttaacctttttcttttcgtctcatcacgcanaaatgagtttagaaacttatacgagcctgccataatttg

SEQ ID NO: 210432 - DNA, 455 bp, Gossypium hirsutum
tgctgatgcagtgatcgaagtgctgccaactcagctcattccagacgacaatgaagggaaggttttgagagttaggttgataatgaaagaaggggttaagcatttcagtcctgtttacctgtttgatgaaggctcaaccatctcatggataccatgcggaaggaagctcacttgctcttaccctggcatcaaattccactatggccctgacacttactttggcaacgaggtttctattctggagatggacggccaatttgatagattagatgaacttatttatgttgaaagccatttgagcaacatctccaccaagttctatggagaagtcacccagcaaatgttgaagcatgcggatttccctggaagtaacaacggaactggcctcttccaaaccattgtcgggttgaagataagagatctctatgagcaaattacttccagcaaactgcagc

SEQ ID NO: 210433 - DNA, 427 bp, Gossypium hirsutum
cccacgcgtccggtgaaggcaaaaatcgcaaagttaacggttggaccaccggaggatgactgtgatatcactccggttgtgtcggaatcatctgcaaatttcattgaagggctggtcaaggatgccaaagagaaaggagctatattttgtcaggagtacaagagagatggcaatcttatatggccattgttgttggacaatgttcggcctgatatgaggattgcatgggaggaaccattcggcccggttttgccagttataagaatcgactccattgaggaaggaatccaccattgcaatgctagcaacttcggtctccagggatgtgtgttcactaaggatgtcaacaaagcaatattgattagtgatgcaatggagaccgggacagttcagattaattccgcaccagctcgaggaccggatcatt

SEQ ID NO: 210434 - DNA, 455 bp, Gossypium hirsutum
  unsure (1)..(455): unsure at all n locations
cagcagccaaagtttttttggcagggttggatctgaactgtgggtcatttcttgggcaacacactgaggctgcagtaaaagcagggcttttgaatgaatcggccattgacaaggccgtgacgaacaacttcgccactttaatgcgactgggattcttcgatggtgatcccagcaagcaaccttacggtaaacttggccccaaagatgtatgtacacgagagcaccaagaattggcccgtgaagctgcaagacaagggattgtgttgctcaaaaacagccccgggtcgttgcctctatctccgactgcaatcaaaaccttagccgtaattggacccaacgccaatgtcacaaaaaccatgatcggaaactatgaaggcattccatgcaaatatacgacgccattgcagggtttaacgacctcngtggcaacaaactacgtgcctggtgcaccaatg

SEQ ID NO: 210435 - DNA, 457 bp, Gossypium hirsutum
gtggcggtggccatgaccctttcgatatcttccagtctttctttggtggcaatccttttggtgctggtggaagcagccggggcagaagacaaagaaggggggaggatgtaatccatcccctcaaggtatcattggaagatctctacaatggaacatcgaaaaagctttctctttcacgaaacgtaatctgctccaagtgcaagggtaaagggtctaaatctggtgcatcaatgaaatgttccggttgtcaaggttcaggaatgaaagtctccatccggcacctcggtccttccatgatccaacaaatgcagcatccttgcaatgagtgcaagggtactggtgaaaccatcaacgataaggatcgttgcccacaatgcaaaggtgataaggttgtgcaagagaagaaagtcttggaggttattgttgagaaaggtatgcagaatggacaaagattact

SEQ ID NO: 210436 - DNA, 323 bp, Gossypium hirsutum
ggctgattaaaactcggaatgcgcttaggagaaactggacattgattgtgttcacaataatgccgttatggagctgcttataggggtgagaactctattgacagaactcatctctgggctaggtgcacaagattcggctcctatgagtctaggtttgtctgatagtctctctagatacaaacggaacttcagcgccaataagggtgatactatgagtgagcaagctattgcgatgctcgatgatcttgctaaaaagctcaacacgtatgcaatgaggattcatgaatggtatggttggcatttttcagagcttacttagattg

SEQ ID NO: 210437 - DNA, 446 bp, Gossypium hirsutum
cctgctttgctctgaaaagtccaagtttttctccaatggcgaccgtctctccaactcctctggtgaaagatgagctcgacatcgtgattcccacgattaggaacttggactttttggagatgtggagaccctttttccagccttaccatctcatcattgttcaagatggtgatcctaccaagaccatcaaggtccctgaaggcttcgattatgagctttacaataggaacgacatcaacaggattttgggtcctaaggcttcttgtatctctttcaaggattctgcttgtaggtgctttgggtacatggtttccaagaagaaatacatctataccattgatgatgactgctttgttgctaaagatccatctggcaaagacatcaatgcattggaacagcacatacagaacctactgagtgcatccactccatttttctttacactc

SEQ ID NO: 210438 - DNA, 454 bp, Gossypium hirsutum
caataatttggcttaggttgcatctctgtgtctgatgcaacagagaggaagaactaacaaccgtagatcaaggtctttctccagatctcggcttgctgtcgaaggattttagttccccttttcactccccattaaaaaaaaaaaaaaaatcaattcctctcatagctcactagagatcttctctgttaaccatggcggctaacggatttgtaggagatgaacgcaaagttcaaaagaattactggattgaacactcggttgatctgacggtggaggctatgatgctcgactccaaagccgctgatattgacaaagaagaacgtcccgaagtgctctccttactccctccatatgaagggaaaaccattttggaactaggagctggcattggccgatttactggtgacttagctaagaaggctggtcatgttatagcattagacttcatgagaat

SEQ ID NO: 210439 - DNA, 454 bp, Gossypium hirsutum
cccacgcgtccgagtgtccacgtcttaacaaccgggtactggccaacatatccacctatgggtgttcggcttcctcacgagttgaacatctatcaggacatctttaaggagttctacttaagcaagtacagtgggaggcggttaatgtggcaaaactcgttaggtcattgtgtgttgaaagccaattttaccaaaggtaaaaaggagctcgcagtttccttatttcagactgtagttctgatgttgttcaacgatgctgagaagcttagctttcaagacattaaggactctactgccatagaggataaggaattgagaaggaccttgcaatcccttgcatgcggtaaagtacgagtcctgcaaaagttgccgaaagggagggaggtggaagatgatgattctttcgttttcaatgaacgattttctgctcctctctatcgtataaaggaaatgc

SEQ ID NO: 210440 - DNA, 450 bp, Gossypium hirsutum
attccggtcgcccacgcgtcgggccaccaaaaaccatgtatcaccctcaagttccaggcgagcccacccaaaccaccactttcctcgtcgagactgccaccggcgccatccaaagcttccgccctatcaaacaaatccatcaacacctctgcgcatttcatttctatggctacgacatgacccgtcaagtcgaagcgcaccatttctgcgcacatcaaaacgaagaaatgcgacaatgtctcatatatgacaccccagaagccgatgcaaagctcatcggattggagtacatcatatcggagaatttgtttttgacgttgccggacgaagagaagccgctttggcattcacatttgtacgaagtgaagagtggggtgttgtttatgccgcgagttccagggccgatcgagaggcaagatctggacaaagtttgcaagacttatggggaga

SEQ ID NO: 210441 - DNA, 397 bp, Gossypium hirsutum
acccaaaccctggaagttatccacctccaggaagtactcaatctggttatggaatgccgccttcccaaactggctatgggaatcagccaccagcacagcctggttatggagctggatatggacaaccacaaacgcagaaacctttggccaatccgcagatgtatgggcaggctcaacagtcgcctagcaccccaggaagttatggccagccaggatatcattcacagccgccatcttctggttatggtcaaccagagacaggttcacaacttgcacaaccaccaagttatggtgcgacatctgcccagcctggatatggagccccaacctatggagctggttatggagcaccttataacacctcttatggtggtagttactcacagccttcaacata

SEQ ID NO: 210442 - DNA, 447 bp, Gossypium hirsutum
gcaccagccgacgacatggggaggagacctgcaaggtgttatcgccaaatcaagaataagccataccccaaatctcgatactgccgaggtgtcccagatcctaagatcagaatttatgacgttgggatgaagaaaaaaggtgttgatgagtttcctttctgtgtccatcttgtgagttgggagaaggagaacgtctcaagtgaggcattggaagctgcccgtattgcctgcaacaagtacatggccaagtttgcagggaaggatgctttccatttgagagtgcgggttcatcccttccatgttctgcgtatcaacaagatgctttcatgtgccggtgctgataggcttcagaccggaatgaggggtgcttttggaaaacctcaaggaacatgtgccagagttgacattggtcacgttctgctctctcgtcgttgcaaggatagcaca

SEQ ID NO: 210443 - DNA, 456 bp, Gossypium hirsutum
tccgcccacgcgtccggctgtttgcctttgcaccgctatcaaagctaacatcttaggcatcaaccttaacagtccagtttcccttagcttgctcctcaacgtttgctcaaagaatgttccttccaacttccaatgctaagtcttcactgttcccaatattctttctagtcttccttattgcgtttggttattgaaagttacggcttccgacatttgcagcaaaccagtggtttttcatttgtaactttattatttggatttccttgtgagggagggatactgaataaatttaatacttctcttcaagtgtttttcttttggggttttttttatctccaaaagacatgaaaaagacttgtattattcccttgcttttgcttctctatccatttactattggattttgtatgtgaaccaatctacgttgaacgaataatacatctttattcgatttta

SEQ ID NO: 210444 - DNA, 438 bp, Gossypium hirsutum
cccacgcgtccggaacaaccaaacatacaggttgcttagaagtcccaagttagagaacatgggtcgtggagtcagcagtggtgggggacagagttctttgggttaccttttcgggagcggagaagctccacctccaaaaccaaccaacgtcacgagtactggcaccaccagtaatgaagttcctcagaagcagattgaggttgtgaaggaaactgtgcaaaaaccgaccactgcttcaccatcatcgggtgatgccaaggagatccctgcaggtgttccagggagcaaaacgaacaactatttccgagctgatggccagaattgtggcaactttcttacggagcgcaggacaactaaggttcacgcagcgcctggcggtgggtcttccttggattacctgtttggtggcagcgagaagtgatatgtgagatattaaat

SEQ ID NO: 210445 - DNA, 211 bp, Gossypium hirsutum
gacatggatgatgtgcatcgctttgatccagttcatggacaatgggcccaaatagagacagggggggagaaaccaacgggccgaagggcattttctataggggggattggcaaatgcatgatcatatacggctgggaagtggatcctcgtgatttatgctaccatcgtgctgagaaaatttctggagaggtatactgtgtggacacagaca

SEQ ID NO: 210446 - DNA, 460 bp, Gossypium hirsutum
cctgagcctaagccaccagtttataccccaccaaagaaagagaagcctgaacccaagccaccagtgtatgaaccaccaaagaaggaaaagcctaagcctaagccaccggtttatacaccaccaaagaaagaaaaaccagaacccaaaccaccagtttatcagcctccgaagaagccaccagtttatgagcctaaaccaccaaaaccaccagtttatgtaccaccaaagaaagagaaaccaggacccaagccaccagtttatgaacatccaaagaaaccaccgtatggtcactatccaggacaccctccattggggaagcctcaatagagagatcccatcggctagccatcccaagaactgagctactatggctatatagataaattagtatctatacaataagagtttcttcctactcatgttctattctctcgtatgtcatggaagaatgtttctttta

SEQ ID NO: 210447 - DNA, 427 bp, Gossypium hirsutum
gtcaaatgcacatcttcgtcaaaccctaacggagaagactataaccctagacgtcgagtcgttggacaccattgacaatgtcaaagctcacatccaagacaaggaaggcattccacctgaccaacaacgtcttatcttcggcgccaagcaactcgaagatggccgcaccttagccgactacaacatccagaaagaatccactctacaccttgtcctccgtctcaggggaggtgcgaagaaaagaaagaagaagacctacaccaagcccaagaagatcaagcacaagaagaagaaggtcaagctcgctgtcctccagatttacaaggtggatgagtccgggaaggttcacagactgagaaaagagtgccctactgcggaatgtggcgccgagaccttcatggctaaccattttgataggcactattgc

SEQ ID NO: 210448 - DNA, 373 bp, Gossypium hirsutum
caaagactcacttcaagttctacgctaatgaacctggcacaggccctagctgaccacaaaatgtgctacgaggagatgccacttcaagagttgcaggcaacacaggagcagcaaaccatccaaaacctatgtgacacactaagaaccattctccggttatagatagttgaatgctacatttcttttttcggttgttgtatgttattgtcattgtcatccgtgctttaggatactgcagggtatgttgtattatataagggtatacatgatggcaaaatgaaatgcaatctaaatcaagctttgaagcgtataatgtcgaaaccgttttttgaaaaaaaaaattaacttttatgctttttttctcctctttctt

SEQ ID NO: 210449 - DNA, 447 bp, Gossypium hirsutum
ggctgaagctcagtcaaagtgctgtcttaaaaccctagttttcgagctctctttcagttttccggaatccatgtcaaggagaaaggttagggagcccaaggaggagaatactaaccttggacctgctgttcgagagggtgagcatgtttttggggtggctcacatttttgcttcattcaatgacacatttattcacgtgactgatttgtctggaagggaaacaatggttcgaatcactggtggtatgaaggtgaaagctgatagggatgagtcttccccttatgcggccatgcttgcggcacaagatgtttctcaacgctgcaaggagttgggtattactgcccttcatataaagctccgagctactggaggaaacaagacgaagacccctggtcctggtgctcagtcagcacttagagcccttgctcgttcaggcataaaattggt

SEQ ID NO: 210450 - DNA, 369 bp, Gossypium hirsutum
tgaaaaccttacagcttatcttaaggttcatggaaccctaaatgcagaagcagaacgcgcaaagattaagaataaaatggatgaaatactgaagcagcaggagaagctgaagaagatcatcagtgcatcaggatatcaagaaaaagttccatctcacattcaagaagagaatgcaacaaagctggcaaaacttctccaagaatttgagtttttcaagaaagaaagcgatcgtttagaatctgaatcgcagcatcaaaagtaaggttaacccctcccttttgagtttctcgattcgaatgataatttgaatggcattacactatctcttcttttttatgattgctatgttactgtctaaacctcaccata

SEQ ID NO: 210451 - DNA, 427 bp, Gossypium hirsutum
  unsure (1)..(427): unsure at all n locations
gaaaagggtnggaatagaagactgtttcgagcaaatcatatctttcgagacactgaatcctaatttgtcagaatcgaagtgtgtcgttctcaagccgtcgacggatgccatcaaaattgctcttcacgtcgcacgtgttgattccccacgcaccctatttctagacgacaatgttcagaatatatccgctggaaagactttgggcctctggacttgtttggttgggaagagtggtgagggaaaggaagccgattatgcaatagaagaagtcaagactttgggggatgtgataccagaaatctgggtcaacaaacaggatggtggtgacagaagcagaagtgaatgggagttggatcaattcaatatctctggngacctaattgaaaacgatgtgggcttagctcttacggccccattatgcacatga

SEQ ID NO: 210452 - DNA, 404 bp, Gossypium hirsutum
ggaatccgagttcccaagtcgcgtcatctctcgggtcttgcttggaagctcaagtgcaagaaaatcaaagcaagttgaggggtttggaaacggtttcgaaccgcttgcaagaagaaattgatgaaaaagacaatgaagtctcggttttgaggaagaaattagctgagattcattggggtaacaccaagttgtccaagaaattatctggtaacctcaattcagcttgtgatgttcttttaaccgttagggtatttcattccgttttgcatgatgcttgcagagcaactcataagttcagtaagattttgattggtttgatgataaaagctgggtgggatcttgatttggttgccaattctatttatcctgatattgtttatgctaagatagggctcactagattt

SEQ ID NO: 210453 - DNA, 400 bp, Gossypium hirsutum
tgctgctaatggtgctgcagtagtattggcagaaaaaggccagcttgatgtttcaaaagatatttttactcacgtccaagaaggtgcaagtgggagcgtttttgtccaaatgccagatgtatggataaacttggctcatattttcttcgctcaaggaaattttgctttggctgtaaaaatgtatcaaaattgcctgcggaagttctattataatacggactcccaaattcttctatacttagctaggacgcattatgaagctgaacaatggcaagaatgcaagaaaactttattgagagccatccacttagctccttcaaactacacattacggtttgatgcaggagtagcaatgcagaaattctcaacatcaacactacagaaagaaaagaggactgca

SEQ ID NO: 210454 - DNA, 419 bp, Gossypium hirsutum
cgtatccatttatgctctcttatatgcacctgtcatctcagctgagaaagcataccatgaacaattgtcggttcccgagattacaaatgctgtgtttgagccttcaagcatgatggcaaaatgtgaccctaggcatgggaagtacatggcatgttgcttgatgtatcggggagatgttgtccccaaggatgttaatgctgctgttgctaccatcaaaacgaagaggactgtgcagttcgttgactggtgccctactggcttcaaatgtggtattaactatcagcctccaactgttgtacccggaggagatctcgcgaaggtgcagcgagctgtttgcatgataagcaacaacacagcagtggctgaggtgtttgcacgcattgaccacaaattccatctcatgtactcgaagagagctt

SEQ ID NO: 210455 - DNA, 450 bp, Gossypium hirsutum
ccatcaccgctgagaaaattgcaacaattgttaaagctgcaaatgtttcggttgaatcttattggccaagcttgtttgcaaagcttttcgaaaagtgcaacattgaggatcttataaccaatgttggtgctgctggtgctggtgctccagttgccgcagctgcacctgttgctgctggcggtggtggtggtgccgctgctccacctcctgctgaggaaaagaagaaggaagaaccagaggaagagagtgatgacgatatgggattcagtttgtttgattagaagttcctttcagtgcttgatttggttgattactgttttaatgcattaaagctgtgacagtagttgttgaggcttcttggtattattattatttatctgcttttgagtaaaaactttctttgagttgtatgtttgaatcttctatatataaaacgtttctaaccaattt

SEQ ID NO: 210456 - DNA, 441 bp, Gossypium hirsutum
ggaagaggtgggtggttttgccaagttgggaaccgcttgcggggttaaggcatggaggagttgtagtggcattcagtgatgccagagttataccatggatttggagccttactcctgtttgtctacttgttggttagcacaccacttctctatgacttctacaactatcgtcccaatgaaccccaatactctgttctgcttggtgatttcttgcagtgtgttgcgcaatgtggtgcattaattttctttgtggggatgaagaactcgatgccaaagaggcaactaaggaggaagtccccgaagcaaaaagctacttagatgtaatcaaagaagtaaaattttggcaatctccagtaaaactttgcaggtctatctgattggatcctttctcgatttctagcttttatctgttctttattaactgaagcatttgtactatcg

SEQ ID NO: 210457 - DNA, 417 bp, Gossypium hirsutum
  unsure (1)..(417): unsure at all n locations
cccacgcgtccgggtttccaagggctaaaaacattggtcgatgttggcggtggtaccggtgccacgcttagcatgatcgtctctaagtaccccaccataaaaggcattaactttgatttgcctcatgtcattgaggatgctcctagctgtcctggtgtggagcatgttggtggagacatgtttgtaagtgtaccaaaaggagatgccattttcatgaagtggatatgtcatgattggagcgacgaacactgcgccaagtttttgaagaactgctatgaagctttgccagacaacgggaaagtgattgttgccgaatgcattcttcctgattaccccgaccctagccttgccacgaagttggttgtccatattgattgcattatgttggctcacaaccctggtgngaaagagaggacc

SEQ ID NO: 210458 - DNA, 346 bp, Gossypium hirsutum
ctcgaaaacagaagccacttctgactacactgtttgcggttgtggatgacatattctgcttggttcaaggccacattgagaatattgctgttcttaagcaacactatggcttgaacaaaacagcatatgaggggatcattgttattgaagcttaccgaaccctcagagacagaggtccttaccctccggatcaagatgtaagagatatccaagggaaatttgctttcattatctttgatagctcttgaaaagccacatatatagcttccgatgctgatggaagagtacctttcttctggggaactgatgctgaaaaccaccttgttcttgcagatgatgcggagac

SEQ ID NO: 210459 - DNA, 409 bp, Gossypium hirsutum
cgacaagtgcagcaaagggaagggttactttggtggggatgaagttgggtaccttgatatagcttttgggagcttcttgggatggcttagagtgacggagaagttcaatgcgatgaagctgctggacgaggggaagacgcctggtctggtaaaatgggcggacaggttctgttcccatgccgctgtgaaggacgttatgcctgataccgacaagcttgcggagtttggtaagtttgttattgccaaaataagagccgctggcgctgctgctgaaatgcattagaacaaaaattagcacatcttggatggaactaatgaatatattatctctgtttcttcactttgtgatgatgaacaaagatatatatatatattccagtaataaacccttttctttggctattggatt

SEQ ID NO: 210460 - DNA, 368 bp, Gossypium hirsutum
tcgaccactcgtacggtcccctattgttggaaatttacagctaataaactccaaaaccgggcccgagatatctgctgcgtagccaagctcaagaattattctaaagggaaatcctttgctaacatataatgagaattatactgtggatttgcatttgaagaaagacattggggatttgcaggtggcaagcgatgctcttctgaggattgctggcgtctcaaaacatagcatgtttcttgatatggatacgactgatatagctgcaggtgagcttgggatcaccatcaaaaacaagtacaaacttgcacaaagaatactcttaactctttagatcttttttacttatactatttagagattaatattta

SEQ ID NO: 210461 - DNA, 458 bp, Gossypium hirsutum
  unsure (1)..(458): unsure at all n locations
cgacaaatagctgaattaaattttcgaatatgtatgtgtttggaaatcggctcagagcccggagaagcaattccgtactgtcagaaggccatctccgtttgcaagtctcggctgcagcgactcacaaatgaagtaaagacttcctcagacctggcatcatcttcagctacatctgaattggatgatggtgttcaacagtcctcctctggctctcaaactgtcatatctgtcaaagataaagaagcagagatcgaaacacttgctggacttgctgaagaccttgaaaagaagctcgaagatctacaacagctggtagccaacccaaagtccattattgccgaaatcctgngaatggcatctgccaaggcaaaggctgatgagaagagtgcatctcctgctgtggggagttcatcgcggatgggtactgttaacagtaatggaggtttgattcttcactg

SEQ ID NO: 210462 - DNA, 323 bp, Gossypium hirsutum
gggaaacataattgctaatgctgatggagtggcagaggcaacaattgtggacaagcagatgccactaagtggccccaatgcggttgttggaagagcatttgtggttcatgagcttgaggatgatcttggaaagggtggacatgaacttagtctaaccactgggaatgctggcggaagattggcatgtggtgttgttggcttgactccggtataaatcttatcgatgaaaccagtttggtgttgtgctatttgttggttggatttggcagcttcttttatagagccgcatgtgatgttgctttcaatgttgatagcgtgttata

SEQ ID NO: 210463 - DNA, 432 bp, Gossypium hirsutum
cccacgcgtccgcccacgcgtccgcatcggtggacgtgcatgttagcaaagataatgaagggcaagagagagctgttgagaaaaggcctaaacggttggctatggatgtctctccttttggtttgttggaccccatgtcacctatgagatcaatgcgtcaaatgatggacacaatggaccggatattcgaggacgcaattgacattccccggcaccaacagaacacgaggagacgtacgtgcaccttgggacatcaaagatggcgaacacgacatcaaaaagcgattcgacatgccaaggctcggaaaagacgaggttaaggtttccgtagaagacgacatactggtcataaaaggagaacacaaaaaggaagaaacccaagacgattggacaaacaagaagtacagttcttacaatactagtcttcaacta

SEQ ID NO: 210464 - DNA, 448 bp, Gossypium hirsutum
gctacctgtgttaagatctctactgatgcttcaatcaaagaaatgatcccacctggtgccggtgttatgctcacaccccttgttgttgggatcttttttggcgtggaaactctctctggtgtcctcgctggatctcttgtctctggtgtccagattgctatctctgcatccaacacaggaggtgcttgggataatgccaagaagtatattgaggctggtgcttctgaacatgcaaaaactcttggtcccaaaggttcacatccacataaggctgccgttattggtgacaccattggtgaccctttaaaggatacatctgggccatcgctgaacatcctcatcaagctaatggctgttgaatctcttgtctttgctcccttctttgctacacatggtgggctgctttttaagatattttaagtgaagacaaacatcggctactagtcta

SEQ ID NO: 210465 - DNA, 438 bp, Gossypium hirsutum
  unsure (1)..(438): unsure at all n locations
gaaacaacgaaagaatttgtggcgaagttggatctaaagcctggccaaaaggttggagatggtggctgtggcataggtggaggtgacttttatatggcaaaagaatttggagtctatgttgtgggcatcgatctgtccataaatatgatatcttttgctcttgaaagagccaatggactcgattgctctgtggaatttgaagttgctgattgcactacaaagacttatccagataacagctttgatgttatctacagccgtgacacgattctacacattcaagacaagcctgcactatttagatatttctacaaatggttgaagccagtgggcaaagttcttataagtgattactgcanaagcgcangagcttcatcgcccgaatttgcagagtacatcaagcagagaggctatgatctccatgatgtaaaagcttat

SEQ ID NO: 210466 - DNA, 422 bp, Gossypium hirsutum
attttaatggtgggtcttgatgcatctggtaaaaccaccattttgtacaagctcgagctcggcgaaatcgtcaccacaatccccaccattggattcaatgttgagactgtggaatacaagaacatcagcttcactgtttgggatgttggtggtcaggacaagattcgtcctttatggaggcactatttccagaatactcagggtctcattttcgtggtggatagcaacgacagggaccgtgttgttgaggcaagagatgagttgcacaggatgttgaatgaggatgaactgagagatgctgttttgcttgtatttgccaacaagcaagatcttcccaatgcaatgaatgctgccgaaataactgataagcttggtcttcattctcttcgtcagcgccactggtatattcagagtacgtgtgc

SEQ ID NO: 210467 - DNA, 168 bp, Gossypium hirsutum
cgcgtgcgccacgcgttctgtctcgacacattatcaagaacgactgttggcttgtcatcgagggcctgcttctgaacgtcacaacattcatgtaaaaacatccatgaggagaagaggtgttgttgtaatcaccagggaaggatgccacaaaagaattcaactatttcg

SEQ ID NO: 210468 - DNA, 310 bp, Gossypium hirsutum
cccacgcgttcgagagaaccggagctactgtcgtcgtcgccgccatggtgaagtgtctgaggtccaacaaggccgtgattgtcctccaaggccgatatgctgggcgcaaagcggtgatcgttagatccttcgacgatggaacacgtgaccgcccctatggccactgtttggttgcagggataaagaagtacccgagcaaggtcatccgcaaggattccgccaagaaaacagcaaagaaatcgcgcgtcaagtgcttcgtcaagctcgtcaactaccagcacctgatgcccacccgctacaccctcgacgt

SEQ ID NO: 210469 - DNA, 456 bp, Gossypium hirsutum
cccacgcgtccgagaaaatatcacatatcttcttctccttctcagaaatcttagtatcatcagtatggcctcaaatcccaaggtcttctttgacatgacgatcggtggtcagcccgctggtcggattgtgatggagcttttcgcagattgcactcctcgcactgcggagaacttccgtgccctctgtactggcgagaaaggcgtcggccgcagcggtaagcccctccactacaaaagctcttctttccatcgtgtgatccctaactttatgtgccaaggaggtgacttcaccgccggaaacggtaccggaggtgaatccatctacggatcaaagttcgctgacgagaacttcatcaagaagcacactggtcccggtattctctcaatggctaacgctggaccgggaactaacggatctcagttcttcatttgcacggctaagactgagtggctcga

SEQ ID NO: 210470 - DNA, 400 bp, Gossypium hirsutum
aaagctttcgatgtggggaacccttatggttatatataaagcaccatatgctctcagttatcgaaatatggcaattctaggcgtgcaaggcgtctcggcactaccccaccactgtttgcagctctgctatgggttttttgcctttgccatagcagccaacttgttgagagattttagccccaaaaacattgggaaatgggttccacttccaatggcaatggccgtgcctttccttgtcggtgcttattttgctattgatatgtgtgtggggagtttggtcgtgtttgcatggcacaagctaaatggcaagaaggctgatttgatggttcctgctgttgcatccggcttgatctgcggagatggcttgtggcttcttccttcatctattcttgcttttgtt

SEQ ID NO: 210471 - DNA, 304 bp, Gossypium hirsutum
cggacgcgtggggttgtgtccgatttcgtcacttccgttgcgtcttccaagcctacaatagctcagccctcggtcgccacatggtggaaagccacagagaagtactatcagctcagcaagaaaccttattctcttgccatcacattgggttcacaaatccttgacgagaactactctttgggaaagtcgctaacaaatcaacagatcatggaattagcatcaaagggtggtcagaaaaacgccattaacgttgttttgacatcagctgacgtggctgtcgaagggttctgctcaagcaggtgtg

SEQ ID NO: 210472 - DNA, 440 bp, Gossypium hirsutum
cccacgcgtccgcaccaagggaacgttgtctgtcccattcctggaactaccaagatcgaaggcttcaatcagaacattggagctttgtccgtgaaattaacacccgaagagatggcagagctagaatccattgcttcagcaggttcagtgaagggagaccgatatggtggcactatcgcaacctactatgaatcggatactcctcccttgtcttcatggaaaccttaaatcagagcatactagttcaaatcaatacaatctttaaggtgagttatgaacctaatgtaaggcccctactttgtttttagaataaattttctgtgagatttaataataaaagggcttttggtgataggttgtgcaagcttggttgtagctatatctacgtttgtaatatgttgagaatgtcgattccaggttaataaagcaaaagtttctat

SEQ ID NO: 210473 - DNA, 420 bp, Gossypium hirsutum
atggcccatcctttgcttctccaaagcgagtgattgcatgtcttattgaaaaggagattgagttcgaggctgtccctgttgatttgcttaaaggagagcacaaagaccctgaatttctcaagctccagccttttgaaacagtccctgtcactcaaaatggaaataatgtttaatttgaatcccgtccattcataaggtcctttccaaaaaattccaattaaaagggacttgtcctactggaaaaaccagtaaagaaaaggggccaggggaaaaattgcttaaaattgaagcacacaattttaacccattaatttacccctttacccttcatgttatggttgctttcaagatgggggtcccttctgatgaaaatttgatcaaagaaagcgaggaaaagctatgcaaagtgccggatattta

SEQ ID NO: 210474 - DNA, 294 bp, Gossypium hirsutum
gagggagaagacgtgaacatgaatctggcgaaaacagaggcgaagttgcttcatgagaaaagttcagacaaagcttacagtgatgaccatgtcataaggcttttggctacaagaagcagggcacatatcaatgcaactctgaatcactacaaaaatgaatatggaaatgacataaacaaggacttgaaggctgatcctaaggatgagttccttgcactactaaggtccacattgaagtgcttggtctatccggaaaagtattttaaaaaggtccttcgcctaccattcaataaa

SEQ ID NO: 210475 - DNA, 443 bp, Gossypium hirsutum
atcttggtctcaataatcgattgattcatgtctaccacttcagtaaagagactgcccagaggcagatgcaagtgcaaaattttggtgagccctttttcttggtcattcatgaaggtgaaactctggctgaagttaaattgcggatacaaaagaaattgcaagtttctgatgaagagttctccaagtggaagtttgcatttatgtcattgggtcaaccagagtacctacaagactctgacattgtgttcaaacgttttcagagaagagatgtttatggggcttgggagcaataccttgggttagagcattctgatacctctcctagaaggacttatgttaatcagaaccgtaacacatttgagaaaccagttaaaatatacaactagtagaaagctagttatacattagcatatcagtcgatgtggagatccttcaagtgatgg

SEQ ID NO: 210476 - DNA, 320 bp, Gossypium hirsutum
atgaaacattaccctggagagaatgagggcattactgaagagatgagattcgttggcatggaacttcgtaatattaaaggtaaaaaggtcagttccgattgtgtttctgactctgaaaccgacactgaaaataccccaagcgatcaagaaaaagaagatgattctgaaactgtgaaaagcgatgaaaatggtggtgatggagaagcagagacttggagtcccactatggaaggatttcttaagtacttggttgatagcaaattcgtcttcaacactattgagcgcatcattgatgaatccgatgatgttgcttatgccta

SEQ ID NO: 210477 - DNA, 396 bp, Gossypium hirsutum
gcgaacatccctagaagattccatcttgctggttacccatatgaggaacagaggcaactgaggaggctaggacagcacatgcagggaagaagtgagaggggggaggagtctgaggaagaagaaggagaaggagaagaagaagaagaagaagacaaccccagccgccgcatccgacaccagaaggaggatgagcaggggcgggaaagctcatcatgcaacaaccttttatgtgccttcgacagaaacttcctcgttcaagctttaaacgttgaccacgacatcattagaaaattccaccgtgtccaaggaattaaaggcaccttctccaaagtcaggtccaaactcaaggtcgtaccacaacccaaatggaaggagaaaaacctggggaaccccaac

SEQ ID NO: 210478 - DNA, 402 bp, Gossypium hirsutum
atcggaaaaagagaaaacatgggttggatcggagacaccgtagactccatcaaatcaatccagatgcgccagctcctcacccaggtcgtcagccttggtatgattgttacgtctgccctcataatatggaagggattgatgtgtgtcactggcagtgagtctcctgttgtcgttgttctttcaggaagtatggaacctggcttcaagaggggggatattttgttcttacacatgagtaaagatccaattcgagctggagagattgttgtttttaatattgatggccgtgaaatcccttgtcaaacttgtgatctgcagcaatcccgatgattcagctatccatcaagcttcatcgcaagttagagcatcgtgtaattaacgtccatgaaaggcaagatactg

SEQ ID NO: 210479 - DNA, 401 bp, Gossypium hirsutum
acgacatatacaatttagccaactcttgtgtatttcatccacgatgaatcccttcaaaacggtgccaaccctttctttcctgttcttaacccttttcagcttagcccatgcagccacatttgatataagaaacaactgcccttacaccgtttgggctgccgcatctccgggtggtggcatgagacttgaccaaggtcaagcatggcaaatcactgcagcctctggaaccacacaagcccgaatttgggctcgaaccaaatgcaatttcgatgcctccgggaaaggctcatgcgagacaggcgactgcggtggagtcctcgaatgcaagggatacggtaaagctcccaacacactagccgaatacgcaatcgaccaatttgagcaccaagacttcattgaca

SEQ ID NO: 210480 - DNA, 460 bp, Gossypium hirsutum
gcgctgagcctaatccaccagtttatacaccaccaaagaaagagaagcctgagcccaaaccacgcggtataggaacccccaaagaaggaaaagcctgaacctaagccaccagtttatacaccaccaaagaaagagaagcctgagcccaaaccaccagtgtatggaccaccaaagaaggagaagccaccggcttataagcctccaaaaaacccaccagtgtatgagcctaagccaccaaaaccaccggtttacaccccaccaaaaaaagaaaaacccgtacctaaaccaacaattcattaatcttccaagaaaccaccggatggtcactattcaagacacccttcattggggaagcctcaatagagagataccataggcttgcaattccaaaaaccgagctattatgactatgctaatagataaattagtatccatgcaataagagctgcttaatactcat

SEQ ID NO: 210481 - DNA, 350 bp, Gossypium hirsutum
ttttcgtgctcctgctaagatcctctggcgtaccattcgtggcatgattccccacaagaccaggcgtggggcagctgctcttgctcgattgaaggcttatgaggggattccagctccatatgataagacaaagaggatggttattcctgatgctctcaaggttttgaggcttcagaaaggacacaagtactgcttgttgggcaacctttcctctgaggttggatggaaccattttaacaccttcaaggacctcgaaaggaaaaggaaggaaaaacctcaggggccttataaaaaaaaaaagcacctaactaacctaagggttaaagccaaaaaggttgttaagaaaaacc

SEQ ID NO: 210482 - DNA, 246 bp, Gossypium hirsutum
  unsure (1)..(246): unsure at all n locations
ggcccactcgttctgtcaatcctggtcgtcaaactatcgactattgatttaagattganaagcgtgaagatgattacatgctggttttctgcccaactgtgtgtgatttctgcaaagttatgtgtagggacgtgggtgtttttattgacaatgccggtgtaaggcaactggctctcaattattttccccttaaaaatatgtttaaaaaggcttggaaccttaaaatccatccttatttttaattct

SEQ ID NO: 210483 - DNA, 357 bp, Gossypium hirsutum
cccacgcgtccgcccacgcgtacggtaaatttccaaaatctagacggtatttactgggttgacctaaggaatatttcgggtccttttccggatcttcttttcgggttacccaaactcttatatgcttacattgagaacagtaagctttcgggatccttacctgtgaatattggtaagctaaaacaactcggggccttgagtcttgaagggaatcggttcactggatccataccgagttctatctctgagttgactcagttaactcagttggttcttgggaaaaatgaattctccggtcatttcccggcggggattaaacagattaggaaccttagttacctgagtttagaacaaaac

SEQ ID NO: 210484 - DNA, 359 bp, Gossypium hirsutum
aaaaaacatacaaacacacaaaacagttaatttacaaaatataaacagaatttacttgaggagcgctaatgaatatttcacctccttttccggatcttcttttcgtattatcccaaactcttatatgttcacattaaagaacaataagctttcagggatccttacctgtgaatattggtaacttaaaacaactcgcggccttgagtcttgaatggaatcggctcactggatccataccgagttctatctttgacctgactcaattaactaacacggttcttggaaaaaatgaattctccattcatttcccctcggtgatcaaacagattagcaaccttagttacctgaattcataacaa

SEQ ID NO: 210485 - DNA, 416 bp, Gossypium hirsutum
cccacgcgtccggagcaattgggtcagggactggtattcttctggcagtcacaatcgtctggcagtatttcgagacttttgagaaggagaaggccagtgagcttggcttctttggattgtgagcttacgctttgactggagggatgcttgtgcttcttagctttcgcaattttgggttaggtgagggattcatttcgggcctacttttgacaacagagtttacaatttagttagttcaatatgttttgcttacacattttgtttgagaaatcacagaaaaagggtattgcctgaaagcagtgctacttttgtctagtataccttgcaatatagaagtttgttctatggttggacgcacgcgcaatgacaacacttcttatatcttgtgtatctttagttgcttgaggagagccttt

SEQ ID NO: 210486 - DNA, 357 bp, Gossypium hirsutum
caggggagtatgagagaggactttttgctcatactgataaaccagtcagtacacttatttgtgaggatcaagtttcaggattggaaattgaggtcaacgacggccaatggatcaagttgaccaatctatctccttcttcttttgtttttgtagttggagatcctctcaaggcatggagtaatgggaggttgaaatcagtaaatcacagagtgatgatgagcggagacaaagatcgatactctatagcagcctttgtcattccaaatgagggtactataatcaggacacccgaagagcttatagatgaccaacatcctcggcttttcaaggacttcgatttcatggatttcttccttt

SEQ ID NO: 210487 - DNA, 432 bp, Gossypium hirsutum
ctggggtgcaggttggaaccttctatcattgttgcttgcagtcaaacgttctaaaagaataagtggcatagatgctcttaggcatccttttttatgtggaccaagatggcgtgtggtcccatctatggatattattagatggggtcttgggtcaactgcagtgagaatcacagaggaatatatctatcgcacagctcagcgtgataggcttgcccactttattgaattaatggagatgttgaatccccattcaagaccaaagaactggctagagcttttgcccgggaaatggcgtctgttatactctacaggaaggcacataggcttaactcttcgccaacctcctctccgtgtcctcattggcgatgcatacctaacaattgcaagaccttctaagtcaaacgcacgcctttctgtaacatctgaaattgg

SEQ ID NO: 210488 - DNA, 328 bp, Gossypium hirsutum
ttcgtaatacgcgaagcacctgagcgatagctcttcgatcgctatattctcgcgatggcgggggagcgaagatcttcgcgagacggcccatgaatcaatctcgagaatcgagcatggggcttgtataccctaccgcattccggccccggggccttcaattggtcctttctctcttctcttttaccagtgagtggtgagtttcctttctaggtaggtacctcttggattcagagtttggtccaacatctgccacacatgagatcctgatcgtctttctcccagcgttgatgcctgctgggggaaggaaacaaaaaagcacataagctta

SEQ ID NO: 210489 - DNA, 380 bp, Gossypium hirsutum
ctttttaactctaaagccaagaaagcaagcttctaaggttttgagagaagatcaaaatggcggctgaaagatcagcttccatggtcctccttttggcactcaacattctctttttttccctagtcagtgcttgtggctcttgctcttcacccacccctaaaccaaggccaaacccaaaccccaacacccccactcctactccatctgcacgaggcaggtgccctagggatgccctcaaattaggtgtatgtgccaatgtgcttaacctagtcaatgtcaccgttggttcacccccagtgatgccatgctgttcccttctcaatggccttgtcgacctcgaagctgctgcatgcctttgcaccgctatcagagcaaacatt

SEQ ID NO: 210490 - DNA, 393 bp, Gossypium hirsutum
tgcaaaaagtgttgatacgtcctatccacatagaaagcttaccctcttccacacattgccggtggatgctacagccgctatcactttggctgcaggaggggaatggttaagtgaaactctcgacgtcttgtttggtaaacgggatgtttacccaggcgccgtattcttgcctaaccgttcggccggagatgcctttgtatggtatagcaagctgcttagctacttgtatcgatttgccacagtgtggttagatacaatgcgctggcagcctcagcttggcaggatgggaatgaaggtcgaggaagcagggaagaaaaggttattcgctattggctcacccttgtatcatgccttggtacggcctatacatgattgagtcatgacggttttgac

SEQ ID NO: 210491 - DNA, 407 bp, Gossypium hirsutum
attacaccttatacatatatttaaagtccctcacaaccctcaaaaactctggcttgagcgggaatactcacatcagcactcccccttgacaatcctctaaaccatctgcttgtccccgttgcctacatgttcagaacccaatatagtgcactctctacttactatttatacacgttcaaacaactcctttcatccaatctcacaatctcctgtactgagaaatccttgacagatcatgttgcaataaatgcacatcgtaatgcgtaccttaccgatttgaaacgcaataaactttttaaggtatttgttgatcgtgacatcttatttaccctcacaaacccaactcttacttccaaagaatggtacaaaaaccttgctttatttaaccgaatcctttaccaccccca

SEQ ID NO: 210492 - DNA, 437 bp, Gossypium hirsutum
  unsure (1)..(437): unsure at all n locations
cccacgcgtccgagcgcatgtgtgaaaaatcgatgatcaagaagcgatacatgtaccttacgagaagagattttgaaagagaatcccaatgtatgtgaatacatggctccttcactggacgctaggcaagatatggtggtagttgaggtgccaaagctaggcaaagaagcagccaccaaggccattaatgagtggggccagcccaagtccaagatcacccaccttgtcttttgcaccactagcggtgtggacatgcctggggctgactaccatctcaccaagcttttatgcctccgcccctccgttaagcgcctcatgatgtaccaacaaggttgcttcgcatgggggacggtgctccgagtggctaatgacttatctgagatcaacatangtgctcgtgtacttgtgtgtgctcggagattactgctgttaccttc

SEQ ID NO: 210493 - DNA, 418 bp, Gossypium hirsutum
aagggtttctcaaggagaaccaaaagatgattatatcagaccgcaggggcttttattcacacccaggacattagacatttcagatacaggcacatcttttacattcaacatggattcatctttctctcaaagagtatcaatgaacgaaagcccggcactgcattcactgcaacagagattaagttccagtgaagaacctgatagtcatatttcctgtcaattaaatctaactctggcatcttcttcattgcaagtcaataaaagtccgatcttaactaggatgtcccaaccaagttgggaaatcggaaaagtctccgagtcaaggtctaatgccaacagtaaagactctgattctagacctttccatagcagaagatacatgattgatggggaaacaacattatcgtcatcgaaagat

SEQ ID NO: 210494 - DNA, 300 bp, Gossypium hirsutum
cccacgcgtgcgcccactcgtccgcccactcgttctcccacacgtacgcccactcctgcgggctagtttcagtatcacttccatggctatcacggctgcttattatacattgtcatggcatatggatcgaggagaacagcctctgtctgaaatgctcgtcacattcgccctatctgttggcaccgccgtaggcatggacttttttgctacatggacacatctagctctgtggcatgcttccttatggcatatgcatgagtctcaccatccaccaagagaagagccattcgaactaaacta

SEQ ID NO: 210495 - DNA, 425 bp, Gossypium hirsutum
gtccaaactggtgaaattgcaggcttgggaagctatacaaatggagagctaagtccgtcggggagttcaaacagattgaagaatcagattagcttctcatcaagactaccttcatccttgggcatcttgtcacagatttccgaagttgtcgatgatgctaaactcgaaactggatgccaatacggttcttggaacgattctgcaaacttcccagagaacttttctggctcgaaaacgacacaagataacgactccaacttcttttccgccaaccagaacagtgctagtggaagtcgtcttcatgtattgtctcaccatttgagtctgccgaagacatcgaatgaaacgcctgccatggagaagtttctaagctttcaagatccagtcccttgtaagattagagctaagcgtgggtgcgctacaca

SEQ ID NO: 210496 - DNA, 383 bp, Gossypium hirsutum
ggcgcatgcgtccgaatttaacccatactccccttatggattccctaacatctattgttaaaggggacactgtgaatgcttactactaccacattgttagcccatttacgaacacagctgttggtgcgtaacttacccatagcttttcaagtaatgagaacactctcacgattggtacacaacatgctctttacccgtttaccacaattattgttcaactgaacaactacggcaaaacaagtggtcttatccatcatgagtggctcccaaaatgcctcttcaatatctttggagacatggacaccacatcaatttaaaatactgctaaagtctctcttgccttttcactcaaaccccaaggaaaagcaatatcactgctttaa

SEQ ID NO: 210497 - DNA, 405 bp, Gossypium hirsutum
cgtttaagcagtttcttgaagctgttataaatatgaagtttgatgaggagcccaattatgccaagctcatatccttctttgaaagcctaattggtccatgcataccattgagaccaattagaattgatggagctcttaaggttgggcaaaagcgtggaagattagtcattaatttggaagaagatgagcaacccaagaaaaaagtacgactgggtattcctgctactcagtgggtttctgtttacaatgcacgacgtcccatgaagcagcgatatcactacaacgtagcagattcaaggttgcatcagcatgtagagaagggtaatgaagatggattgtttattagttgtgtggcttcagcagcatatctctgggccctgatcatggatgcaggaacagggttct

SEQ ID NO: 210498 - DNA, 347 bp, Gossypium hirsutum
cccacacgttcgaaattaaaacaaatataaatatagaatgtagaagaagaacccaattgtgcggaggtcatatccttctttgagagcctcattgctccatgcataccattgagaccaattagaattgatggagctctcaaaggtgggcacaagcgcggaagattagccattaatttggaagaagatgatcaacccaagaaataagtacgactgtgtattcctgctactcagatggtttctgtttacaatgcacgacttaccatgaagcagcgatatcactacaacgtaacagattcaaggttgcatcagcatgtatagaacggtaatgaagatggatcgttcattag

SEQ ID NO: 210499 - DNA, 438 bp, Gossypium hirsutum
  unsure (1)..(438): unsure at all n locations
cggacgcgtgggcagctgcatcatctgaatctaatcctgaaggagaagctgaatctgttgaagcagcagcagccgctaaatcgaaggccaaggctttacagcttgcacttgtgttcggtttttggtactttcagaacattgtctttaacatttacaataaaaaagcattgaatgtcttcccattcccttggctgcttgcttcttttcaactctttgctggttccatttggatgttggttctgtggtctttaaagttgcaaccttgtcccaaaatcacaaaaccttttattattgctcttcttggacctgcattttttcacacaataagccacatttcagcttgcgtttcgttntctaaagttgctgtttccttcactcatgttatcaaatcatcggagccctgtgtttcggttgttttctcttcattcctggtgatac

SEQ ID NO: 210500 - DNA, 353 bp, Gossypium hirsutum
cccacgcgttcggttttatgtcctatatgttttcatcctgactggaagaatgatcagagggcgggttatattgatttaaaacatggataaactcattggtagctttgagacaatccacgttcaagatgctgcttggcatgagcttgcacctcgtcttggtaatttgttcacaattggaaaaggaactaagccatgtgtattccttcccaagggcaatggtcttaagtcgtccatcattgtcgatgctaagaagaggctttcagcccaaaatgctgcttgaacattaacacaagatatctagatatgccttgctactgtaacctattctggagtgactacatttcatgctttca

SEQ ID NO: 210501 - DNA, 399 bp, Gossypium hirsutum
gtttttgctcttttcccgttttccatttcctatcttcacagcggaatttagggtttgggagggttgaatatgagctctacgggtggatcaacgaaaggagggagagggaaaccgaatgcatcaaagtcggtttcgaggtcgcacaatgccggtcttcaatttcctgtcgggaggatcgccaggttcttgaaagctggaaaatatgccgagcgtgttggtgccggagctcccgtctatctctctgccgtgcttgagtaccttgctgctgaggttctagaacttgctgggaatgcagcgagagacaacaaaaagacccgaattgttccaagacacatccaactggcagtaaggaacgatgaagagttgagcaagcttttaggttcagtcactattgcaaat

SEQ ID NO: 210502 - DNA, 400 bp, Gossypium hirsutum
cccacgcatacgtatcgcttatttcgcgtccttactgtgcactcgatggcaaatcgatgggggaggcctgaggtgtatccgctgttcgcggccgtatgtgttgctgtcagaatctgcgggtttcagttggtgcgaaatatcttcatcaaccctgaagtcagggtaaccaaagagaacagggctgctggggttttggacaactttgctgagggagaaaaatattctgaacatttcttgagaaaatatgtccgcaacaagacgccagaaatcatgcccagtatcaacatcttcttcactgacccaaagtgaggcttcactcttgctttatgctgaaactaatattaaaaaatagaagaactaagtcttattcaatcaataccaagttttggcctttctttct

SEQ ID NO: 210503 - DNA, 327 bp, Gossypium hirsutum
cccacgcatacaaatcgcttatttcacgttcttactgtgcactcaatggcaaatcgatgaaaaaggccttatgtttatccgctgttcacaaccttaagttttactgtcaaaatctatctctttcacttgacgcgaaatatcttcatcaaccctgaactcagggtaaccaaacataacaggacttctgggactttggacaactttacttagggagaaaaatattctgaacatttcttgagaaaatatgtccgcaacaagactccataaattatgcccattatcaacatcttcttcacttacccaaaatgaagctttactctttcttta

SEQ ID NO: 210504 - DNA, 305 bp, Gossypium hirsutum
gcgctgcacagcttccccaagaacccatcattctcagattttctctcagcgtttaagggtggaacgatgtccactgtcggagaagctgcttgctcttacgctgctcttattctttatgatgatggcatccccatcaccgctgagaagatttctacactagttaaagctgcaaatgtctctgttgaatcctactggccaagcttgttcgctaagctttttgagaagtgcaacattgaagatctcataaccaatgttggagctcgtggtggtggtgccccagtagctgcagctgcacctgttgctgc

SEQ ID NO: 210505 - DNA, 301 bp, Gossypium hirsutum
  unsure (1)..(301): unsure at all n locations
aattaccgactcgacggacgcgtcctnccacgcgtatttccacgctgttttccacgcttcctgttcaggatatcacccttcacttagccttgctttaacagagatgggtcctcttcatagagctgctaacaaaaattgtagacctctggtggaactccttttgagattcatccctgagaaaagttcaagtaaattaggattggaaaaccagatggcagctggtgggattcatgaaagcttcttgtttacgcctgatgctctaagcccttcaagtttgactcctcttcacattgcagctggt

SEQ ID NO: 210506 - DNA, 400 bp, Gossypium hirsutum
cccacgcgtccgagaatacatactgaaaccaggggatggcactgtggatatcaatagggtagaggaatacatatcctttgtcgttgatgcaactggcaaggctggaattattcggcaaatggaggcatttcgagctggatttaatcaggtttttgatgttgcatcattacaaatatttactccccaagagttggactatttgctatgtggtcgcagagagttgcgggaggccgagacacttgctgatcatataaaattcgatcatggatatactgcaaagagccctgcagttgttaatttacttgaaattatgggagaatttacaccagagcaacatcgggccttctgccaatttgttactggtgcgcctaaacttccacctggtggtcttgcagtgctg

SEQ ID NO: 210507 - DNA, 402 bp, Gossypium hirsutum
ccacgcgtccgccgcaaggctgctccagctcctgcacaacagcctgaacaaggaatttgggccaaaactgaaagaacatatgcaatactgtatggagcatcctgaagaaataagcaagctagctaaggtcaaagctcaggtttctgaagtcaaaggtgttatgatggagaacatcgaaaaggtgttagatagaggggaaaagatagagctgctagtggataagactgagaatcttcataatcaggctcaagactttcgaagtacagggacaaaaatccgaagaaaaatgtggctacaaaacatgaagatcaagctgattgttctaggaatacttattgccttgatccttatcattgtcctctctgtttgccatggtttcaactgtggcaaaaaaataaatgc

SEQ ID NO: 210508 - DNA, 380 bp, Gossypium hirsutum
cttggaaggtgtgatcacagccatcgatctgtccaggaaaacatttagccggatacaatggaactatgtttttgcgatggcgtacaatgtggtggcaataccaattgctgctggggttttgtatccatcattagggataaagttgccaccatgggcagctggtgcctgtatggccctttcttcggtaagcgtggtgtgctcttctttacttcttcggagatataaaaagcccagacttaccactatacttgaaataactgtagagtagaaacaaaatttgaacaactatttttctctccatcgccttcctttaggtttgtgtttttataaagaggggaattgagggggtgcgagtgaatcataaatttcccaattttgtg

SEQ ID NO: 210509 - DNA, 389 bp, Gossypium hirsutum
cccacgcgtacggttgtcttctgtcttccctgtccatttatctcatgcgaggagtccttgggatcccttgtgcatattttctatgttgtctctgtgattcaggctttaattgtatgttgtcagagacatggttgtaagaccgatggattagattcccataatcgcctagttactgatatctgtggcattcttggagaaactggttgtgctcattggtattttgtgtcaaatagtgtcgaccattcttgtgatattaaagatatgattcgaagattgagtttcccgtacttacggagatgtgcattgttgtggaagttgcttaaatcgtctttcccagcacctttctgctaaagagatgatgtgtggagagtctcttatgcaacaactga

SEQ ID NO: 210510 - DNA, 416 bp, Gossypium hirsutum
gtttataacatattctcaagttcactacaagctgtctttctgagcaacggtcactaaattatttatatctggagctacgaaactctgaattaagtttcgttaattttccctgaaactagacttatttttctttcttccataaaattttcaaattttttggtttagccaaatagtacagtttattcctcaaagttacccctgattcactgtctgacagttccgacccttctatactaaagttcaattatctcatagtacaagactcaaataatgttctcgtctatttatcttgaaactaaactcatatgtctacttatttttttctagaatttttggttgggccaattagtacagtttattagttaaagtctcccctgtttcagggtatgaccactctaacccctgtgcactacaaa

SEQ ID NO: 210511 - DNA, 325 bp, Gossypium hirsutum
ggctaactcggaggccaccttgggtacatacaagggtgatgcaaagattagtgagggtgctgcagagagccttcatgttaaggactacaaatactaagaatttagtcttgtggtctgtgtatcagagaaattttctgtattgatgatagacgtttagtgctgtttttgggggttgtccgtttcttctcatggaatttaggttgtgaaatcagactcaaataagcttggggggccttagttctcgctgagtgttcatggttttttgtttgcttcagtttaaaacaatattctcagcatatacaactgagtgtgctttgcacttttt

SEQ ID NO: 210512 - DNA, 411 bp, Gossypium hirsutum
agacaaggaaggcatccccccagaccagcaacgtctcatctttgccggaaaacagctcggagacggccgtaccttggccgactacaacatccagaaggagtcaactctacaccttgtccttcgtttgcgcggcgggatgcaaatcttcgttaagacgcttaccggaaagacgatcactctcgaggtcgagagctctgacacgatcgacaacgtgaaagccaaaatccaagacaaggaaggcatcccgccagaccagcaacgtctcatcttcggcggaaagcaactcgaggacgggcggactttagccgattacaatattcagaaggaatcgactcttcatctggttctacgtcttcgaggtgggatgcacatcttcgtcaagactttgaccggttagaccattactttaga

SEQ ID NO: 210513 - DNA, 417 bp, Gossypium hirsutum
  unsure (1)..(417): unsure at all n locations
cccacgcgaccgacccaaaccgncggttgttaagcctccgccatatacacctaagccaccttactatccaatggggccggggatatcaccaccaacactgcctccaaagccaccagtctaccccagtccaccaatagtgaacccaccaacaccgccgattctgccacctcctattgtgaatccaccaacaccgccgattctaccaccaccatcaccacctattgtgaacccaccaacgcctcctatcgtgaagccaccttcaccgggaacaccgtgtccttcaccaccacctccggcacaacatacatgccccatagacactctcaagctaggtgcatgtgtggactcgttgggtggcttagtacacatcggcataggtagcagcgccaaagacacttgctgccctgtactacaagg

SEQ ID NO: 210514 - DNA, 391 bp, Gossypium hirsutum
tgctgatctccattgtgttgattggaacccccatgatgacaatcttatcctgactgggtctgcagatcatactgtacgtatgtttgatcgaagaaatctgacttctaatggaattggatcacccatttacaagtttgagggtcataaagctgctgttctatgcgtgcagtggtctccagacaagtcatctgtatttggcagttctgctgaggatgggctcttgaacatttgggactatgacaaggttggcaagaaggtggaacgtgcttcaagatctcctagtgcttctgcgggactgtttttccagcacgctggacacagggacaaagttgttgacttccatttgaatgcatcttatccatggactgttgttagtgtgtctgatgaactg

SEQ ID NO: 210515 - DNA, 420 bp, Gossypium hirsutum
cccacgcgtccgcccacgcgtccgggcgatggtaaaacaggcgtggtgtcactcgatctcagtaggtgagtaaaccagctccagtagtcctcatggttaccagatagagtccattcaagattaacctgtctccaaacttcctgtgcagggccacaccgtgtgcttatatgtagcggagtctcagcttcaatattacagcggggacacataggggaaatagcaagtcttctattgtaaagtatagatgctgtaggaataaaattgtgtattattctccaatttgctatcttatttttgggagtgatttggagagaccaaatttttttgtaaaagtcaatattaccttgggtagagtctgtataatcagaggcatacgttaacatttgatagccactcctgactgtgtaaagtcatgtatgt

SEQ ID NO: 210516 - DNA, 309 bp, Gossypium hirsutum
tccacgcgtccgctcgatatcctttcctgttgtaagagcggtctctgataagctgggtgagcctgttgatatacttcatttagatgcccatcctgatatttacgattgttttgaaggaaataagtattcacatgcatcttcttttgctcgaattatggagggtggttatgctaggcggcttttgcaggtcggtatcacatctataacaactgaagggcgcgaacaaggaaaaaaggtcggaatggaacaatacgaaaagcgaacatttttaaaaaaacgtcatttctttgaaaaccttaaactatggga

SEQ ID NO: 210517 - DNA, 255 bp, Gossypium hirsutum
  unsure (1)..(255): unsure at all n locations
cgttcctgtacctggagaatctggttttccttttccggggctttttgtgctcggacagtcgcaaaaggaagcagaactactcangaattatctgaagcaaatcagagaagaaacgagtgggagattgttgagtgttgcctataggcccaatggaactccaaataaatggtggttagcttttgcgaaaagaaaatttatgaatataattattccatgaaatgaaaaacgttgtatattgaatcaaaagtagaatgt

SEQ ID NO: 210518 - DNA, 420 bp, Gossypium hirsutum
  unsure (1)..(420): unsure at all n locations
gtgaagatatactttgtctcccccgacattgttaaaatgaaggatgacattaaagattatcgaacatctaggggtgtcgagtgggaagaaagtggtgatttaatggaagtggcgtctaaatgcgatgtggtgtaccaaactcgtattcaacgagaacggtttggagaaaggatccatctttatgaagaagctcgtggtaagtatatagtggatgagaatgtgttgaaggtaatgcagaaacatgctgtggtaatgcatcctctcccgaggcttgatgagattaccgtcaatgttgatgcccatccgagagctgcttattttagacaagcaaagaatggtctctatataatgatggctcttttaaaattgttgcttgttggatggtgaggaaaaaaaaggngctgtttttggattattttg

SEQ ID NO: 210519 - DNA, 194 bp, Gossypium hirsutum
aaataccgggccgacccacgcgtacggggaaaggttccatgtgaactgcacttgcactttggttagtctatcctaaaagacgggggagtcccgtttgacagcgcgtacagctcgagcttctaaagggaattggttttaaatatctgaaccgggacgcggcggctgactgcaacgtttgggagttctgagacatc

SEQ ID NO: 210520 - DNA, 426 bp, Gossypium hirsutum
ctcgaaaaaggtgttccacaattttttcttccattgagcagattggacaagcatcatcggtggtgagtcttcgagtctttaggttactaagcgttgggagataattgttagaaaatctccataaaagtatttttattttactgggaatcgggaggttccataattttgtaaaataagcttttatattagtttggtctgtataataatcctgtagatgaagggtattagtcattagccatttaaaaccactctgaactatgtatttgcccgatttgtacccacgccatatcataacatcctattgagtcccgattaccaatggaatcgacagggttgccttggcttgttccctttttagtaagttctagattgcatcatagttccgcgtaaaagattctttaataattaaatctgctactttggaat

SEQ ID NO: 210521 - DNA, 292 bp, Gossypium hirsutum
cggaacgacccactcgtccgacccctccttcccctactcacactttacagactttcatcactggtttggacactgacatggggacagatgggtacaacgacgaattaacccatgcaacttctacaaacataaacttttgccttaagaacatactttccaactctgaaatatgcaatgatgaatactaaccttgccgatattctatgaattaaaccgaaaccgatactactttaaccattcatgttacaccctaagacggatttacttatacaatgcttacaagctgttatct

SEQ ID NO: 210522 - DNA, 355 bp, Gossypium hirsutum
  unsure (1)..(355): unsure at all n locations
ggaangaccggggcgacccacgcgtacacccacgcgtccgcnatggtgatcttctcacacttttgaacgtgtaccatgcttgcaaacagaacaactaggatcgatcctggtgctatgagaatttcatcaaccatagagcgctgaaggctgctgttaatgttagacaacagctcgggcgcattatgtccaggtttaatctcaagctgtgcagcactgatttcaacagccgcgactactatgtcaacattagaaaggccatgcttgctgggtatttcatgcatgtagtttatctggaggcgcacggggcactacttgacaatttaagacaaccaggtggtgcacttgcattcattaa

SEQ ID NO: 210523 - DNA, 381 bp, Gossypium hirsutum
tcgacccacccgcccacgcgaacagtgtaccaaacaacagagcaaaaactacttcgtaaactgcatactgtccacagcgcaccggcgaggacttgattgccatgagcttttaacgtgcaactaccacttatgcctgatcaagagacccgcaacttttggaagggccacacacctcccgaattactgtagcaaaccctccctttactcaatggatagcgcttatccttcttcaatctacaaaatgagaaatattaaaaaaagaatagaatgaggtctttattgaggaggcttttgccctgaaaaatgactaatgaaaattcaaaagaatgggtctgtgcttttaaaaagattaaaatgccaagggtgaatagaaagcctttt

SEQ ID NO: 210524 - DNA, 238 bp, Gossypium hirsutum
agaagatggaaacactgaaacaaaagacttcttgcagcttctgttggacctcaagcagaagagcgatagcggaatatcgataacaatgaatcaagtcaaggccttgctcatggacattgtggtcggtggaactgatacaacatcaaccatgatggaatggacaatggctgaactaattgcaaatcctgaagcaatgaaaaaggtgaagcaagaaatagacgatgttgtcggttcggat

SEQ ID NO: 210525 - DNA, 235 bp, Gossypium hirsutum
tccgacaaccaacctggagtgtttatccaagtctacgaaggtgaaagaacaaggaccagagacaacaacttgctcggtaaatttgagctctctggcatccctcctgctcctagaggtgtcccacagatcactgtctgctttgatatcgatgctaatggtatcttaaacgtctctgccgaagacaaaaccactggacaaaagaacaaaatcaccatcacatacgacaagggccgac

SEQ ID NO: 210526 - DNA, 237 bp, Gossypium hirsutum
gctgtgggcaatggaacatgatcaacaagaaaatggtcaatgggggtaaagttgatttcgggtcttgtgtgaacttctcctctgaatattggaatatgtcagaagacttctgtgcggggctggtgaatatgtgtaacagcaaaggaatggtgtttcgccaaactccttcaattgcaatgcgatcagctcgtgctgatcgaattgatcagactctcatggatgtatacaaagagtctg

SEQ ID NO: 210527 - DNA, 388 bp, Gossypium hirsutum
caaaaatctggcaaatcctataatcaaatagccgaagaaaccggcttaaccaacgtttacggggctcagctcctcaaacgccaggctcagctcaagcctgaaaccgctcctaagctaagggcagccttgcccgaattgcctgaggagcttctccatgagatgatgaaaccaccgttacggtcctatgatccgaaccttatccaagaacccactgtttacaggttgaatgaggcagtgatgcattttggtgagagcataaaggagattatcaatgaagagtttggtgatgggatcatgtcagctatagacttctactgctctgttgacaaaagtaaaagccttggacgggaaagaccgagttgtcgttacactttatggaaaatacttg

SEQ ID NO: 210528 - DNA, 291 bp, Gossypium hirsutum
caaggctgctcctcaggcagtcaagagcgttgaggttgaatctaatcctggccctggaagtgtcgtaaagatcaactttgctgaaggccttccattccaatatatgaagcaccagattggaggacatgacgacaagaatttgtcatacagttatagtttgatcgaaggtggacctttgggggacaagcttgagaaaatcagctatgacaacaagtttgaagcagctgcacgtggaggaagcctttgcaagagctcgatgaaattttacactgttggcgactatgtgatcac

SEQ ID NO: 210529 - DNA, 317 bp, Gossypium hirsutum
agagccatcttttacatggtaatgcaatgcctgggcgcaatatgtggtgctggggtggtgaaaggatgccagccatcaagatatgaggtgttgggtggtggagccaatgttatgaaccatggatacaccaaaggggacggccttggagctgagattgttggtacatttgttctcgtttacactgttttctcagcaaccgacgccaagagaaatgccagagactctcatgtccctatattggccccattgccaattgggtttgcaggggtcttggttcatttggcaaccattcccatcacaggaacaggcattaaccc

SEQ ID NO: 210530 - DNA, 454 bp, Gossypium hirsutum
  unsure (1)..(454): unsure at all n locations
cgggacgaccccacgcgtcgcgcacaaagaagggttacattcccattgtccacgttacctcaggtacctacaacgactcggtgactagtgttgacgggcaaggtaaatggcggccgttcacaagcggtgattccccacaagattctacccatgtgccgcagctggtcgctgtcttggaaccgtcanccaagacgcgccacttggccgttgaaggtcaacacagcaggnttggtaacccggattataagcgaagaggattcatgtcagagtggagcatgttcaaccttcaaggtgcactgaggaattcaagctgaggaagctgaaaaatgatcagcttaaggcagaggccaaggcaaggggtgaggtgattagcacaaagaggcagcctgagggcccaaaacccggtttcatggtcgagggtgcgatgttggaaactgttactcccattccatac

SEQ ID NO: 210531 - DNA, 241 bp, Gossypium hirsutum
cccacgcgttcgaaagaacaagagtggaggcttgatgtacgttcaggacaagagggaagaagacagagacgaaattttcaagctcttgtacgatggagcccatatatatttctgtgggctcaggggaatgatgcccggcatccaataaacattgaagagggttgcggtgcagagaggagagaactgggatgagaagccttcacagctgaagaagaacaaacaattggcctgttaaagtata

SEQ ID NO: 210532 - DNA, 362 bp, Gossypium hirsutum
acgatcactttcaactctctcgtgattctcagactcccgactctgatgacactaccgatacccgtcccaaagatcttaccaccaaccacagcccttctctccccagtggtggtggcaacggcggtgcttctcgtggtggtgccaacagtggcgacggtgctagcatcgaaatcgttcgtagacccataggtcgtcctccgggctcgaagaataagccgaagccgtctgtcatcatcactcacgagcccgaccctgcgatgagtgcttacattctcgaaatccccggatggaacgacatcgtcgaagctatctcccggttctatcgtcgcaagaacattggaatctgcgtgctcacggcatct

SEQ ID NO: 210533 - DNA, 450 bp, Gossypium hirsutum
tccacgcgtccgcaaagctgaggctgagaaatctgatgtcaccgacaatgcagggaagaagagggtgatatactgcacaagcttgaactgtagtgcaaatggaagcaccttatttagtggttatacagatggtgtaatcagagtttggggaattggtcgatactaaaaccaacattcatgcatgcatgttgtgccttccaatgagtaatcatatagtatgaaggaacatgtattgatacttttagttgcttctcttaacattttcaaaacccttttaaaagatttttgcttaaatatgttcgtaaaggaattgcttttcattttttgtttggaaggtttttcatttgaagcccttatgcacctttattgataattttgggtttgggcgttaacatttaaaaaaattatttttaaattaattttaaccatgaaattcgttttccctctctt

SEQ ID NO: 210534 - DNA, 315 bp, Gossypium hirsutum
cgctgaacctgtaaactaatcgaagccttagccatcttcttcgccaactaaactgtctgacggagaaacaaggacaaaagaaaaatggtaagagaaagagaaactccaaagcagcaacaacaggtttcatacacagtggagcagcttgtagccgtcaatccttacaatcccgacatcttacctgatctcgagaactacgttaatgaacaggtttcatcgcaaacctatagcctggatgctaatctctgccttcttcgcctctaccagttcgagcctgagcgtatgagcacacaaattgttgcacgcattttggtt

SEQ ID NO: 210535 - DNA, 388 bp, Gossypium hirsutum
  unsure (1)..(388): unsure at all n locations
gcgaccacgcgtccggcagtccgaatttcacccgcaatcgatcacctcgacgccactgacactaatccgctcaacctaggcttggccgtgatcgagaggcttaatgagcttcanctgaaattggggtcgaaactcgcttaccttcatgtgactcagcctcgttatcatgcctatgggcaaaccgaatcaggcaggcacggtagtgaagatgaggaagctcatttaatgaggactttgaaaaggagttacgagggaactttcatgtgcagtggtggattcacaagggagctcggaatgcaagcagtagctgaaggtgatgccgatctggtatcgtatggcccgctttttatatcaaatccagacctcgtttttaggttgaggatcaatg

SEQ ID NO: 210536 - DNA, 448 bp, Gossypium hirsutum
cttgaactctcctgatcgtgcttgcagtcttgcgaaacaggcttttgatgaagccattgcagagctggatactcttggagaggattcatacaaggatagcactttgataatgcaacttctccgtgataacctcactttgtggacctcagacatgcaggatgatgggactgatgagatcaaagaagcttccaagcctgaggaagagaaacaaccgtgaagttcccagtctttgtggtagcattttacttctcttcttgtttttgtatggagaagttggttgatcccactctctctttagttacttgcttttagttgatcaggcctggatttatgaaccttggaagtaactgctataaattccttagcatttcactgcttattcaatttgagttgtagctttctaattgcagtgaggttatgtgcactctctttcttgattggtttcttg

SEQ ID NO: 210537 - DNA, 431 bp, Gossypium hirsutum
atccatcttagcttccaactttggttttatggcttcagcaatgctgctctttggcctgctggtggcatttttccatccctctagtgcccaaataggtgtttgctatggaatgatgggcaacgacttaccatcaaaaccagacgccgcatctcttttcaagcatagaaacataagaagaatgcgactctacgagccaaaccaacctgctctccaagctctcaaaggctctgacattgaggtaatgtttggcctcttcaacgacgatcttccacgtatcgccggcagtcaagccgaagcaaacacctgggtccagaacaacgtcaaaaactactgcgacgttaagatccggtgcatcgctgttgggaatgaagttcaacctttggattccaaggcacgatctttatttcctggcctgcgaaacattcacaatg

SEQ ID NO: 210538 - DNA, 449 bp, Gossypium hirsutum
gtcgagagttccgacacgatcgacaacgttaggcgaaaatccaagacaaggaagggatccggccagagcaacaacgtctcatcttcgccggaaaacagctcgaagatggccggaccttggccgattacaacatccagaaggagtccaccctccatctcgtcctccgtctacgtggtggcatgcagatcttcgtcaaaaccctgaccggcaagaccataactttggaagtcgaaagctctgacaccattgacaacgtcaaggcaaagatccaagacaaggaaggcatcccaccagaccagcaaaggctcatatttgccgggaaacaactcgaggacggtcgcaccttggccgattacaacatccagaaggagtccaccctccatttggtattgaggcttcgtggtgggatgcagattttcgtcaagacgttgactgggaaaaccataact

SEQ ID NO: 210539 - DNA, 411 bp, Gossypium hirsutum
ctttttaactctaaagccaagaaagtaagccactaaggttttgagagaagatcaaaatggcggctaaaagatcagcttccatggtcctccttttggcactcaacattctctttttttccctagtcagtgcttgtggctcttgctcttcacccacccctaaaccaaggccaaacccaaaccccaacacccccactcctacttcatctgcacgaggcaggtgccctaaggatgccctcaaattaggtgtatgtgccaatgtgcttaacctagtcaatgtcaccattggttcacccccagtgatgccatgctgttcccttctcaatggccttgtcgacctcgaagccgctgcatgcctttgcaccgctatcagagctaacattttaggcatcaaccttaacatcccagtttccc

SEQ ID NO: 210540 - DNA, 419 bp, Gossypium hirsutum
gaaagaggttttcgattacgctgatcgaagaattaaagggttaagtaaacaagactggtagaatggctcgagttgcgggtggatcgtcaacattgaaccccaatgcccctctgtttgttccggctgtttatcgccaagtggaggatttctcacccgaatggtggaaactggttacgacaacaacatggtaccgtgactattggatcagccagaaccaggatgaagatggcttttacgacaacacagaggatgatgtatttgatgtcaatgacattgttgatttgcttgcagatccctttgactttgtctctgacgaagatctccaattcgaagagttcatccaatctaatgaaatggaaaccatagcacctcctttaccgtcaaatggtggctttgagaagggttttgaatctctgatg

SEQ ID NO: 210541 - DNA, 336 bp, Gossypium hirsutum
ggcgaccacgcgtacggaatctttctctttacacagcgtaatgctgaataacaagctttagcgaaaatgactccaaagcttcttggggccctggtaaacccatctacattgaacatgattgggcatatgtttttaaaaaggatgtatgactatgatgaggcttctgaacaaaattcttggaaactcctttctaaagttacctttctctcatgacaatttcctcgaagtgaatgcacttatatttgacttcattgacaatgtcaaagattacatattacatgctaataacattctgcctatggatcccgattcctatacctaatgctttttataaaa

SEQ ID NO: 210542 - DNA, 354 bp, Gossypium hirsutum
gtccaatgctcataccttcatccacaagtctccacctcgcatccccgaaattcatttgccagaggagccattcctccaagttgcctctgcattggcaattgaacttaaccagggattgaaacttctgcgggatattgcatctggaagaaatctgaaggagttccttatggttatagctgcattctgggttctgtcaattgtgggaagttggtgcaacttcttgaccttgttctatatatgtttcgtattgctgcacacggtacctgtattatacgagaagtacgaagataaggtagatccatttgcagagaaggctgcaatcgaggttaaaaaacaatatgcagtttttgacgc

SEQ ID NO: 210543 - DNA, 323 bp, Gossypium hirsutum
  unsure (1)..(323): unsure at all n locations
ccacaatcgaaacctttaggcggcgactactactcgagcttcataacacacgaagcttttagctatggcgggtgtagagacggaggttgcggcggccggtgtgcccaagaagagaacattcaagaagtttagcttccgaggtgtcgatttggatgctctccttgatatgtccactgatgagcttgncaagctcttccctgctcgagctcgcagaaggttccagaggggtttgaagagaaagcccatggctctaattaagaagcttcgcaaggcgaaaagggaggctccacctggtgagaagccggaaccagttagaacccaac

SEQ ID NO: 210544 - DNA, 428 bp, Gossypium hirsutum
cccacgcgtccggtctaccacacacttgcttttatttctacttggagtggccgctctagccgcgtccctcttttggtacctatgagtctcccaactatgggaagccccctactcctgtttataagcctcctaaggtgaaacccccaccttatgaacataagccacctgtctatgaacctccaaagaaggaaaaacctgaacctaaaccaccagtttatacaccaccaaagaaagagaagccagaacccaagccaccagtatatgaatcaccaaaaaaggaaaagcccgaaccaaagccaccagtttatacacctccaaagaaagagaagcttgaacacaaaccacccgttttttgaaccaccaaagaaggaaaagcctgagcctaagccaccagtttataccccaccaaaaaaagagaaacctgaacc

SEQ ID NO: 210545 - DNA, 431 bp, Gossypium hirsutum
atttctgcttctactcccacttctcatttcctcttcccctgttcaagaccctgagcttgtagtccaagatgttcacagggccatcaatgcgtccaggaggaacctagggtatctctcctgtggaaccggcaaccccattgatgactgctggagatgcgaccccaactgggagactaatcgccagaagctagctgattgtgccattgggttcggcaagaacgccattggcggaagagatggtaagatttatgtggtcactgactcgggcgatgatgaccccgttaaccccaaaccagggacattacggcatgcggtgattcaagacgaaccgttgtggatcattttcgctcgtgacatgaccattcagctaaaagaagagctgataatgaactcattcaagaccatcgacggtaggggcgccagcgttcata

SEQ ID NO: 210546 - DNA, 384 bp, Gossypium hirsutum
gtgggggtatgcagatcttcgtcaaaaccttaaccggcaagaccatcaccctcgaagtcgagagctccgacaccatcgataatgtgaagtctaaaattcaagacaaggaaggcatcccaccagaccagcagcgtcttatcttcgccggaaaacagctcgaggacggccgtaccttggccgattacaacatccagaaggaatctaccctccaccttgtcctccgtcttcgtgggggtatgcagatcttcgtcaaaaccttaaccggcaagaccatcaccctcgaagtcgagagctccgacaccatcgataatgtgaagtctaaaattcaagacaaggaaggcatcccaccagaccagcagcgtcttatcttcgccggaaaacaac

SEQ ID NO: 210547 - DNA, 404 bp, Gossypium hirsutum
gaaggtgatgacgcaaccattgttaacgattggcccaacaatcccatccatgtatttagatgaaagacgtgaaaaggacaaagattacgatctcaatctctttaaactagactctaccagtacatgttggctgaccaccaagccaccatgctcggtcgtttacgtctcatttggaagcatggctaacctaaccatcgaccaaatgaaggaacttgcacggggtttaaagcaaactgggcttcatttcttgtgggtggttcggccttccgagttaccgaaagtcccacactgtttcattgaggaaatgggtgataaagcattgatagttacttggataccacaaaccgaggtacttgcgaatgatgccatatggtgttttttcacgcattgtgggtggaacttca

SEQ ID NO: 210548 - DNA, 434 bp, Gossypium hirsutum
ggaaaacaaagaagaaaaacttaatcatggctcggttgacgttcgtgacctccatcatcctgctgctatgctccgttgccgctggatcaactttcgacgactccaaccccatccagatggtatccgatggcctcaccggcttcgaatcctccgttcttcgtgtcatcggtcacactcgccatgctctctccttcgcccgttttgcatacaagcatgggaagaggtatgaaaacgtggaggagatgaagctacggtttcagattttcgaagacaacttggatttaatcagatccactaacaagaagggactgccttatactcttgctgtcaatcagtttactgattggagctgggaagagttccagaaacacagattgtgggctgctcaaaactgctctgctaccacaaagggcaatcaccagctcactgatgtc

SEQ ID NO: 210549 - DNA, 413 bp, Gossypium hirsutum
cccacgcgtccgcccacgcgtccgcccacgcgtccggaagatcgtgggtggatctgaacatacacttcgggcaaagctgacattttcacaggaatcacatgcaaacctcacaaaggaagctggtccagttagcatgactttcacaataccaatgtataatgtttcaaggcttcaggtgaaatacttgcagatagcaaagaaatccagctcctataatccatatcgatgggtgagatatgtcactcaggccaattcgtatgttgctcgaatatgatacagtcaaacctctctttttctttaatatgttctgtatttgttgactcccatatgacacttttttccttttttttttcccttttcactaactgctttaaacatctttatcatgtagccattacctgatttctatgtta

SEQ ID NO: 210550 - DNA, 437 bp, Gossypium hirsutum
ggcagcagtggcttgacgttcccctttgctcccttcttccagaagccaaaagtttgagttaagaacaagggcttatgctacaatgaagccgaccaaacctggtttggaggagtcccaggagcagattcacaagatcaggatcactctctcctccaagaatgtgaaaaaccttgagaaagtttgtgctgatttggttcgtggtgccaaggataagagactgagggttaaggggccagtgagaatgcccaccaaggttcttcacatcacaaccgaggaagtctccctgtggtgaaggaacaaacacatgggatagatttgagctccgtgttcacaagcgagttattgatcttttcagctcccctgatgtggtcaagcagatcacctctatcaccattgaacctggtgttgaggtggaggttaccatcgcagattcttaa

SEQ ID NO: 210551 - DNA, 402 bp, Gossypium hirsutum
gaaaatgatgggaaggaaattcttcgtcggtttaaattggaaatgcaatggaaccactgaggaagtgaataagattgtgagtactttgaatgctggagaggtgccttctccggatgttgttgaggttgtggttagccctccatttttgttccttcctttggtaaaaacttcactgagacctgagttccaagtcgctgcacaaaattgttgggtcaagaaaggaagtgctttcactggtgaagttagtgcggagatgcttgtcaatttgagcattccttgggttattattggtcattctgagaggagacttattttgatggagtcaaatgagttcgttgcggataaggttgcttatgcactttctcaaggcttgaacgtgatagcttgtattggggaaacact

SEQ ID NO: 210552 - DNA, 426 bp, Gossypium hirsutum
cccacgcgtccggcagaagctggtttgactgttgctgaagttactgggagcaatgttgtctgggttgctgaggatgagctaatgagaattcttattcttgttcggaattttgtacctggttatcatcaagttattactggagattggaatgtcgcaggcattgcttatagagcttatgatctcgaagggaagacagttggaactataggtgctggccgtatcggcaagctcttactccaacgattgaagccattcaactgtaatctcctatatcatgatcgagtcaagatagatccagaattggagaaacagaccggagctaaattcgaggaggatcttgatgcaatgcttccaaaatgtgacattattgtcataaatatgcctctaactgagaagacaaagaggatgtttgacaaagatcggatc

SEQ ID NO: 210553 - DNA, 371 bp, Gossypium hirsutum
gaacgggtgttctgagtatagatcacagaaaaatggtgaaagcagtggctgtccttagcaggggtgaaggtgttagtggaactgttttcttcactcaagagggagatggcccaactacagcgacggggaacatttctggtcttaagcctggcctccatgggttccatgttcatgccctaggggacacaacaaatggttgcatgtcaacaggacctcacttcaatcctgctggaaaagagcatggtgctcctgaagatgtgaatcgccatgctggtgatctaggaaatgtcactgttggtgctgatggctctgcgagtttctctattgtcgacaaacagattccttccttttgtgccacacttcattattgg

SEQ ID NO: 210554 - DNA, 434 bp, Gossypium hirsutum
tttcaaccaacgtcaatctcgacggcgtcgacacctccgccatcctttccgaagccacctgtgccgtcggtaaactcatcggcaaacctgaggcctatgtgatgattgtgttgaagggttcagtacccatgtcatttggtggtactgagcagccagctgcctatggagaactggtatcaattgggggccttagtccagatgtgaacaagaaactgagtgctgcaattgctgcaattcttgaaaccaagctacaagtgccaaagtcacggtttttcctcaaattctatgacaccaagggttccaactttggatggaacggatccaccttctgagcctggcatgttctgaatttctcgaaacatcagtgatgtctattcaaaacaatcttactcgtacggtgaactggtgtgagaagacattcttaaaacttggca

SEQ ID NO: 210555 - DNA, 364 bp, Gossypium hirsutum
cgctaggcaagatatggtggtagttgaggtgtcaaagctaggcaaagaagcagccaccaaggccattaaggagtggggtcagcccaagtccaagatcacccaccttgtcttttgcaccactagcggtgtggacatgcctggggctgactaccagctcaccaagcttttaggcctccgcccctccgttaagcgcctcatgatgtaccaacaaggttgcttcgcaggggggacggtgctccgagtggctaaggacttatctgagaacaacaaaggtgctcgtgtacttgttgtgtgctcggagattactgctgttacctttcgtggacctagtgacactcacctagacagtctttgtggccaagca

SEQ ID NO: 210556 - DNA, 417 bp, Gossypium hirsutum
ttttgattccatgagtgccggaaaaaaatcaaagagtatcgatgaagactaggggtaaaaagaagagctacagatacggcttccaccaatcaaatatgacacaaacagaaacctaaagacttgctatagaaagcagacagagacgtgctaaggtagaagacttatgtggatactgtggttttttgactatggaacctttaatgatacatattccatatacaaaacaaacactatttataatgttgcttgaaaatgaaaatggataatacaattggtaataaaagcaccataaaatttattttatactgaggatgacctgattcagaaatttgctactggtgtctacatggttactgcattgtctcttgccatctaatacccgacccttgcagctgcaccacacatggttcatcaatg

SEQ ID NO: 210557 - DNA, 395 bp, Gossypium hirsutum
attttggacatgttgcttctgattctctcgtcaatccgccgcataaaagctcttacatgagcgctaaggagtatggtcatggtctgttcctagacttcactggtcaagaaacacaagatcaaacaccgcctcaccaattcattgataactggcccaaggatcagtctagtcgttctatcgttacttggccaaatgagttaaaacctgactggactcaactctcgatgtctattcctatggtaacatcagagttctcatcaaccttgtcctcaccagtgaaagagaaactcgacctttcatctcttatgttagttcaggagttcgatcacatccaaatgggtttaggagtgaacaatgacatcactgaacaaaccagatagcaacctaactggata

SEQ ID NO: 210558 - DNA, 421 bp, Gossypium hirsutum
cccacgcgtccgacttgcaaagatctgtgttgatatactatccgtcattgataagcatctgattccatcttcctcgacaggggaatcaactgttttctattacaagatgaaaggagattattttcgttatttggcagaatttaaagccggagaggatcgtaaagaagctgctgatcagtcacttaaggcttacgaggctgccaccactactgcaaattcagatttgccgccaactcacccaattagacttggcctggctttgaacttctctgttttctactatgagatattaaattctgctgagagggcttgccatctggctaaacaagcttttgatgaggctattgctgagcttgatagccttaatgaagaatcttacaaggatagcaccctaattatgcagcttctcagggataatctc

SEQ ID NO: 210559 - DNA, 443 bp, Gossypium hirsutum
  unsure (1)..(443): unsure at all n locations
atgaaaaccttttctaccactactcgtctgtcgcacaaagaattggggtttacactgcccgggactatgctgatatagttgaatatctggttgaccgatggaagttgaaggaactcattggactttcacccgagggccgtgaagctcaggaatttgtgtgtggacttgcaccgagaattagaaagctagaggagagagctcaattgaggaccaaggaatcacccagtgttccattcagttgggtttctggtagagaagtgaagctctaaattggctatcctccaagtgacttgtaatacaagaaagaaacaacagggcttatggaggagcatgatgaaaactgcaactctgtgtttagctggaatgcaataagtggaggaagtgtgtgtgtgctgtttncgttgtacttttcttaaaacacgtaatatcaacatctttcttct

SEQ ID NO: 210560 - DNA, 342 bp, Gossypium hirsutum
  unsure (1)..(342): unsure at all n locations
ggtcgacattttcaattagtagtcttacttttaaatcctttttcaaaatccaaactntcgggttgaccgggaccagtaagacggtcccataacacttagaaaattctgatactaacgccagcgtaaaggccaatattctagacatggatggtactcctccatatcagctagaggtgctcttacatagtatgcaacttgatgattgccgcacgttctctgattacaacttgctgaaagaatccacactccacttattgcttcatctccatggatgaatgcatatttttggtaaaactttgactgggaaaaccattacatttgacgtacacagcttagatacca

SEQ ID NO: 210561 - DNA, 391 bp, Gossypium hirsutum
cccacgcgtccgctctcccactggtgtttcttttacctctgccggaacgaagaaaggtgatcttttcttggctgatgttaatacccagctgaagtctaggaatgttacaactgatatcaaagtggacaccagctccaatctatttaccaccataacagttgatgaacctgcacccgggctaaaggcaatctttggcttcagagtccctgatcagaggtctggcaagattgaactccagtatttgcatgagtatgctgggattagctcaagcattggattgactgccaacccgattgttaacttctcgggtgtgcttggaacaaatgttcttgcactatgtaccgatatctcattcgacacgaagactgggaattcaccatatgcaacgcgg

SEQ ID NO: 210562 - DNA, 245 bp, Gossypium hirsutum
ttaaaatcatgggtgttgtcacttatgactatgaaaatacctccccaatcgggcctgccaggctttttaaggcctttactgttgaagctccgaaagtttggcccacggctgcaccaaatgcagtcaagagcattgaggtcgaagctaatcctagctctggaagtatcgtaaaaatcaactttgttgaacgccttccattccaatatatgaagcaccagatcggaggacatgatgaaaagaatttt

SEQ ID NO: 210563 - DNA, 433 bp, Gossypium hirsutum; identical to SEQ ID NO: 195228

SEQ ID NO: 210564 - DNA, 449 bp, Gossypium hirsutum
  unsure (1)..(449): unsure at all n locations
cccacgcgtncgctcaatcatccacttcttctcttctttgaactcaaagtcccagctaatagtagaggcatgggtgttgtcacttatgactatgagaatacctccccagtcgcccctgccaggcttttcaaggcctttactgttgaagctccgaaagtttggcccacggctgcaccaaatgcagtcaagagcattgaggttgaagctaatcctagctctggaagtatagtaaaaatcaactttgttgaaggccttccattccaatatatgaagcaccacatcggaggacatgatgaaagtaatttttcatacagttacgatttaatcgaaggtgggcctttgggggataagcttgaaaaaattagctatgagaacaagtttgaggcaactgcacgtggaggaagtatttgcaagagctcaatgaaattctacactgtttgcgataatgt

SEQ ID NO: 210565 - DNA, 283 bp, Gossypium hirsutum
agggaatgttttttagagggaagagaacggatggagagggtctcgcttccgacaagaacggggatcacgcgcctcctaataaagtctccaaaactttttctgaaggcgactctgacgattccgacgatgtcaacgtgttccacatatccaatactagaacagtttcactgcagaaccggaatggcacgatttggctagatattcctgaattctaagagcaatgataggcaacaacttgctgccaagaaaggtcgatctgtaattattgagcactgcaataatg

SEQ ID NO: 210566 - DNA, 421 bp, Gossypium hirsutum
  unsure (1)..(421): unsure at all n locations
gaagaggagcttaggttcgccactactcggccggcgagcagcgtgatatcgaggctggaagaggtagccaagtcggtgaagttcaacgtgaagaaaagtgagtcaaaggtgaggttacagggtcaagaatgtggaaggaaaggaaaattagctattgctgctgacatatttgcagtgacgccattgtttttggtcgtggaagttaaaaaagacaacggcgataccttcgaatacaaccagttttgcagtaaacagctctggccggcgcttcatgacatcgtctggacttcaccagccgagaagccgacggttgcttgacgggaagtttcaagattattaattatctacatgaaaattgaaaaagaaaaaaaaatgagaaagagaggatgctatngtgttatcactcttattttattaattt

SEQ ID NO: 210567 - DNA, 309 bp, Gossypium hirsutum
  unsure (1)..(309): unsure at all n locations
cccacgcgtccgttctcgaggtttttcaaggagaggtgccccgatgcttatagttacccagaggatgacccaacaagcttgtttacatgccccacagggactaattacaaggttattttctgcccatgaagagtatttgggatggttttaagtcctttctatacacaaattagtaggtttatatcaataaaatggaataaactcaaatgctatttgagcacatttcttgatgtgcatatgttctgatttgtaataatagtgtttgtcatgaatgaaaatntggagtctctatgggtttcgtttgggttc

SEQ ID NO: 210568 - DNA, 398 bp, Gossypium hirsutum
ctctcccgcggcttctagtttttggtgctgtttacttcatctcctacccatggcggacgtggatgccgatgtcgccgcaccaggtgtaccgaagaagagaacgttcaagaagttcagtttcagaggtgtcgatctcgatgctctcttggatatgtccactgatgaactcgtcaagctctttcccgcccgtgcacgccgaaagtttcagagaggtttaaagaggaagccaatggctctgataaaaaaattacgcaaggctaaacgtgaggcgccacctggtgagaaacccgagccagttaggacacacctccgcaacatgattatagttcctgaaatgattggtagtattatcggtgtttacaatggaaagaccttccatcaagtggaaatcaagccag

SEQ ID NO: 210569 - DNA, 403 bp, Gossypium hirsutum
gaccgacgcgtccgcccacgcgtccccaagaacacagattcattttaccaagaatcagaaaaacatgggttctgggaagcaaggggttatatggttatcagggcttttgtttctaaatatccttgccttatccacagctgaagtcctttattacgagttttttttgcaagaatcccagttcactaagctgtgtaccacgaagagcatcttgaccgtcaatggcagctttccagggcctgatattcgctttcggagaggggacacacgctttagcaccaactcccccatataaccccccaagtgctacacctccagctaagccaccaacaactacagcatactcttacgaagccaccaaattcaccatagccaccttgtacgacaaaaaatgattgcatcccat

SEQ ID NO: 210570 - DNA, 385 bp, Gossypium hirsutum
cccacgcgtccgcgtctgcacagcaggcatggctaccaagcagccaaatactggcctctttggaggactgaacaagggccatgttgtaacaaagaaggagttggcaccacgcccctctaatcgtaaaggaaaaacgagcaaaagagtccatttcgtgaggaacttgatcagggaagttgctggttttgcaccgtatgagaagaggatcactgagcttttgaaagtcggtaaagacaagcgagctcttaaggtagctaaaagaaagttgggaactcacataagggcaaagaagaagcgtgaagagatgtccagcgttctccgcatgatgagagcccacggtggaggtgcagaaaagaagaaataaaagcttattttctttggtttc

SEQ ID NO: 210571 - DNA, 421 bp, Gossypium hirsutum
agaaagcaagccattaaggttttgagaaaagatcaaaatggattcaaaaagatcagcttccgcagcccgccttttagccctcaacattctcttcttttccctagtcagtgctaattgtggatcttgttcttcttctggctctaacccaaggccaactcccacccctactccatctgcacgaggtaggtgccctagggatgccctcaaattaggtgtatgtgccaatgtgcttaacttagtcaatgtcaccgttggttcacccccggtgatgccatgttgttcccttctcaacggtcttgtggacctcgaagccgctgcttgcctttgcaccgctatcagagctaacatcttatgcatcaaccttaacatcccagttttccttagcttgcttctcaacgtttgctcaaggaatgttcctact

SEQ ID NO: 210572 - DNA, 449 bp, Gossypium hirsutum
caaaaactgcgcctcctccttaaccagcagataccatggccccaaagaaagacaaagctcgtcctccgtcctctaagcccgcaaaatctggaggtggcaaacaaaagaagaagaagtggagcaagggaaagcaaaaggagaaggtgaacaacatggtgctatttgatcaagctacctatgacaagcttctctctgaagctcctaaatacaagctcatcaccccctctattctttctgatcgtatgaggatcaatggatcacttgcaaggaaggctataagggaattgatggcaagggggtcgattagattggtgtctgctcattctaaccagcagatttacactagggctaccaacacttaggaatcatttttcccttaatttaagtattatttagaattatatttgctgagtttatcatcattgaatgctttctttttgttatttatt

SEQ ID NO: 210573 - DNA, 289 bp, Gossypium hirsutum
gtcactcatccgcaaggaggttataggggcattcgcacctgtcttgatggatgaaaggaaggatacgttgaggaaggtggtactggaacagttgacaacttctacttgctacaacttgcttttgatgatttactatgcggtgcggtgttgtgggatgaccctgggtgcgtgttaaaactatgatcaagcgtgagtatcacgaagtacagatgactgcatggtcggtctagcctagtgtgggatggataaatcaccgatacatgccgttgcaattacaagtcatttttag

SEQ ID NO: 210574 - DNA, 413 bp, Gossypium hirsutum
cccacgcgtccgtggacataagaaagcttgtaaaggataatcttattataaaaaagcctaacataagtcgatcgggatggaggtacaggaaaggtaaggatgttgggaatcctaggagaaaaggatatgggaagagaaagggaacaaaggaagcaacgctaccatccaagctttcgtggatgagaagagctcgagtcctaaggcgactccttcgaaagtacagggaaatgaagaagattgataagcacctgtaccatgaattttatatgaaagccaagggaagcgtttttaagcataaacgtgcacttcttgaggcccttcataataaggctaagagtgagaaggatcagaaggttcattttgatcaggttatagctattaaagccatgggtaaattaggtagcaaggagacc

SEQ ID NO: 210575 - DNA, 344 bp, Gossypium hirsutum
acggtcctactagtcgtgaaggcaaaagccaacatggacgctgcgccgatgatcgacgtgaccgagttcgggtactttaaggtccttggaaagggtgttttgcccgaggaccaaccgatcgtggttaaggctaagttggtgtccaagacagctgaaaagaagattaaggaagctggtggtgctgttgtgctcaccgcctatgttagcttttctgtttttgtggtttttggatttgaatgacatttctgttatattattatcttatgttgtttggagttgatcttgaaatgagattttcaatttattttggtcaattatatatcaaagttgcgacgatttgggtt

SEQ ID NO: 210576 - DNA, 366 bp, Gossypium hirsutum
  unsure (1)..(366): unsure at all n locations
cccacgcgtccgcaaatgttgtagcttattggccgagcgtttggttccgatacattgctggggggaacgaagtccctccttcatcttggttagctcaattcgttttgcccgccttagtgaatgtattcaacgcgggtcgatcaatcggtttggagagtcaaatcaaggtctcaatcgccattgatatgaccttgatcggtgtctcgtatcctacatcggctggtgcgtttcgtggggacgttaggtcatatttggaccctatcatangccacttaacatgggctaaaacaaccttgcttgccaacatttacacttacttgagctattcaagcaatccaagggatatctcacttccatatgctcttt

SEQ ID NO: 210577 - DNA, 416 bp, Gossypium hirsutum
atttgtacagacatacttttgctgtgcttacatccaaagtttagagtgaatcagcccagagggctcgggatggtccctttgcaatgacttagtggatactgaagcgatcgttcgatgacaacccagaggtgggcttggtagccaacattctttgaaaaaagcgtaatacctgactggtctagctgcttgtcacctacaatgtatcaggcctcacgtgcttcaccgaaccgaccttaccttaagagctgctctttgctgtgtgaataaatgccttgtatggatgcccaatcattgagaaagaaggactctctcatatgcttaccgtcttggggagataacggctgagatccatggatctgctgacgatgaacctgctacaaacttcgtggctaggcttcgctcttttgacttttaaa

SEQ ID NO: 210578 - DNA, 349 bp, Gossypium hirsutum
cccacgcgtccgcccacgcgtccgttcacctctcaagttatcatcatgaaccaccctggccgagattgggaatggttatgccccagtcctcgactgccacacctctcacattgctgtcaaattttccgaactgttgaccaagattgacagacgatctggcaaggaactcgagaaggaacccaagttcttgaagaacggtgatgcacgtatggtaaagatgattcccaccaaacccatggttgttgagactttctctgaatacccaccacttggacgttttgctgtccgtgacatgcgccagactgttgccgtcggtgtcatcaagagtgttgagaagaaggacccaact

SEQ ID NO: 210579 - DNA, 426 bp, Gossypium hirsutum
ctgaagctgaaaagcgaccttatgttgataaggcagagaaacgaaaggtcgagtatgaaaagaacatggaagcctacaataagagacaggctgagggtccccaagaagatgaggaggaatctgagaagtctgtatctgaggtgaatgatgaagaagaagatgatgatgaaggcagtggagacgaggaagatgatgagtaggaaaaatcctgggaggatagcataatcaaagtaggctgtgatagtgtttgatcatcttatgttaatgctttttaaatgcaaatttcatttaagcaaaaatgtaactctggatggtgttggtttcttttgacgcttggaaattaatagttgtagatgggtcaaacaaaaaaaaacccaacaaaaattttaaatatcttttctctttttttattttaaaaaataaaaa

SEQ ID NO: 210580 - DNA, 408 bp, Gossypium hirsutum
cccacgcgtccgcaagaatcccagttcactaagctgtgtagcacgaagagcatcttgaccggcaatggcggctttccagggcctgagattcgggttcgcagaggggacacagtttttgtcaacgtccacaatcaaggaaaccatgctgtatccctcaagtgggagggcgttaagggttcaattgatggttcgaatgagttgattcagccagggagaaacttcacttacaagatagagttaaagggtgaaataggaactctatggtggcacgccaccagtgcttgggctgcggcaaccgtccacggtgcctttgtcatttcgccggcagcgaatgaagactatccttttcccgcacctacttctgaccaaacaattatactttgggcatggttcaagcaagagttaaca

SEQ ID NO: 210581 - DNA, 346 bp, Gossypium hirsutum
aattgtcgttgatggcaaagatttatgggtagcgaacattggtgactctagagctgttgtgtgtgataggggctctgccaatcaaattacagtggaccatgagccgcatgctgaacgaagaaggatagagaagcagggtggctttgtgactactcttcctggagatgtgcctagggtgaatggtcaacttgcagtagcacgggcctttggggatcagagccttaaagctcatttaagctcagaacctgatgtcagacatgtccccatagactccactattgactttgtaatactggctagtgatggtttgtggaaggtaatgaagaatgaagaggcagttaatttg

SEQ ID NO: 210582 - DNA, 419 bp, Gossypium hirsutum
gtacgcacaaggaatagcgcaagcatgttgcataaagcacttgttgagtttggttatgatggtaccacaattcaaggtgctctcaatcaagctgaacgagacaagatagtcaaggaatttaaagatggtttgactcaagtgctcatttcaacggacctccttgcccggggttttgaccaacaacaggttaatttggtcatcaactatgatctttctgtgaaacacgacaaccgtgtggagcctgattgtgaggtttacttgcatagaattggcagagcaggacgttttggtcgcaagggagccgtgttcaacttactctgtggtgatatggaccaaatgataatatccaaaatcgaaaatcattttgacagcaaaatagcagaggttcctgactggaagaatgaggaagactttaaaac

SEQ ID NO: 210583 - DNA, 267 bp, Gossypium hirsutum
  unsure (1)..(267): unsure at all n locations
cccacgcgtccggcaaagtgaaaatttactacacgctctaacacgatctgtagattaatcgggcatggggactacacaaaagctgtcactttccatgaacgcaatatgccataaatgtaaagcgaacagaataaagagtgcaaccctctatacatgctatgggtggcagggcacaggaatgtaaattactacactgccgagaggactgnccatgatacaacagatgcaccaagatagttctgaatgcaaatgctcacgttatatgat

SEQ ID NO: 210584 - DNA, 250 bp, Gossypium hirsutum
  unsure (1)..(250): unsure at all n locations
cccacgcgtncggattggccatattgccgtgttcattgaattgcctttaaacgaggtataggggaaactttctcagatgattctgtataataactttgcagggactatgcatcaaggtgcagggacgccttgttatatttgataaccctatagatgatgtcatctattttgcacctttatataccatatccaacatgcccagggtgggcgatagcctctatgtatgatctgttatgataatgacatcaga

SEQ ID NO: 210585 - DNA, 453 bp, Gossypium hirsutum
gaccacgcgtccgggagtgtgaaggcaatcagaagaaagaccactggaaccggtaggatgaggtatctgcgccgggtcccgcgcaggttcaagactggtttcagagaaggtactgaagcagcaccgaggaagaaggttgcagcagcttctgcttgaggtattacaaggttgttttggatgaagccttctttttttaggaaaacttttacgagaacatttttcttgaggggtgtcattacattgaatgctttagctgtttttagtttatgattatggagttgcattaaattttgaacaaggatgaatgctttagtttttctctagtttatttttgaggagttgcttcaaattttgaacgaggatggacaaggctattgttggttgacacttagttacttgatacatttttttgggatgaaggtaatgtatgttcttgtttttggtaaaaatgat

SEQ ID NO: 210586 - DNA, 240 bp, Gossypium hirsutum
  unsure (1)..(240): unsure at all n locations
ngggaaggtaagaatgttgttaccacaggtcgcaagattatcggagccacaaacccagcgaaatccgggccgggaacaatccgtggtgactttgcaattgacattgggaggaatgtgatccatgggagtgattccgtcaagagtgcaaggaaggaaatcgccctttggttccctgaatgccctgttaactggcagagcagccttcacctttggatctacgagtagaaatcatttggtaaa

SEQ ID NO: 210587 - DNA, 442 bp, Gossypium hirsutum
  unsure (1)..(442): unsure at all n locations
gctgtcaaggatccaaacaagccaaagaggcctgctagtgccttcttcgttttcatggaggggttccgggagcaatacaagaaggatcaccctaaaaacaaatccgttgccgctgtccgcaaagctggtggagataaatggaagagcttgtctgaagctgaaaaaacaccttatgtacccaaggcagaaaagcgaaaggtcgagtatgaaaagaacatgaaggcctacaataagagacaggctgagggtcctaaagacgaagatgttgagtctgacaaatcagtgtctgaggtgaatgatgaggatgatgatgaagaatgcagcggagacgaagaagatgatgagtaggaaggtccgtggtggatagcataatcaatgtangctgtgatagtgtttgatcaaaaccatatggtaatgctttcgatgtttncatgttattctt

SEQ ID NO: 210588 - DNA, 400 bp, Gossypium hirsutum
aaagaaagaaaagcatgaacacatgccaccggtgtatgaaccaccaaagaaaggagaacctgggcctaaaccaccagtttatgcacctccaaagaaagaaaaaccagaacccaaaccaccagtttataagcctccaaagaagccaccagtgtatgagcctaagccaccaaagccaccggtttatgcaccaccaaagaaagagaagccagaacctaaaccaccagtatatgagtctcccaagaagccaccatatggtcactatccaggacaccctccattggagaagcctcaatagagagatttcctcggctaacccattccgacaactgagctactatggctacatagataaattattatcactgcaataagagctgcttgccgctcatgttctgttttc

SEQ ID NO: 210589 - DNA, 451 bp, Gossypium hirsutum
cggaagacccacgcctaccgcgactcgtaacgatccaaacaagccaaatacgcctgctacttcctttttctctttcatggagcgcttccgtgggcaatacatgactgatcaccctacaaacaaatcccatgcccctgtccgcaaatctcctttatataaattgaagaactcgactgaagctgaaaattcaccttatgaagccaacgcagtattgcccaccgtcgaatatgaaaagaacatgaacgcctacaatatgagacaggctgagggtcctaaaaactaagatgtttagtctaacaaatcagtgtctgaagtgaatgatgaggatgatgatgataaaagcatcccgcgaccaacaagatgattagtttcaaatgccgtggtggataacataaacaatgaacgctgtgatagtgattgatcaaaaccatatatttatgctttcgatgtt

SEQ ID NO: 210590 - DNA, 426 bp, Gossypium hirsutum
ccgcaaagaccttgtcggacgagctgttggctttggacaaccagatgaaatacttccaaatgccaccatttattgaaggaaactgggacgccactattgatgccttcctcaatggagatgcaacacaggatggtggaaacccgatggatctttggaactttgatgatttccctgccatggcggagggtgttttctgaacgaactttccataataactagtgtttgtaaataaagcaacatgaatttggtcaaaatctgttgtgaagttgaagtaaaaaccaagctatgcatgcataagccttgcctgcactgctttcagaggttcttagtatgtaccctttttttatgtgttttttttggggactttggactaaattttaaatttgagtgacttgaaaagtgattgtgtctgaatttgttatgttt

SEQ ID NO: 210591 - DNA, 431 bp, Gossypium hirsutum
gccagaacaagcttgattatgtcttggctttgactgttgaaaacttccttgagcgtcgggggcaaactctcgtgttcaagactggtatggccaagtcaattcaccatgcacgtgtgttgatcaggcaacgacacataagggtcgggaggcaggttgtgaacatcccgtccttcatggtgagggtcgactcccaaaagcatattgatttctctcttactagtccgtttggaggtggccgccctggaagagtgaagagaaagaaccagagagcagctgccaagaaggctgctggtggagatggtgatgaagatgatgaagagtaaaccttatgctactatcaaccaccactaggaaccctttaaaagcctttgtttggaacttacaatatcctccattggtagacatggttttgagttttgtttccagaactt

SEQ ID NO: 210592 - DNA, 437 bp, Gossypium hirsutum
cccacgcgtccgcaaaatcggccgtcgtttacgtttccttcgggagtatcgcggcgttgaagaagcaacaagtggaggaaatcgctcgagctttaatatccagccggcgaccgtttttatgggtgatgaggaaccggaaagatagaggcgaagaagagaaagaagaagataagttaacttgcagggaagaattggaacaatttggaatggtggttccatggtgttcgcaagtagaagtgttgtctcatccgtcgttgggttgcttcgtgacgcattgtgggtggaactcgacgttagagagcttggttgccggtgtaccgatggtagcttttcctcagtggacggatcaagggactagtgcgaagctgattgaagatgtgtggggcactggggtgagagtgagcactaatgaagaagggatggtggaacgtgatgag

SEQ ID NO: 210593 - DNA, 440 bp, Gossypium hirsutum
  unsure (1)..(440): unsure at all n locations
gcctttcagcttatctgaatgctttcacagttgcaccgaatttccttttagagctgatacagaatagcccaacgtcacttgttctcattctggatttaccacctcgaaaggacccagtcttatatcccgaataccttcaaactttttatgagaacacccggcttgaatcacttaggcaagcgcttgagaaactcccagaagttcaaccctactactcctcagcactttacattcgatgtctcacctctcccacatcgatcatgatccgaatcaacacagaggggactgagggagacggaccaggacgcatggaggagattataaaggatcacatagatcccgtggtgaaagaagcattggngatatggttggatcaatgtgcttgtggaaacagaaatgtggatgaagcggaaaaggcatatttggagaagagggatgga

SEQ ID NO: 210594 - DNA, 450 bp, Gossypium hirsutum
  unsure (1)..(450): unsure at all n locations
gggttgagccatcaagttccgtattatgattatgcacttgatttgattttggacattgaatcttctcatggcgatatgttcaccgaagaacaaaatgaattggttgaatcagctgctgagatgttgtatggtcttatacatgtccgttacatattaactagcaagggaatgtctgctatgttggagaagtacaaaaactatgactttggaagatgcccgagagtttgctgctgtggacaaccttgtcttccagttggtcaatcagatattcctcgctcgagtactgtgaaaatctactgcccaaaatgtgaagatatatattaccctcgatccaagtatcaaggcaatatcgacggagcatatttcggtacaacatttccacatctatntctgatgacatatgggcacttaaagcctcaaaagccaactcaaaactacatcccacgagtt

SEQ ID NO: 210595 - DNA, 203 bp, Gossypium hirsutum
cccacgcgtccgcaatcgggaatggtctaatagatcctgaaatccagtatcaagcggaccgagattatgctttgaacacaagtataattacacaatctgattatgtcgatatcaaaaagttggtcccttcatgcgtgcaagcaatcaaaagatgtggctctaaaggtggagatgcttgtgtggatttttttgatacttgtaac

SEQ ID NO: 210596 - DNA, 374 bp, Gossypium hirsutum
gctagcttcttgatgcaggcatacactttaaccaaacgctcattcatcaacatgtccagagactttggctattattggctgagactactaatatatgttgtagtcactgtctgtattggaaccatttatctcaatattggaaccagctacaactcaattctggcaaggggttcatgtgcatcttttgttttcggttttgtcacattcatgtcaattggtgggttcccttcttttgtagaggacatgaaggtttttcaaagggaaaggttaaatgggcactatggtgtcaccgcatttgttattgggaatacaatctcagctatgccattcctcattatgatcactttcaattttggaacttattgtttctttat

SEQ ID NO: 210597 - DNA, 450 bp, Gossypium hirsutum
aaccgccaaaactattgcttcacctggtcgtggaatactggcaattgatgaatcgaatgcagcatgtgggaagagattatcttctattggcttagacaatactgaacccaaccgccaggcttacagacagcttctgctcacaactcctggcctcggagaatatatttccggtgccattcttttcgaggaaacactttaccagtcaactacagatgggaagaagtttgttgatgtcttgcacgaccagaaaatcgtacctggcatcaaagtagataagggtttggttcctctacctggatcaaacaatgaatcttggtgccaaggcttggatggattgtcatcaagatctgccgagtactacaaacaaggtgctcggtttgccaagtggagaacagtagttagcattccttgtggtccttctgctctggctgttaaggaagctgcatgggg

SEQ ID NO: 210598 - DNA, 415 bp, Gossypium hirsutum
cccacgcgtccgcaacaccgtgtctttaagtcccccggtgggaaattagtctatgagacggctaagaagagagcgagtgggcctaagtgtcctgttactggaaagcgaattcagggtattcctcacttgagacctgctgaatacaagccgtctcgattgcctaagaaccgtaggacggtgaatcgtgcctatggtggtgttttgtctgggagtgctgttagagaaaggataattcgggccttcttagtcgaagagcaaaagattgtgaagaaggttctgaaaattcagaagactaaggaaaagcaatcatcaaagagctaggaatttttaaatgctgatgaagcttgattgtgtttggcttgttagatttatctgaaagaaaatttttgtttggtattattggggaattgatgaa

SEQ ID NO: 210599 - DNA, 227 bp, Gossypium hirsutum
  unsure (1)..(227): unsure at all n locations
nccacgcgtncgcaacaccgtgttgttaagttcctcggngggaaattagtctatcagactgctaagaagagagcgagtgggcctaagtgtcctgttactggaaagcgaattcagggtattcctcacttgagacctgctgaatacaagcggtctcgattgcctaggaaccgtaggaccgtgaattcgtgcctatggtggggttttgtctgggagtgcttgtagagaaa

SEQ ID NO: 210600 - DNA, 421 bp, Gossypium hirsutum
aaacttgccacttgtgccagtgagaacaattttcgaaaattggcgtacctgcatgatgctgtgacatactatattatgattcgacggagggatatataatgatcttagtgatggacttcttgaaactgttgagacggaacttacaagtgtacaacgtctatcatactggctgtattctgcctatagtgatacagctgaggctaattacccgcatccttcaaactactgaatgcctttgcacagacatgccataacagaggtctgctaaaagaatgatgggtctgctgccggggctagcattgtggagcatatatataatgcatacagcgtatattacaattgtactggagatgctgactggatccaactcgatgacgatcctcatggcactgatgggtagaactggcacgcatgcactgaa

SEQ ID NO: 210601 - DNA, 454 bp, Gossypium hirsutum
gattcctctcaacaatattccaggcaatggggattcgagaagcttctgtttagagaatcaagaacgggaattcggcgtgacaggaaatatgcaattcaggcgaagaatgcattcgcaacgggagtgcatatgtcggagaatgttattgggaaaacattacataaaacagaaacaaagattcgttattatcactatcacaacaccattaccgtacaccaagagctatgcagagagtacctccctccctctgccaaaaacaatgtcacttggttcaataagctaccctatgtctacgatgataacatgaagaaactggccaacaccatcaaggaattcgagcataaaaccattggagacctcggttctctatgaccccacaccccacattccactccagcagctaccacatgtatcagtttaatgcgttaatggttgagcattcatggcatatgtg

SEQ ID NO: 210602 - DNA, 456 bp, Gossypium hirsutum
cccacgcgtccgcccacgcgtccgcccacgcgtccgcccacgcgtccgcccacgcgtccgctcagttggagcagatccacggcgaaatccgggatcttttccgtgctctttcaaatggcttccagagactggataagatgaaagattccaataggcaaagcaaacagctggaagagcttactggcaagatgagggaatgtaaaagattaatcaaggagtttgatcgtgaaattaaagatgaggaaagcaaaaatcctcccgaagtgaacaagcaactcaatgatgagaagcagtctatgatcaaagaactgaattcgtatgtagctatgaggaaaacatacatgaatacccttggtaacaagaaaattgaactctttgatatgggagctggagtcagtgaacctacagctgatgaaaatgttaaaatggcatcatcaatgtcaaaccaagagcttg

SEQ ID NO: 210603 - DNA, 229 bp, Gossypium hirsutum
cccacgcgtccgcccacgcgtccgcccacgcgtccggctaggatgatcttttatggttcggatgagctcctaaagcatgcatatatgatcaaaaactaaaaaaaaaagggcggacggtctaaaagatacaagcttacatacacgagcatgctacgtcatagctactgtatagagagacctaaattcaaatcactggacgtagatttacaacgacgggactggaaaaacc

SEQ ID NO: 210604 - DNA, 214 bp, Gossypium hirsutum
caagaagatgctaaagagggtgaagctgaagacgaggaaggccttgcaatatacccttacgaacgtctcagaataacatcaaccgatcccgtttctgagatagatgtgaccagacgagagacatacctgtcatccgaagagttcaaggagaaattcgggatggaaaaaggcgcattctattaattggcgaagtggaaaccaaaccagcttaaaa

SEQ ID NO: 210605 - DNA, 430 bp, Gossypium hirsutum
caccattaagatgatgggccctaaggagatggcggtggacggacaattggtgcttaattcgttccttacaatccatctttgaaccatgctgcttaaatggatgtttggagctggagactggattgtgctgcttgctttatttatttaatattcaagggttttgagaacattaatgttaatagctattattgtacgagattttttcaaaaaaacgttagtgccagtttgcgcggtcaaacttctgggaaaattatattcaatgaaatcatattgtgaatcctttttgttaaaagcattgatcgctgcgtttctaagtattggcaggtgaatagcatgattggtcagatgctcaatgctggtggtcggtcttcgattgtaatcagagtcattgtcattcttcttccatcttgaattcgttaaaatgttaaac

SEQ ID NO: 210606 - DNA, 314 bp, Gossypium hirsutum
gtgatatgaacaccccagtaaagattgaagtttcaggttaaaagaaggaagaaggaaatgtggtggtggagtcttgaaaatatgctagagcttctaagagattttaaaaggcactaaagtatatctattatgattctcacttcaacgaataggataaaactcaatgccaaggcattgaaagttgcttgcaatctgaacattgctgcttgcaagctgaaactgaacgattttaagcaagcttagaaactgtgcatcaaggctttagacatagaaagttcgaatgtgaaatcgttcgatataatggctcaagcata

SEQ ID NO: 210607 - DNA, 419 bp, Gossypium hirsutum
cggaaccacttagatccacagtgtcttatattatcagcggcgatgaaacggcaccggtcggggtatatatgtgctccaattgtgcactagactactgctgcatgggatctgcatatactacgagtaacagtggagctgtatgtgcttgaataagagggacgagactatgcataggcacagtaatgtatagtaccaagttgttatatatggaagacagggactatacagcttgaaggtatatgacattatgacactagagatcaatgataccgtcaaatcatattacctatacgaatgcttgtatcagtacatgggaggaaatggaaagggcgatgcaggtgaagtctgtaaaatggacatcaggaattgtaagcaggtgctgcgttatagatgacgcaaacttacgtacgcttgcatgc

SEQ ID NO: 210608 - DNA, 446 bp, Gossypium hirsutum
  unsure (1)..(446): unsure at all n locations
ncgccacgcgtncggtcgcctcattttcttcactcgttcagtctttggttggttttgttcggtcttgaaaatgcttgctcggctcgcgtctcgacgttttctcgagatccgtcaagctttccgtcaatcttctcaggcctctcgatctttgtccactgccctgaactatcatcttgataccccagataataatcccgaccttccatgggaattttcggaggcgaacaaacaaaaggtcaaggagatattgtctcattatccatccaactacaagcaatctgcagttattcctttgctagatcttgctcagcagcagcatggaggatggcttccagtttcggcaatgaatgcagttgcgaaggttatagaagttgctcctattcgtgtgtatgaggttgcgacattttattcaatgttcaaccgatcaaaggtcgggaaatatcatc

SEQ ID NO: 210609 - DNA, 463 bp, Gossypium hirsutum
accacgcgtccgcattctttattgcgagactatggacatccccgatggggttagcgtcaaggtaaaagccaaggttatcgaagttgacggtcccaggggtaagcttatccgcgacttcaagcacctcaacctcgacttccatctcattaaggacgaggagaccggcaagcgtaagctcaggattgaggcttggttcggctccaggaagactagcgccgtcatccgcaccgatctcagccacgtcgagaacctcatcaccggcgtcaccaagggataccgttacaaaatgaggttcgtctatgctcactttcccatcaacgccttcatcactaacgccaacaagtccatcgagatccgtaatttccttggcgagaagaaggtgcgcaaggtggatatgttggaaggggtttccatagttcgatctgagaaggtgaaggatgaaattgttttggatggtaatgat

SEQ ID NO: 210610 - DNA, 398 bp, Gossypium hirsutum
cccacgcgtccgcagaagaagatgctgctgcactaataaaggaaagtgggactgaaaagcccattgttgccttcattgctggacttactgctcctccaggacggcgtatgggtcatgcaggagctatagtatcagggggcaagggtactgcacaggacaaaatcaagactctaagggaagctggagtgacagttgctgaatctcctgcaaagattggagtagcaatgcatgatgttttcaagcaaagaggcctcctgaattaacacccttttttttttcctagaaaaaggaaaactttttttcctgaataagtttcaggtggacatttttcatataattccattggtcttcttttgtccaaaattatgactatactaaaaaaatgagggaaaatctta

SEQ ID NO: 210611 - DNA, 451 bp, Gossypium hirsutum
tcgaccacgcgtccgcagaacaagatgctgctgctctaataaaggaaagtgggactgaaaagccgattgttgccttcattgctggacttactgctcctccaggacggcgtatgggtcatgcaggagctatagtatcagggggcaagggtactgcacaggacaaaatcaagactctaagggaagctggagtgacagttgctgaatctcctgcaaagattggtgtagcaatgcatgatgttttcaagcaaagaggcctcctgaattaacacccttttttttttcctagaaaaaggaaaactttttttcctgaataagtttcaggtggacatttttcatataattccattgggcttcttttgtccaaaattatttttatactaaaaaatgagggaaaaatcttataccttagtcaatgaaaccagatttggcataaacaagacgggcaatactt

SEQ ID NO: 210612 - DNA, 287 bp, Gossypium hirsutum
cccacgcgtccgccaacatcgatagtgagttacaaccatctgggaaataatgatggcatgaatctgtcagcaccccaaaccttccgttccaaggagatctcaaagagcaatgttgttgatgacatggtttcaagcaatggaatcctctatgagcctggtgaacatcctgatcatgttgtggtcatcaagtatgtgccgtatgtgggagacagcaagagagccatggatgagtacacatcagagatattcatgggaagcaagaacaccattgtgttgcacaacacatg

SEQ ID NO: 210613 - DNA, 349 bp, Gossypium hirsutum
cccacgcgtccggtgctataattatgtttgacgttactgcccgtttgacatacaagaatgttcctacctggcaccgtgatctttgcagggtgtgcgagaatattcctattgttctatgtggtaacaaggttgatgttaagaacaggcaggttaaggcaaagcaggttacattccacaggaagaagaatctgcaatactatgaaatctcagccaagagcaactacaattttgagaagcctttcttgtaccttgcccggaagcttgcaggtgatcctaatcttcactttgtggagtcacctgctcttgctcctcctgaagtacacatcgacttggctgcacagcaacaaca

SEQ ID NO: 210614 - DNA, 428 bp, Gossypium hirsutum
gcagattcatgagatcaaggacttccttctgactgctagaaggaaagatgcacgctctgtgaagatcaagaagagcaaagatgttgtcaagttcaaggtccgctgctccaagtacttgtacacactttgcgtgtcggatgctgagaaggctgacaagttgaagcagtcccttcctccaggtttgagtgttcaagacctgtgaaaatatggcagcctcaggtttgtcacctgatttataggtgatgaaagctagattttagttttgggtttattgtatttctggtcattctgcaacagtgaagctcaattttctgtaattggatctatgtttttttgttgattaaggattttagtgatatatgcacttttcaattacaatgaatgttctttttaatgaaaaacacagaaaaatttgatgttgcttcgct

SEQ ID NO: 210615 - DNA, 327 bp, Gossypium hirsutum
ggccgatcaacttacggacgatcagatctcttagttctaggaggctttcagcctttctgaggagatggcgatggctgcattactaccaaggagcttgagactgtgatgcgatcacttggtcagaaccctactgaggcagaactacaagatatgatcaatgaagctgatgctgatggaaatgggaccattgattttgctgaattgcttaacctaatggcacggaacatgaaggatactgattccgaggaagaacttagagaggcttttacggtgtttgacaaggaccataatggtctcatatctgctgctgatcttcctcatgtcatg

SEQ ID NO: 210616 - DNA, 378 bp, Gossypium hirsutum
gggatatgaacaccccagaaaagattgaagccgcaggtaaaaagaaggaagaaggaaatgtattgttcaagtctggaaaatatgcgagagcttctaagagatatgaaaaggcagtaaagtatatcgattatgattcttccttcagcgaagaggagaaaaagcaagccaaggcattgaaggttgcttgcaatctgaacaatgctgcttgcaagctgaaactgaaggatttcaagcaagctgagaaactgtgcaccaaggttttagaaatagaaagttcgaatgtgaaagcgttgtatagaagggctcaagcatacatccatctggcagatttagatttggctgagtttgatgtcaagaaagcccttgagaatgatcctg

SEQ ID NO: 210617 - DNA, 451 bp, Gossypium hirsutum
ctagaagcctagctgatgccatggttaggttggtatgctccgacaggaagagcggccaagttgtcttcaaaaaggagggatacaccgacaaaaccggaaaataccagattcgtgtatccgaggatcacttggatcagatctgtgatgcagttcttgtgaagagctcccagcttggttgtgccacaatgtcccccggtcgtgaacgtgcccgtgttatcttgaccaacttcaatggcatttcatccaccacccgttatgccaatgccatgggcttcatggttgacgagcctgaagcaggctgtgctgagatgatgaagatgtatcaggaggatgaggaggatgtctagtgtgttggtttggatttatttgcatatgaaatatgatgttgtctgctatttgttatgtgaattgctccgttatttctacgtttagaggacttctataacttatt

SEQ ID NO: 210618 - DNA, 379 bp, Gossypium hirsutum
tcgctaaaagcctaactgatgccatggtttggtttgtatgctccgacaggaagagcgggcaaagtgtcttcaaaaaggagggatgcaccgaccaaaccggaaaataccagattcgtgtatccgaggatcacttggatcatatctgagatgcagatcttgtgaaaagctcccagcttggttgttccacaatgtcccccgttcgtgaacgtgcccgtgttatcttgaccaacttcaatggcatttcatccaccacccgttatgcctatgccatgtacttcatggttgacgagcctgaatcatactgtgctgataatatgaacatgtatcaggatgatgaggaagatgtctaatgtgttggtttggatttatttgcatatta

SEQ ID NO: 210619 - DNA, 199 bp, Gossypium hirsutum
ggccgatcaacttacggacgatcagatctcttagttttaggaggcttacagactttctgagaaacagggcgatggcagcattactaccaaggagctggacactgcgatgcgatcactcggtcagaaccctactgaggcagaactacaacatatgatcaatgaatgtgatgctaatcgaaatgggaccattgattttcct

SEQ ID NO: 210620 - DNA, 418 bp, Gossypium hirsutum
gtgaggcctgcatcctacgacattccgagttatcaaggtccttgacgaatatcatactgagggagctaacaaagcaacgtcacaatagatattatatgcaccagttcacttcttatacatagaatgtatacctgtctccatgtctatagatcctgaaacgacgataatatataaagatgatcgactcatctagaagtgggctataagactgaccttcgatgacgaacaacatccgtatctgccatagcatatgctatacagacatatagaacagttcagtgatggagtcggatatagttggatcgatggtctcaaggtctatgctagcagacatgtgactcttaatatgatgttcaatgctactctcatatttacttacacacactatctacttaagaagcatattactacatgatga

SEQ ID NO: 210621 - DNA, 361 bp, Gossypium hirsutum
ggaaaaaataaatctagatcatgtttttggtcgattgcctctatgggattcttgcttccctcggtctatggcataaagaggccaagatcttgtttttagggcttgataatgctggcaaaaccacgctccttcacatgctcaaagatgagagattagttcagcatcagccaacacagcatcccacatcagaggaattgagcattgggaaaatcaagtttaaagcttttgatttgggaggccatcagattgctcgaagagtttggaaagattactacgccaaggtggatgcagttgtttacctggtagatgcttacgacaaggagaggtttgctgagtcaaaaaaggagttggacgctctcct

SEQ ID NO: 210622 - DNA, 319 bp, Gossypium hirsutum
ggaaaaaataaatctagatcatgtttttggtcgattgcctctatggcattcttgcttcccggggtctatggcataaagaggccaagatcttgtatttagggcttgataatgctggcaaaaccacgctccttgacatgctcaaagatgagagattagttcagcatcagccaacacagcatcccacatcataggaattgagcattgtgaaaatcaagcttaaagcttttgatttgggaggccatcagattgctcgaagagtttggaaagattactactccaaggcggatgcagtcgattacctggtagatgcttacgacaa

SEQ ID NO: 210623 - DNA, 367 bp, Gossypium hirsutum
gatggacactgccaaggcgctcaagggccccttctccatccgcctcaccagcgagtccggcaagaaggtcatcgccaaagacgtcatcccgccgaactggagacccgatgccgtctacacttccaacgtccaattctactagactttgaattcccttcgattcatccggcgcggtgggctatggacctgcagcagcaagctaattaagtttatatatattgcatgagagagcatgcaccgctaaccatatatactactgagacttctgaattctagtatatgtaatccttttgtttgggtttaggaggcaattctaatcatgtatgccgaattccaaagagtggaaaacaagcaaaatgttaaatat

SEQ ID NO: 210624 - DNA, 457 bp, Gossypium hirsutum
  unsure (1)..(457): unsure at all n locations
gttatttgggtgaaacctctggacaatgattgttacaagaggcgagcacatggtacagagccacctctatgcaaaagtggcaatgatccagattcagtatggggagttccaatggaagcttgcattactccgtatcctgaacaaatgcacagagatgggggaactgggctagctccctggcctgcccgattgacagccccgcctccccgtcttgctgatttgtacattactgctgacacatttgaaaaggacacggaaatgtggcagcaaagagtagaaaactattggagtttgctgggcccaaaggtaaaaccagacactattagaaacatcatggacatgaaggcaaactntgngtcatttgctgctgcactcaaggagaaagacgtatgggtgatgaaatgtgtgccacatgatggaccaagcaccctcaagataatctatgatagagggctga

SEQ ID NO: 210625 - DNA, 456 bp, Gossypium hirsutum
  unsure (1)..(456): unsure at all n locations
atgacgctgtgcgggtgcgggctgcagagaggagaggagtagagcggcgtacgtagtacgtaccgtcttggcgtggtcctggatgcggagcggcggcgcggaggcgcaccgaaccttccaggcggcgagcgcgggcgcgaggcggcgctgcatgtcggcggtgacctgcgccttgagctgcggcgacttgaagaaggcgccgacgaggccgtgcacgcgccgctgcaggctgccgttgatgagcaggatggaggactcgcccatgagctccgtcagcgaccgcgggtaccagggcacgaaggcgcgcgcgtcgctgtgcagcacgaaccggctcaccttcgcgtccgacgtcaccaccgtcgccgagccgatcaggtgcgaccggaacaccgngctcccgtgcctgcgcgccaaacccaccgtcatgccgcgccatgccacaacgcacgtgcgtac

SEQ ID NO: 210626 - DNA, 497 bp, Gossypium hirsutum
cacgacaagatggcatgcacagacaatgcgatgagagccttgttcctcctggtcctctgctgcatggtgcatggtgagaaggaagagtcaaagggcatcgatgcgaaagcgtccgggcctggtgggtccttcgacatcaccaagttgggcgccttcggcaatggcaagacagacagcacgaaggctgtgcaggaggcatgggcatcggcgtgcggcggcactgggaagcagacaatcctcatacccaagggcgacttccttgtcggacaactcaacttcacaggcccttgcaagggcgacgtgaccatccaggtggatggcaatctgctggcgaccacggacctaagccagtacaaggaccatggtaattggatcgagattctacgcgtggataacctggtcatcaccggcaagggaaaccttgacgggcagggcccatccgtgtggagcaagaactcctgcaccaagaagtacgactgcaagatccttcccaactc

SEQ ID NO: 210627 - DNA, 484 bp, Gossypium hirsutum
  unsure (1)..(484): unsure at all n locations
tcgcctcctaatcgcgaacgagcgtctttctcctccgtccgcgcccgtttgctcatcggttttgcctgccggtgggggaccgcctgcacgagcagcggctagccagacgtacggccttcgtttgaggctggagtcctgattggcaggtgcaagcacagagctcgatcgccatgtctttcaccggcacgcaggacaagtgcaaagcctgcgacaagacggtccacatcatcgacctcctcaccgccgacggcgtctcgtaccacaagacatgcttcaagtgcagccactgcaagggcgtcctctcgattagcagctactcttccatggacggcgtcctgtactgcaagacgcactttgaacagctcttcaaggagacagggaccttctcaaagaactttcaaggtggagcatcttcaaacatgaacgacncgtcatatgtctcaagcatgctatcatctgcattctctggaactcaagataaatg

SEQ ID NO: 210628 - DNA, 478 bp, Gossypium hirsutum
ctgacgcgtggtgcaaggtgggcctcataaccataccattactggctaggctgttgcgctcaaacaggcaactactccagaatacagagcttaccaagagcaagttatcagtaattgtgctaaatttgcgcagagcctgatttcaaaaggatatgaactcgtctctggtgggactgacaaccatttagttctggtgaatctcaagaataaggggatagatggttcaagggtggagaaggttttagaaagtgtgcatattgcagcaaacaagaacacagttcctggtgatgtttcagctatggtgccaggaggcatcaggatgggaaccccagcccttacgtcgagaggatttgttgaagaagatttcgctaaagttgctgacttcttcgatgcatcagtgaatctggccttgaagattaaggctgcaacgacaggtggaacaaagctgaaagactttgtgccactttgcaatctgata

SEQ ID NO: 210629 - DNA, 497 bp, Gossypium hirsutum
acaccctcggtgagtgcaagtacaccatcggaggtgacctcggtggcggcgagggccacaacgggtgggtctcctgcgtcaggttctccccaaacacatttcagcccaccattgtctccggttcctgggaccgcaccgtcaaggtctggaaccttacgaactgcaagctgcgctgcactctcgatggtcatggcggatatgttaacgccgtcgccgtgagccccgatggatcgctctgcgcctccggcgggaaggacggtgttactctgctgtgggatttggctgaggggaagaggctgtactcgctggatgcgggctccatcatccactccctctgcttctcgcccaaccgctactggctctgcgctgcgacccaggactctgttaagatctgggaccttgagtcgaagcacgtcgtgcaggacctcaagcctgacatccagatctccaagaaccagatcctgtactgcacaagcttgagctggaccgccgatgga

SEQ ID NO: 210630 - DNA, 357 bp, Gossypium hirsutum
ccccgatcagacaaccaggacctgtcatttcctacaaaatattcacagaatttctacggtcaatgtgccgcaaacttttggaagcaataccgttcctactggaagaatccgccctacaatgctatgcgctatctgatgacatgtctctttggccttgtatttggtacagtattttggcaaaaaggaaagaacatagattcacaacaagatttatataatctgcttggagccacttacgctgctacattctttcttggggcttcaaattgcatcacggttcagcctgttgtatcgattgagcgagcagttttctaccgtgagaaggcaagcgggatgtactctccgttatcctatgca

SEQ ID NO: 210631 - DNA, 498 bp, Gossypium hirsutum
  unsure (1)..(498): unsure at all n locations
gtggatattaggaaggatctgtactgcaacatcgtcctctccggtggcaccaccatgttccctgggatcgctgacaggatgagcaaggagatcactgccctggctcccagcagcatgaagatcaaggtggtcgctcctccagagaggaagtacagtgtctggatcggaggatccatcctggcatccctcagcaccttccagcagatgtggatcgccaaggccgagtacgacgagtccggcccatccatcgtccacaggaaatgcttctaattctttgggcccgagaaatgcaagccgtgggggagccgttaccgtcgccagcctctcctgcccccgttttcgttgccgtttcttcattagcgcgaacaaagttttgtgccggtctatcggccgtcgctttcctcccctattcatcaagactgcaataactgtcgctacctatgctnctaacctgtatttttggacacaatatgttaaggtccattcaattctaatgag

SEQ ID NO: 210632 - DNA, 392 bp, Gossypium hirsutum
  unsure (1)..(392): unsure at all n locations
gtcgacccacgccgtccgccttttttggaatggttaatcctggtggtccagcattattagatcaagtagaagccaggggagcactgaagccagagaagctacgagccacaaggcacgttctttcagagtatggtaacatgtcaagtgcttgtgttctatttattttggatgagatgaggaagaaatcaagggaagatgggcttcagaccacaggagaaggattggagtggggagtgctctttgggtttggacctggcctcactgttgagactgttgtgctccatagtgttgctgcttaaagttaaacaaacatgccttttaagtaattggtcgtgctccacttggcttgcagntttatcttcttcttttttccttttttagaatcctatgaa

SEQ ID NO: 210633 - DNA, 370 bp, Gossypium hirsutum
  unsure (1)..(370): unsure at all n locations
gtaactannnaagatgatcaaccgaaaatggcaaaaggaggtgaatcattttttacagtattatcaagaagagttttagggatttctcaagatttaatcaaacagaggaacgtgggaaaagtaacatttcagttaacggacatcctattcctgaacgtgtggttaaaaaagctgaaaagatagctggaccggttcttcctggacagtattggtatgatttccgagctggattctggggtgttctcggcggaccttgtcttggcataattcctccttttatcgaagaatttaaccatccaatgccagagaactgtgctggtggaaccactggtgtttttgtaaacgggagagagctccatcaaaaagattt

SEQ ID NO: 210634 - DNA, 430 bp, Gossypium hirsutum
gaagaacgagcacatgacagaagatatgttttgtaatgaattccacctcgttgatcgtggagtcatggagaattgcttgaaagtttccaaaggagtggaccatgtcttcaacctcgctgccgatatgggtgggatgggtttcattcagtcaaaccactctgtcattatgtacaacaacactatgatcagtttcaacatgcttgaggctgctaggattagtggagttaagaggtttttctatgcctcgagtgcttgtatctaccctgaatttaagcagttggacactaatgtgagcctaaaagaatccgatgcctggcctgctgagcctcaagatgcttatggcttggaaaagcttgcaactgaggagttgtgcaagcactacaccaaagattttggaatcgagtgtcgtattggaaggtttcacaacatt

SEQ ID NO: 210635 - DNA, 377 bp, Gossypium hirsutum
gatgaacttccagaatacatgaaaccaagctacaaggcactgttagatgtttatgggggaatgaaacaactggtggctgagcatgggagacaatatcgtgttgaatatgcgaaaaatgcgatgatacgacttgctcagtcttaccttgtggaagccagatggactcttcaaaactacaaaccatcattcgaggagtttaaggcaaatgcattgccaacttgtggttatgccatgcttgctattacatctttcgtcggcatgggagatatcgtaacactagaaacctttaaatgggcagccaatgatcctaagatcattcaagcttccacaattatttgtaggtttatggatgatgttgctgaacacaagttcaagca

SEQ ID NO: 210636 - DNA, 391 bp, Gossypium hirsutum
gcccacgcgttccggcttaatttatgggggtttttaacaaattgcctagtttcgatccggaactagccgtaggcgaagtttgggaagttgctgaaggcaaggtcggccctgatgttaaagtttttaatgtggtggatttcggtgccaagcccgatggaaccaccattagcactatcaattttattagggcattcaaagcagcttgcaatcacaatggccgtgcaatgctggtgatccctgagggaaatttcttattaggatcgatgttattgtccggaccttgcacttttcaacctccgttgatggttcaattcaacggaaaccttttgccgcaaggttcaacgtccacggccgaaaatgcagactggatcacattcataaactttaatgg

SEQ ID NO: 210637 - DNA, 400 bp, Gossypium hirsutum
gaaaaccggggcgggcacgcgtgcggaacattcccatttccaatctccagcttctcaaggtaaatatgccgatcagaaacatcgggggtgttcggcccgaagaggctactcaccccgatgctctcaaggctgctttggctgagttcatctcaaccttgatcttcgttttcgctggatcgggctcaggaatggcctttaacaagttgactgacaacggagcaaccaccccggctggtctcgtagccgccgctctagctcatggcttcggtcttttcgtcgctgtctccgttggcgccaacatctcaggtggccacgtcaaccctgccgtcaccttcggtgcttttgttggcgggaacatcactctcttgcgcggcattctttactggatcgcccaacttct

SEQ ID NO: 210638 - DNA, 290 bp, Gossypium hirsutum
  unsure (1)..(290): unsure at all n locations
cttcaacgcatttnaaaacgttttacatnaagagnncnaagccatcactgccgcatttttttaaagggatacagccccaccacttcatttgcttgccangcacctacatgtcgatccctccaagtcaatgaactcaagcctatggaaggaagatacaatctgcattgaatggcttaacaaacaggaacccaattcaattgtgtatgtgaactatggaagcattactgtcatgttcgaaaaacatctcaaaaaaattgcatgggggttggctaactctaagcacccatttt

SEQ ID NO: 210639 - DNA, 392 bp, Gossypium hirsutum
  unsure (1)..(392): unsure at all n locations
tcggccacgccttccggattcttgtcgaacccgagggaaaaatttaaaatcccatctttagggtgtaccattttctcaggagaaacacanaggtcatataaaggaaggcattgcaagaagttctattcggaggaagggtgtccttacggtgataattgcacctttttgcacgacgagcagtccaagaatagagagagtgtagctataagtttgggccccggagggtacggtggtggtggcgccggcggaagaggaagtggcggtggtggtgggaatggatcaaatgcaaagccgtctaattggaagacaaggatttgtaataagtgggaacttactggttattgccctttcggaaataaatgccattttgctcatggagctgcagaactaca

SEQ ID NO: 210640 - DNA, 313 bp, Gossypium hirsutum
  unsure (1)..(313): unsure at all n locations
gatcaataccaaaatatcttnccgatctttttctancacacccactatganaaaacgcgcgagcttttaaagcgagctgacgccacgttaacatgaacctgcncaaatagattattataacgatggccgactgttttaatgatttgagcattgaaaatcttgcttctttttaacaagagatggataactctttcactcttattcgttatataaagtatctttttcttttcaaccagatctatactttcatcaaaaatgtgaataatgttgaagatatacacaaaaatctcttacattaacttcaattccttaa

SEQ ID NO: 210641 - DNA, 398 bp, Gossypium hirsutum
tcgaattaaatttaaccggaacttcattaaaattttattaaatggaattttaattttcaatggagccacttataaaaactctatttttgctatttaatacggacaaatttaattacatcatttatttcaatatgaccattcttttgaaaacatgtacttagatattcatggttcaacagatggatggaacgcaatccgagatatggtggttcgaggggctcctgctattgccataactgcagccctttcactggcggttgaagttgccaacttaaaagactttaatggcggatcgaaagatgccgcttcttttcttgaatcgaaattagaatatcttgtctcaagtcgaccaacggctgtgaatctttctgatgctgctataaagcttaaagaaatta

SEQ ID NO: 210642 - DNA, 295 bp, Gossypium hirsutum
cttttatccaagctctaccataggaacattataaagtttgtagcagcatgcagaaaagcgccgttttattgtgttataacggaatatttatcggagggttcgttaagggcatatttacacaagcttgatcacaagtcccttcctttgcaaaagataattgctattgctctcgaagttgctcgtggaatggaatacattcattctcaaagagtcattcatcgggatcttaagcctgaaaacattcttatcgacgaagaaattcaattgaaaattgctgatttccgtataacttggg

SEQ ID NO: 210643 - DNA, 323 bp, Gossypium hirsutum
caatgcgccaccgtggtcgagagaaacctcttagctgacacggcggtgatcgttggagagaataaaaactgtaaacggaaagatgatttgaggaagatcgtgaccgacggtttactgtcacttggctataactcttcaatttgcaaatcaaaatgggacaagtctccttctttccctgccggtgattatgagtatatagatgtggttatggaaggggagagaatgttgatcgacgttgatttcagatcggagtttgagatggcgcgatcaaccgggacttacaaagcgatcgtccaatcactgccgttcattttcgtcggaaa

SEQ ID NO: 210644 - DNA, 360 bp, Gossypium hirsutum
  unsure (1)..(360): unsure at all n locations
tcgnccacgcgttcgnccacgccttccgaaacccgctgatcaaaccggttaaatttatttttggggtgaaaggccaggatgggaatgaagtgttttttaggattaagagaagtactcaactgaagaagctgatgaatgcgtactgtgatcggcaatcagtggatttcaactctattgctttcctgtttgatggccgccgtctgcgagtggaggaaactccagatgagttggaaatggaagaaggggatgaaatagatgcaatgctacatcaaactggtggtgctatggcctaagtagctagtttttaggttacgtaatgcagtaggatttaaacggtagtacttacgaaatcaggatcta

SEQ ID NO: 210645 - DNA, 274 bp, Gossypium hirsutum
aaaaggtattttattttgaaccaaagttccatccgtcctaatcgaccacctttggcggggatcaaattccacggaagccctctgtccactgctacacaaagggttcttgcatgcctttacgagaaaggcactgattttcagtttgttcccataaacatggctgctggtgaacataaatccgaaaactacctttccctcaatccattcggtcaagttccagcttttgaagacggggacttgaagctcttcgagtcaagagcagtcacccattaca

SEQ ID NO: 210646 - DNA, 448 bp, Gossypium hirsutum
  unsure (1)..(448): unsure at all n locations
cggaaaacccggcgggacgcacgcgtccgcccacccctcctgcctttgtaagcctgacactgactctattcttaattcgggtcggcgcccaatttgggaagctgtacgagaggaagccaagctggaggcagaaaaggaacctattttaagtagcttcttgtatgcaagtatcttagcgcatgattgtttagaacaagcattggcttttgttcttgccaatcgtctacagaatcctacactcttggcaactcaacttatggatatattttctaatgttatgatgcatgatagagatattcaacgatcaatacgcctggatgtgcangcattcatagatagagatcctgcttgtttatcgtatagttcagcgttactataccttaacggataccattctcttgcatcatatcgagtagctcatgcctttatggaagcagggcgaaatgtg

SEQ ID NO: 210647 - DNA, 363 bp, Gossypium hirsutum
cccacgcgtccgacaaagtcgaagaacgaagcagttcgcagccaggactttgagagaggtggggtattacgtgatcgggaaattgaactcagggctcagatcactgcaatccaagagaaagacaaggagatgaataaggcagaggcggaggcaggggatggagggcctgtagtgactgaagtcgacattcagcatatagtctcttcatggactggtattcctgtcgagaaagtatcaactgatgaatctgatcgcctacttaaaatggaagagacccttcataagcgagtcattggtcaggatgaagctgtcaaagccattagccgtgctattcgacgtgctcgtgttggtctcaagaacccc

SEQ ID NO: 210648 - DNA, 370 bp, Gossypium hirsutum
gcgcggaactgctggtgtttggagaattaaagcctctggaggaatccggaggctggcttgggggactactgtagaggacatggacatagctgttcgtgcgcatcttaatggttggaagttcatcttcctaaatgatgtgaaggtcctttgtgaagtccccgagtcttatgaagcatacaggaagcaacaacatcgatggcattcgggaccaatgcacctattccgcttatgccttccagcaatcataacttccaagatagcaatatggaagaaagcaaatttaatacttctgttctttttattgaggaagcttatccttcccttctactccttcacattgttttgcataattcttcctctcaccatgttt

SEQ ID NO: 210649 - DNA, 385 bp, Gossypium hirsutum
agatgtggcaaaacttggccgtcgttacggtggggggagctgaaaaaggggactccggcatgagggcataccagagtgcaagaaaaaccgagacttcattgtctaaatgtgcactcatggcaagaatgacaacaaagatctcttgtgatgagaacataagttctcccggtcgtgttttgagggaagacgaaaacgatcaaagtatgggtattattaagaggaagaacgataacagccttaattggaagtggatcgccatagccggaaccgtggcgctggctttcggacttcgctcaggcgtaattggtaaggcattgttagttggagcagggcagagaattggccgacggtgagattttttttttctttggtctttttacatttg

SEQ ID NO: 210650 - DNA, 226 bp, Gossypium hirsutum
  unsure (1)..(226): unsure at all n locations
gtcacctactcttcattccatttgcagttcatcacagaacgagaagcagagactttttttctgacagatgatgatttaaagcatttatataaattagttgaagaaaaagatggaggtcctgcttggattcacatgatggataagtccaccccaactatgggatatcaagcttggcaaagagatcttgagattggtcctacacaatatncgtaccggactgttttca

SEQ ID NO: 210651 - DNA, 339 bp, Gossypium hirsutum
ccacgccttccgatcccaaccttttttttttgaagggaacgtaacctatggcaccatggcgcctttggaagtgccagtaaagggtattcttattaacgggcaattcccgggaccaaatattaactctaccaccaacaacaatattgtgatcaatgtattcaataaccttgatgagccattccttgtaacatggaacggcattcagcataggaagaactcttggcaagatggtgttctgggaaccaactgtcctatcccccgtgggaagaattacacatataaattccaggtgaaggatcagattggcagctacatctactatcccgtgacggctatgca

SEQ ID NO: 210652 - DNA, 362 bp, Gossypium hirsutum
tcggcggcttctgcttctatttactaatttcttactcttccacctccttgggcccatcctttggaccttttccaagctggttaaagaccaccctctggtgttgaagtaccacaatgggccactcttgaaggggaagatcaccgttaatctcatctggtacgggaagttctccccaacccagcgctccataatcgtcgatttcatcaactctttgagctctgccgtcaaacccaaagattccgtcggcgtcgttttggtggaaaacgacggagaaatacaagtccggttcctccactttggtcgtgggcaaacaaatcctcctcgaaaattacccgctcggtaaaatccttaagaacccacac

SEQ ID NO: 210653 - DNA, 391 bp, Gossypium hirsutum
tcgggaatttattggtggtaccaaactttattacaaccctcctgaactaactgctggttcctgcgccactgttctgagagatggttatgatccagttgtctcagtgttgtctcgacatggagctgctttgcatattccctgcttagagatgatggacagtgaaaccccaccaacctatctttgcagtcctgaaggattactgaaacagatgcagtctgtttcaaagaaaaggatcgttaacttgattggaagaaatacaaccgaacgacttgacaaaactggactatggaaaattcgttcaaactgttacaatccccaagcagaagttgtaagatcatttacttatttcagaatgaatgatagtatatttagggttgaaaattggaataac

SEQ ID NO: 210654 - DNA, 278 bp, Gossypium hirsutum
  unsure (1)..(278): unsure at all n locations
aatttcaattacantttaatatctgcgtttatgggctcttagcctaccccattcagagttgtcaagtgtattttatgacaacgttttacttttggcctgaggattcaacaatatcttcattcttatcatcggtatatttgaatttatatgcgcaacagttggtgtgttactagtgatggaaaccctcagcgcattcttacacgncttgaagcttcattaggttgaattttcaaagtaagttctactaaggagaccgttataaatntcaaccattttca

SEQ ID NO: 210655 - DNA, 172 bp, Gossypium hirsutum
aaaaaattggccacccaaagttatcacactatcagcacccgcctgcaagccagaaagcttaaatctggcaaatcctacaatcaaatagccgaagaaaccggcttaaccaacgtttacgtggctcatctcctcaaacgccaagctcagctcaagactgaaaccgctcctaaac

SEQ ID NO: 210656 - DNA, 430 bp, Gossypium hirsutum
  unsure (1)..(430): unsure at all n locations
cggaaaacccgggccgagcggcacngacgtccggttctaggtgttcttcccagcaaacctttatcaggngaaagggcgtgcagagggcagaacgccgcnccgagttgataaggtctagatgatcgttgctgttttatatgcatcgatgctgccttacctgtgctggaccagtatgtggaacacagggtagactgcatgatagatgctggtttgctcaatgaagtgtatgacatttacaatccaaatggaaattatactctaggtttgcgacaggccataggtgttcgagaatttgagaattttcttcaggcttacttttctgacagcttggatgatgagacaagtgattcttctgatggaactcttctaaagctgtcaacaaggattgatgataaattgttcaaagaaaatactangggaatactaaatt

SEQ ID NO: 210657 - DNA, 447 bp, Gossypium hirsutum
  unsure (1)..(447): unsure at all n locations
acaggntagaaaacccggcgcgacgcacgcgtccggccgtaactgtactatgcttcatcctggttatggtttccttgctgagaatgcggttccgctagatatgtgcggagatcggaggatcaactttattgggcctaaccctgacagtattcgtgttatgggtgacaaatcaactgcacgagaaacaatgaagaacgcgggtgttcctactgttccgggaagtgatggattgttacagagtacagaggaagcaatcaagcttgcccatgagattggctttcctgtgatgatcaaggccacagccggtggtggagggcgtggaatgcgtcttgctaaagagcctgatgagtttgtgaagttactgcagcaagccaaaagtgaagctgcagctgcatttggaaatgatggagtttatttggagaagtacattcaaaattcaaggcacat

SEQ ID NO: 210658 - DNA, 216 bp, Gossypium hirsutum
  unsure (1)..(216): unsure at all n locations
ggcttaggtccagttcacatagtcttggcaggtcaaggtcaaaaagtcgaggcagacttgaagctggaaatcctggcaacacactntatgtgaccggtctatctcaaagggtcacagagagggaccttgaagagcatttctccaaggaggggaaggtggcatcgtgtttccctggttgttgaacctcgtactcgcatatctcgtgggtttgctttt

SEQ ID NO: 210659 - DNA, 219 bp, Gossypium hirsutum
  unsure (1)..(219): unsure at all n locations
cttcctgtgttgtggacctttttattttcagttaatatggatgaggaaaattatgaaaacccatgtctttttgaaccatggagatgggagaaaattggagctgctgctaataacaatagttntacaccatttggaggtggccaaaggctttgccctggtttagaactatcaaggcttgaaatttcaattttccttcaccatcttgtcaccacttacaga

SEQ ID NO: 210660 - DNA, 379 bp, Gossypium hirsutum
cccacgcgtccgccagctgcagattcttgagttgcttgagaatgctatttttacagctggctataaggctgtcttgcatgttcattccgttgttgaggaatgcgagatagttgaactattacagcaaattgatccaaaaacaaggaaacccatgaaaaagaaagttctttttgtgaagaatggtgctgttgttgtatgtcgtgttcaggttaacaactcaatttgtgttgagaagttctcagattttcctcaacttgggaggttcactcttcgtacagaaggaaaaaccattgcagtgggaaaagtcactgatcttcctgttgcttaaaacaattttgttcttagaggcgagaatataaaggtacaaactcgtatacct

SEQ ID NO: 210661 - DNA, 416 bp, Gossypium hirsutum
gtcttcttgggactagggttgagtggctttaccatatcctccaggccttcaactcaggtgatctagctcgctatcaagaattgtgtcatgtgcacaatgctgcattgagggctcaaccagccttggttgagaatgagaagaagctgtctgaaaaaatcaatattctatgcttaatggagattatcttcagccgcccatccgaagaccgaaccatacctttaaaagttattgctgagcgaacaaaactgtccattgaggatgttgagcatcttcttatgaagagcttgtctgttcatctgattgagggcacaattgatcaagttgagggtacagttcatgtctcctgggtgcagccgagagttctgggaattccacagatcaaatccttacgtgacaggttggataattgggtaggc

SEQ ID NO: 210662 - DNA, 298 bp, Gossypium hirsutum
tcgtccacacgtgcgctaaaatggtacaatctctggacatgctactcccaaatgactacgtttacggttgagcacgccaccatcatgcaccgcaaaattggctctttcgtaatccccgcaggatctttctccgcttttctcattatcagcattctcctcttcacttccctaaatgaaaaatttttcgttcccttggctcgaaaaatcacccataatccccagggaatcactagcctccagaagattgggattggactagttttttcggtagctgctatggtaggggctgctattattg

SEQ ID NO: 210663 - DNA, 381 bp, Gossypium hirsutum
cccacgcgtacggattggagcatgcttcttgccgctatcacaaccattttcctggctgctgagaagcaatggatgatgcttgattggaagccaaggcggcctgacatgctcattgatccttttggtatagggaggattgttcaagatggtcttgttttccgtcaaaacttctcgattaggtcttatgagataggtgctgaccgtacggcatccatagagacgctaatgaatcatttacaggaaaccgcgattaatcattgtaaaagtgctggactgcttggaaaaagttttggtgctacccctgagatgtgcaagaagaacctaatttgggtggtcactcggatgcaagttgtgtttgatcgatatcctacttggggtgat

SEQ ID NO: 210664 - DNA, 420 bp, Gossypium hirsutum
gcagccggtcgctcaactttgttcaaattgtggcgtcaacatgggagaatatttctgtgcaatttgcatgttctttgatgatgataccgagaaggagcactttcattgccatgattgtgggatctgcagagtcggaggtcgtgataacttttttcattgcaaaaagtgcgggtcttgctatgccattgcgttgcgagataatcatttgtgcgtggagaactcgatgcggcatcattgccccatatgttatgagtacctattcgattcgttgaaagataccactgtgatgaaatgcggtcacacgatgcactgcgaatgttactatgagatgataaagcgaaacaaatattgttgtcctatatgctcgaagtcagtaatcgatatgtctagaacctggaagaggatagacgaagagataga

SEQ ID NO: 210665 - DNA, 399 bp, Gossypium hirsutum
  unsure (1)..(399): unsure at all n locations
atgagagtgagtgtaaattatgcgaatcctttgtgacgcttgtgaaagtgctcctgctattgtcttctgtgctgctgatgaagctgctctctgccattcttgtgatgaaaaggtccatatgtgcaataagcttgctagccgtcatgtccgtgttggactagcanatccaagcgctgttcctcgttgtgacatatgtgaaaatgcacccggtatgcatacagctttcttttattgcgagatagatgggagttccctttgtttacaatgtgatatgattgtacattattgtggtaaaaaaacacnatggaagataccttcttttaaggcnaaagagtcgagttttccgggtgaatacgtcggttgaacccgagtgaaaaccgggagaggccaaaatcaact

SEQ ID NO: 210666 - DNA, 422 bp, Gossypium hirsutum
cccacgcgtccgcccacgcgtccgcccacgcgtccggctctctgtagccgccgcctgcgtctctctcttcatctctctgaaccaaaaagtctttagcttttcgcttcgagagagaccatgttggtttaccaggatctcatctccggtgacgagcttctttctgactcattcccctacaaggaaatcgagaatgggatgctgtgggaagttgagggaaagtgggttgtgcaaggagctgtcgatgttgacattggtgccaatccttcagccgaaggtgctgatgaggatgaaggtgttgatgaccaagctgtgaaggttgttgacattgttgacactttcaggcttcaggagcaaccccctttcgacaagaagcagtttgtcgtgttcatcaagaagttcatcaagaacttgacaccaaaact

SEQ ID NO: 210667 - DNA, 416 bp, Gossypium hirsutum
gttcttagagaaagatggattggaataagtggaaggatatctacattgaatggacaagaagtgggtacacgagcttgtacagaactgtcacgagcatatttgtacactacaagtccacatctgttcagcggagatgctaatgaggcatttgcccgtgttagagataaggtcaaagtgccactatatggctgtgactgctacgcttatgccctcttggcttctggttatgtggatcttgtcgttgagtccggcctccggccatacgatttccttgcacttatacctgttatagaaggtgctgggggtgttgttactgactggaaaggcaatcatcttcattgggaagcttcttcaacttcacgtgcaacaagctttaatgtagtggctgctggagataaacaaattcatcaacaagc

SEQ ID NO: 210668 - DNA, 423 bp, Gossypium hirsutum
cccacgcgtccggggttgataaagaaaggatccttccctttgtcttcaccctttggctttcccatttttttatttttattttcaatttgccccttaatctgttcttcgttaacatctccagcaatccccaattttcaatttcgttttgttcactgcataagttttttttagaaacctaaatccgatcacaagagaaatctcatggccactactggaaacaagaacatcaatgctaaattagttctacttggggatgtcggagctgggaagtcgagtcttgtattacgctttgttaaagggcaattcgttgaatttcaggaatcgaccatcggtgcggcttttttctcccaaacggtggccgtgaatgatgcgacggtaaagtttgagatttgggataccgctggtcaagagagataccatagc

SEQ ID NO: 210669 - DNA, 427 bp, Gossypium hirsutum
tttgcccactatctgtctctctctctctctctttcacttcacttccacagccttctcttctccaccaatccaaaaaaaacaaagatgcagtacaaaaacctgggcagatcaggcttaaaggtgagtcaactatcgtatggagcatgggttagtttcggtaaccagctcgatgttaaagaagcaaagtcacttctccagtgttgtaaagacaacggagtcaactttttcgacaacgccgaggtttatgccaatggtcgagccgaggagatcatgggtcaggctattagggaacttgggtggaaacgatcggatatcgtggtttctaccaagatcttttggggcggtcctgggccaaatgataagggtttgtctagaaaacatattgttgaaggaaccaaggcgtccttgaagaggcttgatatggatt

SEQ ID NO: 210670 - DNA, 404 bp, Gossypium hirsutum
catactatgctgtgaggcccatccaccttataacctctggtggatttagctgatctgctacacattacttttctctaatgttctattgcctcatttaatacaagccatcttatactgaatataaatgtcacatgggtattcgcgagtctcatacctatatcgaataaaaaaagaactactcttttttctgctaggcaatggagaggcacaaattaattaaggaagctggtgatggaacattagatactgttctaccatctattaataagctctctggcgaagttgatgcaattaataaaatgagaaaaaaatattactcatgggaagagtgtgagactctaataaaacttaattacctgcagagaatgaatcataccaatatcgtgaagcttaacgatgtcatt

SEQ ID NO: 210671 - DNA, 380 bp, Gossypium hirsutum
gacatttgaggaagggggatctgtttgtgttaagaaaaacgcaagacatcatccatgaaacactcaagcttcaaatcatgcgaaaggggaacagtcccatggcacaaaatcagttcacttgtttcaacagcacagtgcagtcaccaatgcagctccagaatcaaaccaaccatgataaccaactcaaggcatctcgagacgttgcaatggccacagatgctaaagcaaaacttcttcttctggagctgaaaactgttaaagcagatttggcttttgtaaaggaacgatgtgctcaactggaggatgagaataaacttcttcgggagagttgagagaaaggggataatcctgcagacgatgacttgattccactgcaactg

SEQ ID NO: 210672 - DNA, 422 bp, Gossypium hirsutum
tgctcacatccatggatgcagcaaaaactagatttgagtttacctgtaaatgattataatctggggtacgaacatatgctggccaatgggttgcagaacttgggaagtggggatctgataagacagcagttgcagcattctttttaatatgttcaacagtcagtcagccattatttactgttgcagtagcagcaccagcaatctgtttcacagtttgttgcacacaacattgtgcaggcatcagaatcccaaattctaaacgagggttttttcccagtccctggacgggaacaagtaggcaatcaatcggatgaactggctcatcaacagcataacacgactcaaagtgatcagcaccagcagaggcggccggtgaatgtgccttcatcatttctgaaaccagatttttttgactcacgatc

SEQ ID NO: 210673 - DNA, 386 bp, Gossypium hirsutum
  unsure (1)..(386): unsure at all n locations
aatgaatcgaaattgagggaggtactgaaattcgcaaatgcatgtggagccataaccacaaccaagaagggagcaatcccagcccttccaaccgaggctgaagtccttgccttaatcaatggagcttaggattattagcagcanacttcaataatctatgctcatctttttttttttttggattctctttttttaatttcttacattttcagagagagggttttgaaaagtatcaattttttctttccactcttttgttttcctttttcacctcgtttttcctccatcccctccctgtgtaatattgntaggctttgtgctttcaaagaggagtaggaataaaaataaaccttttttttttttctttnnnaaaaaaangggggggg

SEQ ID NO: 210674 - DNA, 425 bp, Gossypium hirsutum
agatagttctagtacgatcgaacatagccctcaaagaccagaacctgtaaaacaccacatcgcaaaaactgacaatgtcaaccaagagagaatcctgttggaagagcggatcaaagctgaaaaggtcaaggcagtcaacttaaaaaggtcagggaaacaaactgaggctttagatgcacttagaaaggccaaaatgctagagaaagctaaattccttgtcttaataaaatactaaaatcatataaatttccattttcagctaggaaaatgatttgaggtacataatatttgtggctaccatgtgaaaaatgatttatttccatcttaagcataagtatactaaattttgtatcatcgattcttaggtggaaaatgctcttcatttcgataccatttgcatttgcaataaaaagattgaacatgat

SEQ ID NO: 210675 - DNA, 426 bp, Gossypium hirsutum
ggcgctattgatgttgttgccaagtttggcgcaaaagctgacgggaaaacggatctgagtaagccatttttggatgcttggaaagaagcatgtgcctctgtaaccccatcaacagttgtgattcctaaagggacatatttattatcaaaagtaaacttagaaggtccatgcaaggctcctattgagattaatgttcagggcactataaaggctccggctgatcctggtgctttcaaggaccctaattgggttagattctatagtattgaaaatttcaaaatgtccggcggaggaattttcgatggtcagggaagcattgcttatgagaagaataaagatccccacaatcgtgcatttcgtgtcaaactccccgttaatataaagtttgactttgtgaccaacgcattgatacaagatataactagc

SEQ ID NO: 210676 - DNA, 377 bp, Gossypium hirsutum
  unsure (1)..(377): unsure at all n locations
cccacgcgtccggttttccttgtttttttttacattcagcgaaggggtgctctgaaatcacataccaaaggggtgaaggccgttgccgtccttggcagcaatgaaggtgttagcggaactgttttcttttcccaagaaggaaatggtccaactaccgtgactgggaacctttctggtcttaagccgggactccatggcttccatgttcatgcccttggggacacaactaacgggtgcatgtcaactggaccccattntaatcctgctggcaaagagcatggtgctccagaagatgagaaccgccatgctggtgatctacggaatgtcactgttggtgatgatggctgtgcaagcttctccatcaccgacaaacagat

SEQ ID NO: 210677 - DNA, 427 bp, Gossypium hirsutum
cccacgctttctctctgagagtatctggacctgcaaggctcctttgtgcaagatcattggacagaatgggtctggccactaatgcgctcaaatctctgtctttgtctgctgctggatcacgacctcacacaccaaataggacctctgtttctaggggtgccagtccttctacggcaagacctttcactacacctacaagaggggtcattgcaactacaaggagagacattacatctctgatgaggacatccaccttatctaatcaattccacagctcaactctaggtcttagttttattgcagatattaataagggaagaaaaggtgcaaactacatacaagatgctcattaactgcctcttctttataatcgatatttgcagtggcgatttgctaatgcccgatcatacactgtgctgtacattca

SEQ ID NO: 210678 - DNA, 396 bp, Gossypium hirsutum
cttctgactcaagagtcactgaacgagtcgagttcgaattcagattacccaaaatggcggtcagattgaggagtgtgaaagtaccgcccaactcaacgagtttggaagaagcaaggagccgggtcttcgatttcttcagaaaagcttgtcgatcaatccccactattatggatatctataacctagacgacgtcgtcaccaaatccgagctccgttcttccatctccttcgagatccgtaagaactctcatgttactaaccctaaggtaattgatttgctgctgtttaagggtatggaagagctgaacaacattgttgaacatgcaaagcaacggcaccacattatcgggcagtatgtgctgggtcgacaagggcttgcacaggatttggacacca

SEQ ID NO: 210679 - DNA, 419 bp, Gossypium hirsutum
cccacgcgtccggtggaagtggctgtgtgtttgacaaatatgcttcattttctgattgtgtgtgggggcctgaaaaggaaatcaggatcattcaatatccttatgtcaaaagaagggataacctgccagaaccaaaggagaaagagaagccagttggcttgtggtctattatcaaggataatatcggaaaggatttatctggtgtctgtcttcctgtgtactttaatgaaccactctcttcactgcagaaatgctttgaggatttggagtattcatacttggttgatcgagccttggaatggggaaagcaggaaaatgacttgatgagaattctaaatgttgcggcatttgctgtatctggttatgcatcgacagaaggtcggcagtgcaaacctttcaatccacttcttggagagacc

SEQ ID NO: 210680 - DNA, 426 bp, Gossypium hirsutum
tggttacaactaaggatgcaggagatgctgttaccttgttacagtcattggctggctcaacatgggacagcggccaacttgtattgacagcttgtatgggttatcaaaatgtaaatgagaaaagactacatgatttaagagagaagcatcgatcagctgtaatagctgcagttgaggaaagatcaaaggggcttcaagcttggagggattctcagggcctagcatctaagctatataattttaagcaggatcctaagtccatgattatggaaacaaataagacaaaagcaaatggggatctctctcattctgagtctggttccacaaactctgacgaagttcttattagtctgactggagatgctgacacaggtgctgttccagatcttcaagagcacgttgtgtggttaaaagttgagttgtgca

SEQ ID NO: 210681 - DNA, 420 bp, Gossypium hirsutum
gcgaccaaataaaaacatggcaccacaccttaatattgttccttccatgtttgtacttttattattggtcattgcaacctctaaagttcaatcagatgcttttgatgttgttgccaagtttggcgcaaaagctgacgggaaaacggatttgagtaagccatttttggatgcttggaaagaagcatgtgcctctgtaactccatcaacagttgtgattcctaaagggacatatttattatcaaaagtaaacttagaaggtccatgcaaggctcctattgagattaatgttcagggcactgtacaggctccggctgatcctagtgctttcaaagaccctaattgggttagattctatagtgttgaaaatttcaaaatgtttggcggaagaattttcgatggtcaaggaagcattgcttatga

SEQ ID NO: 210682 - DNA, 419 bp, Gossypium hirsutum
ggagtctcctatgtcgaaccaaccactccactaaaacttggagaatactacggcgtagccgacaaggttttcaagtatgataccattcccgatgagccaccaagtgacaacactagggtaactttggcacctattgtcctcaacatgacacacagaagctttgtggaaatcatcttcgagaatcacgagaccgccattcagtcttaccacttgtctggctactcattctttgccgtgggcatggacattgggaaatggagccctgagaagaggatgaactacaatcttctcgacgccgtgagcagacacaccatacaggtattccccaactcctggtcagcaatcctattgacattcgacaactgcgggatgtggaacctgaagtcggagatatgggacaggcattaccttgtgcaaca

SEQ ID NO: 210683 - DNA, 414 bp, Gossypium hirsutum
aattttgaaccctcagaacaaagctggaaggattacagttatcacaagaatgggtgctgagaatatgagggtgaagcttccccatctaattagggcagtgcgtcgtgctgggcaaattgtcacttgggtcagtgaccctatgcatggaaacaccatcaaggctccttgtggtctcaaaactcgccccttcgattccataagggctgaagtgagagctttctttgacgtgcacgagcaagagggaagtcatcctggaggagttcatctagagatgactggacagaatgtgacagaatgcatcgggggatcccggactgttacattcgatgacttgggttcacgctaccatacccactgtgaccctcttttgaatgcctcccaatcttttgagctcgccttcattatcgccgagcg

SEQ ID NO: 210684 - DNA, 427 bp, Gossypium hirsutum
aaataaacagtgattatcaacttatctggaagtagatattggatgtgagtcttacgaggaggcgattgcggctttgtctaagcttctcagtgagaaagctgatctcggaagtgttgccgctgaaaaaatcaagcaaataacagccgacttagaggcagctggcagttgcgacaccgacaaccggatcaaaaccggtttccttcatttcaagtcagaaaaattcgagaaatatcctgatttgtacggtacacttgccaaaggccaatgccccaagtatttgatatttgcatgctcggactctcgagtgtgtccgtcccacatcctggatttccaaccaggggaagcttttatggttcgaaacattgccagcatggtcccgccatatgacaagaataaatactgcggagttggtgcggctattgaatat

SEQ ID NO: 210685 - DNA, 419 bp, Gossypium hirsutum
ctctgatggcaatacaaatatttgagttgattgggtggcatcaacataagactcttcctactgggtaccgtgaaattatggagtctgctattgaacgggcaataagggaaacatgggaagaggcaggtgctgaagtggaagtcatttccccttttgcacaaatggatattccctttattggacaagttagaataagcatccttaatttacttctgtatctcatgtacatttatggaagatgtttatgtatctaacatcgctttgtcttttttggagcagacttatgtaatcttcttggcaaagctgaagaagccccaattttcaccaggaccagaatcatccgagtgcttgctctttgaattggacaacattcccttctttggaattttctcccatttttgttactttgaatttgtata

SEQ ID NO: 210686 - DNA, 339 bp, Gossypium hirsutum
attccctgaaaacctttttgaagctgttattgctagacttcccattgccacattattcggctggcgctctgtttgtcgtaaatggaattccttcctggaatcacaaaaattctctcatcattgtgctgaaatcccactagccaatccctggttttataccattactcatgaaaatatcaatgttgtagccatgtatgacccttcaaccaataaatggcaccacccgacaatctcttttcttccaccaaagatgattgctctgccagttgcttctgtaagtggactaatttgctttcttgatattggacatagaaacttttatgtctgcaaccctttgac

SEQ ID NO: 210687 - DNA, 420 bp, Gossypium hirsutum
gcaactaagtaaagtgtaatcaactttttttgttcccctaccttaaacccatcccccggcgccgtgcaagccactattctaaccttacgcgccactgtaatccccacgaataaaccactcacccctcctccaaaccgccgccgatgtcttttcataacggcacaatcccaagcagccgtaacacccgaccctccctctccacccacagtaaaactcaacaaatatagctcaagagtaacggaaccgaagtcacaaggcgggtcccatgcgatgctatacggggtaggattatcagaagacgacatgtcgaaaccccaagtgggaatttcgtccgtgtggtacgaagggaacccgtgcaacatgcatttgttgaagctgtcggacgaggtgaaacggggtgttgaagacgctgggatggtt

SEQ ID NO: 210688 - DNA, 425 bp, Gossypium hirsutum
tccactttaaccttgtccactactattacactgccggaaaaaaatcatggccaccgtcacgacgcaggcgtttgccgctgttttccggccatgtgcatcgaaaacacggttccttactggttcttccggtaagttaaaccgagacgtttcatttaaaccagtggctgctacatcgactagctcattcaaagttgaagcaaagaaaggggagtggttacctggtcttccttcaccagcttacctgaatggcagtcttccaagataatggctttgatcctcttggattggctgaggaccctgagaacttaagatggtatgtacaagctgagctcgtgaatggacgttgggctatgttgggtgttgcagggatgcttctgcccaagttttcactaagattgggataattaacgctcctcaatggtatg

SEQ ID NO: 210689 - DNA, 192 bp, Gossypium hirsutum
cgattttcaaatccaattcattcctcttttcaaaggaccaaaaagaagatggcttcaacattcagcggcgaggaaactgctcctttcttcggctcttggtgctgtgctgccctcgttttctcttgtatgggagcagcttatggtacagcgaaaaagtggtgtttggtgtagccatcaaatggggtgtaaatg

SEQ ID NO: 210690 - DNA, 425 bp, Gossypium hirsutum
ctggaattatcttctgcagtcaactccaccatattcctaagtttctctctcaagctctttgcgggcccagggggagaaataaaaatcttcttgggtttgtcttttattgccttccatttttcttttattttcagaagaaaatggaaggacatggcagccgaggaggctcttgacttgtcaactttgcagtctcagctaagtgaaactcatgaaatgtggaaccaggagatggaaaaacaccaatgccaggtagattttttacaagacaaaattatggaggtaaaggcttgcttacagggtccggaggaggaatcaaaggaggtagatttctttggcgtaaggtaaaaactactgcaactttgttggctaacttgaaatcaaaagcaagagtgatggctgttcctgatttagcccataagtcatgc

SEQ ID NO: 210691 - DNA, 420 bp, Gossypium hirsutum
cccacgcgtccggcaggacatcctgagggctccggcattgggtataaagaggaagacaaacccggtttcgctgtttccttctattcaaaaaccaaggctatggttgaagagctgttgaaagaatatgaaaacgtctgcactctcagagttcgaatgccgatctcatctgacctaaacaaccctcgtaactttattgccaagattgcacgctacaacaaggtggtcaacattcccaacagcatgacaatcttggatgaacttctgcctatttctatcgagatggctaaaaggaacttgaagggtatctggaactttacaaaccctggggttgtaagccacaatgagatcctggagatgtataagacttacattgacccaaagtttcagtgggtgaacttcacattggaagaacaagccaag

SEQ ID NO: 210692 - DNA, 384 bp, Gossypium hirsutum
  unsure (1)..(384): unsure at all n locations
ttccacaaatggggtgggttttggccaaaattttggcggatcggacggcccggttttgcctccgccggcggaaatggagcctgaggaaggtgttgctctcagggaatggagaagggagaatgcaattcggttggaggagaatgagaagagggagaacgagttattgagccaaataattgaggaagctgatcaatacanagttgagttttattaagaaaagggaggtgacctgtgaaaataacatggccaattacagagacaaagagaagatatttgtagccaatcatgagaaattccatgccgaagctgataagcattactggaaagcaatcgcggagctcattccttaatgagtgccaaccatagagaaaaggggaaaaagga

SEQ ID NO: 210693 - DNA, 417 bp, Gossypium hirsutum
  unsure (1)..(417): unsure at all n locations
cccacgcgtccggtttcaggggaatgtttaaaggaaatggtactaattgtgctcgcatcattcctaactgagcagtgaagtttttcagctacgaagaagcctctaaggggattttatacctatatcggcagcaatcaggaaatgaggatgcacaattcactccacttctacgccttggagctggtgcatgtgctggaatcattgccatgtcagcaacttatccaatggatatggtacgaggttctaacagttcagactgagaagtcgcctcgccaatatagaggaatctttcatgctctnttaacagtattaagggaagaaggaccccgtgcattgtacaaaggctggttaccatctgtaataggagttgtaccttacgtcggtcttaattnntgctgttatgaatctctgaaagat

SEQ ID NO: 210694 - DNA, 420 bp, Gossypium hirsutum
ggcaatctcggaagacgtggaggcttccttcaacttcagatctgcatcgggggcatctgtcatgggtagcggctctcctgattctgagattagcaaagtttggaataaaatcccaagagatcctccagattgtaaatgcaatttttgatggcatctgtaggctccaaagtttcttgtaaaattcttttgtttcggtctataataaatagtttttaagatccagattagcatcttctaatagtttataggcactgcggactgaaaactcgccagaaaattctcctttccaaacctggaaatcctcatgttcaatctctacaaggggaatatgaagaatttttcgagcaatgtcctcttgaaagctatcttcccatatcgagatgttgtcccctctgtccactctacaacacatcccttttt

SEQ ID NO: 210695 - DNA, 444 bp, Gossypium hirsutum
  unsure (1)..(444): unsure at all n locations
gcgttcggccaagccttcggccaacccgtccgttgggtcagggctctaatggctgccaacaacatgccaggtggaatagacaaagagcaggcctttggcatggcggaaacagagatggaatatagggtagaactttttaacaggcttgcacaaacatgtttcaacaagtgtgttgacaaaaggtacaaggaatctgagctaaacatgggggaaaacagttgcattgatcgctgcgtttctaagtattggcaggtgaatagcatgatcggtcagatgctcagntgctgtggtcggcctccgatgtaaaacacagtcattgtcatcctcccatcttgaattcgtttaaaatgtaaaacaaggctaagtcctgcaattgacattagcaatttatcttttgtttggacagctaatcaaaaactcttataaaccaagctttcatncatg

SEQ ID NO: 210696 - DNA, 412 bp, Gossypium hirsutum
  unsure (1)..(412): unsure at all n locations
ccccagtctgccgatcaacaagcggattcgggacctcatgcgacggatgagtctcgatgagaaagattggtcagatggtgcaaattgatcgtaaagtagccactccggaggtcatgagggactacaaaataggcagcattttaagtggaggaggaagcgtaccgcatctgcaagccaccccacaggagtggctcaacatggttaatggtttccaaaatggttcactctcaaccaggcttgggattccaatgatttatggcattgatgctgtccatggacataacaatgtctataaggccaccatatttcctcataacattggccttggtgctacaagggatcctgagcttgtaaaagaggattngtctgcaacagctcgtgaagtagagctactggcataaactacgttttc

SEQ ID NO: 210697 - DNA, 398 bp, Gossypium hirsutum
  unsure (1)..(398): unsure at all n locations
cccacgcgtccggcggttataatcagctccttcctgtggttgtcccagctcctaatcctggtgttgccaaaccaaagccggcgccaaaacccaaattcactccaacccctgctacatcgtctaatccaattaccatagagcagaagatgacaacttcctggaatgccaagggaaaaacctactacaggtattccacaatagtgaccaacaagtcttacaagacactgaaggatctcaagctttctatatcaaagctttatggtcctctatggggtctctccaagtctggcaattcttatggtttcccaacatggctcaactctctacctgctggaaagagtattgagtttgtatacatccattctaacttctnctgctgatgtctcggtttcaagcta

SEQ ID NO: 210698 - DNA, 416 bp, Gossypium hirsutum
ggataattaataaattactgtcgggcgaaaaaaaagggtaagagatggctcgattaatgggaatatcgatgctatttctcttggcaggatcaatgcttatggtccagggcggagatcccacccttttttttcgaatggaacgtcacctatggcaccattgctcccttgggagtgccagtaaagggtattcttattaacgggcaattcccgggaccaaatcttaactctaccaccaacaacaatatcgtggtcaatgtgttcaataaccttgatgagccattccttgtaacatgggacggcgtgcagcataggaagaactcttggcaagatggtgttctgggaaccaactgtcctatcccccctgggaagaattacacctataaattccaggtgaaggatcagattggcagctacat

SEQ ID NO: 210699 - DNA, 436 bp, Gossypium hirsutum
ccaacgcgtccgcccacgcgtccgcttggtcagggctctaatggctgccaacaacatgccggctggaatagacaaagagcaggcctttggcatggcggaaacagagatggaatatagggtagaactttttaacaggcttgcacaaacatgtttcaacaagtgtgttgacaaaaggtacaaggaatctgagctaaacatgggggaaaacagttgcattgatcgctgcgtttctaagtattggcaggtgaatagcatgatcggtcagatgctcagtgctggtggtcggcctccgatgtaaaacacagtcattgtcatcctcccatcttgaattcgtttaaaatgtaaaacaaggctaagtcctgcaattgacattagcaatttatctttgtttggaacagctaatcaaaacttcttataaaccaagctttcatccatg

SEQ ID NO: 210700 - DNA, 405 bp, Gossypium hirsutum
cccacgcgtccggcggttataatcagctccttcctgtggttgtcccagctcctaatcctggtggggccaaaccaaagccggcgccaaaacccaaattcactccaacccctgctacatcgtctaatccaattaccatagagcagaagatgacaacttcctggaatgccaagggaaaaacctactacaggtattccacaatagtgaccaacaagtcttacaagacactgaaggatctcaagctttctatatcaaagctttatggtcctctatggggtctctccaagtctggcaattcttatggtttcccaacatggctcaactctctacctgctggaaagagtattgagtttgtatacatccattctacttctcctgctgatgtctcgggtttcaagctacaatttg

SEQ ID NO: 210701 - DNA, 393 bp, Gossypium hirsutum
gaaagaatgttttcccggagagacctggcgagcctgagtgccaattttacatgaagactggtgattgtaaatttggtgcagtttgtaagttccatcacccaagagagagagttcttcctgcccctgattgtgtgttgagtcctataggccttcctttacgcccgggtgaacctctatgcatattctattctcgatatggaatttgcaaatttggtccaagttgcaagtttaaccatcctatgggaattttcacatacagttactcaccatcatctccatctgatgccccagttcactgtttcttgggttcgtcgtcaggaactgctgggttaaacctgtcatcagagggacttgttgaagcagtccctacaaagccccaggcgactatcactg

SEQ ID NO: 210702 - DNA, 407 bp, Gossypium hirsutum
  unsure (1)..(407): unsure at all n locations
tccccggccgaatcccgggtcacccacgctcgaaggtttggtgtttggccttgccctgtctctctttgctgctgataacgccacagtttnggctattggagttccatttccagcttctgtatactatatttacagtgccatataactgttccctggcacagtgttctatggtgttaatgtttgaaagatttcactacacaaccaacttaaaggccgatgtctatgtactatagctgatcttttcaagagaaagtagatacattcagtgttgtattggcatcactccaacttacgtcgtgctgcagctacatatgttactaacactacaatattacccacgcttggccatccatcgaatcaacaagcagctgctgaagctgagaaacttctcttctcatctttgtcaa

SEQ ID NO: 210703 - DNA, 449 bp, Gossypium hirsutum
gttcagttagggaagctagtcttgcctgctaatctagatcttctagttgtacattctgcgatctcaccatgaccctcaactatggggagatgaggtacatctttttaaaccagagagattcgcagaagggattgccaaagctaccaattacaatgcaggtgcattttgtccctttggattgggacctcggaattgtgttggtatgaactttgcaatcatcgaaacgaagattgcactctccatgattctacaacgctacaccatttctctttcccctgcctatgtccactcaccaattccttatatcaccattcaaccacaacatggaattcaagtaatactcgagtcactgcataacgatgcgtaatgtaacatagctgctaagaattcagggtttaaataagtttagctgctataaatttggggtttaaataagtttattcatgtat

SEQ ID NO: 210704 - DNA, 445 bp, Gossypium hirsutum
cccacgcgtccgcccacgcgtccgattcacgcagctgccccttcatcactctgccaccggtgtattcaacctccgtcgcctcgccatggcatcagagaagaagctgtcgaacccaatgagggaaattaaagttcaaaagcttgtcctcaatatctctgttggtgaaagtggtgatcgtctcacccgtgctgccaaggttttggaacaactcagtggtcaaacccctgtcttctccaaagctaggtacactgtgagatctttcggaatcaggcgtaatgagaagattgcttgctacgtgacagtgaggggagagaaggctatgcagcttcttgagagcggtttgaaggtcaaggaatatgagcttttgaggaggaacttcagtgatactggctgctttggattcggcatccaggagcacatcgatcttggaatcaagtatgaccct

SEQ ID NO: 210705 - DNA, 452 bp, Gossypium hirsutum
cggcctctttgtgctgagaccaataaaatacgtgggtattgaagtctggcaggtaaagggtgggtcggtttttgacaacatattgatttgtgatgacccacaatatgcaagagaagttgtagaagatatatgggccaggaatagggaggctgaaaaggaagcctttgaagaagcagagaaagaacgaagagcccgggaagaggaggaagcaaaaagagctagagaggaaggtgaaaagcggagaagagagagggaccaccgacatagagacaggaggcaccgtagaaggcacgatcctcgtgattatctggacgattaccatgatgaactatgaggttgtccaccacaatttcgcgagttttaggatcccatttcgattacgaaaaagagaaaaatcgaagcaaggttccacgctgagagagttggggttactgtgtactggttgttctcat

SEQ ID NO: 210706 - DNA, 220 bp, Gossypium hirsutum
cggattattgcatggttacaagaagtaatttaaagaacctatattggatagtgactcaacaggtagcacaccacacaatcaatggttgcaacctgaggccaggcgatctccttagaactgggaccattagtgggaatttgaatcatttggatgtttgctggaactaacatggaatggacaaaaacaatttccattaaatgggacaactcaaaaattctta

SEQ ID NO: 210707 - DNA, 420 bp, Gossypium hirsutum
  unsure (1)..(420): unsure at all n locations
ncctttaaattcagttcagttactatgggttaacctgatcatggatactcttggagcacgtggattggctactgaaccaccaacagacaaccttatgcataggtcaccggttggccgaagggaacctctaattacaaacatcatgtggaggaacttactcctacaggcttcgtatcaagttactgtcctccttgtgctcaacttcgcgggcttgaccattcttcatttgaaggatgaccgtgacagggaacatgcttatgacgtgaagaataccttgatattcaatgcatttgtcatgtgtcagatattcaatgagtttaatgctagaaagccggaagaaatcaactgcttcaaaggagtgactaaaaactacctttntatgggaataattggatttacatttgttcttcagataatcat

SEQ ID NO: 210708 - DNA, 445 bp, Gossypium hirsutum
ggaagaacccatttattaaaccccaaaacccccatttcggaaaaccataaaatttccaaccggggtttcagttccatctcccagtagtcaagtttgaaagcaaaccatggttcccccccaacaagaccatgatcttgtctataaccttaggctctcatcggttggaccaggttgtgtcaccggttcggacgtggttcatgacctaagcggcctggacttgaccatgaaactccattacctcaaagcggtctacttcttttccagccatgcagtggaagggctaactatcatgaacatgaaagaagccatgttttacttgcttaacgattactacatcacctgtgggcggatcaagcggtcggagtcttcgggtcgaccgtacataaagtgtaatgactgcggcataagggtcgtggaaggtgtttgcgatgaaactgtggatgaa

SEQ ID NO: 210709 - DNA, 487 bp, Gossypium hirsutum
  unsure (1)..(487): unsure at all n locations
cgcaannattgtttcaagggaatatgagggactcatttttccaatatgcctgccctttctgtgctccaaggggggtnnttgtgacnnatgtcaaagggtctgggagaaaattcgacgaggagaatcgcagctacaccaatgcncggaacagtaccaaaacaaaatggtctcgatcctttgcaacgattgcgagacaaaatctctagttcggtttcatgtcctggctcagaaatgcccgaattgcaagtcatacaatactaggcaaacacgaggctgaagtggcttagagtgggatgtagaaaccgacttggatggcatattttccaaatcgatgcatcaagcattgggttctggttaagcttctgcaacgtgtattggtaccagtcgtggcgcatggttccttcgggggttcggtttagtgcttggtattttcaattcttttgtagatgattcaatcaataggccaacaaataagcatttgctttta

SEQ ID NO: 210710 - DNA, 438 bp, Gossypium hirsutum
gaaacaatggagtccaacaccaaaatgtcagctcttcttttgatttgcatgcttttcaggtcttcagtgacaccaattcttgggtgtggttcatgtgggaaagcacacaagcatcgaaagcctaagggaaagtcccctaaaggtcccatcactttgcctccccttgtgaaacctccaatcaagttgccaccggttgttcctccaatagttaagccacccattgacctccctccggttacggtccctccaattaaccttcccccagggacggttcctccagtaactaagccaccaagtgggaaaccctgcccaacaccaccaaccaaggacacttgccccattgacacactgaaattgggtgcttgtgtggatctgctgggagggttggtgcacattggactaggtgacccggttgtgaaccaatgttgtccggttctt

SEQ ID NO: 210711 - DNA, 464 bp, Gossypium hirsutum
gaaaaggaaaaagaagattagatttgagagaatttgaagatggggaatgctctgagatgggtgtatagccattgctgcaagccaaccacagctggagactcccaaggcaaggatggagtttcagctctttcccatgatctcttccaatttgatatcacctctcaggttcctgaagggctaagttatcacgtcgtttcatccaagaaagctcaggctaactggtatagaaagttattagatgcttggagagaagcaaaaccaccaccaaaaacacctgaggaagcttcaagctttgtcattcagacattgaagagacaccaaaaggcagatgtcgagggattattggcatactatagtcttcctcagcagccttctgctagcgccacaacatcattgcctcaaggagttaagtttgaattgcagactttaccagtggacaccaaagcagtacctgatggagatac

SEQ ID NO: 210712 - DNA, 449 bp, Gossypium hirsutum
aacgaaagcttggccgtacccttcaaggtaatttggtatctttgaataagccattttctgctccaagggcaagttgaagaactcctgtgtatcggtcttcattttctcaatcacttcatctgctatcccatggttgattaactgttgcacccaacagtaagaatgaactactgaatccatagacgtaaaaaaagtataattgtgtttcaattaggtacctggaagaaaccccagtctttgcaagcctggtggagttttttctgttcagcatcatggtctagtttgctcatgtcaattacaggaatctgctgggattcatctatggaaaccacatcgaattcgacctctggtctgatgtatctggatgggattctgttgaggttcttggatgcaagagcttggacattctcaactggtaaagaatataacatatctgtgctctgcacttt

SEQ ID NO: 210713 - DNA, 453 bp, Gossypium hirsutum
atgactacagcttatacggaatacaaaaacaagcagaaaatgcaagatgttgcaacgggggaaccatccaccccgttcgaccatggtgctggacatgtggatcccgtttcagcgcttaatccagggcttgtgtatgatttgacagcggaagattatctgggtttcctttgtgccttgaactacacagagttccaaatcagatccctggcgagaagaaacttctcatgtgatgctagcaagagatacagagtcactgatctcaactacccttcctttgctgtcaattttgattcggtcatgggtgggtcgaatgttgttaaacacacccgaactctcaccaatgtgggctcgccaggaacttacaaggtatcggtatcacctgaaactccaggagttaagatatcagttgaaccacagactttgagttttagccaagcaaatgagaagaaatca

SEQ ID NO: 210714 - DNA, 454 bp, Gossypium hirsutum
cccacgcgtccgctaatgctcagtatgatgatcctgacatactagatcggttgagagttgagatgatgccacacggcactggtgaccgtggatgggatgtattctcattggaatatgatgctagggttcctttagatacagtgtttactgaatctgtcatgacaaggtatttaagaatttttaattttctgtggaagcttagacaggtagagcatgcactcattggtgcttggaagacaatgaaacccaattgtcttacttcacatgtatacacaaagctgcaacatgctgtaaaattgcaattgctttcaacattgaggcgatgccaggttctttgggatgagatgaatcattttgttaccaacttgcaatactatatcatgtttgaagtctttgaggtgtcatggtccaatttttccaatgaaatggaagtagccaaagatcttgatgatct

SEQ ID NO: 210715 - DNA, 458 bp, Gossypium hirsutum
cccacgcgtccgctcgttactggagctgcaggacaaatcgggtatgctcttgtacccatgattgctaggggagtcatgttgggtgctgaccagcccgtgatccttcacatgcttgatatcccacctgctgcggaggctttgaatggtgtcaaaatggagttggtggatgctgcatttcctcttctaaagggtgttgttgctacaactgatgctgttgaggcatgcactggagtcaatgttgctgtcatggttggtggtttcccaaggaaggaaggaatggagaggaaagatgttatgtcaaagaatgtgtctatttacaagtctcaggcttctgccttggaacagcatgcagctcctaactgcaaggttttggttgttgctaaccctgccaacaccaatgcattgatcctgaaggaatttgcaccttcaatccctgcaaagaacattacctgtttgac

SEQ ID NO: 210716 - DNA, 443 bp, Gossypium hirsutum
cccacgcgtccgcccacgcgtccgcaagaacaagcaacaagaacgtacaagccaagctggtactgcttggggacgtgggaactgggaaaacaagcttggttttgagatttgtcaaaggccaattttctgattttcaggaatccacaattggagctgccttcttcactcaggttctgtctctaaacgaagccacggttaagtttgatatatgggacacagcaggacaggagagataccatagcttggctcctatgtactatcgaggtgctgcagctgccatcgtggtctacgatatcacaaactcggaatcctttgagcgtgccaaaaaatgggttcaagaactgcaaagacgaggaaatccgaatctgataatgttcttggtagcaaacaaggttgacctgaaagaaaagagagcggtgggaaatgaggaaggtgaagtatat

SEQ ID NO: 210717 - DNA, 455 bp, Gossypium hirsutum
gccgaaaaaccaacccttaccaaaccacctgaacctaacatcatcatcatccatggcggcaccgaggtggctatgggctttctctgtagccctaactctggttccgtctgtttttggaaactctgaaggagatgctcttaacacgttgagaaaaagtttgaccgatccagataacatactccagagctgggatccgaaccttgttaatccttgtacttggtttcacatcacttgtaaccaaaaataatcgagtcactcgagtagatttaggtaattctaacctgtctggacatttggtacctgagcttgggaagcttgagcatttgcagtatctggagctttacaaaaataagatccagggaaccatcccaactgaacttgggaacttgaagagcctcattagtttggacctatataacaacaacatctcagggaccattcctccttcactaggg

SEQ ID NO: 210718 - DNA, 461 bp, Gossypium hirsutum
atctctctgtctctctcccatttacctccatggctgtctcttttaaaatgtgtgtgagtggcggtctatttgtgggtcttatgatgctgggtctggtaagctcagctaagttcgatgagcttttccaacctggttgggctatggatcacttcatctatgaaggagagctccttaagctcaaactcgacaactattcgggtaatttccaccctttcttgctctccaagtacccacctacttatgttcattgactccctgtttttcattacaatatggtacttccaacttttttcttcgttgtaaacatgccagcttatagattaatgaaaatggtgggttttggtgatatcaggtgctggctttgcatcaaaaagcaagtatctatttggcaaagtgaccatgcagattaagcttgtagaaggcgactctgctgggactgtaactgcttactatatgtcatc

SEQ ID NO: 210719 - DNA, 457 bp, Gossypium hirsutum
gaagcttcttagagagaataatagcctcccgagctatggtggtccagccgacgtctgcggtgaaacagtttatacattgtccagaagttgcttggattcacttttatctctgttcaagcaagcagttgaactagaaccaagtgataaatccatggaccgcagagaacctgtggtgaaacaaatagctttggaggcagataatctctcatggttgcttgagattttggctgacaggcaatcagcagatgaatttgcactaatgtgggctagccagcaagaattagcaacattacattcgaagcttcccattgtgtctcgacaccatgttagttgcattacagctcggttatttgttggaatcggaaaaggggagttgctaccagcgaaggacactcgtcagttattgttacaaacctggttgcaaccattgatcaatgactacaactggttgcaacat

SEQ ID NO: 210720 - DNA, 421 bp, Gossypium hirsutum
  unsure (1)..(421): unsure at all n locations
catcaagcggctgccagaccgaccaaacttcagcggatgccagcccatcagggaatgcaagcgaagcttatggagcacttagcaatgctattcaaaccataattgccgactcagatggctcaattactaataaagagcttgttctgaaggccaggcagatgctcaaaaaacagggcttcactcagcaacccggcctttactgctgcgaccatcatgtcagagctccatttgtctgcgaatactagtcttttatctgcaagcttcagaaacaaataaagtctatgatttggtcagagaattgttgttgatgagattgtactgcttgtctttcactgttcgctttatccatatatttacagtttgtgtgcttctggacaatgaatggattttgaacaaaaaatgattaatctattgcagctna

SEQ ID NO: 210721 - DNA, 366 bp, Gossypium hirsutum
ccaacccttccggaaatactcgaagaacgagttgcagttgggaagcttccccactatacgtggcttacccaaacactcagctaagccaataaagtatgcctctgagaagagggatgttgattcattgatggccttcgttaatgccctccgatgaagggattcataaattatttgtcgagttaacaaaaaatcaacttttgagcggtgattcatgctggtttacaatctcataaactaactcatgaacccggagtttgtcatgcttccatcgtccgtagcatcataatgaacctcgggcgtttctgtatactgaacacaatgttccatattttgacatatatgtgtgaaattgatgagttctttatt

SEQ ID NO: 210722 - DNA, 464 bp, Gossypium hirsutum
  unsure (1)..(464): unsure at all n locations
ctnccgccaccccttccggccaagtccatattacctgatttactaaatcattggctatcacttggtggggcatgagaggatcctattccacttggtttttgtgtcgttttctcattctcttaactcactcttctttctctttatattatatgatactaatgttataaaaattacctcagttctaccagcaagaagcaaccaaactccgacgacaaattcgtgatgttcagaacatgaacaggtctcctatcaatttctcttcttcttcctacactctatatctatatctatatacgaatgatgtttgttgcaggcatatccttggagaggctctgagctcattgacctttaaggaactcaagaaccttgaaggcaggctggagaaaggcatttgtagaatcagatcccaaaaggtttttgttttggtgtatattaaaatctttcattctttccttccatcttaa

SEQ ID NO: 210723 - DNA, 457 bp, Gossypium hirsutum
gtttgggatagggatctaaagagttcaggtcttttcatggagaaaataggccccggttcggctccaaaggtattccttttgtctaattctataaatttttccagaggaaatactactcctggtgcctatgacttgaccgtcatctcgaagcccttgagggctagcatgttagcagcatctctacaacgagccatgggcattgggaacaaagggaatccctgtaatggagagttacctagcttgtctcttcggaatcttcttcttgggagaaaaattctaattgtcgatgacaacaatgtcaacctgaaagttgctgctggtgcactgaaaaaatacggagctgatgtggttagtgcaacaagaggaataaaggctattgaactgctgacaccacctcaccactttgatgcctgtttcatggatatccaaatgccagaaatggatggatttgaagcta

SEQ ID NO: 210724 - DNA, 445 bp, Gossypium hirsutum
accccatgcccgaaatcgagaagcccatgtttgaactagtctcagcagcccaaacgatcgggccagatagtgatggtgcaattgatggtcaccttcgtgaagttgggcttacatttcaccttcttaaggatgttccggggcttatttcgaagaatatagaaaagagcctggtagaagcatttcaaccattggggatatccgattggaactcccttttttggattgctcatcctggtggtccagcaatattagatcaggtagaagccaagttagcactgaagccagagaagctacgagccacaaggcacgttctttcagagtatggtaacatgtcaagtgcttgtgttctatttattttggatgagatgaggaagaaatcaagggaagatgggcttcagaccacaggagaaaggttggagtggggagtgctctttgggtttggacc

SEQ ID NO: 210725 - DNA, 417 bp, Gossypium hirsutum
ttggggcaagttttctctctaaaaacccactctccagtcatgcgtcaccatggatgcggcgaaactgaactagttgaagaagttcatccaactctgcaaatctaatccttgcattctcgatgatccttccctctccttcttccgcgactatcatcaaagtctcggagctaagatcccatcctcggatgacaccgccgacgactccaaatcgaggagttatgtgctggaggaaagcgacgaggagcttgcggatgcaggagtgaaaattaatatagaagaagaggaagacgaagatgacattatcgaatcggatatcgagctcgaaggtgacaccgttgagcctgataatgagcctccacagaagatgggagacccttgtgtggaggttaccgatgataaccgtgatgcttcccattc

SEQ ID NO: 210726 - DNA, 393 bp, Gossypium hirsutum
gtagagatgaggaaaatcatgggtgccaaagttctcttcttctttgctttgctttccgggtcagctgtgtcggcatttgcacaggatgaggaagaccaaggtcttgttatgaacttctacaaggattcttgtcctcaggctgaagacattatcaaggagcaagttaagctactgtacaagcgacacaaaaacactgctttttcttggctgagaaacattttccatgactgtgctgtccagtcatgtgatgcttcactgctgctggactccacaagaaggagcttgtctgagaaggagacagacaggagctttggcctaaggaatttcatgtacattgagaccatcaaagaagctgtagaaagggaatgtcctggaagctgttcttgtgctgat

SEQ ID NO: 210727 - DNA, 434 bp, Gossypium hirsutum
cccacgcgtccgcttcgcccccttcagtttccatttctattaacaaaaaaaatggatccagggaacacatggggcaactcctcccttgaatccgtcgacccagaaatgcatgacctcatcgagaaagagaagcgtcgtcaatgccgcggcatcgagctcatcgcttccgagaacttcacttccttcgccgttatcgaagccctcggcagtgccctcaccaacaagtactccgagggcatgcccggtaaccgttactacggtggcaacgaattcatcgacgagatcgagaatctctgcaggtctcgcgctttgcaggcttttcatctcgaccctactaagtggggtgtcaatgtgcagccgtactccggttctccggctaacttcgctgcttacacggcggttttagagccgcatgatcggatcatggggctgga

SEQ ID NO: 210728 - DNA, 454 bp, Gossypium hirsutum
cttccggaatttcgatttcggcgattcggcggcggtcttccaaaaatgcaaattccttgtccgggaggcacaatcaggacaacaaaacgttgttacggcacaaaaaagattggaccataatcagcccacagcttttgtgatcatggacagtgaaatcatcccagatgctgagcttgcaccagcgaagaacgaattcccagcattccttggtcgtccatggggtaagctatccagagctatcatcatgcaaacttacattgacgatatggtacaccccgaaggttggactagttgggatcccaaagaaccgacaaatctttgccaatacgccgagttcaataacactggccctggtgcttccacttcccttcgtgttaaatgggccggagttaggttgcttaacgaggcagaggccattaactacactccacccaagttcttcgacgtcggcgat

SEQ ID NO: 210729 - DNA, 451 bp, Gossypium hirsutum
cttcggtcatttttttggttaaggaccattccaccattgttcgtggtgtccaaaaggttctccaaaactacaagaacttgcaggatattattgctattttgggaatggacgagcttagtgaagatgataaattaactgttgctcgtgctcgcaagatccaaaggttcttgagccagcctttccacgtggcagaagttttcactggtgcccctggcaagtatgtggagttgaaggagagcatcaccagcttccaggtacaattatatctcttcctagcttgcttctattgcatcatattagtgtgtttatgacatcttaagagcaagtgattaatttcttatgataggtggatccatggattgatatactttattattaaaattagtataacgttgaaaagtatgcatttttagtgtctgtgttaattggtagatggtaatcttttcatata

SEQ ID NO: 210730 - DNA, 457 bp, Gossypium hirsutum
atccgacctctcttcaagattaaaacaaaagtcatcgagaacaacctgaatcccatttggaatgaaacgtttgagttgattgccgaagatagagagacgcaggaactgactgtagaggttttcgaccaggacattgggcaagacaagaggttgggaattgcgaaattccgtttgatcgaactagaaccggagacaccaaaggaggttaatctgaaccttctgtcctcactcgatacacttaaaataaaagataacaaggacaggggaagttgtaccattaagcttttgtaccatcaatttaacaaggaggaacagttgattgctttggaagaagagaagaggatcctagaagaaaggaagagattgaaagaagccggagtaatcggaagcacaatggacgcacttgacggagcggcttcactggttggatctggtgttggtatggttggtaccggta

SEQ ID NO: 210731 - DNA, 450 bp, Gossypium hirsutum
gcacatttgtatgaggagtacggggaagactttgtggacatgttggatggaatcttctcgagttgtgctattggatactcgtgacaatagctatattgtcgctcgtgatgccattggtgtcacctcactttatattggatggggactcgatggttcagtttggatagcatcagaattgaaaggattaaatgatgactgcgaacatttcgaaagctttcctcccggtcatttatactcgagtaaatctggaggctttaggagatggtataatccaccttggttttcagaggtcactccatcggttccatacgatcctcttgttcttagacgtgcatttgaaaatgctgtgatcaaaaggttgatgactgatgtgccttttggagttctgttatctggaggacttgattcatcattagttgcttccatcacagctcggtatttggctggtac

SEQ ID NO: 210732 - DNA, 450 bp, Gossypium hirsutum
tcggccaagccgtccgccaacccgtccggcctatgacactgcaccagcaccagagacggtggtggtgcaaaagctttggtgtgtggctaagccgagtgtccctacggagacactgcaagaagcaatggactacgcttgtggtgaaggcggtgctgattgtaaagaacttatgccagatgggagctgtttctatccagacaccattgttgctcatgcttcttatgctttcaacagctactggcaaaagaccaagagaaatggaggaacttgcaattttggaggcactgctatgattatcaatgctgacccaagtttcctcgagtgtcggtttgttctcagtagaatggagaatgttgggattgtttgagtacaatgtaggatgtgtggggtctaattgctaagtggaatgtctggtttttaccctttattcttagtgagtagttgtggtgt

SEQ ID NO: 210733 - DNA, 454 bp, Gossypium hirsutum
gggaaccaactgttacacacagcagcagcagcagcagccatggttcgtcaatcttccgcatttcgggaacatctttccatttttttcttagagaagtattcaagtttcattccaaattcttttcgttttcattatatttttattggtttgatttgttttctctctctctctctttttataggtgaagtactcaagagaaccggacaaccctactaaatcttgcaaagctaggggttctgaccttcgtgttcattttaagaatacacgagaaactgcctttgcaatccgaaagctacctttgacaaaggcaaaaaggtacttggaagatgttattgcccacaagcaagcaattccattcaggcgcttctgtggtggaggtgggccgaaccgcacaggctaagaatcgccattctaatggacaagggccgtggcccatgaaatctgcaaaattcat

SEQ ID NO: 210734 - DNA, 409 bp, Gossypium hirsutum
gaaacttagatctgtgagaaagtacacaaaaccagctgccggaccaacatttccagtgtgcgccgccgccgaccccgacagacccctttggttcccaggcagcactcctcctccatggctggatggcagtctccctggtgactttggtttcgatcctctcggtcttggttctgaccctgagacattgagatggaacgtacaagcagagctggtgcactgcagatgggcaatgttgggagctgctggtattttcatcccagagttcttaaccaagattgggattttaaacactccatcgtggtactcagctggaacagaggaatacttcactgacaccacaactctcttcatcgttgagcttatttttatcggctgggctgaagggagaagatgggctgacattctcaag

SEQ ID NO: 210735 - DNA, 430 bp, Gossypium hirsutum
ccttggtgtcaagcaaatgatttgctgttgcaacaagatggatgccactacccctaaatattcgaaggctaggtatgatgaaatcgtgaaggaagtctcttcctacttgaagaaggttggatacaaccctgacaagattccatttgttcccatttctggttttgagggtgataacatgattgagaggtctaccaacttggactggtacaagggccctacacttcttgaggctcttgaccagatcaatgagcccaagaggccttcagacaagcctctccgtctaccacttcaggatgtgtacaagattggtggtattggaactgtcccagttggtcgtgttgaaactggtgtcttgaagcctggtatggttgtgacctttggtcctactggtctgaccactgaaaagtaagtctgtgagatgcaccatgaa

SEQ ID NO: 210736 - DNA, 461 bp, Gossypium hirsutum
attttagaccacgccaacattccccacctccaatctctccaagttttgttttcattctcgggtgtatatttgctccattccatctcgttttctatttgtaatttcataaccaagctttccaagtctgttcaatatgaaggcaagtcattggcttaacagcttcatcgtactgttagtcctcatcctgacgatggacttccgccatggaatttattatgctcgggctgatgctggcggcaccggtttcgttcaaacaacagcaactaagtttgtcataaatggaaagcctttctacttgaatggcttcaatgcatattggatgatgatgtttgcgtctgacaattctacgaggagcaaggttactgacgcatttcgagaagcctccaagtatggcatgaacatagcaagaacttggccttttaacgatggtgattacaagcctcttcagaattccccaggtt

SEQ ID NO: 210737 - DNA, 421 bp, Gossypium hirsutum
atcttctccctctcttcgcttctgatttctactttcagatggattggcaagggcaaggggtagcagagcagataatgcaggtgatgctattggtatttgcagtggtttcatttggtgctggttatgtgttgggatcatttcagatgatgatgctcgtatatgccggtggtgtgaccctcaccactttgattactattccaaattggcctttcttcaaccgccacccactcaagtggttggatctaagcgaggccgagaagcatcccaagccacaagtagctgtgagttcaaagaagaaatccaccaagaagtagggtcattttggtttcatcttagcatcattagaaagttgctaggggtatgaattgatgttttctgctttctttcatctaatcggctaggtttctcaaagtttttgaac

SEQ ID NO: 210738 - DNA, 407 bp, Gossypium hirsutum
gtcaattcccctggagggtcagttacagctggtatggctatatttgacaccatgaggcatatgcggcccgatgtctcaactgtgtgtgttggacttgcagctagcatgggagcctttctgctaagtggcggaaccaaaggaaaacgatacagtttgcccaattcaaggataatgatacatcaaccccttggtggagctcaaggtggtcaaactgatattgatattcaggcaaatgaaatgctgcatcataaggcaaacttaaacgggtatcttgcttaccataccggccaaagtttggagaagattaaccaggataccgaccgtgatttcttcatgagcgcaaaagaagcaaaagaatatggacttatcgatggtgtcattatgaatcctctcaaagctcttcagcc

SEQ ID NO: 210739 - DNA, 427 bp, Gossypium hirsutum
cccacgcgtccgcaacatttggctcgaccatctttcccttcaccattgcgtcgatggtcgtatcgatgtcattcaaggttccactgccgttaccagttctaattgccacttcactgaccacaacgatgtgatgttgttcggagcaagcgactcatatagtgccgacgagaagatgcaggtcactgttgctttgaaccacttcggtaaaggattggtagagaggatgcctaggtgccgatttggttttattcatgtcgtcaacaatgactacaatcactggttcctgtatgccattggcggcaccagccaccctacattatcagccagggcaacaggtactccacgccaggtaccttcacagctaaggaggttacctgtaggggcctcttaaaaccggcacagtggaagaattggaactgggtatcat

SEQ ID NO: 210740 - DNA, 453 bp, Gossypium hirsutum
cttgaagctcttgatgatactgatcggattcacattgtggactttgatattggttttggggctcaatgggcttcctttatgcaggagcttcccatgaggagtagaggagctccctcattgagaattactgcctttgcctccccttcaacgcaccattctattgagcttgggcttatgcgtgatattcttatgcaatttgctaatgaaattggtctaagttttgagcttgaggtggttaatttcgattctttagatcagaaccctcattctttgccaatgtttcaatcaaatggaaatgaggcaattgctgtgaatttccctgtttggtcttgttcgaatcggccctctgctttgccccatcttatgcgctttgtgaagcagctttcaccaaaaattggggtgtctttagaccaaaggtgtgatagaaatgatctgacattcccacaacatgtg

SEQ ID NO: 210741 - DNA, 445 bp, Gossypium hirsutum
gctgaacgggtctatcgtgaactatccaccatactagagggagaagcagacctggagtgggcctgcattatggttcaggccttgaatttgattctactcacttcttctgagctatctgtgcttcgggaacttttaaaacagtcacttgttaatgctgctggaaaggatttgtttgtttctttgtatgcttcatggtgccattcacccatggccattttaagtctttgtttgttggcacaggcatatcagcatgcaagtgccgtgattcagtccttggttgaggaagatattaatgtcaagttcttggttcagcttgataaattgattcgcttgctcgaaactcccatctttgcttatcttagattgcagcttcttgaaccaggaaggtatatatggttgctgaaagcattgtatggtcttttaatgttacttccacagcaaagtg

SEQ ID NO: 210742 - DNA, 437 bp, Gossypium hirsutum
  unsure (1)..(437): unsure at all n locations
tctcatgcccctcatgctcaagattacttactgttgatctgactacgaatgcagatggggggcaatctagcaaaacaacactgaaggggtttaaatcctcaagtattctgaacagaattcaattaaatgattttcagacgagcactaaaatagaggctttggtatgacttactgggattcattaattgctaaaaagttgctagactattttgagaggatcaaatcccaacagcgaaggaaacaagtactgcagctgctgctgctgccagtccatctcatgatacttcactgcattctgttaatttctgtgaaacgacaataaaaaatggaactggtgctattttgcctgaaaagccggtctcaactggccagactaataacctgatatcagctaagacttcagagacagctctgcttgatgagaggtctntgttggc

SEQ ID NO: 210743 - DNA, 378 bp, Gossypium hirsutum
cataggtattgctgttgatcaccgccgtaaatatagatctcttgaaggtcttcaagccaatgttcagaggcttaagacctacaaggccaaacttgttgtcttcccaagatgtgctcgcaaatttaaggctggtgattctactgtcgaagagcttgcaactgcaacccaagtacaaggatcatatatgcctatttctcgtgagaagccttcagttgatcttgtgaaggtcacagaggagatgaagtcattcaaggcttataacaagctccgtgtggaacgaatgaatgagcgccatattggtgccagattgaagaaggctgctgaggctgaaaaagaagataagaagtaacgttgtttgatgtgttctgggatttaact

SEQ ID NO: 210744 - DNA, 363 bp, Gossypium hirsutum
cactccttctcccacgcgtactttcacgctttcggtttggattatatggatggggaagggtgtgaataaactaaacaagaataacaagttggtgaacaaacttgccaagaaatatcatgcctttttggcttctgaatctgtcatcaagcaaatccctcctcttttgggtcctggtctcaacaaagcaggtaaattcccaacccttgtcactcaccaagaatcactatagtcgaaagtgaatgagacaaatgcaatggtttagttccagctgaaaaaagttctatgcatatgagttgctgttgggaatgttgcaatggaggagaaacacgtcttccaaaatgtgcaaatgagcgtcaatttcct

SEQ ID NO: 210745 - DNA, 377 bp, Gossypium hirsutum
attgtcttcaacaagtttcactcagtagtttcatttgtgccaacagtgtcaactgttttatgacctgaaattgttgaaagggaagctgaatctgggggaaagcttggtgatctagactcgtatgaagttgagggtggtgagacaaagggcgaaatacttcaaaatcttgcagagttccagttctcttgtgtaatgttcaatgcagtgttggagaatgcttgtagcgagcaaggagcaagaatgtccgctatggatagttcaagcagaaacgcaagcgacatgcttgatcgcttaactcttacatataacagaacccgtcaagcatcaattaccactgaactgattgagattatatccggagcatcggcattggaagg

SEQ ID NO: 210746 - DNA, 375 bp, Gossypium hirsutum
caccttttcccctcgatttccattcctttgacttcccttcatcatttcaagaaatgggttgaggagaaaaggtatttgtttatgaagatctggtgaagcacaaagacagaaatgattgttggcttttgatctctggaaaggtgtataatgtaacccaattcttggaggaccatcctggtggagatgaagttttgcttgctgctagtggaaaagatgcgaccaatgatttcgaagacgtaggtcacagtgatgatgcaagagagcagatgcagaagtactatattggtgaggtcgatgccaccaccattcccgcacgaaggatgtacaaagcacagacgtcaaccgcggcaactcaacaagaggagcctggctttc

SEQ ID NO: 210747 - DNA, 441 bp, Gossypium hirsutum
  unsure (1)..(441): unsure at all n locations
tgaagaggttgattatgttgcttgggtattctaccaggatgcttatgcatgcagtgatganaaatgctcagctcaatcaatgctattcatgcatgagaattggtcaacgagttcactcatatctaaaataaaagatcttgctgagagaaggaagttagcagatttaactgtcggtcctgtccttactgtcacaactgaagcaatgttggagcacaaaaagaaattacttcaaatttcaggttcgaagttactttttggcggtgaacccttagaaaatcactcgattccagccatttatggtgctataaagccaactgccatatacattcctctcgaagaaattttaaagccagctaactatgagcttgtaaccaaagaaattttcgggccatttcagattataaccgattataagaaggatcaattaccaatggtattgga

SEQ ID NO: 210748 - DNA, 410 bp, Gossypium hirsutum
  unsure (1)..(410): unsure at all n locations
cccacgcgtccggcaaaacatagcaaaaattaaaaatggcaaaatcagcagaggaagatgaccaacaaaaagcttttggttgggctgctactgataattctggaatcctctcccctttcaatttttccagaagggaaaatggtgatgatgatgtcactttaaaaattctttactgtggagtgtgccattcagacctacatactttgagaaatgactggggtttctccttttaccctgttgttcctgggcatgaaatttcaggtgttgtgaccaaagtggggaagaatgtgacaaaattcaatattggtgaccgggttggggttggagttttggttggttcctgcaagacatgtgaatgctgcgagcaggatcntgagaactactgccctcgtataatatntacctacaac

SEQ ID NO: 210749 - DNA, 372 bp, Gossypium hirsutum
  unsure (1)..(372): unsure at all n locations
ggggttcattatggaatttgcagagaatctggtgttgaggttaatggaggacccggaagagagggatagaaaattcagagaacacgtttactctatgaaggatcgatgcgcaaaaaccaaggagatgtggagttatccactgcggccttatgggttttggacatttgagcgccacaatgctcagctccgttgggatcctcagattagccaagtccccggccgcagggatccttatgatgaccttcttcaagacagttatgcgtcttcctccaaacgaaactgagaagccattagcagatggtttggagcttgatctacanatgggaagtggacattgaaaccctntttactgtttgtttgaatttattttca

SEQ ID NO: 210750 - DNA, 340 bp, Gossypium hirsutum
  unsure (1)..(340): unsure at all n locations
ggatgagagtgagtgtaaattatgctaatcctttgtgacgcttgtgaaagtgctggggctgttgtcttctgtgctgctgatgaanctgctctctgccattcttgtgatgaaaaggtccatatgtgcaataagcttgctagccgtcatgtccgtgttggactagcaaatccaagcgctgttcctcgttgtgacatatgtgaaaatgcacccgctttcttttattgcgagatagatgggagttccctttgtttacaatgcgatatgattgtacatattggtggtaaaaaaacacatggaagataccttcttttaaagcaaaaaatcaagtttcccggtgata

SEQ ID NO: 210751 - DNA, 368 bp, Gossypium hirsutum
cactgcttgagtatgaaaagcataaaatacacggtggcatgctccctcatgcagatacttcggttgttgagcctaatggagttgaagctcaagctggtagtaatcaagctcctgggtcaggtagggcaaagagagatgctgctgctcgtgcgatgcggagctggcattctcaacgtgttctcgataatggtgaggtctgtcatccaatcatcaaggacaagacctctagtccgacgctcaaaagtgacagacaacttaaaaattttggtttattgaagcgtaaaaagccatccactttggactctggtgtccgagtttctcaacttaaggcaactaaatcacagcgttcttttggtaggttggatact

SEQ ID NO: 210752 - DNA, 434 bp, Gossypium hirsutum
  unsure (1)..(434): unsure at all n locations
gcgtacgcgacaaaatgaaagcttctaancatttttttaataggcgaggggatcattctcatcacgaatcattttaatatgtgtggatgaacaacaatcaaatgatgcanaagcaactgaattgctggacaaggggtttatggagtatggttgcccacattatcgaagaaggtgccggattagagctccctgttgtggtgagatatttgattgtcgtcactgtcataatgaggcaaagaacaatatcaatgttgaccagaagctcagacatgatctcccacgccgtcaaatcagtaagattatttgttcgctatgtggcacagaacaagaggctcaacaagtttgcatcaactgtggtgtttgtatgggaaaatatttctgcaacacctgcaaactttttgatgatgatacatcgaagagacagtatcattgtg

SEQ ID NO: 210753 - DNA, 453 bp, Gossypium hirsutum
cggggcgaccggggcgtccgcccacgcctccgtgctgtttcaacaggctttctctatatgggtatgatccagttctaacgaaagcttatttggaaccaaatattattgttaagagttgttgtggttcaagaaagaagggaaagagtgggaataaaaaatacattgacaagaagagggcagctaagagaactgaatcgaccatccctattttcaatatggaagacattgaggagggtgttgaaggatatgaggaagaaagatctcttctcatgtctcagaagagactagagaagcgatttggtcagtccccggtatttattgctgctaccttcatggaacaaggaggcattccaccatcaaccaatcctgcaacacttttaaaagaagcaatccatgttattagttgtggatacgaggacaagactgaatggggcaaggagattgggtggatta

SEQ ID NO: 210754 - DNA, 420 bp, Gossypium hirsutum
tccatcttcactcccccacgtcccccaaaccctacaaaatggccgccgccgcgcgcgctgttgtctccgtccaaaccatagagtctgacatggctactgatgccaccccaaccgttcctctcgctgatgtgatgaaagcctcgattcgacccgacatcgtcaccttcgtccacgacaatatatccaaaaacagccgtcaaccctatgccgtctccaaacgcgctggtcaccaaacttcagctgaatcctggggtaccggtcgtgccgtctcgcgtatccctcgtgttcctggtgggggtactcaccgtgcaggccaaggtgctttcggaaacatgtgtcgcggtggacgcatgtttgctcctaccaagatctggcgccgctggcaccggaaaatcaatgttaaccagaagcgttacgccg

SEQ ID NO: 210755 - DNA, 443 bp, Gossypium hirsutum
cccacgcgtccgcccacgcgtccgcgaatgtctctgatgctcacaccatcaatggccgcgctggatctaccccgagctgcccttcaaagggaggatatacattggcagttaaaccaggaaaaacatacatgcttcgtatcatcaatgctgcactgaatgaagaactgttttttatgattgccggccatcaactcactgtcgtcgaagttgatgccacatacgtgaaaccttttaaaacagacaccatcgttatatccccagggcagaccacaaatgtccacgtaacaacccatcgtcgtgccggaaagtacttggtcgccgcctcgcctttcatggacgcacccatcgcagtcgacaacctgaccgccactgctaccttacattacgccggttctcttacgagtgccgccactactctcgtatcaccccctcctaaaaacgct

SEQ ID NO: 210756 - DNA, 377 bp, Gossypium hirsutum
gcttctctcatttcataacatgtatataggtgtaaatggatgctctctgaagatggctgagaatcttgatgttgtgaggggcatacctgttgaaagaatgatgattgagactgattctccatattgtgaaatcaagagtactcatgctgggattaattttgtgaaatccttatggccttctaagaagaaagagaagtatgacaaagagtgtcttgttaaagggcgtaatgaaccttgtttagtgcttgttaaagcaacaattgagaggtacaaaaaggcttctgattcctccaatactgggtcagttgctgaagttaatgctcagttctatcagcaagaagctgagaaactccgaaatcaaatccggaatttgcaga

SEQ ID NO: 210757 - DNA, 380 bp, Gossypium hirsutum
  unsure (1)..(380): unsure at all n locations
ctttgagatcgatcctgatgggtcagtcttgtcatttgctgacatgatgaggaagaaaatgtccatgccagcccacttgatgtatgatggccgtgacgaaaaccttttcgaccactactcgtctgttgcacaaagaattggggtttacactgcccgggactatgctgatatagttgaatatctggttgaccgatggaagttgaaggaactcattggactttcacctgagggccgtgaagctcaggaatttgtgtgtggacttgcaccgagaattagaaagttagaggagagagctcaattgagggccaaggaatcacccagtgttccattcagttgggtttctggtagagaagtgacgctctaaatnggctatcctccaa

SEQ ID NO: 210758 - DNA, 386 bp, Gossypium hirsutum
ggccgaccgacgcgtccggattactttcccaggagaagctgatgaagcttccgatacggttactggggacattgtattggtcctggaacagaaagatcatcctaaatttaaacgaaagggtgatgacttatttgtagagcatacattggcacttactgaggccctttgtggctttcagttcatactgactcacttagatggcagacaacttctcattaaaacccaacctggggaagtcgttaagcctgatcaattcaaagcaataaacgatgaaggaatgccgatttatcagaggccatttatgagaggtaaacttttcattcacttcactgttgacttccctgactcgttgaccccagaccaatgcaaggcactggaggctgtgc

SEQ ID NO: 210759 - DNA, 398 bp, Gossypium hirsutum
gaaaaccgggccgacccacgcgtgcgcatcaagatggattgctccacacaacttgtttaacccctgcatatgtagctcctgaggttataaaccgaaagggctatgacggggcgaaagctgatatctggtcttgcggggttatcctctttgttctactggctggttatcttccatttcatgattcaaatctgataggaatgtataagaaaataagcaaagcagattacaagtttcctaattggttctcacctgatgtcaccaagctgctatcgagaatcctcaatcctaatccaaaatctcgaatttcaaccgcgaaaataatgacaaactcctggttcacaaaggggtttaaattgaaatcaagtcacaaaactgccgaaaaggacttgccttctaca

SEQ ID NO: 210760 - DNA, 402 bp, Gossypium hirsutum
gaaaacccgggccgacggacgcgtccgcaacgaaaaaaatctttccagtttctattttttaaaaacaaaactgaaaatgtctggctgcgtaggaaactgtggctgcagctctggttgcaagtgtggcaatggctgtggaggatgcaagatgttccctgacataatagagaagactacaactgagactattgttcttggtgtgacaactcagaaaatgcactttgagggatctgagatgggagttggggttgagaatggatgcaagtgtggagacaactgcacttgcaacccttgcaattgtaaataagagggggggaaaatgaacaacaaagagaagcagagaggcctttgtcttttaactaaataaattctattactttagtatgtatcagcaaatcttta

SEQ ID NO: 210761 - DNA, 426 bp, Gossypium hirsutum
cctcccctttctattttacatattacaccatgaatttggtagcaggatattaaattgtctgctccccacaaaaaaaaaaaaaaacaacaaataaaccacgaaaaacatacatacaaaaaacacaacaaaaactacactaaataaacaaactgttaacactgattgccagccataacactcactgtcgtcgaaaattaatgccacatacataaaaccttttaaaacacacaccatcgttatatccccacttcaaaccacaaatgtccacataacatcccatcgacccaccaaaaagtacttgatcaccgcctcttcttaacatggacgcacccataaaactcgacaacctcaccttcactgctaccttacattacgccttttttctactagtgcatacactactatggcatcaccctctcctaaaaa

SEQ ID NO: 210762 - DNA, 378 bp, Gossypium hirsutum
gtggcctccgatctcaaccttcctgcttactctttcctcccatccgccctcggtgctgttggttgctgactttatttgcccaccctcagtaacaaatttactcaaagcttccaacatctcaacgttttccttgatatccctggtgcgccaccgattccatctgcagatatgccgccgacaacgttcaaaggcaacaagctgtatgacattttcttagacatcgccaccaacttgcgccgttcaactgggattattgtggacacttttgaatatctcgagccaaagagcttcaaagagattaatgatggactctgcttgccggactaccccacgcctcccctttactgcatcggacctctcattgttaacacgaccgtg

SEQ ID NO: 210763 - DNA, 345 bp, Gossypium hirsutum
cccacgcgtccgcccacgcgtccgtccacgcttccggtgtgtgtgtatttttcagagtagagtcttcactaagcttactccctccctccttcccgctctctgtttctgtcgcttccatggctgtcttgtttaaaatgcctgtcgttttgggtttctttgtgggtcttatgatgctgggtttggctagctcagctgagtttcatgagctttttcaacctgcttgggcaaacgatcatttcatctatgaaggagagcttcttaagctcaaacttgataacttttctggtgctgggtttgcatcaaaaagcaggtatttgtttggaaaagtatccatgcagattaaac

SEQ ID NO: 210764 - DNA, 398 bp, Gossypium hirsutum
gaaaaccgggccgaccgacgcgtgcggcttgcttgagtgcatggcgaacagttgatttccgaacaagagaagcacttcggggtagcgttctttcagatcttattgcgagctatgaggactgcatacggaccttcatccaggaacgtggacatggggatgtccttgctttacaggtccaagatcctttccatagattgttgctgcatggtgtctgtgagttctacaacgtggtctcggtaacagttacacagtcaaagggtgcggagtcactaaaggtgacgaggataaagaagaagaagacaggggtggttgagctccctaatatcaccttgtccaatttcctgaaaatgtcaaaggagggcatttggtagttctaggggcagaaattcgcccccccc

SEQ ID NO: 210765 - DNA, 433 bp, Gossypium hirsutum
  unsure (1)..(433): unsure at all n locations
aaaaccgggccggcgaggcgtacgatctgctnnnacaatctaaagcctcatattatcacaaatggttgatggttgcctccaagcttgctttacagacgaggataaagggttaccgaatgaacaatctcgatctttcaaagggtccagctgaagtaaggacaagggataaatttgggttccatgaagacaacaaattcgagaaccttaacttcaatatgttgaacttggactccaagatcggagatagtgtaagcaaaagtaccttccgaaatggtatttacaacaccgatgctgtttaccagaaaaataacagccacaacattgggaacctgtctgccaacaaatatagcggcaacaaccatagcaacaaagatattaataataacagcaacaccaactccaacaacaacgaaaacaacaatgcaaacaatgc

SEQ ID NO: 210766 - DNA, 441 bp, Gossypium hirsutum
aaaaccgggccgaccgcacgcgtccgcccacgcctccgcccactcgtccgcaatttctgaagtttagtatggattcctcggcttcgctgttaaacaagctcatgggtgcggatccatttttcttgttagcgggtcccaatgtgattgaatctgaagatcacattctaaggatggctggctacatcaagactatcactaccaaacttgggttgcctttggttttcaaatcaagctttgataaagctaaccgaacatcatcaaaatcatttcggggtcctggaatggctgaaggcttgcagatccttgagaaagttaaagtagcatatgacattccaattgtaactgatgtccatgaaactattcagtgtgaagcagttggaagagtcgctgatgttattcagattccagcattcttatgtcgtcagacggatcttctagttg

SEQ ID NO: 210767 - DNA, 378 bp, Gossypium hirsutum
atcaagctgcaacaggagctcattgttacaagtgataagaccattgatgcgaggggagccgatgtggaaatttgtaatggtgctggtatcactatccaatttgtgaagaatatcattatccatggccttcaaatccatcacattattcccgccaagggtggcaagatcaaggatggtgaaaaccaccatgggttacggggtgacagcgacggagacggggtgtctattttcggatcaaccaatgtttggcttgaccatcttgcccttcaccattgcgccgatggccttatcgatgtcgttcaaggatcaactgccgttaccgtttctaactgccacttcagtgaccataacgatgtgatgttgtttggagcaagcgac

SEQ ID NO: 210768 - DNA, 377 bp, Gossypium hirsutum
cttgtgcttggaccgtatcaggaagcttgctgataactgtaccggtcttcaaggtttcctgtttttgaacgctgttggtggaggcactggatctggtcttggttccctccttttggagcgtttgtctgttgattatggcaagaaatccaagttgggtttcactgtctacccatcaccccaggtctccacatctgttgttgagccctacaacagtgtcctctcaactcactcccttttggagcacactgatgtggctgttcttcttgacaatgaggctatctatgacatttgcaggcgctctcttgacattgagcgacccacttacaccaatcttaaccgtcttgtctcccaggtgatctcctctttgactgcttcac

SEQ ID NO: 210769 - DNA, 401 bp, Gossypium hirsutum
gaaaacccgggccgaccgacgcgtccgcttacacacagagggggtgcacttgttgccttatgggtgacaaatagagagaaatggcgtggcgtcattgagaaagagctattccctgcatggggagttagatatgtgtctactatttactggttgaaggtgaaaggggacggttcattgatcagtgatcttgacctctttcatcatcggccatatgaatgtcttctcctgggatactgtcaaggaaaagaaatggattcaaattgcccttcagtatttaggtcgataaaagatgaacatattatcataagcattcctggaggttactcgaggaaacccccaattggagaattactattggaccatgttcctggagttaaacctgctcgatgtattgaactctt

SEQ ID NO: 210770 - DNA, 353 bp, Gossypium hirsutum
gaaaacccgggccgaccgcacgcgtacgcgccgtccttggttgcaccgccgtgttccatttcatcatcatcgaattcttggggactttgtctagtacaactcctctcacttgcttgcaatggttcgtaagcgttgtcataggattcttaggcatgccgatcgctgctgctttgaagacgatacccgtatgaaccactatactagcaatgctgttttccgagtgaatagcaagaaagttttctctgctttatttacagcgattgattgctatcggatcgtaaatagagatttcgggactaaagatcaccataaaaacaaacattttgaaacattttctgtattgaaattctttt

SEQ ID NO: 210771 - DNA, 380 bp, Gossypium hirsutum
cccaacccatgccctctcctctgggttcaccgacaagctcccggtctgtaacccagaccgggaatggctcccaccgtttcacgatcaaagggtattccttagccaaaggcatgggcgttggcaaacacatagccagcgagagcttcactgtgggaggctatcaatgggcaatatacttttatcctgatggtaaaaacccagaagatcattcaacctatgtctccgttttcgtagctttagcaagcgaaggcacagatgttagagcccttttcgagttaactcttttggatcaaagtgggaaagggaaacataaagttcatagccatttcgatcgagctcttgaaagtggcccttatacccttaagtataggggaagtatg

SEQ ID NO: 210772 - DNA, 467 bp, Gossypium hirsutum
taggtctggaaaacccggggcgagcgaggcgtccgcgcggctctgacaagatacatccccacatttatatccctgaaatcaattgggtgctcatgatcctcttcattgctgtgactattgcctttagagacacaaaacacatggggaatgcatcacgattggcagtgatgactgtgatgttggtgacgacatgtctcacatccctggttattatcctctgttggcacaaaccccctattgtggctcttttctttcttcttttctttggttctattgagttgctttacttctcagcttcactcaccaagttcactgaaggggcttggctccctattctcttggcccttttccttatgacaatcatgtttgtttggcattatgcaaccatcaagaaatatgaatttgatctccacaataaggtatcactagaatggctattagcattgggtccaagcttatgaattgct

SEQ ID NO: 210773 - DNA, 380 bp, Gossypium hirsutum
ggaaatcaagaagcgtgattacagcggctcctgctatctcgatttctacttcgtttacacgccccagtccccttttcttctttccttttatttactcttcccataacattacattcccctttagcactcaaacccagaaaactgaaaaccttttctttctcccctaagagagctcaaaatgggagttgactactataacattctcaaagttagccgtaacgcgacggacgacgacctccggaagtcctacaagcgccttgccaggaagtggcaccccgacaagaaccttgtcaacaacaaagaagccgaggctaaatgcaagcaaatttttgaagcctacaacgtcctcagcgacccgctaaagcgtcagatctatgatc

SEQ ID NO: 210774 - DNA, 274 bp, Gossypium hirsutum
atcatgccaacctcgacgcatgcttaacgcctttaacctaccctgatcctacctattactgcgccggggatcactctctcgaacacattgccgcttatgctctagaactccacctctacatctgcataaccgattcacaataaaattacatccatggcgctgaaaacatcaagtcaaacccagatgtgtccttccctgagactgatcttgaaacttctttcattactttgattatcaaacctcctaacaatctcatccaatatctcctacaaac

SEQ ID NO: 210775 - DNA, 378 bp, Gossypium hirsutum
cccacgcgtccgctcaactaaacttataacgttcgatcgtttaacgcaaacccatttttaagtgagggaaaggtttcagttcagagtcataagcaacatcaatggctccttcaactctgacggctcttgcggaagagaaaaccttgcaggcaagcttcgttcgtgatgaagatgagcgtcctaaggttgcttacaaccaattcagtaatgatatccctgtcatctctcttgctggtatcgatgatgttgatggcaagaggggtgagatatgcaagaagattgttgaggcttgtgaggattggggtgtcttccaggttgtggatcatggtgttgatactaaactcgtgtccgaaatgacccgtcttgcgagagagtttt

SEQ ID NO: 210776 - DNA, 346 bp, Gossypium hirsutum
cccacgcgtcctaaaaaaaaataaaccctaatgaaattccccccaaatccgaggcgaaaaggcagagattgtgaccatgatcagcattctcgctcaggagcgtttgcttggtgcaacattatgatgcgcattgacggggatcgttgtattcgagcaacggaaacgcatatatgattccgtttcaagttatcaatctgagatgaaagaactgatatttggaaagaaatctcgctcagagtttgcccttctatggaacaaaacggtggaccaaatatttgtcccagtaattgaagccattagttcccgtcgatggtagacgatttggggtaatttatactgtcaacta

SEQ ID NO: 210777 - DNA, 398 bp, Gossypium hirsutum
gaataaccgggccgaccgacgcgtccgcccacgcgtccgatttggcctcacctgaatgtttctcatccgttgaatggatccagggttcgctggccacacagagtcgccagtcaatgacctggtacaaggcatattttgatgcaccaacaggtaacgaaccattggctttggatatgcggagtatgggaaaaggtcaagtatggatcaacgggcaaagtgtaggaagatattggatggcgtacgggaatggtgagtgcagtaagtgtagttactcggggacgtaccgacctacaaagtgccagagtggttgcggccatccaacacaaagatggtaccatgttccgagaacgtggctaaaaccgaaacagaatttgttggtagtgtttgaagaactcggc

SEQ ID NO: 210778 - DNA, 469 bp, Gossypium hirsutum
  unsure (1)..(469): unsure at all n locations
gaaaaacngggccgaccgaggcgtacggtcggaattattttaatcacactcctttttatatattttacactagtgtcccaatggacgcactttttaaacgatttgtaaggctaccattcataattcttgcccaacttgccgcaacgagctcggaaatataaggtgtttggctctagaaaaagtaacggagtctttagaacttccttgccgataccagattctgggttgtcatgatatttttccgtactacagtaagctgaagcatgaaaaaaactgtagataccgcccctataattgtccgtacgcaggagctgaatgctccgtcaccggtgatattccatttctcgtcatgcatctaaagaatgatcacaaggtcgatatgcatgatggttgtactttcaaccacacatacgttaaatccaatcctcatgaagtcaaaaatgctacctggatgttaaccgttttcaac

SEQ ID NO: 210779 - DNA, 414 bp, Gossypium hirsutum
  unsure (1)..(414): unsure at all n locations
ccctctctnntctcaaatttctgggctccgngcccctaatacnaaaccgacattttccaactctgattgactcctaattgntactggccgggtattttccatcactttcctgggaaaaaaaagcataaaaggaaaaagtttcaggagaaatgtactcagctattcggtcgttaccgttgaatggaagtgtaggagattatcaagggtcgtttgatggaaccaacttgcctagcgatgcttgtttggttttaacaacggatcccaagcctcgactccgttggacagctgagctccatgaacgtttcgtcgatgctgttactcaacttggtggccctgacaaagcaaccccaaagactattatgagaacaatgggagtaaaaagccttaccctctatcacttaaaatcacaccttc

SEQ ID NO: 210780 - DNA, 380 bp, Gossypium hirsutum
cttgcattaagtctcaaagatatcactgcatgaaaaaaaaaaaaccagacatggcttccagcactggggcatccgctgctcttcttcttaccttgaacttgttgttcttcactttggttagctctacctacgtgccttgcccaccaccaccaaagagccacaagcctacccacaaaagcccaccctcggcacctgaacagccaggcacttgccccagagatgcactgaaactaggcgtttgtgctgatttgttgggctcagtgcgcgttgttgttggaccgtcgaggaccaaatgctgctctctcatttcgggtttggctgatctcgatgctgctgtttgcctttgcactgctattaaagctaatgtgttgggggttaac

SEQ ID NO: 210781 - DNA, 379 bp, Gossypium hirsutum
atctgaacttggcgtgcagtttggaaactgtttggaggctcctcatgttattgatatcaaagcccaggtattctgttacaggtatggtctgctgtaatctcccatggcccagacaattaccaattggatgcaagttacaaaacagcggatcaatatgctttccaggactcacttggcaaatccttggaagaaattttcaagattgttccaggtggctgtctgatattcttcccaagttacaagctgatgaagaagcttagtgatcgttggcataacacaggccaatggtctcaacttaaagcacgaaagcccctttttgttgagccaagagggggtgatcaggaagaatttgagactgttctgaaaggttattataatt

SEQ ID NO: 210782 - DNA, 388 bp, Gossypium hirsutum
  unsure (1)..(388): unsure at all n locations
cgcgtgcgatcatgattcttcgatgacaggtaattggattcatttgttcactgatggagctgttatgtgggatgcgtgttttgcggcttgaggagggatgncntgtaagcaagaagaggagtggatcgttgggttcaattgttatttgggattatgcacagtcttcgatgctgaactatggggtgttctagatggcataacactcgtccatgaaaggggatatcaaaaagttgtgattcatacgaaaaatttggaagtagtcaaagttattcaagatgccaatttgacagattcatgcttagctttattacgtagaatccacgtgagtctacaagctatacaacattggaagataaaacatgttcaaagagagagcaatcaagttgct

SEQ ID NO: 210783 - DNA, 369 bp, Gossypium hirsutum
  unsure (1)..(369): unsure at all n locations
acgcccacgcgtccncccacgcgttcgcatgagggtgttcttttatctatacgtggatcacccggccctttgtttggtgctgttgccccttcggacaacaagtatgtcaaggctgttgctttagtgagtcagccggctctttattccaaggagcttatgaaggagcatcctgttggaccagctatgatccatccaactgaaactgttcatggtccaagttggagtgatctctttgaacccggagtcaagcatgctttactggtgggggtgggaattcaagtacttcagcagttcttgggtataaaaggtgttctgtactacactccgcaaattctatagcaagccggggtcggatttcttctttccaac

SEQ ID NO: 210784 - DNA, 351 bp, Gossypium hirsutum
  unsure (1)..(351): unsure at all n locations
caaaagcgaagaanaaaggaatgaaaaaaaaaagaaatataagttgctaactcaaaaccaaatccgcagagattttgttgcaatcaatatagtaaatcaatatagatttatagtaatagtaaataataagaataagaataagtaatacaacgatttcgaactctatttagaatcaaaccaccgtacggtattttctttaagtatcttgtaggatactgttgttccagccacatttctcttttcgctctactagtaatttaattggagcttgaacccgagtttcggtgaagttgaatccacttttttcgttctaccttccttatttattttatctaattcttatctaattct

SEQ ID NO: 210785 - DNA, 380 bp, Gossypium hirsutum
cccacgcgtccgcccacgcgtccgggcagaattacaggaacagcgaaggacgtatttttgggcggggcctggaagagcagtccgagggttgtttattcttatactgaaatggacgaaatcgtccatcctggtggatggtctagtaatcgccaacctgaacgagccgacactgtgtactacggagaatacaaatgcacggggaaaggcgcgactcctgctacacgagagaaattcgtcaaacaactatcggatgcggaagctaaaccattcttggttcttgactacgttgaaggtaccaaatggttacttccccctccgacagtacctaaataattcattcattcccaactttttcatgccggcaacatatcctcacagta

SEQ ID NO: 210786 - DNA, 420 bp, Gossypium hirsutum
ctggatcaatgaggattctacttacaagtactttgaggttatcctggtggatgttgcgcgcggggctatccgcaatgacccaagaattaactggatctgcaatccggttcacaagcacagggaacttcgaggacttacatctgctggtaagaaaaacaggggtctccatggaaagggtcatttgcaccacaagaaccgtccttctcgcagggcaacctggaagagaaacaacactctctcccttcgccgctaccgctgagttactgtgttcaactttttatccttgttgattttagaagtcatcgttttgagtttgaaatttttggaagttttaaaaaacctgactctttgattttacatgcaatttattttcgttttggatgctatgaatttctgaagttattgctacgtgcttttcag

SEQ ID NO: 210787 - DNA, 432 bp, Gossypium hirsutum
agacggtgccgatgtcacaatgagagatatcactaacgataccaaagggtcgcaattggatccctcggaatcgacatttttgggtttagatgataataggttgtgtcaatgggatatgagagatagaaaaggggtggttcaaaacattgccacaagtgattcacctgttttgcattggtctcaagggcatcaattctcgagagggacaaattttcagtgctttgcgagcactggagatgggtcaattgtggtcggatcacttgacgggaagattcggttgtattcgaagacatcaatgaggcaggccaagactgcatttcccggtctcggttcaccgatcactcatgtggatgttacctatgatgggaagtgggttttgggcacaactgatacgtatcttgtcctcatttgcactctgtttacagataaaga

SEQ ID NO: 210788 - DNA, 434 bp, Gossypium hirsutum
  unsure (1)..(434): unsure at all n locations
acccacgcgnncgagagcggtaaactttnntgacttnttttgtgtcttttgtttaggccaaatccaatgcccccggcttttaattggggatttaaaaaagtaccaaaaaatattgattttcaatgtcttgggctggccctgatgatatctttctctccacttctcttgctacttatctagacaagaaactccttgtcttgcttagagatggccggaagcttttgggattactacgttcgtttgatcaatttgctaatgttgttctagaaggagcttgtgagcgagttattgttggcaatttgtactgtgatatccccttgggtctatatgtaatccgcggggagaatgttgtcttaataggagagctggacttgtaaaaggaaaagctttcatctcatatgactgctgtcttggctgctgagattaaaagggca

SEQ ID NO: 210789 - DNA, 434 bp, Gossypium hirsutum
cccacgcgtcctaatttgtggaggactacctctgacgataatatagacttggagcgatttgcggccgcaatatataatgcagtgcgacaagcatcctaagtccatcgtcaggttcggaaatacatcagaagtatcttgaaacctgcaatgttaatgactgatctatgtgagaccttggagaacacagttcgcaagctcatttcagagaatggtttgcaagcacggattgcatttcctactggatgctcactgaattgggtcgctgctcactggactcctaattctggagacaagactgtgctcgagtatgatgatgtgatgaagttagattttggaactcatattgatgggaatatagttgattgtgcctttacagtggcgtttaatcctatgtatgatccgcttcttgaagcttctcgtgaagcaaccaatac

SEQ ID NO: 210790 - DNA, 432 bp, Gossypium hirsutum
cgcttgttccgagacctcttcattcgtgaaggtttccagttttattacgtgtttgattggacgatcgtaaagtatcagcaatctcagattgccaatcctcctacccgtgctcttggctctggtgctggaactagctctggcttacctcctgcaggtgcaattgctgataggcagtcaggtgaagagaccagaccttctggttggtcttcagcagatcctacacgcaggaggcattctggcctgattgcaaattctggaagtttagctaaacaaaaaggtccagtagctaatgatctttctgctgctaaagatcctatgttgtctagttctaatttcttgcgttcaagtggatcttcgaagcgagctgctgtttctagcagtcatgatgccgcaacaatcgcagttagtggccctgaacgctctcactttcgt

SEQ ID NO: 210791 - DNA, 439 bp, Gossypium hirsutum
gcagatcttcgttaagactctaaccggcaagacgatcactctcgaggtcgagagctccgataggatcgacaacgtgaaggccaaaatccaagataaggaaggcatccctccagaccagcagcgtctgatcttcgccggaaaacagctcgaagacggccggaccttggccgattacaacatccaaaaggagtcaactctccacctcgtcctccgtctgcgcggtgggatgcaaatcttcgtgaaaaccttgactggcaagacaatcactctcgaggtcgagagctccgacacgatcgacaacgttaaagcgaagatccaagacaaggaaggcatccccccagaccagcaacgtctcatctttgccggaaaacaactcgaagacggccgtaccttggccgactacaacatccagaaggagtcaactctccaccttgtcctt

SEQ ID NO: 210792 - DNA, 438 bp, Gossypium hirsutum
ggatgagaacaagtcattgatcttaaagattgttgagagccagaattccgggaaatttagtgaatgtgctgagaatcaagcacggctgcagcgaaacctcatgtacttggctgcaattgcagattctcaaccgcaacctccggccatacatgcccaggctggagggcactacatgcagcaacagcaacaaactcaacagatgacaccgcaatcgctaatggctgcacggtcctccatgttgtatggtcagcaaccattttctgatctccaacaacaagttctgcatggtccacttggcatgagctccggtggaagcacgggtcttcacatgctgcaaagtgaagctagcactacaggtggcaatggagcacttggagctggagttttccctgctttcaggcatggctcttctggagaaggcaagcaagacatcggtag

SEQ ID NO: 210793 - DNA, 430 bp, Gossypium hirsutum
aaaaaaaatttctctggaaacaaagcaactatcaactacgtttacctcagatctaaaacaccccgccgcagatccactaaattcaccatgtctactactttcagcggcgatgaaacggctcccttcttcggcttcctcggcgccgccgccgctctcgtcttctcctgtatgggagctgcatacgggacggctaagagcggtgtgggtgtggcttcaatgggtgtgatgaggcctgagttggtgatgaaatccattgttccagttgttatggctggtgttttgggtatttatgggttgattattgctgttattattagtactggcatcaatccaaaagccaaatcgtattatctttttgatggttatgcccatctttcctctggtcttgcttgtggacttgctgggctttcagctggaatggcaatcggaa

SEQ ID NO: 210794 - DNA, 432 bp, Gossypium hirsutum
  unsure (1)..(432): unsure at all n locations
cccacgcgtccganaaaataacattgattttgtcagcataataccacctttggtggtcggtccgtcgttatgcaatcaatgccgccaagcctcataactgcactttctcctatcaccgggaacgaagctcattattcgatcataaaacaaggccaattcattcatttggatgacttgtgcagagctcatatctttctattcgagaatccaaaagcggaaggtcgctacatttgcgcctctcaccatgctaccattatcgatcttgcgaaaatgctcagtgaaaaataccctgaatataatgttcccaccaagttcaaagatgtggatgagaacctgaagagtgtggagttctcctcaaagaagctcttggacttgggatttgagtttaaatatagcttggaagacatgttcgtaggagctgtcgagacatgc

SEQ ID NO: 210795 - DNA, 429 bp, Gossypium hirsutum
tccccctaaatttaaaaaggaccaacctctttgtttcttcttcttcttcttcgacctaaccgccccgctccttctcttcttcctttacgatttatcaacggtcatcataaaatcttctgatcatcaatcatggacgctagtgacagtaatttcaataaagctggcaacccttttgtctctgaacaacaagtacaaggaaacgacaatgtttcgttagaaaccggcgctgaatctcctcctccttctactactttcaacgacatgaaactcccctcccctagaaaacgaaaacctatacataaaagagtggtgtcagtgccaatcaacgacgttgatagttcgcgcctaaaaggggaaagtgctccaccgtctgattcttgggcttggcgaaagtacggccaaaaacccatcaaaggctctccttacccc

SEQ ID NO: 210796 - DNA, 437 bp, Gossypium hirsutum
cccacgcgtccgagaagctggtgcttctgcgatcctcataataaacaaccaaacagaactcttcaagatggtttgtgaatcagatgctgatgtaaatataaaaatacctgctgtcatgcttcctcaggacgctggttccaatttggaaaattatataaataataacaccagggtttctgttgcgttttactccccaaagcgtccggcggttgatattgctgaagtttttctgtggctaatggctgttggtaccattttgcttgcttcttattggtctgcatggactgctaaagaagttgctattgagcaagacaagctactaaaggatgcatcagaagaatttctacaagtgggaagtgcaagttcaagtggttttgttgacataaatacaatgtcagcagttctctttgttgtgtttgcttcatgtttcttggtca

SEQ ID NO: 210797 - DNA, 432 bp, Gossypium hirsutum
  unsure (1)..(432): unsure at all n locations
gggctaagacatatagaaagcattgcttagagatttttttttttcaccatggctcatacccgccggttaaatctattgtcacacgtcttattccccttccttctcaggaggagaaggaactaaaggagacgttgcacgaaataattggacaggggaagcacgttaagctggaacagaagatcgatcctagtattcttggtgggcttgtcgtacagtttgagcaaaaggtatttgacatgtccattaagactagggcacgacagatggagaggttcttgcctgagcctatcaactttggttccctctgaacgatattataaccgccaagtgaccatttcagtttccttgtgcaccaattgcgttatttctagaactgcaaaaaataattaatggtctttntgctttgcctctcgtttcttctactcttgacat

SEQ ID NO: 210798 - DNA, 339 bp, Gossypium hirsutum
ctaaaacattactcttttacatgatatcctttattcaatttctcaactccttctctcaaccatcgcttccctgttacttaaattcaccactagtcccctcggagtaccacctttcccactatcatccgacgttggatcattaaacgccttccttttctaaatcgtcattactttctcactgttgtacaccgtttactccacagccttcgatcctaaacaatgcaacttcgtaatgatcgcaccgtttgcgatcggtttaatcgtggcaaccaatattttaactgctagggcattctacggaaccttaatgaacccaaccgtttcatttccaccaacctt

SEQ ID NO: 210799 - DNA, 436 bp, Gossypium hirsutum
attgaccacttgcatgagttgcaaattcttgaacttggttcgaacagattacgggtaagggagaatttgcaaaatttcacaaaattagaagagctgtggctgggaaggaatcgaattaaagctataaacctttgtgggctcaaatacatcaagaagattagcttgcaaagtaatcgtttaacttctatgataggattggaggaatgtgttgctctagaagagttatatttgagccacaatggtattttaaaaatggaaggtctatcaacattggttaacctccgagtattagatgtttcatcaaataagctaacatcagtaaatggcatacaaaacttgacaaggttggaggacttatggctcaatgacaaccaaatagaatcacttgaaagtgtagctgaggcggtttctggttcaagagaaaagctcaccactg

SEQ ID NO: 210800 - DNA, 438 bp, Gossypium hirsutum
gcttccatctccagaagagccgttgctctgcctgtgctttccctgctgcccgtaagaggaaatgtaggtggagtgttaaggcaatccgaagaaagaccactggaactggtaggatgaggtatcttcgccatgttccttgtaggttcaagaccggtttcagagaaggtactgaagcagcaccgaggaagaaggttgcagcagcttcggcttaagttggctatgaggttgttttgatgaatccatctattttagtaaaagttttatgggaacattacatgagaaatgtcatttattgcattggattcttttaaatatttgtagtttctattttcatgtagctgcttaggctattgttgcttgacacttaattactggatatttttgtggacgaagttaatcatgtgcttgtttcggttatgatgcccttcatcttgtttc

SEQ ID NO: 210801 - DNA, 435 bp, Gossypium hirsutum
cggacgcgtgggcggacgcgtgggcgggattacccgctgtgtttaagcatatcaataagcggaggacgaagcgattgctttgactgatagttctgttaatcttgagaacattgataacagaattatcactgaagttttgggtcctgaaaggtacggtcaggttcgatttcaaggatctggtgttaccccgacccaatattttggatccggctcccagcaatacatgccttccgggagtcaagctcaagctgaagttcagaggttaagagaccagatagctcaaatgcaagcgagcaagttgagcaaattgccgaggttcaaagaaaatatgaactccagcaagaacttagagcggatgcagcagtgagggaggcagtggcagtagcgagggaggcaacggcagcagcgagggaggcaaaagcagcagcgatggca

SEQ ID NO: 210802 - DNA, 431 bp, Gossypium hirsutum
actcgtctgaggatttatatgatgcgaaattatgtgtaatatgctatgatgatcaacgggggtgcttcttcttcccatgtggacactgtgcgacttgctatgattgtgctcaaaggattatggacgaagataacaaggtgtgtccaatatgtcgaacattgattcacaaagtaagaagattgtttagtccatacaaatacgtaatgaaatgagattgtatattcatgccagcatggtggctatctaccgaactgagtgcctcgtttaggtttttgtacaaatctgggttctgaagacgaaacccgtgcaagcaacatgtgggcagtcattgtttgtccccatcgtgaaatcatgtgtagatttgcttacaagatcaccgtgtttatctctaaaccttacttggtggacttcgaagaagttaaaaatgagaa

SEQ ID NO: 210803 - DNA, 410 bp, Gossypium hirsutum
  unsure (1)..(410): unsure at all n locations
gcgtaccacggagttcccttttcgtcgctgtctcagtctttgtttacatctccggtggccatgccagcccctcctttacattcggtgctttccttnncngnaacattactcttttacgtggtatcctttattggattgctcaactccttggctcaaccgtcgcttgcctgttacttaagttcgccactagtggcctgggagtaccagctttcgtactatcatccggcgtgggagcattaaacgcgttcgttttcgagatcgtgatgactttcggactggtgtacaccgtttacgccacagccgtctatcctaaacgaggcaacttgtgagtgatcgcaccgttggcgatcggtttaatcgtgggagccaatattttatctggtggggcattctacggatcctcaatgaac

SEQ ID NO: 210804 - DNA, 432 bp, Gossypium hirsutum
taaggaactaactaaatggtggaagaatgcacttgctagtgataatgttgatgaagtgaagatgagcgaccgtttggacaacactccttgtgtggttgttacatcaaaatacggatggagtgctaatatggagaaaatcatgcagtctcaaaccctatctgattctagcaagcaagcttacatgcgcggcaagaggatcctagagattaacccaagacacccaatcgtcaaggagcttcgtgagagagttgccaaggactctgaggatgagggtgtgaagcaaacggctcagcttatttaccagacggctctaatggagagtggtttcaatctacccgatcccaaggattttgcttcacgcatctacagctcggtgaaatctagcctaaatattagtcccgatgcaacaattgaggatgatgatgatgatgt

SEQ ID NO: 210805 - DNA, 435 bp, Gossypium hirsutum
cttgtttaaaatataagaaaaaaaatcatacgcaatgagcactgctggtcaggttattcgtcggaaagctgcggtggcatgggaggcggggaagccactatcgatagaagaagtggaagtggcaccaccccaaaagcatgaagtccgtattaagattctcttcactgctttatgtcacactgatgtatactactgggagtgtaagggttacactcctctgtttcctcgtatacttggtcatgaagcctcagggatcgtggagagtgtgggtgagggtgtgaatgatttgaaacctggagatcatgtgctccctatcttcaccggagaatgcaaagaatgtcgccactgtctgtcagaagaaagcaataacatgtgcgaactgcttaggatcaactgcgaccgaggtgttatgcttgctgatgggaaaaccagatt

SEQ ID NO: 210806 - DNA, 415 bp, Gossypium hirsutum
ttgctcccatatttgtacaagctccatcagttattggttttactggttttatggcccgccccctcatgggaggagtgtctgcacctctttccaagacagctgctgctccaattgagcgggtaaaacttctaatccaaaatcaggatgaaatgatcaaagctgggcggttgtctgaaccatacaagggaattactgactgctttgccaggactattaaggatgaaggtgtcatttctctttggagaggcaacactgcaaatgttctcagatacttccccacacaggctttgaactttgccttcaaggattatttcaagaggatgttcaacttcaagaaagacagagatggctactggaaatggtttgcaaggaacttggcatctggtggtgctgctggtgcttcatcacttctttt

SEQ ID NO: 210807 - DNA, 429 bp, Gossypium hirsutum
ttcacttgatccatcatataatgataagttacaaatgcacttctatgaaacttgtccttgtccgaaatttgctcattttacagctaatcaagccatattggaagctttttcaatggctaatagagttcatgttattgattttgggctaaaacaaggtatgcaatggccagctttaatgcaagcacttgcattaagacccggtggaccaccggcgtttcgattgaccggaattggaccacctcaaccggatgatactgatgcgttgcaacaagtggggtggaagctagctgaattggccgaacgcatcgggatcgaattcgagtttcggggattcgtggctaataatttagccgatctcgaacccgaaatgctcgatattcgtcctcccgagattgaagtagtagcggtgaacgctgttttcgagcttca

SEQ ID NO: 210808 - DNA, 437 bp, Gossypium hirsutum
gcttaaaacgatcgagccacagttttaagcttagcggttagagagagagagagagatgcgtgggtgcagcggcatggcatcggctgcctcggggttcttgttaatgcccaatctcaccggcactgctgcttctaagactaataacatcagcatgctcttttccccttccagaaacaactactacaatagctcaaggctcgtcgtaagggcggctgaggaggaggcttcgccaccagcaccaacaccagcaaccaccactgcgccaccagaaggtggtgaagctcctaagcctaagccaccaccgattggaccaaaaagaggaaccaaggaccccaagactcggtacccggtggtggttcgattcaacaaagtcaactatgccaatgtatctaccaacaactatgcactggatgagattgaagaagttaaatgagatt

SEQ ID NO: 210809 - DNA, 384 bp, Gossypium hirsutum
caatctatggctcaactagggtcgtctctgtcagcagaaaccgagacactgagcaatgtcctaggcggggtggaggccttcagagcatttgattcaaacaacgatggcgcaatcaatgctgcagagctagggggaatcctgagttcgctggggtacaacgctagcgagcaagacgtgagggccatgatgcgagaaggggacgccaacaaggacggattactgagcatggaagagttcctagagatgaacaccaaggacatggagcttggggagcttgccaatttcctcaggaccgctttccaagcttttgaagtcgaaggggatgatgctttgactgctgccgacttgtatgaggttatggggaaccttggcatcgatcagctt

SEQ ID NO: 210810 - DNA, 413 bp, Gossypium hirsutum
cgcacgcgtccgctccctttcgatgatagaaaccttgcttttctttatcaaaagattcccagaccggatcctcagatcccgaaatggttgtcacctggggctcggaacatgataagaaggattcttgacccaaaccctgaaaccaggataacaatgacgggtatcaaggaagatgactggttcaagcaagactatactcctgctgtacctgatgatgaggaagaagatatatatattgatgatgaagctttctcaatgtgtgaagtgggttgtgatggaggtaggagtcaagaatcacctactctcattaatgcttttcagttgataggaatgtcatcgtgcctagacctttctggtttctttgagaaggaagatgtatcttaaaggaagatcagatttacctcaaatcgttc

SEQ ID NO: 210811 - DNA, 432 bp, Gossypium hirsutum
cgaatttctcagcaaccaaacaaaatcttccattgtcttctagaactttccaagcacactagaggtagtcaatggctcgtacaaagcaaacagccaggaaatcaaccggtggaaaagctccacgtaagcaactggcgacgaaagccgcgaggaaatcagctccagccaccggaggagtgaagaagcctcaccgtttcaggccaggaacagtggcgttgagagaaatcaggaagtaccagaagagtaccgagcttttgatccgtaaacttccgttccaaaagctagtaagggaaatcgctcaagatttcaagacggatctgagattccaaagtagtgcggtggcggctttacaagaagcggcggaagcttatctggttggcctgtttgaggataccaatctctgtgctattcatgccaagagggttactatta

SEQ ID NO: 210812 - DNA, 428 bp, Gossypium hirsutum
gtaaaagtaccacacaatcaaaatcaggcttctcatcattttttatgcttttctcttccgaccgcattataacaacgctgctcctatgggtattattctttggagattcattttcatattatggtatcatattgcttacctctaagctaagtagtggacaaagtacatgtttcccatctctccaaagcaatataaatccccacgatgatggtctctacctaaatgcattcatcaccagtatggcagagctacctgggcttcttctgtcagcaatattgcttgatagggttggccgcaagcattcgatggcaattatgttcggcttagcatttattttcctcacaccactgctaatccagcaacctgctgtgttaactacttgcttattatttggagctcgcatgaatgccatgggaacctttacaatt

SEQ ID NO: 210813 - DNA, 437 bp, Gossypium hirsutum
  unsure (1)..(437): unsure at all n locations
ctttgatgcanaatcctctatcatctggccaactgctttccaatgctgtattgcctattgctggtcctggtgtacatggtgtctcaatgcctgggactgcagcagttgttcctggtagtgggctgtctggtcttccaaatgaagaggctgctcgaaaagctgcactgcaagctgctctcaatttacagcataacctagcaaagattcaagctgatgttatgcctgaacattatgaagctgagttggagattaatgaattcccacaaaatgctcgatggaaggttacccacaaggaaactttgggcccaatatcggaatggactggagctgccattactacgaggggccagtatttcccacctggtcggatcccaggaccaggagaacgcaagctttacttgttcattgaaggacctactgagttatctgttaagaga

SEQ ID NO: 210814 - DNA, 441 bp, Gossypium hirsutum
cccacgcgtccggctgatttcggattagccaaattcttggtggatggaggtgcatcggagtgcgggtgcgccattgcaggatcctatggctacattgctcctgaatatgcatacacgttgagagtagatgaaaaaagtgatgtgtatagtttcggagtagttcttttagagatgatcaccggacgaaaaccagtgggtgaatttggagaaggtgtagatatagtacaatgggctaaacgatcgacaaattgtcgaagagaagaagttagtaacatcgtggaccggaggctaacatcagtgcctaaagacgaggcaatgcacttattgttcattgcaatgttatgcgtacaagaaaatagcatagaacgtcccaccatgagagaggtagttcaaatgctatcggagtttgctcgacattcacttgactcccaatcttcatct

SEQ ID NO: 210815 - DNA, 406 bp, Gossypium hirsutum
gcagcaaatatggcagggtgaagcatatatatgtagacaagaacagtgccggatgcgtctatcggcgatttgactccgcagaagcggcaggtaaagctcaacgtgcaatgcacatgaggtggtttgcaggccgatcaatatcagccttatttatgcaaccccaggagtacgaagcgaggtttaaatgctgaagcagaagcaatattggatttgtttgttatgatatgatgtgtgttgatgggtggtagggtattacttttgaagacgcgttttattctgctgagtttagaattttattattataagcatagtacacaacgacctaattgtaagataaatgttatttgctaactcatttttttgttctgtaataacgatagaatttcggatgtctttatgattcaaa

SEQ ID NO: 210816 - DNA, 426 bp, Gossypium hirsutum
  unsure (1)..(426): unsure at all n locations
gacccacgcngccgatcaggcctggataatggaaatggcttctcatgttaaatccatagacagaaaccacttgcccgccgctggtttataaggattttatggacaatcaactcctcanaagaagaggctcaatcctagcttggatattggaacagatttcattgcaaataatcagattcctggcattgattttgccacagtccactcataccctgaccaatggttatccagttcaagtgaacaatatcagctctctttcttgaacaactggctcgatgcacacatccgagacgcgagaatcatcctccgtaagccgatactccttgccgaattcgggaaatcgtggaaagaccctcgtttcaacacttaccagagggaccaactgttcaacatcgtctacaacaaaatatactggtcggctaaaac

SEQ ID NO: 210817 - DNA, 349 bp, Gossypium hirsutum
  unsure (1)..(349): unsure at all n locations
cggacgcgtccgcccacgcgtgcgcccacgcgtncgaacgtatcgcctgaattggacccggaggtgggcttgagttttttaaacagtatggggaaattgaagaaggtccaatggggcttgataagcagacagggaaacctaaagggtttgctctttttgtatataggtcggtcgagagtgcaaaaaaagcgttagaggagcctcataagaattttcaaggtcatgttcttcattgccaaaaggccattgatgggccaaaacagactaaaggtgtttctggtgggcatcatcagcagtatcagcatcatcaccaagggcaacatcagagccagtctcattaccatcatgc

SEQ ID NO: 210818 - DNA, 356 bp, Gossypium hirsutum
  unsure (1)..(356): unsure at all n locations
nnccggcgatgggtttggatctaangcgatatggttatctcttccatacaagcgacacgcttattacttggtgaggtggtatttacagcagcgtggttatggaatcacttggcaaggagtttgacctggatggtaaccgggtaaatcaaggaatatctgtttatgggaataaaggaagcacagatcagcatgcggaacaagatcagctctatatgcaaaataccgagagttccgttcttgtaaccgccaaaaagggacaccttaaattggtggggcctctgtaactttttattaaccaacaagtggactttattccttaattggccacattaatgcttaacattaaactggtgggg

SEQ ID NO: 210819 - DNA, 295 bp, Gossypium hirsutum
  unsure (1)..(295): unsure at all n locations
cgcgggcgggtgattttcggacaattctcnaacgtatttgcaattcaattnaaaatcattcaccccgcccatttttaaaaaanttctaaccctcatatacannaattcttctcaaaattctctgttgccgaaatccatgattcaactgaagactttgacccttctttcaacattgcataaggagcatatccgaacgtttatagatatacccttcgtcacacttaaattgctataaaaatgctccatcaaaataacttacaaaggcccttgcaatttcaaaaagaaggtgatattt

SEQ ID NO: 210820 - DNA, 367 bp, Gossypium hirsutum
aaattcatctgatctactttctattcactagtatacgcaaaactaaccgcccttggcttctctccaacagaaatggcacccgcttccttccatcacgagaaagtttgcgtgatggatgcctccggtcgcctgggctctaccctggttgaacgcttgctggaaagaggctacattgtccatgctgctgttcaaggccatgttgatgatttgaaactgaatggggtagctactgaaagggaaaagaagctcaaggttttccatgcagaccctttcgattatcagagcattaccgacgccctgaaaagctgctctggtttgttttacgcctttgagcccccacaagaccaccctgcctatgatgaatata

SEQ ID NO: 210821 - DNA, 399 bp, Gossypium hirsutum
ctttttaaaaccattattcttatgtggtttgctattaggcgtgcatctcgtgatataatcgtgctatcaagttactctccgtttgtgaaatatacacctcaatgcaaatggctcgaggaagaattaaacagggttgacaggaagaagaccccatggctcattgtgcttgtgcatgttccgatctacaacagtaacgaagcacatttcatggaaggtgaaagtatgcgagcagtgttcgaagaatggttcatccatcacaaagttgatgtaatcttttctggtcatgtccatgcttacgaaagatcctatcgaatctcaaatataaggtacaatgtatcaagtggtgaacgtttccctgtaccggacgaatcagctcctgtttacatcactgttggagat

SEQ ID NO: 210822 - DNA, 337 bp, Gossypium hirsutum
  unsure (1)..(337): unsure at all n locations
aaattaaaaacattccattacgccagcaggagcttgctgcctacttaacccactgcaaccttcaattaccacacctaagacttgccctgctgaatgcaatgactgtctgctacaaggcaaagaacctggctacggcaggtaactttgcccggcgactgctagaaacaaaccccacaaatgagaatcaagcgaagacagccaggcaagtacttcaagctgctgagaggaacatgacagatgcttctcagctgaactatgatttcaaaaatccatttgtgacatgcggngcaacttatgtgcctatttaccgagggcagaaggatgtatcgtgcccata

SEQ ID NO: 210823 - DNA, 366 bp, Gossypium hirsutum
ctgaggcatatttcaggtggcaaacttctgttagagctcaaccgagtcctccgacctggtgggtacttcatttggtctgctactccagtttaccagaagcttcctgaagatgttggcatttggcaagagatgtctcgactaacaaaatcgatgtgctgggatctggtgactgtcaaaaaggacagattgaatgctgttggagctgcaatatatcaaaagccagcttccaacgactgctactacaaaaggtctaaaaatgcacctccactttgtgaagaatctgatgatcctaatgcagcctggaatgtatcccttcaggcatgcatgcataaagtgcctgaagattcaacagagcggggatccctt

SEQ ID NO: 210824 - DNA, 203 bp, Gossypium hirsutum
cgcgtccggtcaggcgtaattacccgctgagtttaatcatatcaataagcggaggctttatgactgacgctcttgcttttaccggttcctgtacataaataatcccttttttctgccctctcgtatgaatatttgaacagttgcctttaagttgcaatttgctatgctatgatctttttcataaaaaagacaaattaaatact

SEQ ID NO: 210825 - DNA, 303 bp, Gossypium hirsutum
cttccgttaattttttttttgggactcctgtaattgaaagttgaaaaagccacgatgcatccggtgggtgcggttttggcggcgaggatgctatttaacacggcggcctcggtcagtgaatccgtcggagaagggattccgttcggatctccatggtggtttatctacgccgggatttcttgttttttagtacttttcgcggggatgatgtcgggtctcaccctcggactgatgtcgcttggtctcgtcgaactcgaaattcttcaacggagcggcactttcaccgagaaaaaacaagcagct

SEQ ID NO: 210826 - DNA, 371 bp, Gossypium hirsutum
gctgatctcatgtcaactatttggaaacaaatggctgatgctgggatcaagtacattgcgagcgacactttctcttactatgaccaggtgcttgatgccacctcaatgctcggtgctgttccaccgagatatgggtggaacggaggtgagatcagattcgatacttacttctccatggctaggggaaatgcctctgtgcctgctatggaaatgaccaagtggtttgacactaactatcacttcattgttcctgaattgacacccgatgttaacttctcttatgcatctcacaacgcagctgatgaatacaaggaaacttaatcgcatggagtcgacactgtacccggccttgatggtcctgattcatactt

SEQ ID NO: 210827 - DNA, 405 bp, Gossypium hirsutum
ttcaactccaaatcttgcttgtcatttggatcttcaatccgcgtacctgcatcttcagcacctcagtggcctaatgatgggaaacaaactacagtcttcgcaagccatacgcagcttaacgaggttgctgcagagaaatcatcgaattctgtagcggttgttgacatgaaacctaaagttgcattgcctgaggaagatgataaaaaatccgcagagaaggctattccagatgctgcggcaatttcagaattcatggcacaagtttcagaccttgtaaaacttgttgattcacgagatattacggagctgcaactgaagcaatcggattgtgagcttgtcataagaaagaaggaaagcttgcagcagctggaatcagcatctccaattgtcatgcagcagtacatg

SEQ ID NO: 210828 - DNA, 285 bp, Gossypium hirsutum
cttccgccaacccctccgccaacccttccggtcggatgtgatgaggtttttacagagggtgaggcgcggggaataccgccagcatccatcaattgttagggtcaaccatcctactcgccctgacaaggcacgccgcttgggttataaagccaaacaaggttatgtggtttaccgtgtccgtgttaagaggggtggtcgcaagaggcctgttcccaagggtatcgtgtatggtaagcccacaaaccaaggtgtcacccaattgaagttccagcgcaacaaacggtc

SEQ ID NO: 210829 - DNA, 416 bp, Gossypium hirsutum
  unsure (1)..(416): unsure at all n locations
cttccgcggccccttggccacttttccattaaccctttcacttgcaaaacccttcctaactttcccgcttgttttccgcgtagtatatcaaatggaaagagtgacaaagttggcatccgagaagccagtggtgatcttcagcaagagttcgtgttgcatgtcccacaccatcaaaacccttttctacgactttggtgtcaaccctgcggttcacgaactcgatgagatttctagagggcgtgaaatcgaacaaactctttcgaggcttcgttgcaacccttctgtcccagccgtcttcattggtggtgaattcgttggtggagctaatgaggtcatgagtcttcatcttaatcgatccttaattccaatgcttagaaagttggggcactntgggttaatccaaaaataatccacta

SEQ ID NO: 210830 - DNA, 309 bp, Gossypium hirsutum
gagaattctggagccttctttattttctctaaatctcagtcatccattgaacaatgtcgcttataaattatatcccaaacccaaatcctttccctcaagcaatttgagtgattctttctttttcttgtggtctccaaagcatctctgttatatcggttattttctctcaagaactgacgaaaaaatccgaatagattaaaacttaagaaagatcaaaagatgttcggaagagcacctaagaagagtaataacaccaggtactatgagattctgggtgtttcgaagaacgcttcccaggatgatttgaag

SEQ ID NO: 210831 - DNA, 352 bp, Gossypium hirsutum
cacggcaattagcaggcgatttacattcgagtaacccaaaatttcgggggtggatccgcctccgcctgcgaacagttgtcaccggaatcggaaattcagataagtgaagatgaatggagaagtccccaacataaagaaatgggttgttttctatcctgtttatattaattcgaagaaaacagtagctgagggaaggcgaatcagtttggctaaagcctgtgaaaatcccacttgtgttgaaattgctgattgctgcaaccatctcaaagtccctaatgccattgagattgataaggcgtaccctcgtgatttcatgcaaagagggagagtgagggtccaattgaaaaaggaa

SEQ ID NO: 210832 - DNA, 308 bp, Gossypium hirsutum
  unsure (1)..(308): unsure at all n locations
ctgaatatggtgttgttccnataaaggttaaacacatgtttgatgtctgttaagtctcggcatatgttgattgtgagcgggtaacattggtgtttatgttttgagtacatcttagatcttgttagatctgttggatttataaacaaagtgcttatggaatttgttcatctcaattatacaccttgcttctttttttttttttttttttttgactttcttcaaagattcgtccattgtggaggcattacttccaaaacacacaaggactcatttttgtggttgatagcaatgatcgtgatcgtgtggtc

SEQ ID NO: 210833 - DNA, 442 bp, Gossypium hirsutum
tccgggaacccttattgttttatggaatgttgcaaagaagtgtttcacggttggggttatctggcgtacagtttcagatctatttgccagtattgtcccagtccggggtgcctcaatgtctcccacatttaatcctaaaaccaattccttgcttgattcattgagtgatgatcgtgttctggtcgagaagttgtgccttagaaagtacaaattttcacacggtgacgtgatagttttctgctctccggataatcacaaggagaaacatataaagagaattgttggcttgccaggtgattgggtcgggactatttacgacgtggtgcatattccagaaggacattgttgggtcgagggagacaactcagcttccagcttagactcgaggtcttttggccctgttcctttgggtttggttaaaggaagggtcacccatattttg

SEQ ID NO: 210834 - DNA, 380 bp, Gossypium hirsutum
ccaacccgtccgcccacgcttccgcgaatgtgatgtttagatacggttatttgatccgcggttaaggattgtgaatttaactgtaaaacttgatatttacatgctactgcatggtggtttgactgttcagaaggtgcgcgagctgctctgaatcatgcagggactatgcttggattctacccagttagggtgctaccttcgaaaacagctattgcaccagttaatccaacatttttgccgaggaatgaagatgaacgccagatgtgtgcaagaactatctactgtacaaacattgacaagaaggttactcaagctgatgttaagctcttttttgaaacagtctgtggggaagtttatcacctgaggttgctgggggacta

SEQ ID NO: 210835 - DNA, 365 bp, Gossypium hirsutum
ggttgaaacaaaatcttcaacggagccaaaaggaagatcatgccagacgcgggtcagaggcgcagcagcaaatctattcctcaaaacttcttcaagctttgagtcaggtcagtctcggtactccctctccttcggctccacgcggtggtcgagctgtccgtgaagccgctgatagagtgttggcggttgctgctaaagggagaaccaggtggagccgggccattttgacgagccggcttaaactgaaatttagaaagcagaagagatcacagagaggatccgctgctgccgttgctgccgcaacaaggactagccggtcgaagaaaccgagagttagcgttttgaaattgaaagcgaaaagtgta

SEQ ID NO: 210836 - DNA, 282 bp, Gossypium hirsutum
aaatacaactcttgggttacacaaactcgttctcaagtactctttgaagctccaaagcgtaagttgattatcattgccaacaactgccctcctcttaagaagtcggagattgagtattatgccatgttgtgcaaggttggagttcaccactacaatggaaacaacgtagacttgggcactgcttgcggcaaatactttagagtgtgctgcctcagcattattgaccctggtgactctgatattataaagagcatgcccggtgatcactaaactatgggggga

SEQ ID NO: 210837 - DNA, 449 bp, Gossypium hirsutum
  unsure (1)..(449): unsure at all n locations
gaaaacccggggcgacgcgcacgcgtccgctctnctncaattgaaaaggagaaagatgtacacaagactgtataaatatacaacccgccccgttctgcttgcggtcgtgtaccanatatgattgcaaagaaatatgtgccgacactggatttgcagggaagcttaatttaacgttagatctgaattctgaatagctgatgtgagtgctataagtaatgctgattcatgcaagctaaaatagttttattgttgtccatagatttattacttgtaatgctgggcagtcatttgcatgcttcctgactcctggaatgaatattcagcttattggagacgctaatgattttggaggaaaattattttttactgaaatgctacctttcgttttctgttgggaataaaaaaaaaanaaannttaataaaaataatattaaatttataaataaaat

SEQ ID NO: 210838 - DNA, 311 bp, Gossypium hirsutum
  unsure (1)..(311): unsure at all n locations
tcggcgagccccggccgaaccgcccttcgttccaattcttggtggtagtaccaaatattcaaagaagaactttaaaggccgaagaggggaaaggttccatgtgaacggcacttgcacatgggttagtcgatcctaagagacggnggaagcccgtccgacagcgcgtncagcgcgagcttcgaaagggaatcgggttaaaattcctgaaccgggacgcggcggctgacggcaacgttagggagtccggagacgtcggcgggggcctcgggaagagttatcttttctgtttaacggcctgcccaccctggaaa

SEQ ID NO: 210839 - DNA, 323 bp, Gossypium hirsutum
ggcggtggattgtaattaaacaattcatttaaaaaaaaccaacactgggtcacgggaagatcgacgtctgattatcgagaacgctacaaacaggcaagtcacttattcaaaacgaaggaacggtttattcaagacagcccaagagctcactgttctttgtgacgcccacgcttcattgatcatgtactgcagcactggcaaattccatgagtttcttagccccaacatctctacaaaagggtgtttcgatctttaccaaaagaccacacggatcgatctatggaactcccattatgaaagaatggaataaaactacaggagct

SEQ ID NO: 210840 - DNA, 402 bp, Gossypium hirsutum
ctgatactccttttgagaagaggatggatagatattccatgtcttcttctttgcccccgcatttatagattcattggttttcaattatcaactcttgtgtgacggttctccttttgactggtttccttgcaacaattctcatgcgggtcttgaagaatgatttcattaagtacggtcaagatgaagaagcagctgatgatcaagaagagactggatggaagtatattcatggagacgtattccgtttcccaaagtacaaatctctctttgctgctgctctcggatctggaacacagctgttcactttaacggtcttcatttttatgcttgcactggttggtgtcttttatccatacaacagaggagctctatttactgccctggtggtaatatatgccctta

SEQ ID NO: 210841 - DNA, 216 bp, Gossypium hirsutum
  unsure (1)..(216): unsure at all n locations
gggggaagaggaaaatcctttaatgccggttcaaggtccggcttggacgtgtctaatatgttggcggggtggcatacntttaacacattgccgtttgctgggaaaagtgcggtttatatcgatgatagagcgaccgtgctgcctaggaagttggagtggtcgggattcgttttgaattctangttgcttttggaaagatggagataagccggaatg

SEQ ID NO: 210842 - DNA, 315 bp, Gossypium hirsutum
gtccgggaaagatgtcagcaggagctgaaaaaggctgccatggaatggggtgtgatgcacctgcttaaccatggcatctccgaggagctcatggatcgtgttaggaaagttgggcagaaattctttgaactccctgtggaggagaaagagaagtatgccaacgaccagagctctgggaatgttcagggctatggtagcaagcttgctaacaatgctagtgggcagcttgagtgggaagactacttcttccatcttatttttcctgaggataagagagacttgtcaatttggcctaaaatccccagcgaatacact

SEQ ID NO: 210843 - DNA, 427 bp, Gossypium hirsutum
  unsure (1)..(427): unsure at all n locations
gaaaagctttcacttgtcctccctgaaacacccccttatgttccaaggcagtttggccgctgtgctgttataggcaactctggggatcttctcaaaacgaggttcgggaaagagatagatagctatgatgttgtcatcagagagaatggtgcccctattgagaactatacagaatatgtgggcaagaaaagttcatttcggcttcttaacagaggatctgccaaagctcttgataaagttgtagagttagatgaaacaaggcaggaggtcttgatagtcaaaactacaattcatgacattatgaaccagatgattcgggacattccaataagaaatcctgtatatctcatgctaagtgcatcctttggttcagctgcaaaagggacagggcttaangctcttgaattgctctctctatatgtgattc

SEQ ID NO: 210844 - DNA, 318 bp, Gossypium hirsutum
gtagttgttcaatggctcgacccccgattagacaaggatgtcgcatctccacaagcccgccacgatcagctcaatggtttgggtgctgattgaattgcagtgctggagattcaaccccaccagggtcttgcccaatttttttaggaaggtcatgcttttgtttgatactcctgaacaacctgaaaacgaaaggacttgcaagttgagttgctctgcgtgagacaaggctgcaataccgacatcggtgattgcacaccttgacacatccaagtcgctgaggaaaacacaattttctgcaactgcagccaaacttgcatc

SEQ ID NO: 210845 - DNA, 406 bp, Gossypium hirsutum
  unsure (1)..(406): unsure at all n locations
ggtgttccaatntaaaattggcattgcaggggataaataagatattggagaccacgggaccgcagctgaatcttgattattcggaatggacgcangagttaaacgagcagaagctgaaattccctttgagttacaagacctttggtgaagctattccacctcaatatgcaattcacgttcttgatgaattaactggcgggaatgcaattataagtaccggtgttggccagcatcaaatgtgggctgctcaattttacaagtataagaagcctcgtcaatggttaacgtctgggggattgggtgctatgggatttggattgcctgctgctattggagctgctgttgcaaacccggaggcagttgttgtagacatcgacngtgatggaagttttatcatgaatgtgca

SEQ ID NO: 210846 - DNA, 309 bp, Gossypium hirsutum
  unsure (1)..(309): unsure at all n locations
ggctgangaaaaaggtgctagtgtgttgtttctaggcctcatgaatcagggtgaagacgtaaacatgtacagtgaggtgtatgtgaagaagcatcctcagttgaaagtgaagttagtggatgggagtagcttggcagttgcagttcttctaaatagcataccaaagggaacaacccaagtactccttagaggcaacttgactaaagttgcttttgcagtcgcctttgccctgtgcgaaaagggcattcaagtcactgtattgcgtgaagatgaatatgagaagcttgataagtcacttggcaccaaatc

SEQ ID NO: 210847 - DNA, 428 bp, Gossypium hirsutum
  unsure (1)..(428): unsure at all n locations
gtccgaacaagtccaatctgttgtggatggggccatgctgatgtgcactgcaactgatatggcggggctttgtgggggtaatggggaggtttgctattccaaatatggatcatatccattgagagggaaatattgccacgaaatggctttgaggatcctcctagcctgcattgagagtcatgcgaaccggtacaagcgttatattgttcctgttctctctgttcagatggacttttatgtccgtgtttttgttcgtgtatacacttctgcaagtgcaatgaagaatactccccttaagctctcatatgtctatcaatgcattggttgtgattcttttcatctacagcctattgggagaactgtttctaagaataccagtgtgaggtatctcccangctttgcacctgttgtccctcaagagtgtagtg

SEQ ID NO: 210848 - DNA, 444 bp, Gossypium hirsutum
  unsure (1)..(444): unsure at all n locations
ctaccggttgcttattccaaatctttaaaaccctgttcctgttcccaaggaatacgttcacatcccgattcattatcggaacggtgggaaaagcctgaccactgttcagggattgaagaaagaatttagctataacaaaattctcaaggacctcaagaaagaaatttgttgtaatggcactgttgtccaggacccagaattagggaaagttattcaacttcaaagagatcagaggaagaacgtctccactttcctcgttcangctcgtattgtgaagaaagatagcatcaaaatccacggtttttaagtcttagctacgagagtttcccggagaattaaaaggtctatcatgttctaagccggaagagctacccgatgaagtattagttatataggtggtgtcatattatctataatgttaagctgatactctgatatattgca

SEQ ID NO: 210849 - DNA, 400 bp, Gossypium hirsutum
  unsure (1)..(400): unsure at all n locations
gcgcccacgcgtncgtgcttgggtatgtgaccaggatgcctatgcatgcagtggtcagaaaggctgagctcaatcaatactattcatgcatgagaattggtcaacgagttcactcatatctaaaacaaaagatcttgctgagagaaggaagttagcagatttaactgtcggtcctgtccttactgtcacaactgaagcaatgttggagcacaaaaagaaattacttcaaatttcagaaattttcgggccatttcagattataacggattataagaaagatcaattaccaatggtattggatgctttggaacgaatgcatgcacatctaaccgctgcttgtgtctcaaatgatcccttcttcttgcaagatgtgatccgaaaaacggtgaatgggacaacc

SEQ ID NO: 210850 - DNA, 377 bp, Gossypium hirsutum
  unsure (1)..(377): unsure at all n locations
gcggctgttttgtatttcatcttgtcttttccttttccttttttcgccggcattgtttgaacatgccgttgtgcgcccgtcaattccagttaaatatggtgacttttgtttttcaaaaaaaaaaaaaaaaaaaaaaaaaaaaaaaaaaaaaaaaaaaaaaaaaaaaaaaaaaaaaaaaaaaaaaaaaaaaaaaaaaaaaaaaaaaaaaaaaaaaaaaaaaaaaaaaaaaaaaaaaaaaaaaaaaaaaaaaaaaaangggggggcccttttaaaaaaatcaaattttatttacccgtgaatgcaaataaaaaattttttttaagggaaacaaaaaaaaaattaacgggccgcgttttaaaaacgtgggaatggaaaaa

SEQ ID NO: 210851 - DNA, 376 bp, Gossypium hirsutum
ctgttgaaaaacctgcactgcagccaagcttttgaagtaaaactcattaactgttggcgattcagaatccagattttccttcggcaaacatttttccacattagaagcaacatcagcaactccattaggtagcctagttcgtgccatcaacaaatgctttgcatcatatgagggctgaaggaataaccagcttgaaggatttgatatctccataatttcaaacttgtgtctatgtagcccagtgctttctaacagctttagaagttcagacaacgccctcttcttcccttgacttctgttaacatccatccaaaagtcaccacaatccatagtcgttctacctattttttcaagtgtgtgccacaaatcattccac

SEQ ID NO: 210852 - DNA, 415 bp, Gossypium hirsutum
  unsure (1)..(415): unsure at all n locations
gccgagtcaagttctcgcccaccgcctccgctgatttttgccggatctgtcccgtataccgtgtcggatcgtgtcgacacgagtactcatcccaaattgctctgagcccggattgttgtttggcaatttcttcatggttcaaatggttcagatgtgctagcaacaaaataggccttgtttttcatcgtcttgtttcagtatatccctcgatttcttagagttatacacttaacatcagaaatgaaaaggacaacagatgtctttgctgaaactgcttgggctggagctgcatattatttggtattatatatgctttgtagtcatgtgagaagctgcccattgtgatattgagagctgagcttgaccatttggcttccctagcagttntaaaacagttaaatgacatcttaagtgc

SEQ ID NO: 210853 - DNA, 270 bp, Gossypium hirsutum
ggcgtgtccatggcttggattattatggactgattgaaacgggcgaagccaacggacgttgggcatgtgtgagaagagggaaagggttctgatgtgactatcaatggatctgagggggagaaaaaccttgacacacactggcaagagaggttgaagggtcaagatcctttagaattaatgacggctaaggagaaactaaatgctgctgctgttgaagctttggatccttttgtcctgaaaatcaaggatgaaaagtatggttggaagtat

SEQ ID NO: 210854 - DNA, 380 bp, Gossypium hirsutum
ggtgagtcaacacagcaagtacttttgctttttttgtggaaagtatgcagtgaagagaagagctgtttgaatctggggctgcacggattgcgggaaagttaaagctggtggtgcttatactttgaacactgccagcgctgtgacggtgaggagtactattagaaggttgagggagcaaactgagagttgagctgctgctgactacgttatgttcacaactttggtatgatgttcgtgtatgtgttggctacaaaccagttgagtcattttgttgacaattatggcgcttagttcttaattttatatcttaactctggtgctggagctttatttaaagttaaaatattttgagtatttctaggtttcatgaaatgtccttg

SEQ ID NO: 210855 - DNA, 306 bp, Gossypium hirsutum
cccacgcgtccgctcagattccatcctacttgaacggcgagttccctggtgactacggatgggacactgccggtttgtcagctgaccctgaggcctttgctaggaacagggctcttgaggtaatccatggaagatgggcaatgctgggagcactaggctgcatcaccccagaagtccttgagaaatggcttaaagttgacttcaaggaaccagtatggttcaaggcaggagctcaaattttctcagaaggtggcttggactacctatgcaaccccaaccttgctcatgctcaaagcattctcgctg

SEQ ID NO: 210856 - DNA, 408 bp, Gossypium hirsutum
aaggcatacttggggcgtccctggaaacaattcgctaggtctatcataatgcaatctaaaatcgacgacatcattcaaccagagggttatgccccaatgacaggtaccataggaatagacacttctttcattgccgagtttggaaataggggacccggtgctgataccagccgtagggtagcatggaaaggtataaaaaagatagatataaatgaagccaacaaatggactcctcgcgtctatcttgaatctgagacttggattccgagttccggcgttccctatagtcccaacatggtccctggagtttaaacagcttattattgataccaacgccattagtatgcttattatcatatcattgttctaattatgtcgtttttaactaattaattaaacagttttttt

SEQ ID NO: 210857 - DNA, 442 bp, Gossypium hirsutum
  unsure (1)..(442): unsure at all n locations
tttgatttgtttctaaggatttaatctctaaaccttcttcccatttcttcattacattgttcaagaacaaacaaaaaaaaaaaagaagcaaaaaaacatggccaaagttctgttgttcattgctctatgtgtgcttccagctttggttagtgctacacgcattctgaataaccaattggtggttgaaggctatgtgtactgtgatacttgccgtgctggttttgaaacccctaagactagaaggctagctgatgccatggttaagctggtatgctccgacaggaagaccggcggagttgttttcgagaaggagggatataccgacaaaaccggaaaataccagattcgtgtatccgaggatcacttggatcagatctgtgatgcagttcttgtgaagagcccncagcttggatgtgccacaatgtcccccggtcgtgaacgt

SEQ ID NO: 210858 - DNA, 388 bp, Gossypium hirsutum
agtaactataaaaagagtatcaagaaggaagcttgctggaccatctcaaacatcagtgggggaaatgtagatcagatacaggctgtaatcagcgctggcatttttgcccctctagtccatctacttcaaaacgcagagtttgaaatcaagaaagaagctgcttgggcaatttcaaatgctacctccggcggcacccacgaacagataaagttcctggtgagccaaggttgcattaagccattgtgcgatcttctaaactgtccagacccaagaattgtgacagtttgtttagaaagccttgagaacattctgaaggttggggaagctgaaaaaaatttgggtcacaccggagaggtcaatctctatgcccagttaattgatgatgctg

SEQ ID NO: 210859 - DNA, 423 bp, Gossypium hirsutum
gtaattttcttcctttctgccaaggctgccgcttgggagacaggatgaagaccattctttcttccgagacgatggacatccccgatgggattagcatcaaaataaaagccaaggttatcgaagttgagggtcccaggggtaagctcatccgcgacttcaagcacctcaacctcgacttccatctcattaaggacgaggagaccggcaagcgtaagctcaggcttgaggcttggttcggctccaggaagactagcgccgccatccgcaccgctctcagccacgtcgagaacctcatcaccggcgtcaccaagggataccgttacaaaatgaggttcgtctatgctcactttcccatcaacgcctccatcactaatgccaacaagtccatcgagatccgtaatttcctggcgagaagaagtgcgt

SEQ ID NO: 210860 - DNA, 423 bp, Gossypium hirsutum
tgcttttccattttttacttactggagtatttctggctacatgttgttggttcttgacaaatgcttaccttcgggaagaggctccaaatagtcatgttgttgaacaacgggttgaatggctgtatgcatttgatgtgcactgcaattctttcttcccgatgtttgtaatgctttacgtaatacattattttgtgtcaccgcttctggtagcccatggttttatacctgaacttctgtccaatctgctgttcatggtggcagcttcttactatcactaccttaactttttaggttatgacgtacttccctttttggagagaacaacctttttcctctacccaattggtgtcataattgttctatcccctatcttgattttaagtggcttcaatccttcaagatattttatgaatatgtatttta

SEQ ID NO: 210861 - DNA, 433 bp, Gossypium hirsutum
agaggatccatgcttcgactcttctatgaatggtgaaaatcagttaaatctgctagatgcaaatgaagggcaaaagtttgagattttggagctagagagtcagattgagaagaacaacttaattttgaagtctttgcaggatcttgattctacattcagaagattagatgccttagaacagattgaagatgcattgacaggcttgaaagttattggctttgatggaaactgcattaggctgtcgttacagacatatattccaaaagtagagggtgttttgtgccaaaacgtgagtgaggatatttctgagccatctgaaatgaatcatgaattgctggtagaaattgtggatggaatcatggaggtcaagaacgttgaaatgttcccaaatgatgtttacataggcgatatagttgacgcagcaaagtctttc

SEQ ID NO: 210862 - DNA, 419 bp, Gossypium hirsutum
  unsure (1)..(419): unsure at all n locations
gcctcccagtcttgatgatgatggtttgattagtttgttttcagcttatggtgatattgtgatggcaaaggtaatcaaggaccgggttactggactgagtaaagggtatggttttgtgaagtatgctagtgttgacatggcaaacaatgctattaagggaatgaatggtagtcttctagagggaagaaccattgctgtgagagttgctggcaagccaccacaacctgcagtgcctcctggtccacccacattgtcaatgcccagttaccctgtctctagtcagccagttggtgcctatccatcacgacaatttacaactggaggtcctattcctaatgctgcttctgctagttatgcaggaaatccagttccatggggaccaccagttccttctnnctccncttatgccccttatgccc

SEQ ID NO: 210863 - DNA, 421 bp, Gossypium hirsutum
cccacgcgtccgctaagctgagctcttcctagaggaaaaaatccaatggagaattgaaggcaggaatcccacctccgatccgataacgccgtaacctacgaatcaccctacccactctacgccatggccttatcttccacgcccgccgtcacccatctcaactaccaacgcatcgctctcggcagtttcatcgaggattacactaacagagtccacataatctctttcgaccctgaatcacttaccctcataacccacccatctttgtcgttcgaccacccttacccacccaccaaacttatgttccaaccccaccggaaatcccctttctctttctcctccgacctcctcgctttattcggtgactacctccgtctctgggaagttgggcactcttctatcgaacttatcttcgttctcg

SEQ ID NO: 210864 - DNA, 434 bp, Gossypium hirsutum
gcaggataaccctgatcttggctatgatgcagccaaaggtgaatatgtcgatatggtaaaggctggtattattgatccattgaaagtaattagaactgctttggtcgatgctgcaagcgtgtcatcattgatgacaactaccgaagctgttgtagtcgaacttccaaaggatgagaaggatgttccggcaatgcctggcagtatgggtggcatggattattaaggttattccccctaacaatacactgattttaagtgctttcctctaatctatttccatttcctcaacatctgtgagaaaaagaatatccgagtctcgatgtctaagttggaaggtggttttggtgataaagggtcaacaggactctcttattgttgttgctagaaagaacgaactagtttgtattgggccattttatcttgaaataaatgga

SEQ ID NO: 210865 - DNA, 431 bp, Gossypium hirsutum
aagatacaagaaagcatagtgatgaatgacaataaacaatttcctcccaaaatcacacaggattacaagctaacataattgtgtatattctctacatagtgaataacacaatgtagcaacttaggtatctttttgagggttgttgatcggaactctttagtccctctgtctgaaccaacttcatcatcagttcgagattttaacctttgctttttagttttaccttgaactacttgacctgttgatgttggtttattcagcactggatgtactgtttcctttgataccaccaacccagtactgtttaactgcaactagaattttttctggcacaaggggaccatcctcgtgatcattcatcttggtgtcccatctcatgcctccagcaattttcctaaccttggttaggacatcgacatcatcccggaata

SEQ ID NO: 210866 - DNA, 435 bp, Gossypium hirsutum
  unsure (1)..(435): unsure at all n locations
cccacgcgtccgcttcttcttcgtccaactttgtgtctgtaagaaaattcccttgttcatgtttttttctattctaaacggtaccctcacagtttgcagagatgcagctggaatcgctgggaacatctttgctttcgggctgttcatatcacccatacccacatttaaaagaattatcagaaaccaatccaccgagaatttttcgggattgccttacatatatgcccttttgaactgcttgatctgcacgtggtatggcacgcccctggtatctcatgacaacgtactggttatgacggtcaattcaatcggtgctgtttttcagattacctacattgtcaccttcattgtatatgccgataaagagaaaaagatgagaatgctnggaatgctactcggagtttttggcctactggcgatcatagttgctggtag

SEQ ID NO: 210867 - DNA, 428 bp, Gossypium hirsutum
  unsure (1)..(428): unsure at all n locations
atggacttaaccatgttacctaccttattgaacagaacaaggcacaattggttgttatcgctcacgatgtggatcccatagagcttgtagtctggcttcctgctttgtgtagaaagatggaggtcccctactgcattgtcaaggggaaagcacgattgggatcgattgtctacaagaaaactgcatccgtcttgtgcttgaccacggttaagaacgaggataagatggaattcagcaaaatcctcgaggcaatcaaggccaacttcaacgacaagtacgatgagtacaggaagaagtggggaggtggtatcatgggctcgaaatcacaagccagaaccaaggcaaaggagaagcttcttgcgaaggaagccgcacaaaggatgacttaagccaaccattactccctttggtaccaagtcanattactc

SEQ ID NO: 210868 - DNA, 436 bp, Gossypium hirsutum
tattgtgctgtattgacaattaactcattcgttgtatcagctggaataattcgagtttttgggcaagaaattgctgaaattcctttagttgctacaagcatggctaaccatggaaagggatacttccagctgttattctcttgtattgaaaagctgttggcattcttgaatgtaaaaaatatcgttctcccagctgccgaagaagctgaatcaatctggacagataaattcggtttcaagaagttaagacctgaccagctcagtgaatatagaaaatcatgctgccagatggttattttccaaggaacttcaatgctacagaaagaagttccaaccaatcaactcgttagcagcatcgagcgcacagaattatacaaacatatgaaccaaggaagatcttattttctagagtgaagatgataaagaagtggagctc

SEQ ID NO: 210869 - DNA, 435 bp, Gossypium hirsutum
cccacgcgtccgatttttttccattgcacatctaatttaagaggaaaatgactttcagtggaacaacagagaaatgcaaggcttgtgataagactgttcatgttattgatttattaacagctgacggcatttcttatcataagacttgcttcaaatgtagccattgccatggtgtgctggtgatgggaaactattgctcaatggacggtgtcctgtattgtaagccacactttgagcaacttttcaaggaaactggcacttaccaaaataagaatgcaaaaccctcatccgaaaagtcaaatggaacgggaaaggctcctagcaaattcgcatcattcttctctggtacacaagacaaatgcggtgtctgtaagaaaactgcataccccttagagaaggtgactgtggaaggagaaaactaccataaatcatgct

SEQ ID NO: 210870 - DNA, 421 bp, Gossypium hirsutum
tcgattttgtggagaattacttccaatgtgacatacatgtgcaatatagtgacttactgggggtgttcgagtatggggttttcctcctcatgctaattacctatttctaggcgactatgttgatcgtggcaagcagagtttggaaacttttggagataaccgagaagtggaacatggcttgtctgtaaaattgcaagttcaaaagttaattctccaagctacatcacatgaaaatttgtgccagaactatgttgggtggtgtcctttttggtgatctcaagaacaaaaaagaaatggctgattatgcatgcacacttgaagaagtgcagtagcattaattctctgcaggaagattcctagattcaagcttatatgcaaaatgtgagttatatatctggagaagggaatgataggctgctta

SEQ ID NO: 210871 - DNA, 409 bp, Gossypium hirsutum
cccacgcgtccggttaccatggcagggttatcagggtgataacaagagttttctggtttgcaagaaaaagatggccacttctccagagttgatgtgttgcttttgtcctgccccgtttaagcagttccttgaggctgttacaaatatgaaatttgatgaggagcccaattatgcgaagcttatatccttctttgagagcctaattgaaccatgcactccattgagaccgataagaatcgatggagctcttaaggttgggcaaaagcgaggaagactggtcattaatttagaagaagatgagcaacctaagaaaaaaatacgactaggtagtcctgctactcagtggatttcggtttacaatgcacgttgtcctatgaagcagagatatcactacaatgtagcagattca

SEQ ID NO: 210872 - DNA, 428 bp, Gossypium hirsutum
ccgaattccaaaaataatcgtaaggagcaggagaagaaccggaagggtaagttatctgaaaaggcgtcgtcgtttcacgggaaattcccgacggtggctccgtctgatctgaggcggccgaagacgctgcccgacctattctcagagaggactacttccgtcttaccggatgcgaggccgaagttgacgaagctgctgttgaacgtgaccattcaagggagtctcggagctgtacaagtagtgctgtcgccggaaaacactgtcggtgacttaataaccgccgccgttcgtcagtactcgaagggaggtcgccgtccgatcttaccgtcaacggacgcctcgctgttggacctccattattctcaatttagcttagagagtttagaaaggggagagaagctgatggcgctgggatcgcgaaatttctt

SEQ ID NO: 210873 - DNA, 429 bp, Gossypium hirsutum
atcgtaaaaaggttctcagagaactcaactctttgatttccggttcaaccgccaccactgacgacgccgtcgatgaagaagtcaccgacaccgaatggttctttttagtttccatgacccaatctttcgttaacggcaacggacttccgggacaagcttttttcaattcatgtccagtatgggtcgccggatcggaccgcttagccaattctacgtgtgaaagagcgaaacaaggacgggttttcggtatacaaacgatagtttgtataccgttgacgaatggtgtcgtggaattagggtcatcggaattcattatccaaagctccgatctagtgaataaggttcgagcgctgtttaatggaattgaagctgaaacttggtctatgagcaacaacactgacgacccatcatcgttttggattagtgatc

SEQ ID NO: 210874 - DNA, 433 bp, Gossypium hirsutum
cagttcttcaccatttcccctcgatttccattcctttgacttcctttcatcatttcaagaaatgggttcaggagaaaaggtatttgtttatgaagatctggtgaagcacaaagacagaaatgattgttggcttttgatctctggaaaggtgtataatgtaacccaattcttggaggaccatcctggtggagatgaagctttgcttgctgctagcggaaaagatgcgaccgatgatttcgaagacgtaggtcacagtgatgatgcaagagagcagatgcagaagtactatattggtgaggtcgatgccaccaccattcccgcacgaaggacatacaaagcacagacgtcaaccgcggcaactcaacaagacgagcctggctttctgtttaagattatacagttcctggtacccctcttgatcttaggcttcgca

SEQ ID NO: 210875 - DNA, 405 bp, Gossypium hirsutum
ggacatgaaagcaatggatccggttgaacttctcggaatcttgcctacctgcaatttgggcaagttctgctcgaaaaagtaccttgccatcgttcatcccaagatggaagaatgcttgttcggggacttggagcatcgcaaccaagtgatggccgggattcatacaaggagtcagatttatggggagttcttggggctggccaaggcaattgggctgcttcatttgcttgctttatcacttgacccttcaccaagccaattcgaagcaagtcggggagcagagtttcatccacactatatggaaagcgtcagcaagatttctggtgggcgagtacctacaggtcagattgttggattcccagttagccctgggttcaagctaggaaatggttctgttgtgaaggc

SEQ ID NO: 210876 - DNA, 419 bp, Gossypium hirsutum
tcgcccacgcgtccgcgaagatagaggtatcaggttggagcgacgcatcattggcgatggaagcagaggagatgaagggaaaggttgtggaagagaaagatccggttcgtgtcaagaggaagactttgcaagctgtgctggaagagtgccagagagctctcgaattgcttagtaactgcgaagatggaaccgacgatgacgatgaagacggcaaaggtaaagatgaagtgaaccatcaaggagaactcaacggcgtcgatcttagaagagatcaagaagcagatgagttgtgtgatcttctcaaatctagagttcaatgccctgcctttcttgataagctagagtgtgctcaggtaccagttccagaaaacattgccgaagatggtagttcttgtgacatggtcaaccccaatgatctt

SEQ ID NO: 210877 - DNA, 400 bp, Gossypium hirsutum
cccacgcgtccgtggggaaatggtgtggggtgtttggggttgctgcactactgttggtggtgagtgtgtttttaggggttagaggtgctccccaagtcccttgttactttatttttggggattcattggtggataatgggaataataatcaactgtcgtcattggctagagctaattacttgccttacgggattgacttccctaatggaccgacgggtaggttttctaatggtaaaactaccgtcgatgtcatagctgagcttttgggcttcgacaattacatcccgccttactcaaccgcaagcggtcgacagatactcggaggagttaactatgcatccgcggcttgccgaatcagagaagagtacccgacagcactgtgagctcggatcagtttcag

SEQ ID NO: 210878 - DNA, 440 bp, Gossypium hirsutum
  unsure (1)..(440): unsure at all n locations
cccacgcgtccgcaacaacaaaaaaaatctttccagtttctattttctaaaaacaaaactgaaaatgtcttgctgcggaggaaactgtggctgcagctctggttgcaagtgtggcaatggctgtggaggatgcaagatgttccctgacataatagagaagactacaactgagactattgttcttggtgtgacaactcagaaaatgcactttgagggatctgagatgggagttggggttgagaatggatgcaagtgtggagacaactgcacttgcaacccttgcaattgtaaataagagggggggaaaatgaacaacaaagagaagcagagaggcctttgtctttttaactaaataaattctattactntagtatgtatcagcaaatcttcatgaggatttggttcttaattatgtgtaatgtgggcttttctgctatgtc

SEQ ID NO: 210879 - DNA, 425 bp, Gossypium hirsutum
ggtgccaatggccgtaagctaatatggcaaggaattccaaggagcattcgcgacagtcataggaaagttcgtgacagtcaggacggactggtgatccaaaggaacctagctctatacttctcgggtggtgataggcaagagctgaagttgagggtaaccggccgtatatggaaagaagaatgataataaaaaaaggatgttgaatcgagatgattttgtatagtatcagaaacattccgagtctcattggcaaacaaatgaaagcttcggttgtaatcggggctttatgtccactgcattgcaatccctctgctgaccgaccaccagcccggctgccaccttctactgaatgttttagggtaggaaatgatttgtatgagtctgcttggttgctcaaagtttaatgcagcaacatgtatggagcg

SEQ ID NO: 210880 - DNA, 431 bp, Gossypium hirsutum
gaaagggatgggaatcgactggtcttctgtgagaaatgtcatggatatgaaagctgtttatggagggtttgctgcagccctgaaagacttgaaagtctgggttatgaatgtagttccaatcgacggtgccgatacacttccagtaatctatgaacgtggattgtttggaatacatcacgattggtgtgaatcatttaatacatacccgagaacgtatgatgttcttcatgcagatcatctattctccagtattcagaacaggtgctagttggttgcggtaattgcagaagttgatcgaatcctgaagccagaagggaagctgattgtacgagacaaagccgaaacgataagcgcaatggagagcatggctaaatctctacaatgggagatccgaatgatttattcgaaagactgtgaaggattgctttgtg

SEQ ID NO: 210881 - DNA, 433 bp, Gossypium hirsutum
  unsure (1)..(433): unsure at all n locations
gcttacatgtgggtttgtttgacaaaattacaagaaacaacggtatcacaacaaatctcatcagctgatgactccgatgagctttcttatttcctatttgcagtagattgtagaggccacttaaaattacctgccacatactttgggaactgtactatagcacgcaccgtagcagttaagagaagtgcgctgatgggagaaaatggaattgtggtggcaggcaaggccattggaagagaagttatggaaacgtacaaaggaccactgaaaggggcagaaagggaaaagttcaaaagtagacaccctcctatcatggtttcagcatcaccaaaattcgaattatataaggtagattttgggtggggaaggcctagaaagacggaggtcgccaacattgggtcgntgggatctctttctctgttttctattgcag

SEQ ID NO: 210882 - DNA, 424 bp, Gossypium hirsutum
gcgcgtgacacccatagaccctaatatgcttgcttgccttagaaaaaacgagtttttaataaaaatggagaaaagtttgtggatttctaggtgctgtgccgataaaggatgagtacactggatgcaactagagcagaacttgctcttgtagttacgcatttgaataacgctgaagcaagggataagatatgcagggctatacaatatggctcgaaattattaagtgatgggcagactggcacagcacaaaatgttgacaaatcaactcaattggcacggaaagttttccgcctttttaagttcgtgaactatttgcatggccttattagcccagttcctgaaggtactcctgatccacttgttctgctacgaaagtcaaagaatgcactgctgtcaactatcttatttctcgatcaaatagagt

SEQ ID NO: 210883 - DNA, 372 bp, Gossypium hirsutum
accgcggacgcgtgggcggacgcgtgggtgacaaaattacaaaaaacaacagtataacaacaaaggctgatcaaatgatgactacgatgagctttcttatttcctatttgcagtaaattgtagaggccacttaaaattacctgccacatactttgggaactgtactatagcacgcaccgtatcagttaagagaagtgcgctgatgggagaaaatggaattgtggtggctggcaatgccattggaagagaagttatggaaacgtacaaatgaccactgaaaggggcagaaagggaaaagctcaaaagtcaacaccctcctatcatggtttgaccatcaccaaaattcgaattatataaggtagattttgggtg

SEQ ID NO: 210884 - DNA, 251 bp, Gossypium hirsutum
cccacgcgtccggccaccggcttataagcctccaaagaaccgagctattatgactagctgaatggataaattagtatccatgcaataagagctgcttaatactcatgttctgttttcttgtatgttatgtattaatgttttcttttactagcgagagtgcttatggcagtactcattggaatgcctattttatgtcttcttatttctcaatgagcaatatcctgatttcaacaaaaaaaaaaaaaaaaaat

SEQ ID NO: 210885 - DNA, 434 bp, Gossypium hirsutum
  unsure (1)..(434): unsure at all n locations
cccacgcgtccgggagactcttcagtggaggttaacgatgagaaccgcgatgctgcgcagttggctaaagccaaagccatggatgctatttctgaagggaagttagaggaagctatagagaatctgacacaggcgattttgctgaatccaacatcggcaatcatgtatggaacccgagctagtgtttatatcaagatgaaaaagccaaatgctgccattcgagatgccaatgcggctttggagattaacccagattctgctaagggctacaagtctcggggcattgcacgagcaatgcttggtcaatgggaagatgccgccaaggatctacgcttggcatcgaagttggatcacgatgaggaaataaacagcgtccttaagaaggttgaacctaatgcacaccgcattgaggagcaccgtangaagtatgatag

SEQ ID NO: 210886 - DNA, 416 bp, Gossypium hirsutum
cccactcgtccgagaaactcttcattggttgttaacgatgagaaccaatatgcggcgcggtgggctaaagccaaagccatggatactatttctgaagggaagttagaggaagctatatagaatctgacacaggcgattttgctgaatccaacatcggcaatcatgtatggaacccgagctagtgtttatatcaagatgaaaaagccaaatgctgccattcgagatgccaatgcggctttggagattaacccagattctgctaaaggctacaagtctcggggcattgcacgagcaatgcttggtcaatgggaagatgccgccaaggatctacgcttggcatcgaagttggatcacgatgaggaaataaacagcgtgcttaagaaggttgaacctaatgcacaccgtattgaagagca

SEQ ID NO: 210887 - DNA, 302 bp, Gossypium hirsutum
acgcccactcgtacgggaaactctttttttgtttaaacgacgaaaaccactatgctgggcggttgattaaaaccaaagccatacatactattttaaaacggaagttatatgaagctatatagaatctgacacaggctatttttcttaatccaacatcttaaatcatgtctgtaacccaagctcttttttatatcaagataaaaaaaccatacgctgtcattcaatatgccaatgcagttttggagattaacccatattatgttaaagcctacaattcttattgcattgcactagcaatgctt

SEQ ID NO: 210888 - DNA, 356 bp, Gossypium hirsutum
tgcaaatttttgcactgtctgggcatgataatactgtttgctcagtttttactcgaccaacggatccgcaaattgttactggttctcatgatacaaccataaaattctgggaccttagatacggaaaaacgatgtcaactctaacacaccataagaagtccgtgcgagcaatggcaccacatcctaaagagcattcttttgcatctgcatcagctgacaacattaagaaattcagtcttccaaagggagaattcttgcacaatatgctctctcagcagaagactataattaacaccatggccgtcaatgaggatggtgtaatggctaccggaggggacaccgggagttgggggttt

SEQ ID NO: 210889 - DNA, 355 bp, Gossypium hirsutum
cggacgcgtgggttgaaatcggagaatatgaatgactttgacttgggactcaatgccctggactatgaagtctggctatctgacagtcagcattggatctagcagaacttgaaaaatctgcaaagatgggcaaaaacggaatcagttatattgagattcctatctctttcatgcctaacgatttcggatctgctctgtgggacatgattaggggaaaaggaacaggttactctatgaaaggtcacatcaacgttgacactccgcttggagctatgaaactacccatcatcaaggagggtggcacaacccgccttatgaagaatagggaagacggaggtgatgatgatgatgatga

SEQ ID NO: 210890 - DNA, 446 bp, Gossypium hirsutum
  unsure (1)..(446): unsure at all n locations
cccacgcgtccgagaagctggtgcttctgcgatcctcataataaacaaccaaacagaactcttcaagatggtttgtgaatcagatgctgatgtaaatataaaaatacctgctgtcatgcttcctcaggacgctggttccaatttggaaaattatataaataataacaccagggtttctgttgcgttttactccccaaagcgtccggcggttgatattgctgaagtttttctgtggctaatggctgttggtaccattttgcttgcttcttattggtctgcatggactgctaaagaagttgctattgagcaagacaagctactaaaggatgcatcagaagaatttctacaagtgggaagtgcaggttcaagtggttttgttgacataaatacaatgtcagcagttctctttggtgngtttgcttcatgtttctaggtcatgctttaca

SEQ ID NO: 210891 - DNA, 424 bp, Gossypium hirsutum
cgccttgtaagctggagcactgtataagctggagaaagataaggagtttgtgtaggaagattaaatcaataatcaagaccattgttatcatttgtcttgactttcgtgattttgatcacaacaaatgatatgtttgttaacatttcttacgctatccccagattgctactcaaatctactagcttggatatgctgagctgtcaatcacaacactgaacttacctgttatgttggtaatgctgtcttttactacgattcaaacgtatgtcatgtctgttctagaggagaaataccacattttcttatatacattcacaatcatctatatctatttataaactgctgagaagacgctgacaacaacttcgcccgtggccactacactattggcaaagagatcgttgacttgtgcttggaccgtatc

SEQ ID NO: 210892 - DNA, 337 bp, Gossypium hirsutum
ggtcgttttaccaacgggagatgtgcttattgttaacggtgccaagaccggttcagcaggttgggataatgctagggagcctaatttgaaccctgttttgtacaaattccatactgatggaactggttccaagttcaccgtgcttaacccatccaacatgcttcgcatgtaccactgcatgatttgtacatactacgtgatgcaaaaatcctcattgctggaagcaacacgaaccctggttacctcgatgatgcaatgtttaccaccgaagttcgggtcgagaaactcttaccacattacttggaaccgaacttggtcgtgtttcgactagagatca

SEQ ID NO: 210893 - DNA, 341 bp, Gossypium hirsutum
gctatagctcagttaaacataagatgtgtcctataagaggggaaaatgtacaaacacaggctcctgctcgaagtacgcctgataaatcacacaagcctgaagatggccttagtaaagacattgaaattaatttttttgagaacaaggataccaccacttcttttcaagatgaggcgtttaacacctttgttgctgaatttgatagtaataagatcagttctggaattattaataaaaatactggaaaagaaaaagcattggaggctgaaatagtgaggctgaaagaacagctaaaacaatccaacttggagaaggctgagatgactttcaaatttgaaaag

SEQ ID NO: 210894 - DNA, 447 bp, Gossypium hirsutum
agagttgtatgctaagaataacaagctgagggaattagcaaacctcgttgttgttgctggttacattgatgtaaagaagtccaaagacagagaagagatagcagaaattgaaaagatgcatgaccttatgaaagagtataaattagatggtcaatttcgttggatagcagcccaaacaaatcgagcacgcaatggtgagctctatcgctatatagctgactcaaagggtatatttgttcagcctgcattctacgaagcctttggacttacggtggtggaagccatgacatgtggccttcctacgtttgccacattgcatggtggtcctgcagagattatcgaacatggtatatcagggttccatattgatccataccaccctgaccagaccgctgaactcctggcaactttctttgaacgttgcaaggaggacccaagccactggac

SEQ ID NO: 210895 - DNA, 411 bp, Gossypium hirsutum
ctccaagctccattacatgcgcgatattattcttcgttactctcctgaaagcgaacgtactcgcgttcaaaagcagcgagaatacaggcaaaagattatatcacactatcagcctctacaaagggaactgtatgccatgcatgcctcaaacttctttgcgccctcatttctcaaagcaattaatgagaataaaggggaaagttttagaagtataatggctgaacctactcaaggagtttttacatttgaaaagcttcagccccatttctgtgaattgttgttatctgaggtagaaaacttcgaaaaatgggtccacgagacaaaattcagaatcatgcgaccgaacacaatgaacaaatttggtgctgttttagatgactttggtctggaaaccatgcttggcaagttgat

SEQ ID NO: 210896 - DNA, 399 bp, Gossypium hirsutum
gaagaggattaaacggccttatcagtcaaagacctttaaagtggagatcagctttgctgcaaagattcccatgcaagccattcaaaatgctctgcgtggacaggaatcagaaaactcacaagaagccctaagggtgttggatatcattttacggcagcatgctgcaaaacagggatgtctacttgttcgccagtcattctttcaaaataatcctgataattttacagacattggaggtggtgtcctaggctgcaggggtttccattctagcttcagagcctctcaagggggcctttccctgaatattgatgtctcaactaccatgataattcgtcctggtccggttgtggactttttgcttgccaatcagaatgccagagatccgtactccctggactg

SEQ ID NO: 210897 - DNA, 439 bp, Gossypium hirsutum
  unsure (1)..(439): unsure at all n locations
taataaaatcaacggcgaaatcccaagctccattgttcaactttccagtttaaaacacctcgatttgagcaacaacctcctcaccggcgaagtcccggccaactttggcaacctgaaaatgctgagccgtgcattactgagtggaaaccaactcactggtacgatcccaatctccatcagcaacatgtaccggttagccgacttggatttatcgagaaacaaaatacagggtcaaataccagcacagttaggcaaaatgaaggtgctcgcaacgttggacttaggcagcaacatgctcaccggcgaaataccgccggcggttctgggtagtaccggtttgggtatcttaaacttgagtcgaaactcccttgaaggcaacataccggacgttttcgggccgaaatcgtacttcatggcacttgatttatcgntcaataac

SEQ ID NO: 210898 - DNA, 450 bp, Gossypium hirsutum
cccacgcgtccggatggctcacatttgaccttaccaaccaaacctactcttctttggtttccctttatttttatttgtttggtatttttaggttcaaccccagcacacagagtttgtggttggttagtggcaaccacaagacaacaatattaagttttgggttcagtttgatcagctattctgtgctgcccttcttcttcttcttcaaacaagcagaaaaacaagaggaaaaaaatgggtggagaaagaaaggtctacactttggctgaggtttctcaacacaaccatgctaaagactgttggcttgtcattgagggcaaggtatttgatgtgactaaattcttggaggaccaccctggtggtgatgatgtcttgctgtcttccacagggaaggatgcaactgatgattttgaagatgttggtcatagtagcagtgctcgagcaatgatg

SEQ ID NO: 210899 - DNA, 451 bp, Gossypium hirsutum
cccacgcgtccgcagagagtgcctcagttcaggcaatattagattggcagagaaggacgatggacatgatgtataaggatgttgttcaggctctcagagccaagggtagcgatgagaatcccagaaactatttaacatttttctgccttgggaaccgagaggttaagaagagtggagaatatgaaccttctgaaagacccgaccctgatacagattatgccagagctcaggaggcccgtcgtttcatgatctatgttcatgctaaaatgatgattgttgatgatgaatacataataattgggtctgccaacatcaaccagcgatccatggatggtgctagagactctgaaatagccatgggagcctatcaaccatatcatttatcattaagggaaccagcacgaggtgaggtccatggtttccgtttgtcactgtggtatgagcaccttgg

SEQ ID NO: 210900 - DNA, 388 bp, Gossypium hirsutum
gaagcttcaagtgctaaaatctagggatttgcgggtggagaagacgagagcccatctctctgcttcaaagctcctgtccaggtagaattctcttcttcccttgcgttgtgttctttgctgttcaatcgccatggcttcaaagcggattttgaaagaactcaaggatttgcagaaagatccacccacttcttgcagtgctggtccagtagctgaagacatgtttcattggcaagcaacaatcatgggaccctcagatagcccttatgctggaggtctgtttttagttactatccatttccctccagattatcctttcaagcctcctaaagtcgcgtttatgaccaaagtcttccatcccacattcaacagcatggaagcattgtcttga

SEQ ID NO: 210901 - DNA, 408 bp, Gossypium hirsutum
cccacgcgtccgcccacgcgtccgcccacgcgtccggacaatttactcaccggtcagattcctcaacaattaggctttctatcacggttgtcagcttttgatgtttcttacaacaagctttcggggccaataccagcctctttagggaacagaagtgggaaccagccgagtttcaatgtcacttcttttgaaggcaataaggatctttatggataccctttaccacccatgaaaagcaaagggttgtcagttttggccattgttgggatcgggttaagaagtgggcttgctagtttggtgcttagttttacaggagtttgtatctggttgaagattagagatgaaaagatggctgccgaagaagggaagatgagtcaccctatgcctgattattaaaagcttgaatct

SEQ ID NO: 210902 - DNA, 382 bp, Gossypium hirsutum
gggtgttaatggagctttatttgttctaagggagatcctgtttattacaagaccacttatttatgttttgttcattagaagatacggaattaggtcatggattccttggtttctttctctgggtgtggacttcattggatacggctttctatcacatgttacaaaatccaggatggttgaaagagaacaatggttccatctttctgcctctgaaaaggatgaggttaaacgacggaaactgttgtgggcactttacctcatgagagaaccattctttagcaagtataccaggcaaaagcttgccagcactgatagcctattggagcccgctcctttaattgggactctaacatcaaaactggttgagcttataattgagctc

SEQ ID NO: 210903 - DNA, 347 bp, Gossypium hirsutum
gttctctctctctcttattagaaattagacactactagacttgtagaaatgcaagggctcgtcttgttgccggtactcctttgcgccacctaccatatcgctctttccgcgaccaacgttacggtggcggacgggctgttagataatggtaactttgagcaagccccgaatgcctcaaacatgaagggcacggttgttgtggggcgttatgcaataccaggatgggtaaacgaagggtttgtggaatacataaagtccgggcaaaagcaaggggacatgttgctggtggtgcctgagggagcctatgcagtcaagttggggaacgaggcttcaatcaagcaggagat

SEQ ID NO: 210904 - DNA, 449 bp, Gossypium hirsutum
caaagaacaggcattctaactgacaaggtcgctggcctgtaaaatcggcaaagttcattctagatttgctgaagaatgctgagagtaatgccgaggttaagggtttagacgtcgatgcactccatatttctcacatccaggttaaccaggcccaaaaacaaaggcgtcgtacttaccgagctcatggaagaatcaacccttacatgtcctctccttgccacattgagttgattttgtccgagaaggaagaacctgtcaaaaaagagcctgagactcaattggcagcaagcaagtccaagaagtcccaagcttcttcttgagtgaacaaagtttgaaactttatcaagtcagttaatgtagtgatgtctggtctttggatttcatacactatttttgaagtttttgacattaagatgtgttggatggttttttatttcaaagcatgtttt

SEQ ID NO: 210905 - DNA, 409 bp, Gossypium hirsutum
cgcccacgccgtccgcccacgccgtccggtcacagggacccctaaaaggatacgaccagctactgaatcttgtcctggatgaagctgtagagtttcttcgagaccaggatgatccgttgaagactactgatcagactaggcgtcttggcttgatagtttgtaggggcacagcagtcatgctggtgtcacctaccgatggcacagatgagattgccaatcctttcatccagccagatggagcctgatctgatccgttttcaaaatatggcatttcctttgctctactacttatatattctcttaacattttcaagtctgtatttctatgagcatgttgttatctctttgaaagctaccaaaaaaccaaaccatcaaagccttaaatcttaatatcatttggagttgaaaa

SEQ ID NO: 210906 - DNA, 432 bp, Gossypium hirsutum
cccaatgctggctctgatgttgttagcatgaagtgcaaagctgatcgggttgatgggggttatcttctaaatgggaacaagatgtggtgcactaatggtcccgttgctcaaacattggttgtttatgcaaagacagatgtcacagctggctcaaaaggaattacagcatttattgttgagaagggaatacctggatataccactgctcagaaattggacaaacttgggatgcgaggaagtgatacatgtgagcttgtctttgagaattgcttcattccagaagaaaatgttcttggcaaagaaggaaaaggagtttatgtattgatgtcaggactagatttggagagacttgttttgtccgctgggcccattggtataatgcaggcatgtcttgatgttgttcttccttacatacgagagaggtcacagttt

SEQ ID NO: 210907 - DNA, 335 bp, Gossypium hirsutum
cccaatgctgcctctgatgttcctagcattaagtgcatagctgatcgcgttgatgggggggatcttctaaatggtaacaagatgtagtgcactaatggccccgttgctcaaacattgactgcttatgcaaatacagatgtcacagctgtctcataaggaattacagcatttattgttgagaagggaatacctggatataccactgctgacaaattggacaaacttgcgatgcgaggaagagatacatgcgagcttgtctatgagaattgcttcattccacaagaaaatgatcttgtcaaagaatgaaaaggagtctatgtattgacgtcaggact

SEQ ID NO: 210908 - DNA, 394 bp, Gossypium hirsutum
  unsure (1)..(394): unsure at all n locations
attgcattactcttgataagctatatgttgcagagcagaagctttacaaggaagtaaaggaggaagaagttaccaaattggagcttgaaaagaaattgatgttgctccaaaagcaagatgaaaaccatgactggaccaagactcagaaaatcaaatcaagtgttgagaatctggagaatgacatgacacgcttgcaacattcaataagtacagcctgttcatctatattggagctcattgatgaggagctttacccacaactggttgcattaacttcaagtctgatggggatgtggaaaatgatgtacaaatctcatcaatttcagaaccatatttcaaagcagntgaatcatctcactgatcatttaagcatggatttgactactgaatcccg

SEQ ID NO: 210909 - DNA, 380 bp, Gossypium hirsutum
gcgtgtcatagcagagagactctctgaggaagaaattggtggcttgaaagagttgttcaaaatgattgatacagacaacagtgggacgattacatttcaggaactcaaagatggtttaaagaaagtgggatctgaacttacagaaacggaaatcaaggatttaatggaagctgctgatattgataacagtggaacaattgactatggtgaattccttgctgctacactgcacataaataagatcgagagagaggaaaacttagttgctgctttctccttttttgacaaagatggtagtggttacatcaccattgatgaacttcaacaagcttgcaaagagtttggtctatgtgatgtgcatttggatgagatgatcaaag

SEQ ID NO: 210910 - DNA, 391 bp, Gossypium hirsutum
cccacgcgtccgttgcttcacaatggcctctacaaccatggctctttcttccccatcattcgccggtaaggcagtgaagttctccccttccacccctgaaatccggggaactggccgtgtttccatgaggaaaaccaccaagcctgttccttctggtagcccatggtacggtcctgaccgagttttgtacttgggtccactttccggtgagccaccatcttacttgaccggtgagttccctggtgactatggttgagacactgctggactctcagctgatcccgagacctttgctaggaaccgtgagctcgaagtcattcactgcagatgggccatgttgggagctcttgggatgttttccctgagctgttggctagaacgggtcaagttc

SEQ ID NO: 210911 - DNA, 395 bp, Gossypium hirsutum
taccatcaaaaccagctagctaaatcaaccgcatttcaccaggatggctagaggattgaagaaacacttgaagaggctcaatgcccctaggcattggatgcttgacaagcttggtggtgcttttgcacccaagccatcatctggaccccacaaatccagggaatgcttgccattaattctcattctgcgaaacagattgaagtatgctctcacgtacagagaagttattgctattctcatgcagaggcatgtcatggttgatgggaaggttcggaccgataagacttatcctgctggtttcatggatgttgtgtccattcctaaaacaaatgaagactttcgtctcctttatgacaccaaaaggcggtttcgtctccatgccattcacggtgatg

SEQ ID NO: 210912 - DNA, 445 bp, Gossypium hirsutum
gctggtatctctaaagatggtcagactcgtgagcatgctttgcttgcttttaccctcggtgttaggcagatgatttgctgctgcaacaagatggatgcaacaaccccaaagtactcaaaggcaaggtttgatgaaattgtcaaggaagtctcttcttatcttaagaaagttgggtacaaccctgagaagatcccgtttgttccaatctccggttttgagggtgacaacatgattgagagatctacaaacctcgattggtacaagggtcctactctccttgaggctcttgaccagatcaccgagcccaagaggccctcagataagccacttcgtcttccacttcaggatgtctacaagattggtggtattggaactgtccctgttggtcgtgttgaaactggtgtcctcaaacccggtatggttgttacttttggtcctactggtc

SEQ ID NO: 210913 - DNA, 399 bp, Gossypium hirsutum
agaagatttatgataacatgcagaagcctgcattcgtcttcgatggccggaacatcgtggatgtagctaagctgagggaaatcgggtttattgtctactccattggaaagccattggatgaatggctaaaggacatgccagcggtggcataagactgtattctggaccatggttgagctacaactttataatctcgaggaaaacattatccgatagtatactttataacattcatttcttttagaattaagattatgggatttcaacttatattggattacttgggagagctgaaacattagtgtctggatctgtccttagccgccacagtatctgctttgttattagtttaatataataaaacatttaccatttaattttataccacactttacctta

SEQ ID NO: 210914 - DNA, 335 bp, Gossypium hirsutum
gttgatccgaaagaacatccaatgctacttgctgagccttcttccaacactcaacaacagagggagaggacagcagaactcatgttcgaaaagtacaaagttcctgctttgtttttggccaagaatgcggttcttacatcttttgcttcaggacgtgctacctctgttgttgttgacagtggtggaggatcaactactgttgccccagtacatgatggttatgttcttcaaaaggcagtgtcttcttctcctattggaggagaatttcttaccgattgcttgatgaatagcttgaatagcaaaaggcatcggataaaacccgaggtactcttttt

SEQ ID NO: 210915 - DNA, 445 bp, Gossypium hirsutum
caaccactttattttatgtactttgcggtcttattggatatgcagcatttggcaacgatgcaccagggaattttcttacagggtttggtttctatgaacccttttggctgattgactttgccaacatctgcattgccatccatctcattggtgcataccaggtttttgcacaacccttattcgggttcgtggagggttggtgttccaggaactggcctaatagcaagttcattacaagtgaacatgctgttgatgttccattctatggtatttactacctcaacttcttcaggttggtatggaggacggcatacgttatcataacagccgtggtagccatgatctttcctttcttcaatgatttcttgggtctcattggagccggctcgttttggccgttaacagtctactttcccatcgagatgcacatcgcgcaatcgaaaac

SEQ ID NO: 210916 - DNA, 404 bp, Gossypium hirsutum
ggactctgctaactggtgagtgagcgcctgccgattcttaaactgatgccttcaatctctgtctgatcaccaattcccgccgctatcacacccgatattgaccgggcgctattaaagatcattgagagaaacctgttttcaccaaagcggaccaactccgccctgacactattgttcacactcttactggcaaggttgccaatacaaagatggtatcgcaaaagggtcaggctgatggtcctcaggtgcgtcaaatgcgaattgctgaacgcttggtacgagatgaaactggaatgattatctttactgctagaaatgaacaagtggacttaatgaaagagggtactaccattactcttcgcaatgcgaaaattgacacgtttaaaggatcgatgaggcttgct

SEQ ID NO: 210917 - DNA, 454 bp, Gossypium hirsutum
gtcactcttgggacccttataccgataaggccaaaatgatccaccatgatggtccgatgcttaccaagaacgttaaactagccttaatatggtacggagattgtggaaaagacataaagaatacgatgaggaatttcataaaatcgttggtgttgccaggcaaagaccaccttcaacctcaagtcacccgttggtgggaggtggtggaaagttatcaagccatgatgccaggcgcaaagcctgggaaaagccccaaaatcaaggtggaagtggtgaaacaatcgactaataaatcatataaacatggaaaagtcttgactttgcaagcacatatcccaattcttatcgaggaactcactaagggcgatactagtgtccttcccgtcatcgttgctgcaagagatgtctccattcaaggactttgcaatggaaagtgtgccgatcatctacttac

SEQ ID NO: 210918 - DNA, 432 bp, Gossypium hirsutum
cccacgcgtccgcccacgcgtccgcccacgcgtccggttcgaaacctctgattttaatgctattttctccgtcgccaatagacttgaaaagcttcatggtggaaaggtgtatgtggggcttcacattccggatgtcaacactggctctcgacagaatatcgatattgttcttgttactaaaagagaagcaacagttatttctgtccagaatctagcagggttcatttctataaatgaggatggtagctggacctgtgaaggtggcagtagccaaagtgcagtgtgtaatcctgatcccgtttcagaggctaaaaaccaagcttcagtcctcgaatcatatattgaacaaaggggagttgctatacctgaaggatatttttcatacaaagttgtaattcctaatccaaaattccgtaccttttataaacattt

SEQ ID NO: 210919 - DNA, 390 bp, Gossypium hirsutum
cccacgcgtccggtcctgattcaatgggatttggccctctcattccgacggagactgaaaggtctttgatggagcgtgtgagacgggaactcaaacacgaactcaaacagggttacaaagagaaaattgttgacataagggaggaaattttacgtaagagaagggcaggaaagcttccaggggatacgacgtcggttttaaaagcttggtggcaggcacattccaagtggccatatcctactgaggaagataaggcaaggttggttcaagaaacagggttacaattaaaacagataaacaattggttcatcaatcaaaggaagcgaaactggcacactaatccatctacttctaccgccttgaagaccaaacgtaaaactattgcaggtg

SEQ ID NO: 210920 - DNA, 396 bp, Gossypium hirsutum
ggcagccgccggttcctttgaccaccaccaccaccaccaccacctctctgtgatcaaccttcactctctttttcaaggaaattagctgaaatggctggaggattaatccaccaggttttaaggaggaaatttcaatcacagtctgctgttcaagctttatcatggttttcatcaaggaaagttaatgacgatgcgggttctgctggtatgaggaccgttgcactccttggagctggtgtttcaagtttactaggttttgcaacagtagcatctgctgatgaggcagaacacggtttaggagttccaaattatccttggcctcacgcaggcatcctcagttcatatgaccatgcttcgattcgtcgcggtcaccatgtttaccagcaagtgtgtgca

SEQ ID NO: 210921 - DNA, 262 bp, Gossypium hirsutum
aacttagaggcaaagatgctgatatcactcaagaagctgcagaaattcaaatgtacattgaaactcttcaaagcctaccaaaaactagaatgctggatttgtttcaaccaaaatacattcgttcagtgatgattggagttgcattaatggtctttcaacaatttggaggaattaatggaataagtttctatgcaagagaaacctttgcatcagctgggctttcttcaagaaaagctggaaccatagcttatgcttgtgttca

SEQ ID NO: 210922 - DNA, 446 bp, Gossypium hirsutum
  unsure (1)..(446): unsure at all n locations
aaacttttggggtggagtccaaaagggttgtggatattggtaccattgacggtttccagggacgggaaaaagatgttgtaatattttcttgtgtgagggctagcaaagatagaggcataggctttgtgtctgattttcggcgaatgaatgtcggaatcacccgagcaaagtcttctgtactggtggttggttcagcatcaacgctgaagagggacgagcattggaacaacctagtagaaagtgctgaggagcgaggatgcttatttaaggtagggaagccttatacatcattcttgaatgatgaatatctagaatcgatgaaggttattaacaaggatgcacaaatgatggaagatatggatgaccttgataatgataatgtagcagcctataatatggccggagatgctgatcaagctccngtggaagacaatgattatggagat

SEQ ID NO: 210923 - DNA, 392 bp, Gossypium hirsutum
cccacgcgtccgctgggtcaaaaaaggggaagagctctttttgagctggaagatggtgagcagcttaagaagaaacttcggctaggttctcctgcttctcagtggatcacagtatatagttccagaaatccaatgaaacagaggtatcactacaatgttatagattcaagactccagcaacatgtggagaaaggaaaagaagatggcttgtatattagctgtgtagcttcatcattgaatctgtgggccattgttatggatgcagggacagttttcacatctcaggtttatgagttatctcctatctttttgcataaggaatggataatggaacaatgggagaagaattactacattacttcagttgctggtgcttgcaatggcagtgcact

SEQ ID NO: 210924 - DNA, 442 bp, Gossypium hirsutum
cccacgcgtccgtgaatcccaagtccaagcttctgtcatttgtgcaaagaggctcgatattcacctcagattccgtagtggaggccatgattacgaaggtctctcttacgtatcccaaattgaatcacctttcgtcattgttgacctctccaaactgcggtcaatcaaagttgatatccaggacaacagtgcttgggttgaagctggtgccaccattggtgaagtttattatagaattgctgagaagagtaacatccatggcttccctgcaggtctttgtactagcctaggcattggggggcacatcaccggcggtgcatatggttcaatgatgaggaagtttggcctcggtgctgataatgtcatagatgctcgaatcgtggatgttaatggaagagttcttgaccgagcagccatgggagaagatcttttctgggcaatt

SEQ ID NO: 210925 - DNA, 447 bp, Gossypium hirsutum
  unsure (1)..(447): unsure at all n locations
gaacaaagcaccattaccgccgtcaggtgcattaggaaagcaagcagtggcactgaggatatcagcagatgcagcagcctttatcggttgcaagtttattggagcacaagatactctttacgatcacattggcaggcactacttcaaacgctgctacatccaaggttcagtagatttcatattcggaaatgggctttccctctataaacactgccacttgcatgccgtaaccaacagctatggagccttgacagcccagaaaagggaaagcatgcttgaggaaacaggcttctccttcgttaaatgcaaggtcacggggtcgggcgccctctacctcggtcgggcttggggcgttttctctagggtggtctttgtttatacttacatggacaagatcatcacccctagaggatggtatgattggngagacaaaaatagagaaatgac

SEQ ID NO: 210926 - DNA, 441 bp, Gossypium hirsutum
aagaaacttaccaggattcccctagtaacggcgagcgaaccgggaaaagcccagcttgagaatcggtcgccatcggcgtccgaattgtagtctggagaagcgtcctcagcgacggaccgggcccaagtcccctggaaaggggcgccggagagggtgagagccccgtcgtgcccggaccctgtcgcaccaagaggcgctgtctacgagtcgggttgtttgggaatgcagccctaatcgggcggtaaattccgtccaaggctaaatacgggcgagagaccgatagcgaacaagtaccgcgagggaaagatgaaaaggactctgaaaagagagtcaaagagtgcttgaaattgtcgggagggaagcagagcagcgtcagaagttcgatgaactccagtagcagcttcagagcatgatgaagatgtttcagcaatcgcaacagtc

SEQ ID NO: 210927 - DNA, 324 bp, Gossypium hirsutum
gaggtgtaagacctttgaaggatcatatctatctccacttgaatcacttgcctccagaggtgcttaaagagaggcttccaggtatctctgagactgctgccatttttgctggtgtggatgttacgaaggagcccatcccagtcttgcctactgtacattataacatgggtggaattccaaatcatcatggagaggtagttactatcacaggcagtgatccagattctgtggttcctggactgatggctgctggagaggcaacctgtgcatcaattcatggtgctaatcgagtgggtgcaaatttccttcttgacatagtcgtct

SEQ ID NO: 210928 - DNA, 358 bp, Gossypium hirsutum
gccttctggattcaagcaaagggtccgctattatgagcggcaacggtgggcggccatgcgcggtgtcgattaatgccagatgatcagaaacctccccgaggggctccggagagatatcaagtaccatctttgcctggatttagttagacaggtaccattgcctcaacacatggatgatttggtcctagagaacatttgtgatcgtgtcaaatctgtaatttttaccaaaggagaaactataacaagggaaggcgacccagtacacagaatgctatttgtagtaaggggacatcttcaaagcaggcaagttcttagagatggtgtgaaaaagttgctgcatgttaggggccccgaaatt

SEQ ID NO: 210929 - DNA, 398 bp, Gossypium hirsutum
attttcttggtgaaaatcagatctctactgtaaattaccatggcgaggtgcctgcagaacaaagggttgaaaacctgaacaagttcaagagtgatgatggagactgtcccacattggtttgcacggacttggctgctagagggctggacttggatgttaatcatgttatcatgtttgatttccctttaaactctatcgactaccttcatcgcactggaagaactgcacgaatgggtgccaaagggaaagtaacaagtttggtggctaaaaaggacttattgttggcagaaaggatagaggaggcaataagaaagaatgagagtttggaatctcttacagttgataatgtccgaagggatactgcaaggactcggattaccgagcagaaggggaagaat

SEQ ID NO: 210930 - DNA, 313 bp, Gossypium hirsutum
cccacgcgtccgctctgcgttacttaaatctcttctttctttgctgatagatacaaagttctcaagttgactactgctccatcatcgaagagctgggtgaggagaagagagaagaaagcaaaggcaatcaagatgaaacgaacaaggaagaagagcctgcagagattgtactcaaagttgacatgcactgtgaagcttgtgccagaaaggttgctagagccctcaaaggatttcaaggagtggaggacgtatccacagatagtaaggcaaataaagtagtggtgaagggaaagacagttgaccccatcacggt

SEQ ID NO: 210931 - DNA, 448 bp, Gossypium hirsutum
ctcaaaatgaaaaatcactaatgctggaaagtcagaagtcaccactgtgtcacacagatttaaatgatatcctcaactttgaggagtttgtgaaacatttaacaaatgaagagcagcagcagatgttgcagtacctacctccagtcgacattgccaaactttctgatagcctgcaaagcatgtttgaaagctgtcaattcaaggagaacctatgttactttcagcaactgcttgcagaaagggtttttaatatctctgtcccaggggtgaaagctgaagattgtaagactttgaaaagacttgcattatttaatttgactaaatcccaatgggtggaacgccgtcatgtacttaatagatgtcaagatagtattggagcgcctgtagttgctagaggaccaaccgccactacatcgaacaatttagtgatcatgatgagatcatgtga

SEQ ID NO: 210932 - DNA, 407 bp, Gossypium hirsutum
ggatattgacacagagttgtctactgctgcaataagtccccagtcatttggtgtgccaaacatacctttcaagactggatgttcaaatgatgttgccataaacgatgcaggagttttaaatggtggattggggccaaccaaactcaacggatagcgaacatatacaaaggtacaaaagcgtggctctgtgggaagatcaatcgatgtgacccgctacaaagggtatgatgaactcaggcatgatctagcccgcatgtttggtatcgaaggacagatggaagatccacaaagttctgactggaaattagtatatgttgaccatgaaaatgacatattacttgttggtgatgatccttgggaagaatttgtaagttgtgttcagagcattaaaatactgtcatcccttg

SEQ ID NO: 210933 - DNA, 383 bp, Gossypium hirsutum
ccggcgttcggcattttttattttaagaaagccagttagtaatctctctacacgcttgaatgaaaaagagagggtgccaggattatgaattgatgacaagccaaatgaatgaacatgatgatcatatcgctcttatctgccaaatctaccctggattttacacccaaattgcaacacaccacggggaaccgaagcccccacagcttgagattatgaacatggtaggggagaacaggcagtgttcggtcgctcaaaaatggacgcataacctggaacaagtcactctgcttgaacttaattttggtcactaacataaactacaatcagaaaggaaagaccggaatgctttagagcttgggacttgacccgttgacaggtttgct

SEQ ID NO: 210934 - DNA, 397 bp, Gossypium hirsutum
tgattttccatccgttaccgccttttgctaccttgttgctgctactggcttgcagagttgatggagcttatcattagctattattgacatttatgctcttctagtgatgcgttcacttcagaattatcgagttgttactttctttaccattggtgatgggatcgcatccactttgacatttgccgcagcttgtgcttctgcaggcataaccgttcttattgacaatgatcttgatatctgttcgcagaaccattgtgtgcagtttgaaactgctactgcaatggccttcattagctggtttactgcattaccttcatttctcttcaacctttggtcactggcatcccgatagaaggttacacagaaaaaatcggtgtaaatgatgcattttattatg

SEQ ID NO: 210935 - DNA, 397 bp, Gossypium hirsutum
acgcgtccgtgattttacatccgataccgccttttgcttccttgttgctgctactggcttgcagagaggatggagcttatcattagctattattgacatttatgctcttctaatgatgcattcacttcagaattattgagtcgttactttctttaccattggctgatgatgatcgcatccactttgacatttgccgcagctagtgcttctgcaggcataaccgttcttattgacaatgatcttgatatctgttcgcacaaccatggtgtgcagtttagaactgttactgcaatggccttcattagctggtttactgtattaccttcatttcttcttcataccttttgtcactggcattcccgttagaaggttacaactaaaaaaatcggtgtaaatg

SEQ ID NO: 210936 - DNA, 443 bp, Gossypium hirsutum
cccatttctcaatttaagaaagccagaaaagaaaacactcgaaaagctagaaagaaaaagaaaatgagccaagattatgaaatgatgacaagccaaatgaatgaacatgaagatcatattgctcttatctcccaaatctaccctggattttacacccaaattgcaacacaccaaggggaaccgaagccccgacggcggcggaagaagaacaagggaggggagaacagccagtgggcggtggctaaaaaaaggaagcttaaccaggaacaagtcactctccttgaacttaattttggtaacgaacataaactagagtcagaaaggaaagaccggattgcttcagagctgggacttgaccctcgtcaggttgctgtttggttccaaaatcgtagagctcgttggaagaacaagaagctggaggaagagtatagcaagctcaagtc

SEQ ID NO: 210937 - DNA, 334 bp, Gossypium hirsutum
caaaagcacaggccttgaaggcttaaaaagcactgtaatctggggcgcttttaaaaatagggcgcggtgaattcgaacaaaggtttcctttcacacagccaaggaccttgaagaaagataggaacccgaagtatccgcgcattattgccccaccgaggaacaagcttgaccattaccagattttcaaaatttccctcacaaatgagtcagccatgaagaatatagaggacaataacactttattatttattgttgacatccgcgcagacaagaagaagaccaaagatgctgcgtagaaaatgtatgatattcaggccaacaaagtgaacacctt

SEQ ID NO: 210938 - DNA, 335 bp, Gossypium hirsutum
cgaacaacgtccttagcactgcacaacaagtgtggcttcgcaaattaggtggtgcaaaggctgttgttgatgagagtgcaagtggaattattactgcaggacgtgcaaaacggtcagctgctcagccagcacgggctggggataggttcaggcagttaaaagaagacgagaagaagaagaaagtaagcaaggctctgccagcagaagagtttcagagtctagactcagcatctgattctgatggggaatcagatgaagagacaaagggcaagggtgatgaggctctcgaagaagcatattcttcaagtgcaagcaatcaagtcctaatatttctc

SEQ ID NO: 210939 - DNA, 395 bp, Gossypium hirsutum
ctggagatagtaacaggtcgccgtgcagttgacaagtccaaacaaagtcttgtaatatgggcaaaaccatttctggaatcaaatcaagtaaaggaattggtcgatcctcggctcaaagatgattataatccgagcgaagtgcaacgaatattgattacagcttcaatgtgcttaagtcacttacccagcaaccgtccaaccatgacaaaggttgtaaggatgcttaagaacgaagatggtccaattgagtttcaccaaatatcttgtggaaggaaagcagtgatttttgacggccatgatttgaaagattctagttgtaaaaactatctatataccatgcgtccaacataattatgtaattggaaaaccatatctatacatttacgttcgaatac

SEQ ID NO: 210940 - DNA, 374 bp, Gossypium hirsutum
gttttattagacatgaggcgtctctaccaagagaactgaggcggcatctaaattctctggaagagaggcttttggagagcatggtgtgggataaaggttcctcaatgtacaattctttgatagttgcaaaacccgccctatctgctgaaataaatcgtcttggcttattggctgaaccaatgccacctttggatgcaattgcgacacatgtgaacttttctggaagtacacctccagtgccttctttgcagaaacacgaaacatcaacgggtaatgctggtagctcaatcttatgacaaaatggggatgtcaggtctcccatgagaccttgcactgaattgacgagtgtgttggttgaacggaatgcttttaca

SEQ ID NO: 210941 - DNA, 376 bp, Gossypium hirsutum
cccacgcgtccgcccacgcgtccgaaagaggttagagtggctgtctccccagggaaagcggaaggacatagaagaaataacgaggagtacatggagagagaggatttcagctttgggaaccgaggattggaacgagaaatgaccaacaaccacgaaggtgacaaagtgggggatggcaagcccaaaactatgcctcctgcaagtgtcatcacaaggctgatactgatcatggtttggagaaagcttatcagaaatcccaacacttattcaagcttaataggactcacttggtctctaatctcattcaggtggaatgtacaaatgcctgccataatagccaagtccatttccatactgtcagatgcaaggcttggca

SEQ ID NO: 210942 - DNA, 408 bp, Gossypium hirsutum
ctcgaagacggccggaccttggccgattacaacatccaaaaggagtcaactgtgcacctcgtcctccgtctgcgcggtgggatgcaaatcttcgtgaaaaccttgactggcaagacaatcactctcgaggtcgagagctccgacacgatcgacaacgttaaagcgaagatccaagacaaggaaggcatccccccagaccagcaacgtctcatctttgccggaaaacaactcgaagacggccgtaccttggccgactacaacatccagaaggagtcaactctccaccttgtccttcgtttgcgcggcgggatgcaaatcttcgttaagacgcttaccggaaagacgatcactctcgaggtcgagagctctgacacgatcgacaacgtgaaagccaaaatccaagacaag

SEQ ID NO: 210943 - DNA, 343 bp, Gossypium hirsutum
cccacgcgtccggcgatttgcaagcacaagtttgtgtttcacgcactctgcggaccgaataaaaactttacatctcagtctggtttatttgcaataaggcatgggcacttacttagatcctggaatacaagtagtcatcaaaaggtgaatagtcattcgcaaaagatcagagaacatttctcggttgttttcgttcgcttagttgctgctatgttgctggttacttctgcttccgtcgctctaagcaacacgccctcatgggcgctttctgaagaaaatctcctctttctagaggcatggagaacgatagaccgtgcatatattgacaaaactttcaatggac

SEQ ID NO: 210944 - DNA, 427 bp, Gossypium hirsutum
gcctacccttccccgactcgctattactcagttaactcgccctcccttcactcactcccaccatggcattccatttttctgcttaaaagctctttcctttccttttttgtttttttttcctcaaatctcatcttttgaagtaaattatttttatcattattctttagagtaaaagggagagtaaaagggagagatgtatatggtgccgccaccccagcgatcggatccgggttccatcggcggcgggtcgggtgatttacgggtttaccaagcttggaaaggcagcaatatatttttatttcaagggaggtttatatttggaccggatgtaagatcattagggctgactattttgcttataagagctccagtttccattttctgtgtttttgttgcaaggaaattgatggatgatttttctcatcac

SEQ ID NO: 210945 - DNA, 436 bp, Gossypium hirsutum
  unsure (1)..(436): unsure at all n locations
cccacgcgtccgcctcaacatttcagaggtggtacctggagcaatggacattgtcaccatataaagctgccagactttggtccatttcctgataaaactgaagaacacgtcgacatagtacgagatgtgttatcaaagcatccaggaagggaacaagtgattgaaacaatgaatgtgactcccatgacatatcaaagacaagatggccatacatctttgtatcatttcggacgaggaaatgaaacggaacctccgggcgaagattgtagccactggtgcttgccaggggtacccgatttgtggaatgagcttctctatgcactttttctcaagtgggaatctgatcactcctccactccaactngattttcttctcattcttgtacatagaaattcatatgaagtattgagtgtgttgcatgcagtttgaatcaag

SEQ ID NO: 210946 - DNA, 415 bp, Gossypium hirsutum
ccggaaaaaccggagggacccacgcgtccgcacatactacctaaagaaccttttttttttatcaattctcaattaaaacatcactttacgctcacggggaaatataatgggtgatgacaacgttcacatcaaccttgatgtcattgtccatgtcaactctgacaagacgaccactaccgatcattttatctacaagctagacagtattgacaagcgtgtgattgaaacgttcgataaagaggctgcttaaatgaacaaaatgtcatttaactatgctttgatgcttcacacgcttaatgctcatcgtgaacaaagtatcaccattgatattgccctgtgaaagtttgacaccactaaatactattgcacctttattgatacaccttgacaccgttactttaataaaaacattatt

SEQ ID NO: 210947 - DNA, 352 bp, Gossypium hirsutum
cccacgcgtccgcccacgcgtccgcccacgcgtccggccgagcaaggaactggcgtaggcgagcgtcgattcgagagaagtagcgcaaaaccgtaactcgtcttcgaggggttcgagttcgcattgtttgatcgtgtattcgatagctttggcttgatccgagtcttttgagaatcggaaaaaatcaatgatttgtgcgatttttgccgatgaaaaagggattgagttagcttcttctctagaaagtaaatgaggtgaagttgaagggtctttgttggtgagataaatagccattgttttaccaactttaagatcttccatcttgaagaaaattttacccgaaggatctata

SEQ ID NO: 210948 - DNA, 276 bp, Gossypium hirsutum
cgtagctgcaacattgcatctaaacaagattgagagggaagataatctcatggcagccgtctcgtatttcgacaaagatggcaatggctacatcactcaagatgagcttcaaaaagcttgtcaagaattcggttttaaggaaatccacttggataaaataaccgggaaagttgttcaggccaatgttggccggttgaataccattgagttgggggcattaatccaaaaaggcacccttatttttgttaaaaaaaccttcggaataaaaaaggcttt

SEQ ID NO: 210949 - DNA, 424 bp, Gossypium hirsutum
  unsure (1)..(424): unsure at all n locations
gaaccatccgatgagaaggagaaagttgaaaccgcagtgaaagaggcacttgagtgggttgatgacgaccagagtgccgagaaggaagactacgaggagaagctcaaggaggtagaggcagtatgcaacccaatcatcacagcagtgtaccaaagatctggtggagccccaggtggtggatcaactgaagaagatgatgattctcatgatgaactttaaaaaactggtaatgccattttgattgctgaaacaagcaaagaaaagcaaagggtgagaaggatgagagcatangtaggtgagatgaggatatactgtaattgttctccatggtagaagttaaaaaagggagaagtatatccccctttgttcggatgttatttttgggtgaatgaatacgttttaacggatattttttttggttttc

SEQ ID NO: 210950 - DNA, 359 bp, Gossypium hirsutum
cccacgcgtccgaaccgatcggtgagggaggaaggacaggggatgacgacgaagacgaaagtgagtggtggagggggaagaggaggaggagcaagggcagtggcggctgtgctgaggagatcgaaggtgaaggagactgtgaagatggcagctctagggtttcgattaagtgaaattgttttatgcttgatatctttctctgttatggctgctgataaaacctcaggctggagcggtgactctttcgaccgctataaagaatacaggtattgcctatcggtaaatgtgattggatttgtatatgcggggtttcaagcctatgctctagcttatcatctcatcatgcgaaaacatgtcat

SEQ ID NO: 210951 - DNA, 332 bp, Gossypium hirsutum
cccacgcgtccgaggagttgatgaattggaggaaggagaagagcttcaatgtgatcctgtagcttataattcacttcacgcttttcatattggatggccttgtttgagctttgatatcgtacgtgattcgttgggttcagaccggaaagattttccacattcggtgtattttgttgcagggactcaggcagagaaggcttcttggaactctattggagtgtttaaagtaagcaacatttcgggaaaaaggcgtgagctagttcctaagaaatcttccgaggatgatcctgatatggatggtgaaagtagtaatagtgatgatagtgaggatg

SEQ ID NO: 210952 - DNA, 257 bp, Gossypium hirsutum
cacgcgtacgcgcacatttactcccactctttcgcccactctttcttattcttatttcaaaaattaatccgggcttgtgtaattcttaacaaattcacactatcaaactgctaatggctcattaaatcacttatactttttttgatatgaatatgctactctctcaaccctattaattatagatcttattcattcaacatacccctactttcgaaatcgattcctttattatataaaaagaaaacgcattctttttc

SEQ ID NO: 210953 - DNA, 437 bp, Gossypium hirsutum
caagaaactgctctctctgtcttaacgctataatcattgaagaaaaatgggggtgaaggaggaattcgaggagtatgcggagaaagctaagacccttccccagaacactaccaacgacgacaagctcattctctatggactctacaagcaagctactgttggaccagtgaacaccagccgtcctggaatgttcaacatgaaggaaaagtacaagtgggatgcatggaaggctgttgaagggaaatcgaaggaggaagcaatgaacgattatatcactaatgtaaaacagctgcaagaggctgctgctgcatcttcttgacgtgtgtgtgagaatagaaaatggtgtaattttcaagccctttgatacctatgggtttgaaaaggtctaaaactatgaataagcaatgtactatgttttattgctattaaagtatatt

SEQ ID NO: 210954 - DNA, 356 bp, Gossypium hirsutum
gctggctgatccctggtatttgatcacggattaaggagaaactcccacccacggattctaggctgggaccagaccaacggcatttggggaatggaaaatatgatagagcaaatgctgagaaacaacggttggtaaggaggcggagaatgtgaagaaaactacatgaaaatgggtggaagcctagatggctccatcaagatagtgaaaacggatccttacgctacacgggccggtattgggaagcatgaaaacaacgaaaatgggatggatgtccaaatatatatggtgtattcgacgaaaaattagatgattggtgtgaatgatcctgatttcaactttagatcaatattgagatg

SEQ ID NO: 210955 - DNA, 414 bp, Gossypium hirsutum
cggacgcgtggttcggggcagaccccgtgcccgatatcgagaagcccatgtttgaactagggtcagcggcccaaacgatcttgccagatagtgatggtgcgattgatggtcaccttcgtgaagttggtcttacatttcaccttcttaaggatgttccggggcttatttcgaagaatatagaaaagagcctggtagaagcatttcaaccattgggcatatccgattggaactcccttttttggattgctcatcctggtggtccagcaatattagatcaagtagaagccaaattagcactgaagccagagaagctacgagccacaaggcacgttctttcagagtattggaacatgtcaagtgcttgtgttctatttattttggatgagatgaggaaaaaatcaagggaagatgggc

SEQ ID NO: 210956 - DNA, 359 bp, Gossypium hirsutum
cccacgcgtccgcccacgcgtccgcccacgcgtccgagagactacaaagaatcggcatgtcctcggcgataaaagatggtttatgcctattaccatagctggctttattgccgggacgatacttatctcgagcttcataaaaaccgccgattactccatactatgttcgctcgccaaaaccagatccatagccgtagaggaatactcctcctcgccggtccaactccaagctatcatgcactacgccacttcatcaatagtcccgcagcagaacttcaaggagatctccgtaacctttgacgtactcaagaaacgctctccttgtaatttcctcgtctttgggctcggctacgactccc

SEQ ID NO: 210957 - DNA, 424 bp, Gossypium hirsutum
cccacgcgtccggggattcacattgggagatcggatggggtcaatgttcttaactcggggataaaaactggtgatgattgtgtttcaattggggatggttccaaaaatttggttatcaatggagtaacttgtggaccaggacatggtatcagtattggtagtctcggattgtttaaaaatgaagaaccagttgatggagttacagtaaaaaattgcaccatgactaatacttccaatggtgttagaatcaaaacttggccaggtgctgaacctggcacttgttcgaacattcactttgaggatattaccgtgaccaatgtcagttctcctattataattgatcagaaatattgcccatggaacaaatgcaaaataaatgaagaatcgaaagttaaactaagcaacattagtttaaaaacattta

SEQ ID NO: 210958 - DNA, 342 bp, Gossypium hirsutum
agcagagacaatgagaggaacattgacgttgacttggattctgatggtttgcatctcgcaagtagcggtgcagagccaatactactcagagagcttaccatatgatcccaggccggttaaggtcactaatcttcacttctttttgcacgaaactctccgcggtaagaacccaacagtagtcatggtagcccaagctaacaacacaagcaacgacaactactcatcagtgccatttggcaccctatatgccattgatgatcccctcaagataggtcctggggacaactcagaggtgattgggaatgctctgggacttgggatcttggccggcaaaattcaacg

SEQ ID NO: 210959 - DNA, 445 bp, Gossypium hirsutum
ccaacttgggtattttaactttactccatcttcctcctcttccttcttccgttttaggatctgggttttttccccccaattttttaaggttataaaaaaagaaaatggggagaggtagggttcagttgaagaggattgagaacaagatcaacaggcatgttactttctccaaaaggagagctgggttgttgaagaaagctcatgagatctccatcttgtgtgatgctgaggtcgctttgattgtcttctcccacaaagggaagctctttgaatactccactgattcctggtatttccccccttcattctgggtatttttattttttgtaaaaagtattctccaaggttttgagaaacaaagatatagttacttttgttttttggctcttaaactaaaatagatgtttatgaaagtggtttttgaggcactgtctttagcagtttt

SEQ ID NO: 210960 - DNA, 423 bp, Gossypium hirsutum
gccactcttacaaaaatttttaaaaaaatgtcaattgagaggtttattgagaactgccccggtgtgagccccactgtgaatgacacccagaatgtattccactctgataacacctatcttgctactgagctcgttcatgagacctatcatggagcctatcaacccgttgctgtaccctatgctttcaagactgatttccatactcatatacatgtgcctatactggtggtattgcttggaaacaatggatgaaccattggctgaagcgtcatcgctagcgttgaagctatctattaggctacttatggcgctgctcatgacgctgttcactttgcttcattctctggatcatcgactatcccatcaacgatccacattgggtactacattgatgctccaatttatagtccatttaatatggtg

SEQ ID NO: 210961 - DNA, 395 bp, Gossypium hirsutum
  unsure (1)..(395): unsure at all n locations
gcttgggggtgataactttgatggtctttgccgggatttgcatcctggcccggttagtgtgttacattggagtggaaaagggaagccatgggcgaggcttgatgctaaaacaccctgccttttggatgctttgtgggcatcttatgatctcatggatacttcatttgcttttgattcttgaatcgaatgccaaaattatgcttcgggtgtaagtgtttgttggctaggaaagtgacggaatcgtcgagaaacggtggagctataaaagctctaagctgcaataatgccagggcggagctttagctatgtgtttacaaacgattgacggattaaattaaatgtgaaccaaattgatttaatcctcaacaggtttcaactntgattataggagtaac

SEQ ID NO: 210962 - DNA, 382 bp, Gossypium hirsutum
aaagagatggatcgagaagcaactttaaaatattccatcgaagagctcgaagccaaagggaaagaatcattacacctcaagaaacaagtcaaagagttggaagataaattgcaagaagctgaagctaaaatgaaggttgcgagcagtgcagctgaatcgaaggatagtgtagaggtgaattccagagatattgacggattaacattttcaacaccaacaaaacgaaggagtaagaaaaagtcggaagccgcttccgtacaagttgcttcctcttcttcatcagctacccatactgaggcttctactttgacgaacttaaagttcgttctcggagtagcccttgtgtcagcgatcattggtgttattcttggaaagcgttatt

SEQ ID NO: 210963 - DNA, 389 bp, Gossypium hirsutum
cccacgcgtccgcgaggatgaacgtgatgctgaagatgctattcgtgaacttgataatagtccttggggttatgaccgacggcgactgtctgtggagtgggctaagggtgaacgtggtcgacgtgttgatggttctaggtcagtgacaaatcatagacccaccaaaaccttgtttgttatcaactttgatccaatccgtactagggaacgagatattctaaggcactttgagccatatgggaaggttcttcatgttcgcattaagcgaaactttgcgtttgttcagtttgcaacacaagacgatgctaccaaagctctcgaggctacacaaaagagcaagttactagacagagtcgggtctgttgaatatgctttaaaggatgatgatg

SEQ ID NO: 210964 - DNA, 383 bp, Gossypium hirsutum
ctttgtgcgatgacaggggcaaccatttctttaaggattgccatattcgtggcactggggatttcattttcggaagcgggacatctttatatctgaacacggaaatattcgtggtaggagatccggaaggagatccggaaatggcaataattacagcacatgcgcgagaaagttcatcggaggacacgggttattcgttcgtgcatggcagaattacaggaacagcgaaggacgtatttttgggcagggcctggaagagcagtccgagggttgtttattcttatactgaaatggacgaaatcgtccatcctggtggatggtctagtaatcgccaacctgaacgagccgacactgtgtactacggagaatacaaatgcacgggg

SEQ ID NO: 210965 - DNA, 327 bp, Gossypium hirsutum
gaacttttgaaacagtcacttgttaatgctgctggaaaggatttgttttttggtctttgtatgcttcatggtgccattcacccatggccattttaagtctttgtttattggcacaggcatatcagcatgcaagtgcccgggttcagtccttggttgaggaagatattaatgtcaagttcttggttcaccttgataaattgattcgcttgctcgaaactcccatctttgcttatcttagattgcagcttcttgaaccaggaaggtatatatggttgctgaaagcattgtatggtcttttaatgttacttccacagcaaagtgctgcat

SEQ ID NO: 210966 - DNA, 453 bp, Gossypium hirsutum
tcgcccacgcgtccgcccacgcgttcgcccacgcgtccgggaaactgaagtaaatatactgatggtgctgatgggcatgaaatgggtgcaaagcgtcagcggataattgatcaaggcccttcattctatggaaactctccaggttcaagcttcatgtatactgcccctcctcctccttactcatatgttagccaacctccacctttccctgttgttcgacttcgtggtcttcccttcgattgcacagaaactgatgtggctgaattcttccatggtctggacatagtcgatgtcctttttgtccataaaaacagcaagttcactggtgaagctttttgtgttttgggttatcctcttcaggttgattttgcccttcagaagaataggcaaaacatgggcaggagatatgtagaggttttcagaagcaagagacaggaatattataaggcaata

SEQ ID NO: 210967 - DNA, 279 bp, Gossypium hirsutum
cccacgcgtccgcccacgcgtccggagcattaccacaaagcagccttgaatgccattcgggcagggtttgatgggattgaggttcatggagcacatggttatctcatcgatcaattcttaaaagatgggatcaatgatcgcacagatgagtacggtggatcattggcaaaccgctgcaaattcttaatgcaaattgttcaagcagtagcttcagccattggtatagatagagttgcgatcagaatgtcgcctgcaattgatcacctcgatgcaaccgac

SEQ ID NO: 210968 - DNA, 360 bp, Gossypium hirsutum
  unsure (1)..(360): unsure at all n locations
agcagcttangcaaccagttcgcagccatggtgaagtattcgaaggagtcagataatccggccaagtcctgcaaggcaaggggctctgatctcaaggttcatttcaagaacacaagggagactgcgtttgctatcaagaagttgcctttgggtaaggctaagaggtatttggaggatgttatggctcacaaacaggccgtacccttcagacgcttctgtggtggtgttggacgtacagctcaagcaaagaacaggcattctaacggacaaggtcgctggcctgtaaaatctgccaaattcattctagatttgctgaagaatgctgagaacaatgccgaggtcaagggtttggatgtggat

SEQ ID NO: 210969 - DNA, 296 bp, Gossypium hirsutum
agaactcaaataaaaaaaattaaccctaattaaattgcccccaaatacgcgccccatgttcatagatggtgaccattatcagcattcttgctcatgagcgaacgcttggtgcaacattatgatgctcattgacggggatcgttgtattggatcaacgtaaacgcatatatgattccgttacaaactatcaatctgctatgaaagaacctatatttggaaagaaatctcacttaaagtttgcccttctattgaacaaaaccgaggaccatatatttgtaccagtgattgaagccatt

SEQ ID NO: 210970 - DNA, 271 bp, Gossypium hirsutum
ttagagaaagtcctgttgactgttaaaccacaatatggatttggtgatgatggggggccggctactttcggagaatgctctgttcctccaaatgctaccctccatataactgtcgacttggtttcttgtaagaatgtttcttatatcacaaaatacaaaaaggtctcgaaatagattgtgaaagaagcagacggttaccaacgaccacttgatggaacagtgtttcaagtcaaattaataggaaaactaccgtattgaacgatcttgataa

SEQ ID NO: 210971 - DNA, 421 bp, Gossypium hirsutum
  unsure (1)..(421): unsure at all n locations
gcgctgaacaccatccatcgagtggatgaactaatagcattgatcctaatggtacccatatgaggagggggaatccttctcatcacagcctatgctcancaaaacacattctccctccaacaggccaaaagcatgaacagtcacctcaccaagtcatttgagatccctgctggttccatgactgtcttcaccatggtctccatgctctccaccataaccttgtatgaccgtgtttttgtccgcattgcccgtatatacacattgctcaagcgaagcatcagctttcttcacaatatgtgaatatgattcatgatatcattattagccactctggtagcatgcttcgtgtgaagtgaaacgtaaacaagcttctttaccacattggcttcattacaaagctcattcaatcatccccatctca

SEQ ID NO: 210972 - DNA, 196 bp, Gossypium hirsutum
gcgcccacgcgttcgcccacgcgttcggagagctcttgcaacatatgggactcaagcactgggggaaatgatccaaaattgtatggcacaagatttttcatgggaaggaccattaaaggtgggggaaaaaaatttggttaaccttcgggtggcttgcaatgaaccttgcatttaaagaaaagaaggtggttctttt

SEQ ID NO: 210973 - DNA, 424 bp, Gossypium hirsutum
  unsure (1)..(424): unsure at all n locations
gttcttcggtgcagccattctaataaactccattaaagatatgctgggtaagaaatggggatcctacattccacttccgatggcaatggcaatacctttttacctcggcccgtactttgccattgacatgtgtgtcggaagtttgattttgttcgtttgggaaaagttaaacaaagaaaaggccgctgcgtttgcaccagcagttgcctccggtttgatctgtggtgacggtatatggactttgccaagttcaatacttgctctagccggggttcaaccaccaatttgcatgaaatttctctcgaaggcaacaaacactaaggtcgataatttcttgaactcaaaaagttgaatgcattcgtacaaaatctatagatggttacacttgacacgtaaaacagcatcgncaattatttataatttt

SEQ ID NO: 210974 - DNA, 323 bp, Gossypium hirsutum
actgaggatcgatcgatcatcttcctttcagatgagtgaagttttcgaagggtgtgagcggcagtattgcgagctatctgcgaatctttccaagaagtgtacggctgctgttgctcttactggagagcagaagaaacaaaaactttctgatgtaagagctggagtggaagatgcagaagctctgattcgaaagatggacctcgaagcaagaagtttgcagccaaatgttaaggctgtacttcttgctaagttaagggaatataaatcagatctaaacaatctgaaaagtgaagttaaaagaatcgcatctggtaatttgaatg

SEQ ID NO: 210975 - DNA, 324 bp, Gossypium hirsutum
  unsure (1)..(324): unsure at all n locations
tccaaacactantagaaggtttagttttacaaacatggctagttccggtgtcgttaaggtggtttccatgattctcatggtgtgcatgacgatgatgagtgcacccaaagcagccaaagccgccatcacgtgcagcgacgtgttgaaccacttgatcccgtgcttgtcctacgtacaaaacggcggtacacccgctgctgcatgctgcaatggggtaaaagcactctactgcgaggttcaaacctccccggaccgccaaaacgtgtgcaagtgcattaaaatcgcggttaaccgaatttcctacaccaaccataacctcaattt

SEQ ID NO: 210976 - DNA, 317 bp, Gossypium hirsutum
cggaatttcgaatgggattacagatggatggactaccctccacaggctagaggtttggggcacccaaatgatggatcagtggctacttataaaggtcactcagtgttgcgcactcttattcgctgttatttttcacccgaatacagcacgggccaaaagtacatttacaccggatctcatgattctcgggtttatatttatgatgtggtcaccggagcccaaattgcggtactgaagcaccatacatcaccagtaagagactgtagttggcacccgcattaccctgtgttggtcaactcctcttgggacggggacgt

SEQ ID NO: 210977 - DNA, 457 bp, Gossypium hirsutum
acgaccaagccttgtctcaacaaaatggttctttaaccaaagtagatcctcaacatccttcagcgaaccttctaagtgatcttttgggcccacttgccattgaaggccctcctggtgctactgtccaatctgagcacaatgcagtctctggattggaaggtggtccagatgcagttgatggttcagccatagtgcctgtcgaagagcagagaaatacagttcatccgataggaaatattgctgaaagattccatgctttatgcctgaaagatagtggtgttctatatgaggatccttacattcagattggcattaaagcagagtggcgagctcatcatggacgtcttgttcttttcttgggaaacaagaatacagctcctcttgtttcagtccaggctctaatgttgccccctgctcatctgaagatggagctttcattagtgcctgacactatacc

SEQ ID NO: 210978 - DNA, 444 bp, Gossypium hirsutum
ggggttcattatggaatttgcagagaatctggtgttgaggttaatggaggacccaaaagagagggatagaaaattcagagaacacgtttactctatgaaggatcgatgcgcaaaaaccaaggagatgtggagttatccactgcggccttatgggttttggacatttgagcgccacaatgctcagctccgttgggatcctcagattagccaagtccccggccgcagggatccttatgatgaccttcttcaagacagttatgcgtcttcctccaaacgaaactgagaagccattagcagatggtttggagcttgatctacaaatgggaagtggacattgaaaccctttttactgtttgtttgaatttattttcaattgtgctacaaaaagattctgcttgttttgtagtctacttttgaacatttgagttgggacactggtttatg

SEQ ID NO: 210979 - DNA, 469 bp, Gossypium hirsutum
tcgagccacgcgtcacgactgacgatagctggtactgtaaattactatgacattagaaagcagtgtgaaggagacgtgtgtgacgatttctcggacgtcgagacatttctgaacctgaaatcagttagagaagcactcggggtcggagacatcgattttgtctcatgcagcagcgtggtgtacgaagctatgcttatggactggatgagaaacttcgaagttggtatcccttctctccttgaagatggcataaaggtcctcatatatgctggagagtatgaccttatatgtaactggcttgggaattcaaagtgggttcatgcaatgacatggtccgggcagaaaggtttcggttcatcccctattgttccgtttggtgtcgatggtgtagaagccgggaaactgaaaacccatggtcctctcactttcctcaaggtccatgatgctggtcacatggttccaatggatc

SEQ ID NO: 210980 - DNA, 395 bp, Gossypium hirsutum
ccaactcctctgttgaaagatgagctcgacatcgtgattcccacgattaggaacttggactttttggagatgtggagaccctttttccagccttaccatctcatcattgttcaagatggtgatcctaccaagaccatcaaggtccctgaaggcttcgattatgagctttacaataggaacgacatcaacaggattttgggtcctaaggcttcttgtatctctttcaaggattctgcttgtaggtgctttgggtacatggtttccaagaagaaatacatctataccattgatgatgactgctttgttgctaaagatccatctggcaaagacatcaatgcattggaacagcacatacagaacctactgagtccatccactccatttttcttttacac

SEQ ID NO: 210981 - DNA, 333 bp, Gossypium hirsutum
accacgcgtgcgattgaacaatgtcctgctcagaaagaccatgagacctgtgttgaaggcgatagaagattcttgtttgctgatgagccaaattgatgagatcgctcttgttggtggaagcactataattccaatggttctacaactcctcaaggactactttgatggaaaggagcccaaccagggtagcaacccagatgaagctgttgcttatggtgctgcagtacaaggaggcatcctgagtggagagggaggtgatgaatcgaaagatattcttctcctttatggaggtacacttacccttgacattgagactgttggtggagtaatgac

SEQ ID NO: 210982 - DNA, 439 bp, Gossypium hirsutum
acgactgacgatagctggtactgtaaattactatgacattacaaagccttgtcaacgagacgggtggggggatttctctgacgtcgaaacatttctgaacctgaaatcagttatagaagcactcggcgtctgatacatccattttgtctcatgcagcagcgtggcgtacgaaactatgcttatggactggatgagaaacttcaaagctggtataccttctctccttgacaattgcatacaggtccttatatatgctggagagtatgaccttatatgtaactggcttgagaattcaaagtgggctcacgcaatgacatggtccgtgcaaaaaggatacggttcatccgctattggtccgattgtgtcgatggtgtagatgccgagatactgaaaacccatggtactatcactgtcctcacggatcatgatgctggtcaca

SEQ ID NO: 210983 - DNA, 439 bp, Gossypium hirsutum
gttgcccattattcctcagtcctatgttacacatgcgcttagagtggaaggtcttcgaggtataataacagtgccagccaagctggaatcgacaaccctcgtctttgcacatggagttgacctatttttcacgcagcttgcaccttcaaggacatatgattcactcacggaagattttagttatgccttgctactcattacaatcgtggcactcgtagcagccatctttgtaacatggaggttgtccgagaggaaagaactgcaagagaaatggaggtaaaagttcttctcattacgtttgtgtattaacacatttgcttagatgacacacacccttaattatttatttgaattagattagaaaggggtctccttatgactagtaattcttcaaagtttgtagcaatcaatctttaatgtctatttcaatgctatgttt

SEQ ID NO: 210984 - DNA, 142 bp, Gossypium hirsutum
tcttaccaagtttatttttcttaccaattcttttaaaagcaaatccccatttattctcttttccaaaaggattaaatgattgatatcattggtgtcacaaaaggtaaaagttattaaggtgttgtcactcggtgtggtgtca

SEQ ID NO: 210985 - DNA, 457 bp, Gossypium hirsutum
  unsure (1)..(457): unsure at all n locations
cccacgcgtctcggaagactctnccgaatgaaagtaatagagtttatggaaaaagaagtagctcctataatggcggagtattgggagaaggcagagtttccattccaaattcttccaaagcttgctgatcttggaattgcaggctttaataccgagggttatggatcccctggtctctccatcactactagtgctattgcaaatgcagagattgctagagttgatgcaagtttctctacatttttattggtgcattctgtaggcatgcttactattgcatcatgtgggtcagaggaacagaagcagaagtatttaccttctttggcacagttaaagacgatagcttgttgggctttgactgagcctgaatatggaagtgatgctagtgctgtaaatacaactgcaagaaaggtagagggaggttggataattgacggacaaaaacgctggataggaa

SEQ ID NO: 210986 - DNA, 184 bp, Gossypium hirsutum
  unsure (1)..(184): unsure at all n locations
gaagaagagtatccaagcacagntggaaaagatgaagaaatatgcaactgttattagggttttggctcacactcagattaggaaaatgaagggtttgaaccaaaaaaaggcccacctgatggaaatccaagtcaatggtggaccaattgctgcaagggtgattttgcttacaaggtctttgaga

SEQ ID NO: 210987 - DNA, 342 bp, Gossypium hirsutum
aaagattcgatctcttttgctagaaacgggactgaatggcgatccaatcagtgaaagtaggcaacgtttctttgggtgcatctgagcaagatattaaggagttcttttcgttctctggtgacatcgaacatgtcgaaatgcatggcaataacgagcgatcgcaagttgcatatgttactttcaaggatccacagggagcagaaactgctgttcttctttcaggggcgacaattgtagatcaatcagttaccatagagctggctccggattacaagccacctgctactgcctctgcaacacctgcaacacagaacaaagaggccggccaggccgaatctgctg

SEQ ID NO: 210988 - DNA, 436 bp, Gossypium hirsutum
ctttgggtttgaaaaatggagtccaacaccaaaatgtcagctcttcttttgctttgcatgcttttcatttcttcagtgacaccaattcttgggtgtggttcatgtgggaaagcaccacacaagcatcgaaagcctaagggaaagtcccctaaaggtcccatcactttgcctccccttgtgaaacctccaatcaagttgccaccggttgttcctccaatagttaagccacccattgacctccctccggttacagtccctccaattaacctccctccagggacggttcctccagtaactaagccaccaagtgggaaaccctgcccaacaccaccaaccaaggacacttgccccattgacacactgaaattgggtgcttgtgtggatctgctgggagggttggtgcacattggactaggtgacccggttttgaatcaat

SEQ ID NO: 210989 - DNA, 442 bp, Gossypium hirsutum
ggggcatcaaaactgttggcaaacattctctattcttaccgaggaatgggactttcggttggagcgcatgattgctggatgggatgaaacgggccctggactatactatgtggacagtgaagggggaaggttaaaaggaatgcgtttctctgttggatctggttcaccatatgcttatggtgtgctggataatggctatcggtatgatatgtctgttgaagaggctgcagagttggccagaagagctatttatcatgccacattccgagatggagccagtggtggtgttgccagcgtttactacgtgggaccaaatgggtggaagaagctatctggtgatgatgttggagaacttcactataaatactatccagtgatgccaagcacagtggaacaggaaatggttgaagtaggtggggcataaatgggatctactcaacct

SEQ ID NO: 210990 - DNA, 410 bp, Gossypium hirsutum
cccacgcgtccgcccacgcgtccgcccacgcgtccgctttaagcctttttttttttaaaaaaaaagaaagaaccccttaacctgctctgttagggttagttcagcatgcagccgccaaaccaccatccattcgatggtcgacggagtgaacaacggccagatttcgccaaccgaggccgtgactacggtgatctggtaattttgctcctttttttctttatttaaaaaaaaacctcgaatcttatgatattcttttaaaaaacgaaacaaaacttgaagatttaaacaaaatctcgataccattcgacccttcgccacatctatatatttttgaggatgtcgggctctcatcggcgtcgattcgagtatccacttcatgtattcatccctaaatggtagctgatcacaag

SEQ ID NO: 210991 - DNA, 353 bp, Gossypium hirsutum
  unsure (1)..(353): unsure at all n locations
aaatattgaagagatgggtgcaatgaatgagaaatatcagtcgcctaggattcctgaaatagagatctcaactccacctccaaatgatggaatggacaaggaaccaatgcatagcaggaagaaatggaacaatgaggagagccctcctaaagcagccaaagggtttagaaagcttcttttctttggaagaaaaggcaaaaactatgctactgcttagtgtatgcttgtctntccatattgcttatgcttcgggttttcaattttttcgggtggaacgtaccaataaagcctttgatgttgctgccattcaaggattcatgaacttataaataaaatggtgaaaaaaagagaga

SEQ ID NO: 210992 - DNA, 389 bp, Gossypium hirsutum
ctggattcagctgtacaattcctcacaaggagaccgcattgaagtgctgtgacgaggtagatccggttgcaaagtccattggagctgttaattgcattataaggagacagagtgacgggaagttgtttggttataacacagattatatcggtgctatttcagccattgaggatggattacaagctagatataacatgagcagtgcagccggatcgccattagccggtaagctgttcgtggttattggtgctggtggtgctgggaaggcactagcttacggtgcaaaacaaaaaggagcgagagtcgtaattgccaatcgaacctatggtacgatgcacttgtttttcttgttgtaacattctaacaagagttattttttgttttataca

SEQ ID NO: 210993 - DNA, 354 bp, Gossypium hirsutum
aggctctcgtcgtaaggcttcttggaaggatccagaaggtcgcgtcatctccaccaccacccgagacgccgctgtctcacagcttaaacttctccgcgacgacatcgtttccaacaaggctaagttcgacgaggttgcctctcgctactccgattgcagctccgctaaacgtggcggtgatctcggtccttttggtcgaggccagatgcaaaagccatttgaggatgcaacatataatcttaacatatgcgagataagtgacattgtggatactgatagcggtgttcacatcataatgagaactggttgatcattagtgatggagcctggatatcgagagcaattagttcagtc

SEQ ID NO: 210994 - DNA, 454 bp, Gossypium hirsutum
aacggaaaaaaaagaaagcatagagagagagagagagaggcatatgctactgtgatggatgcttgagaggtagcagacttaaagctccttgttgatcagtgcaaatcaaacccttcaattatccacactccctctctttccttcttcaagtcctatctcctaagtctgggagctcaaattccaaccgacccacggacggatagaggtggtgttaaaatggaagagcctgagcaacactctgatgacaagaaaccctatttttcaaatgaagaagatgatgatattattgagtccgatgtcgagttagataataacggtgttgtggaacctgacaacaatcctccacaaaaaatgggagactcttcggttgaagttacggaggaaaagcgggatgctgctcaatcggaaaaattaaaagccatggatgcgatatctggaggtaagctggatgaac

SEQ ID NO: 210995 - DNA, 446 bp, Gossypium hirsutum
  unsure (1)..(446): unsure at all n locations
cccacgcgtccgattaggaaacaagatgatgatagaagagacaaagcgcagtatccatgatgcattgtgtgtggccaggaatctcattcgcaacaattctattgtctatggtggtggctcagctgagatttcttgctcaattgctgtggaggcagctgcagataaatatccaggagttgagcagtatgcaatccgggcatttgctgatgctttagactcagtccccatggccctggctgagaatagcggactccaacccattgagacactatcagcagtgaaatctcagcaaattaaggacaataatccacactatggaatagactgcaatgatgttgggactaatgatatgcgggagcaagacgtctttgaaacactgatcgggaagcagcaacagatcttactggcaacgcaagttgtaaagatgattntgaaaattgatgatg

SEQ ID NO: 210996 - DNA, 362 bp, Gossypium hirsutum
aatctttgaaccacatctcccttgtgtgtagatcagttgaggaatccatgaacttttatcaggatattcttgggtttgctccaatcaggagacctggatcatttgactttaatggggcatggttgtttggatacggaattggaatacatctcctgcaatcggaggatccagagagtttgcccaagaaaaaggaaatcaatcccaaggataatcacatttctttccaggttatttcaattcttttcattccagcatattattttattcctccttgggctaatccaatatctaagtgtgaagaaacaacatcctgctctctacagattaatatatggcgcatataaattgctactctgtttctc

SEQ ID NO: 210997 - DNA, 421 bp, Gossypium hirsutum
  unsure (1)..(421): unsure at all n locations
gttgcaggagatgcatgtgttgccatggaccagtgggtccagaatcccactgcacatactgcgctagatgacattctgccatgtgtggacaatgcaacggcccaagagaccttgttacaaaccaagaatgtcactcaccaacttgtaactgtcgtgaatggcatcatcaatactggtgccaaccgtaatttcccaccacaattggcacctttatattacaatcaatccggtccattggtgcctgttctctgcaatccattccattcaaatctctcggagcgtatgtgtgcatctggtgaagttagcttgtacaattcttctgaggtttggaagaaatatacctgtaacatatctacacctttcgggatttgtactacacctangcggctgacccctcaattctatagtcagatgtcagctg

SEQ ID NO: 210998 - DNA, 332 bp, Gossypium hirsutum
gcgaaaacaaattcaacaggttctgaaataaagtggaaaattccaacagaggcgactcctacagaattatatgccagatttatgagtgaactgtacagtctgcttgatggatctgctgataatgctaagtttgaagacgaatgtcgagctataataggaaaccaatcatatgtgttattcacattggacaagttattatataaattggttaagcagcttcaagctgtctcagcagatgatatggatactaagcttctccagttgtttgagtatgaaaaatcccggaaacatgggaagacaatggattctgtttattatgagaatgcacgtgt

SEQ ID NO: 210999 - DNA, 360 bp, Gossypium hirsutum
cccacgcgttcgatcgattctatcgaaaaccatggaaaaccccgataaaagaggaggggtagtggtgagatggtgttgaattcaagggtttttgagccctgaaagatcaaatctcccatctcccccctgcccttgtgtttcgtggtgatcaacagattagggtttttgttctctttctgaacaacaaaaatggtggggactactgagggagtggattcctctgcctccaacagcaagaagaatcagctgcaagtctccaatacccaaaaaccccttttgttctacgttaacctcgccaagaggtatatgcagctatacaatgaggtggaactctctgctcttggaatggctattgctact

SEQ ID NO: 211000 - DNA, 436 bp, Gossypium hirsutum
aacggaaaaaaaacaatgcgtatcgagagatagatttaggcatatgctactgaaatggatgcttcgagggtagcagacttaaagctccttgctgatcagtgcaaatcaaacccttcaattatccacactccctatgtttccttcttcaaatcctatctcctaagtctggaagctcaaattccaaccgacccacggacggatagaggtggtgttaaaatggaagagcctgagcaacactctgatgacaagaaaccctatttttcacatgaataagatgatgatattattgagtccgatctcgaattagataataacagaccatgtggaacctgacaacaatcctacacaaaaaatgggagactctacagctgaagttacagaggataagcgggatgctgctcaatccgaaaaattaaaagccatggatgcgatatct

SEQ ID NO: 211001 - DNA, 374 bp, Gossypium hirsutum
  unsure (1)..(374): unsure at all n locations
cccgctccttctcgctgcgatttcgtcttcaagatctcagttctcaaatcgtagcgctcttttctatcaagccatggctctgatcttgcatgcaggaaaaacaaacaaaaatgcctttaaggcactcattgctgcagaatatagtggtgtgcaggtcaaaatggttgagaattttgagatgggtgtgtcaaataagactcctgagttcatcaagatgaaccctttggggaaagttcctgtgttggaaacacctgagggtccggtatttgagagcaatgccattgctcgttatgttgctcgctcaaaggttaacaaccctatatgtggntctacattgattgattatggtcatatcgagcaatggattgattttg

SEQ ID NO: 211002 - DNA, 450 bp, Gossypium hirsutum
cccacgcgtccgctgcactaacgcaattacaaaaaggaaaagagagatgttcctatgatcattgttacttggggtcagttttcatgcccaagcttcgagggaaattttttgctacagaaaatttcttctatacctcaaagttctttaggttgcgccaaagggcctttctttccgatctaattatggcgggaaagcatttctgtgaagaggattggtcaaaattgaagaagaaacaccaatcactcaatgaggaagatctattgcgctattgtttttcttcagcatattttgtggccttgcttcacgatagccttgaaattgctttggatgatgaaaggatcagctttgctaatcaggtcaacgatataccattagattgggccttgggagctttcatattgcaaagcacatccatctcagatgtgcaacaaactgactggataactatta

SEQ ID NO: 211003 - DNA, 444 bp, Gossypium hirsutum
cccacgcgtccgactccgtccatcgtctgctctcgccaaaagacacccaaagacaccactttgaaacccggaaatgtcggacgaggagcatcatttcgagtccaaggccgacgccggcgcttccaaaacctaccctcagcaggccggcaccatccgcaagaacggttacatcgtcataaaaaatcgcccctgcaaggttgttgaagtttccacctccaagaccgggaagcatggtcatgcgaagtgtcactttgttggaatcgatatcttcactgccaagaagctcgaagatattgctccttcttcccacaattgtgatgttccgcatgtcaatcgtactgactaccagctgattgacatttctgaggatggatttgtgagttcgctgactgagagtggagacactaaggatgatctgaggctgccaactgatgagaacttatt

SEQ ID NO: 211004 - DNA, 284 bp, Gossypium hirsutum
catatgttcaattactggaattgactgcatgggaggttttcacccttcattggatgccattcttgaaggactcggttatgcagctcctccaatcatggcccttcttttcatattagatgatgaagtagtgaaactttctcctcatgctcgtgcaataagagatgtcgaggatgaggaattaaggagcttcttttatggaatggcaccttggcagttcatacttatggtcgctgcaagctcagttggagaggagcttttctatatggcagctgttcagggagcat

SEQ ID NO: 211005 - DNA, 355 bp, Gossypium hirsutum
ctcaaaagaaaacattattcagttgtggactgctgtcagacagcccaacgtatttcttcccacagtttttattttcttgtggcaggcaacaccacagtcggactctgccatgtttttctttaccacaaataaacttggtttcaccccagaatttctaggacgtgtcaaacttgttacttcagttgcatcgctggctggagttggactgtataatggatttttaaaaaatgttcctttgcggaagatttttcttgccacaacagttactggtacagttcttggaatgactcaagtctttcttgtcacgggattgaaccgacagtttggataagtgatgagtgggttgcaattgggg

SEQ ID NO: 211006 - DNA, 361 bp, Gossypium hirsutum
cgacaagagaatgttgctggagtgaagcttccaaagtttgagtattttactgaaggtgagaccaaaaatgatttgactggtttggcccgaggtggacaacaggtccaacagtgccgtgctgcttacgtgaaagcaattgaggttctagttgagcttgcttctcttcagacttcattcttaacactcgatgaggcaatcaaaaccacaaatcgtagggttaatgctttagagaatgttgtgaagccaaggttggagaatacgataagttacattaagggagagttggatgagcttgaaagggaggatttcttcaagctaaagaagatccaaggttattagaagagggaaatagagaaacagc

SEQ ID NO: 211007 - DNA, 437 bp, Gossypium hirsutum
cccacgcgtccgtcgaacttggaaaaacttcttgatcttgttgagaagagttgccaccaagatcggaaagaaaccatggttcacaaagctgctctgaaagtatgaaaacgatgaacattcaccaaactacaggttgtggccaagttgaaatgtgctttttggaggcaagtggcttaatatgatggtgaaaaaaagtatgttgctatgaccttttctataactgaaatttggttactatagggaaaaccaaaagatggtgcctgttttttatagcaggagggaagaaaacaattaggtgtgttatttgaattcttcatcactattgacaatttcgcatctttcacattatttcaccactatttcttcgagcaagttacggaggaaaagcgggatgctgctcaatcggaaaaataaaagccatggatgcgatatctgga

SEQ ID NO: 211008 - DNA, 363 bp, Gossypium hirsutum
gttggttgacacatatttcctagatccagcaaggaactcttggaagcaaacctgctgctcgaaaaactcagaccatcgtattggttttcagctcacttgcactgcaaattcaccgctcttgttgaacatgaagagggtggtcgagtgacaaaatttcttgcactcgataaatgccttcctgggcgcaagttcttgcaggttgttgatattgatctgatctaggaccttatgaggttcagtacgatgaagaatggctggcaataacacggaaattgaactgtgtctttcctttgaccttccgatgtggagacgttgggtaggagaacaaagctcgacatgcaagattgtcgtcaatgggttaag

SEQ ID NO: 211009 - DNA, 439 bp, Gossypium hirsutum
ggcaggcagccatggcaaggatcaaggtgcacgagttaaggagcaaatcaaagacagagctgttgactcagctcaaggatttaaaagccgaactttctctccttcgtgttgccaaggtcactggtggtgcccccaataagctctccaagattaaggtggtgaggctatccattgctcaagtattgacggtgatatcccaaaaacagaaggctgctttgagggaagcttatacgaagaagaagtttttgcctcttgatctccgtcccaagaagaccagagctattcgccgccgccttaccaagcaccagctatctttgaaaaccgagcgggagaaaaagaaggagatgtactttccgatgaggaagtatgccattaaggtataagcttgaaatttgacttaagatggatacctttatgttagtttcaaagtgactattcg

SEQ ID NO: 211010 - DNA, 358 bp, Gossypium hirsutum
cgagaacacagttccaactggagaaatcaagccagttaaagggactccttttgacttcactgctgagaagaaggttggtcttcaagtccatgaggtaggtttgggttatgaccataactatgttcttggcggtggggaagaaaaattgggtttgaaacgtgctgccaaattgaaggacccatccagctcgagggtccttaacttatggaccaatgcacctgggatgcaattttacactggtaattacgtgaatggagtagtcgggaaaggaggtgctgtttataataagcatgcagggttatgcttggaaacgcagggatttccaaatgccataaaccaatcaaacttcccatcagtc

SEQ ID NO: 211011 - DNA, 400 bp, Gossypium hirsutum
gaatgcctatacaaggattttggccaagaagcatccaaatttctgcatcaactgtgtttgccctggttttgtcaaaacagatataaataacaatgccgggcattcaacccccgaagaaggtgctgcgattccagtcaagttagcactttggccgaacggtggtgccccttccggcctatttttcgttcacggtgaacctgtaccatttgaatgaaactaaaaaaaaaagaaacaatataatcccatcaaagtggtcggcaacttagctcacaattctctcttcatcatcgattacaataacaatgtgtcaacatggttcttcggactatccattcaagcacggtagaacaagtattaggtgcttcacaatttttccaggttcattcctttaaaaagaaat

SEQ ID NO: 211012 - DNA, 453 bp, Gossypium hirsutum
ccaagccagagaataaagactcgttatctatgattatcaacccaagggcagtctattctccctgattcacggtgatacctcctgtgacaaactgagttaagctgcgatttaactcggtgttaactcgggttgcacattaattccttgggtttgccgcaaagcatatgatatattaactagcgttaatatagttgaattataaagcactttctttaatgcatttgcatgtgcaggatcgaaatcaacaagggctaagccactccactggacctcgtgcttgaaaatagcagaggacgttgcacaaggtctcgcctacattcaccaagcatggagactggtccatggcaatctcaagtcctctaacgttctactcggacctgatttcgaggcctgtttaacggactactctctggcagtcctaatcacacccacccacgatgaagaccccgactt

SEQ ID NO: 211013 - DNA, 392 bp, Gossypium hirsutum
gaagtttagcttccgaggtgtcgatttggatgctctccttgatatgtccactgatgagcttgtcaagctcttccctgctcgagctcgcagaaggttccagaggggtttgaagagaaagcccatggctctaattaagaagcttcgcaaggcgaaaagggaggctccacctggtgagaagccagaaccagttagaacccacctgcgtaacatgatcattgtacccgaaatgattggaagcattatcggtgtgtacaatggcaagacattcaaccaagttgaaatcaagcctgaaatgattagccattaccttgctgagttttctatttcgtacaagccagtcaagcacggtagaccaagtattggtgctacccattcttccaggttcattcctc

SEQ ID NO: 211014 - DNA, 442 bp, Gossypium hirsutum
  unsure (1)..(442): unsure at all n locations
cggacgcgtgggccagatacaaattacttgttcatgggagattatgttgatcgtggttactattcagttgaaactgtaacactcttggtagctctcaaagtgcgttacccccaacggataactattctgaggggaaatcatgagagccgtcagattactcaagtgtatgggttttatgatgagtgcctaaggaagtacggcagtgccaacgtttggaagatcttcactgatctgtttgattattttccactaacagcattggttgaatctgaaattttctgtctccatggtgggttatctccatccattgaaacactggataacatacgtaactttgaccgtgttcaagaagttcctcatgagggtcctatgtgcgatcttttgtggtctgaccctgatgatcggtgtggatggngcatttcacctaggggtgccggatata

SEQ ID NO: 211015 - DNA, 444 bp, Gossypium hirsutum
acgcccacgcgtgacgggattcaaattacacccagttgactgagctttacaacaaatacaaggacaaagggttggagatcttggcatttccttgcaatcagtttttgaagcaagaaccaggtaccagccaagaggcagaagagtttgcttgcataagatacaatgctgaatatcctattttcaaaaaggtttgttgcaacgggccgaataccgaacctgtcttcaagttcttaaaagcaaagaaatctggtttcttgtgatctacgataaaggggaacttcactaaatttttagttgataaggatggtaacgtactctctcgctatagcccaaccaccacaccactggccatagagggtgacatcaagaaagcattgggagtggatacgtgaaaatataagaggtggagggaaaatggaaactaaaaacaatgtatataggatg

SEQ ID NO: 211016 - DNA, 351 bp, Gossypium hirsutum
cccacgcgtccgctttagggaagtataatggcttctctgactatggttccaagttcagtggacgaatcccatatggagaaaggtttgcacagactgatggaattgctccagttgggagaggaaggggaccttcttggagatctgaaacgtctgatgattgggatttccctgcgtttaatgcatcaaggaatggacaatttcaatcaagaagagctccagctagcagcggcctggatggtagatcacccaaatcagaacacgagagtgatcagattggtggcaggagaggttgggacaagggtcccgggcctgaaagacttggtgaaagaccttcagctagaagtgtctggc

SEQ ID NO: 211017 - DNA, 247 bp, Gossypium hirsutum
ggcaggcagccatggcaaggatcaaggtgcacgagttaaggagcaaatcaaagacagagctgttggctcagctcaaggatttaaaagccgaactttctctccttcgtgttgccaaagtcactggtggtgcccccaataagctctccaagattaaggtggtgaggctatccattgctcaagtattgacggtgatatcccaaaaacagaaggctgctttgagggaagcttatacgaagaagaagttttt

SEQ ID NO: 211018 - DNA, 296 bp, Gossypium hirsutum
  unsure (1)..(296): unsure at all n locations
gtcctcccaccgaccggagcaattatgtcaactatctatgatgaaaaaaaggatgaagacggatttctgtacgttacatacagtggagaaaatacatttggctagcagatcatgcagggaccttatttccatgctatagtttacatttaattgaataaattaataattgtggcattctgcctaatatatgatatgattcctcggaatgcctatacgtgtatagtttcaccgtacataattccatgtcaatctaaaatgtcggaactattgctcaaattcnnnanannnaannnnaa

SEQ ID NO: 211019 - DNA, 441 bp, Gossypium hirsutum
gggagaaatatcgtggttccaggatatgagcaaggaaattttattggtccgacaattttaactggtgtcacagctgacatggaatgctataaggaggaaatcttcggcccagttcttgtttgcatgaaggctgacagcttggaagacgctttaaacattgttaacagaaacaaatatggtaatggtgcttctatatttactacatccggtgctgtagcgaggaaattccagacagaggttgaggctgggcaggttggcatcaatgtccccataccagttcccttgccgtttttctcatttactggcaataaatcatctttcgcaggcgaccttaacttttatggcaaggctggagttaactttttcacccagattaaaacagttactcaacaatggaaggatttacctagcggcagcggtgttttcctagcgatgccaaca

SEQ ID NO: 211020 - DNA, 444 bp, Gossypium hirsutum
gtcttctcaaaactcagagcatgatgagatagattttgagttcttgggcaacagaacagggcaaggatacattcttcagaccaatgtgttcactggtggcaaaggagacagagaacaaaggatttacctttggtttgacccaaccaaagaataccactcctactctgtcctctggaacatgtatcagatagtgtgagtgctctttttctttttttaagtatttcaactgaaatgcacttgttatttagtgattctgattaagcttttgaaaaaaaaaataatgggggtgcaggttctttgtggacgacataccaatcagagtgttcaaaaactgcaaagatttgggagtgaggttcccattcaaccaaccaatgaagatatactccagcttatggaacgccgatgactgggccacaaggggtggtctcgaaaagaccgactggt

SEQ ID NO: 211021 - DNA, 442 bp, Gossypium hirsutum
ttttcttgttaatctgagtttgttgtgtgtaatttttagggttcaagggtaaattgtcttcttgttcttcttcttcttcttttatgtctgcatctttctgaatttattcgagatagagaaaaaaaaagagatgcatattgaggaattgaaagaaggggagcagcaggatcaagatcagagtcaattgtgtgaagatagattggttgtttgggacgcaaaaagggttttggtgggagcgggagcacgcgcccttttttacccaacgttgttgtacaatcttgtaaggaacaagatccagtctgaatttagatggtgggatagagttgatgagtttattttgttaggtgccgtacctttcccagcagatgttccccggttgaaggatcttggtgtctctggagttgtgaccttaaatgaaccatacgagtacttggcccaacat

SEQ ID NO: 211022 - DNA, 340 bp, Gossypium hirsutum
gaccaagacaccaggtcctggtgcacagtcagcacttagagcccttgctcgttctggcatgaaaattggacgcatagaggatgttacccccattcccactgacagtacccgtagaaagggaggcagacgtggaagaaggctgtgattcttcgcttcgtatctgttgctcactgttgctgctcctccaatatgcttggagtttcttttttaaacaatttttggtttagattgaagattgttttgccctgttatgttgttgcacattagttccagaatggattttgatcgtaatttacatgtggaactcttggaagtaatctttttattgattttgattttc

SEQ ID NO: 211023 - DNA, 395 bp, Gossypium hirsutum
cccacgcgtccggaaggacaaaaaaaacactattaatgaagtgatcaatttcccattcttgaaagaaacacacgatcccattgagaacaatttataccctttcgttttcctttcaactgatgacaacctcttcgtttttgccaataattgttcggttcttttgaacacccaaacccacacgattatccacgagtacccagtgctccctggtggtgctcataattatccgtcatcgggatgcgcttctctccttccaatcatgcttaaacctaatgaagataggaaatcaatccctgtcgaggttttggtgtgcggtggaacgccgcatgatgcatatacaaaggccgatttgcaacgccctaaggtgtttttgccaggaaacaccgattgtgctc

SEQ ID NO: 211024 - DNA, 359 bp, Gossypium hirsutum
cccacgcgtacggaaggacaaaaaaaacactattaatgaagtgatcaatttcccattcttgaaagaaacacaccatcccattgagaactacttataccctttcgttttcctttcaactgatgacaacctcttcattgttgccaataattgttcggttcttttgaacacccaaacccacacgattatccacgagtacccagagctccctggtggagctcataatgatccgtcatggggatgcgctgctctccttgcaatcatgcttaaacccaatgaagataggaaatcaatccctgtcgaggctttggtgtgcggtggaacgccgcatgatgcatatacacaggccgatttgcaactcc

SEQ ID NO: 211025 - DNA, 424 bp, Gossypium hirsutum
cccacgcgtccgcccacgcgttcgcccacgcgtacggcggaggcatgggaactataacctgagggttagagctgatatcaatgatgtgattgcagctttggccacggaagctggctgggttgttcttgctgatggaaccactttttcatcaagatctcagagttcacctgctgctggcacttctgctggcatgacttcatcctcctctcaaatggtgtcacaacagattccacctccccctgccactttgcaaagagtctcttacggctatcgcaccacagaggagtacaatgcttgacggatgaagagtgttttcatgcctaccccttcaccttatgatctatcctcaactgccccggctcaaagttcacgcgtggatgctgatggtggagaacaaacagaaagactttctcttattgctggc

SEQ ID NO: 211026 - DNA, 375 bp, Gossypium hirsutum
tggtcctcctgcaacagctcttgggtttaatcctccagatattgggataatgcacaagccaccacgcagaagtgatgatgctctcattaactcttgggtcctcttccgttacttgataataggttcatatgtgggcatagcaactgttggcatcttcatcttgtggtacactcgggcttcttttatgggtatcaaccttgtgagtgatgggcacacactagttgaactgtctcagcttcataactggggagagtgctccacatggtcaaatttcactgtggctccatatatggttggtggaagccaactgatcactttctcaaacccatgtgactacttcaccgctggtaaagtgaaagcaatgactctggcatt

SEQ ID NO: 211027 - DNA, 371 bp, Gossypium hirsutum
ttgtctacaagaaaactgcatccgtcttgtgcttgaccacggttaagaacgaggataagatggaattcagcaaaatcctcgaggcaatcaaggccaacttcaacgacaagtacgatgagtacaggaagaagtggggaggtggtatcatgggctcgaaatcacaagccagaaccaaggcaaaggagaagcttcttgcgaaggaagccgcacaaaggatgacttaagccaaccattactccctttggttaccaagtcaaatttactcctttgcccgaggattacttatatattttctagtttaactttcaaaacatcgagtagctgctgtttgtgatgtaactttgtgccttttcttaatgaaaattatgccc

SEQ ID NO: 211028 - DNA, 413 bp, Gossypium hirsutum
cccacgcgtccgcccacgcgtccggtttttaacaatacaaatagataaaaattttagctaaagaattagtttgctctttgatctaatgtataaagattaatttgtctattttctgaatatatgaagcaaaatgcaatacttttacttgcaaaaaacatatgatacgttaggttgaattatatgaattcgtgcaggtttcatggtcctatacttatactagaccagggtacataaaaaaacaacaccagtctgttccgaaagattggtggacggaagatgtatcggatctcgatatagaccttttccgatgcataataacagcagtaagatcgacatatataccaccgccacagctcattggtgaagctttgcatgtgtatgcatgtcgttggctaccggacactacaaagtct

SEQ ID NO: 211029 - DNA, 416 bp, Gossypium hirsutum
aaaggaaactactgttgaggcagtgaatcgtcatcttgatattttgagaccagctattaggaattatggtgggagtgtggaagtattgtctattgaggaaggggaatgtgttgtgagttatacagggcctgaaactattggatcagggatcaaagctgcaattaaggagaaattcccagatattaccaatgttgtattaactggctagctttttcattttcatatcagaagctgaaagttttggccttttgtttatttttttctttttcactggtaatgcctgtttcttttagataatagatagacaaagtacatggggatggtgattaaatgttgtatctgtatgcaaagattcatccttattttcatggtcatacatgtaaaatcttatacaggtattcaataatttcatatgg

SEQ ID NO: 211030 - DNA, 395 bp, Gossypium hirsutum
cggacgcgtgggcggacgcgtggggaagtcccttttcctccacaaatcacaactaccaagccactatctcttttgggtcatggaattaccgacattgagattcactttttgcaaatcaagttcacagcaattggggtttaccttgaaccagaagttgtaggacatttgcaacaatggaaggggaagcctggggacgtgctagctgaagatgatgacttcttcgaggctcttattaatgctccagtggagaagtttctgagagttgtggtgattaaggagatcaaaggttcccaatatggagtgcagctagagagtgctgtgagggaccgattggcagctgacgacaaatacgaagaggaagaggaagaagccttggaaaaagttggtgaattctt

SEQ ID NO: 211031 - DNA, 420 bp, Gossypium hirsutum
aatggaggtacacaatccgtaaccctgtgttttggcgtacagcctgcttaaaggcttggcagctttctggcctggtggagaattataagatcttgcaatcaaaatatgaaggttcatggaggaaaatgtggcttttaagacctcgggtacgaactgatggtctctacgtaagtcggaatacttatattcgtgctggagttgcagagtggaagatcacaaatccagttcacattgtctgctactttcgttacttgagattttttccttctggcagatttctatacaagaattcctctcaaaaaaataaaggatgcagcaaagttcatgaattttcgtgcatccaaagcagactgtgtttttggtggccattacactttgtccgataacaaggttgaagctgccgtcttgtaccctggcatg

SEQ ID NO: 211032 - DNA, 420 bp, Gossypium hirsutum
gtacaatcaaggctgagttgcaatgactttgtggaccatagactagttggaagcttcaccatggctggtattaaggatatgatcaagttggcattgaaatgcatgagttttcccggggaaaggcggccagatatgaacaccgtttcgattgaactcgaacggatccgtgaaaacgagatggaaatgacaacagtaaaaggtgaaggtactgcaaaaatcgcttaggtagtgagctatttgcttcaaaataaggatccatcccaatgtagttttattaaagcttggggccaaagcttaggataaaaaatgaagtgtttataaagtaggggtagtgaagctgctatcataaattaatggaaatgtgtatatttattttatgggattttattgataaatattaatgtatcatacagcttatta

SEQ ID NO: 211033 - DNA, 428 bp, Gossypium hirsutum
gaagattgataagttcatcggaggtgaaacaagcttgcctttacatgggttggaaggtaatggtggtggtagcagtggtggtgctaatgggcggtactatttggggatgttcttgggtggggcttaccaggaatccctcggtggagttcacaacctctttggtggcccaagtgttgttagcgtgtcgcagagtgatggtccatatagctttgcggttacgcgggcggcgcctggtccgtcatgtggggatgtcctccgagtgatgcagcacgagcccgagctaatgtttgagaccctcaagcaccgtgcggaagaattttgtggacaggaccatggcaatgaaggcacccatgctgctttagttagcaccattgctcgttctttccacaacatgccttatcttgtagtggcatcccctttgtttcgtg

SEQ ID NO: 211034 - DNA, 427 bp, Gossypium hirsutum
accagattgccttggccatcaaggatgaagtggaggatcttgagaaagctggtatcaatgttatccaaatcgatgaggctgctttgagagaagggttgcctcttaggaagtccgagcatgccttctaccaaaaatgggctgtccactccttcagaatcaccaactgtggtgtccaagacactacccagatccacacccacatgtgctactccaacttcaatgatatcatccactcgatcattgacatggatgccgatgtcataaccattgagaactcacgttcagatgagaagctcctgtcagtcttccgtgaaagagtgaagtacggtgctggaattggacccggtgtctatgacatccactctcccagaataccatcaaccgaagagattgctgacagaattaacaagatgcttgccgtgctcga

SEQ ID NO: 211035 - DNA, 395 bp, Gossypium hirsutum
ggagaagaagaaaaagaaaatggcggaccagcttaccgatgaccagatctctgagttcaaggaggcctttagcctctttgacaaggatggcgatggttgcattactaccaaggaactgggaactgtgatgcggtcactcggacagaaccctactgaggcagaactccaagatatgattaatgaagttgacgccgatggaaatgggaccatcgatttccctgaatttctcaacctgatggcaaggaaaatgaaagatactgattctgaggaggaacttaaagaagctttcagggtgttcgataaggatcagaacggtttcatatctgctgccgagcttcgtcacgttatgacaaatcttggcgagaagcttaccgacgaggaagtcgatgagatga

SEQ ID NO: 211036 - DNA, 416 bp, Gossypium hirsutum
cccacgcgtccggcaagctgtcacagtccatgccactaacaactactttgtaactgcttcacttgacacgacgtggtgtttttatgatctttcgtctggtttatgcttgacccaggttgaagacctatcaaattctatgggctatacgtctgcagcttttcatcctgatggccttatccttggaactggcaccactggagctactgttagaatttgggatgtgaagagtcggggaaatgttgccaactttgatggacacactggggctgtaacagccatatctttctcagaaaacggttacttccttgcaactgctgctcatgatggtgttaagttgtgggatctacgcaaattgaagaactttcgatcttttgaattatatgatcaagacacaccaaccaactcagtggattttg

SEQ ID NO: 211037 - DNA, 419 bp, Gossypium hirsutum
ggggagttccaatgttacgacaaaaacatgcttcaccttcttaagcaacatgccgaagcatgcggaaagccaaagtggggactaggtggccctcatgatgcacccgctaacagcgagttgcctacagcaaacaccttcttcaaggatcatggtggatcttgggaaagtccttatggtgatttctttctttcttggtactcaagccagctcatagctcatggagatcgcctactctcacttgcctcttcggttttcagtgatagtgcagtgaacattttcgggaaagtcccgttgatgcactcttggcacggaacccgttcacatccttccgagctcacagctggcttctacaacactgccacgagaaaaagctacgaagaagttgcagagatgtttgcaaggaattcatgcaaaatcat

SEQ ID NO: 211038 - DNA, 432 bp, Gossypium hirsutum
gtcactgttgctaccgtaattggtcacaagaaacaacaagatgcatgtgatggtgttggtctcttgggtattgcatgggctttcggtggcatgatctttatccttgtttactgcactgccggtatctcaggtggacacattaaccctgcggtgacttttgggttgtttttggcccgtaaagtatctctcatcagggctgtggcttacatggtgtcacagtgcttgggtgctatatgtggagttgggttggttaaagctttcatgaagcatccatacaactcccttggcggtggtgcaaacacggtggcttctggctacaacaacggaactgctttgggagctgagattattggaactttcgtacttgtctacactgttttctcagccaccgaccccaagagaagtgctcgtgactcccacgtccctgtattg

SEQ ID NO: 211039 - DNA, 439 bp, Gossypium hirsutum
atttaacatttagtcgtcttgaacccggagggaagttggtcatgggtttcagaaaggcttcagctgcttcagcatctgagcaggaaaatgaagccaaaaatagtaatggagtttctacccatggagatgctgaactggcagatcctagctcatggtcaaaagttgataagtccggatacatagcaaaggaagcattaggaaccaaagtagcagttcccagaaagaggaagaatagtgtgctgggttcaaagagtaagcgactgagaattgataatgaagacatgatagagctgaaactaacatgggaagaagctcaagggctgctccgtcccccgcctaatcatgtagccaatgttgtttcgattgaaggttttgagtttgaagaatatgaggatgcgcctgttttatggaagcctacaatatttgcaactgataagtc

SEQ ID NO: 211040 - DNA, 428 bp, Gossypium hirsutum
ctcgcaaaaagggcccatagagcgtagcaaaacaatcacatttgcactacgtttggttggatggaattgctattccattccgccctaattccgtgcgctacagtaaatcagttgtttggttcaccatttaggtgattccacggaattgctattacagtctcattccctcagctcaccgtttaggtattcaggggttgggggtctgaatacctattcaacaccacaccgtttaggtttttagaccaaaatagcctgcctctcttcttcccaaaattctctccagatttcttcctccccaaatcaagcatccattcgcccttcatcttcatctccccaaatattgtaaagggctgctggcaagtcggcaccgacaactagaggtatgaagaagcatcaccgatatcgccctggaactgtagctctgcgtg

SEQ ID NO: 211041 - DNA, 405 bp, Gossypium hirsutum
gtttcgcccctctgatctctccccgtccaattactgctgtccgatcctctcctatcgttcccactcacgaagatgagggtccgattggtgttcgttatatttcaacccaagtcgttagaaaccggatgaagagtgttaagaatattcagaaaattacaaaggctatgaagatggttgctgcctcaaagttgagagcagttcaaactaaagctgagaattcccgaggcctctggcagccatttactgcacttcttggtgatcttcccagtgttgatgtcaagaagaacgttgttgtaaccatctcttctgacaaaggtctctgtggtggaattaactctacatcagtcaagataagcaaagggatctataagttgaactctggcccttgaaaagaaacaaaatatg

SEQ ID NO: 211042 - DNA, 393 bp, Gossypium hirsutum
cccacgcgtccgcccacgcgtccgcccacgcgtccgggaagcctagctggcaggttgcagtttgctagtcaagcagctatgaccaggctttcttgcctatggttacgttgccgtgcggaacaaaaggcatctaggaagctattgagcagtctcggtattgacattcgggtttattgattgttggtatccatcaattctagttgttaaattgagtgtctttttgtatcaacgtttcaagttttgtttgtccaaagtgcattgtgtttgcttttgtgttattttcatttttggtcgggttatacagagaatggagtatgtatgtatgtatgatatttgattcctgtttgactcaagttgagacgctcatgtaagagagacagagagcaagtgtag

SEQ ID NO: 211043 - DNA, 408 bp, Gossypium hirsutum
gaagaacgtagcgaaatgcgatacttggtgtgaattgcagaatcccgtgaaccatcgagtctttgaacgcaagttgcgccccaagccattaggccgagggcacgtctgcctgggcgtcattcgaaaacctcaagggatgcacggagaagtgcagaaactggtcgcttaacatgcttgggaacttgcaaacgtttgactaagaaaaatctgccgattcttggttttcttttgctatgtccatgatattcctctggaggttcttaatctgtcttaataaactaatatgtgctacctgtagttactttattgtactctggacaaggaaaaaaattgcctgacttatgatttggaaattatttaaggcaggcaatcttgcggtgacaatttgggtcaattcccaatagttca

SEQ ID NO: 211044 - DNA, 367 bp, Gossypium hirsutum
cggacgcgtgggcggacgcgtgggcggacgcgtggggtggtgcaatttcatctgttcgtatcatcaactcagaaggggcaggaagtgtaacagtagccactgcttcaaaagatcgaactctgagactgtggaagtttgatgcagaggactctactgaccatcctgcaaggataagagcattcaagatattacgtgggcataatgcatctgtacacagcattgcagcaaagacatctggagacatgatttgctcaggttcttgggattgtacgatcaatttatggcggacaaatgacactgatacaaatggggacgcggtatcaatcaagaaaaggaaggttaataataaaattgaggagtctcaatc

SEQ ID NO: 211045 - DNA, 434 bp, Gossypium hirsutum
cggacgcgtgggttttgtctagcaaagtcttctctcaggatcaagattccggtgagaaatcgaacacttcctccgcctccgatcacctggcggcggcagttaacggccataaaacttccttggatctgaacttagttccgctagataagaagaacaagcctcagccacctgctaaacagcctccacagaagccgttaactattaccgatttgtctcctgctccgaagcacggttctcagttgcgtgtggcttatcaaggagttcccggtgcttactcggaagctgcggcggggaaagcttatccaaattgtgaagctattccttgtgaccagtttgaagttgcgtttcaagcggttgagctttggattgctgatcgagctgttttaccggtggaaaattcactcggaggttcgattcatcggaactatgatctt

SEQ ID NO: 211046 - DNA, 419 bp, Gossypium hirsutum
cccacgcgtccggctttttgatgatccaaatacggtggagactattgtttcggtttacaggatcaatgatctctctgatcccaagacccgcttcaaagttgatgttaatgcccaagaaaaccggttgactggttgtgctgtgatttccgagggcattactgttatagtagtggaaggtggaagcaaatccattaagaggtatgggaagcttatgcttcggcgaatcaactgggctgaagctgtaaaagatgacaaggacggagatgaagatgaagacgaagagaaaccacctaacaagtgtgtgctggtttggcaaggtagcgttgcgaaatcaagtttcaacaagttctcggttcacgagtgcattaccgaagcagccgcgaaaaaggtatttgctgatgcaagagttgcccattact

SEQ ID NO: 211047 - DNA, 377 bp, Gossypium hirsutum
aagaagacctacacgaagcccaagaagatcaagcacaagaagaagaaggtcaagctcgccgttctccagttttacaaggtggacgagtcgggtaaggttcagaggctgagaaaagagtgtcccaatgccgagtgtggtgctggaaccttcatggctaaccattttgataggcactattgcggtaagtgtaggctcacttatgtttaccagaaggctggtggggattgagtgggataagatagatttttacttgttttcaagtaatcgtattgtcatgttctgatttttgtttgtttttagtatgttataatttttgggtttctattttggaattttggttgctaattgaaatgtttgaatcaaatcttatgaagttc

SEQ ID NO: 211048 - DNA, 416 bp, Gossypium hirsutum
tgttgagaagcaaggtatgagtgatactaggttcttggagaatgggaagtactaccatgatgtgagttctgagaacaactactacccgaaccggttcgagaactcgaggggagtcggttcgaggaacgagttcaacgagaaccgttacaataacatgggaaaatataatcagaatcaagaggagttcgaagaagagttcgagccatgaaaccacacgtatatgctaattaattagcaaaaagagagtaaggaagaaagggtttatttattgggttttgtgttttattttgtgatcctttttattttatttgcagggtttgatagtatcctttgcttttgatattgaaatgctaaaagatatgataatggagccttatgctttttacttttcttaaacagtgttatgcaataaaaat

SEQ ID NO: 211049 - DNA, 398 bp, Gossypium hirsutum
gttttgcttttcatactcatttagcccctttcattagcatcaaaatcactccagttttctttatcactgaaaaatgtcttgctgtggtggaaactgtggctgcggtactggctgcaagtgtggcagtggctgtggaggatgcaagatgtatccagacctgaacgctgccgagatgaccacaactgagactctggttcttggtgtagcaccccagaaagcacactttgagggagctgagatggaattcggggctgagaacggctgcaagtgtggagacaactgcacctgcaacccttgcaattgtaaatgattagagaccaaagccaaagctccctggaagcagaggcgcctttgtctttaagaaataatatgttttggtggttatgtgtttttaaaat

SEQ ID NO: 211050 - DNA, 408 bp, Gossypium hirsutum
cccacgcgtccgatttgacggtgatgggaaagtcattggagtaacttctgaaggcgaaactgctaagtgcaacaaagttgtttgcgatccatcttatttgtctgataaggttaagaaggttgggaaagttgctcgtgctgtatgtgtaatgagccaccctatccctgataccaacgattctcactcagctcaggttattctgcctcagaagcaactcggtcgtaaatcagacatgtacgtcttttgttgctcctatgctcataatgtagctcccaagggaaaatacatcgcttttgtttcagctgaagccgagactgacaaccctgagcaagagttgaagcctggggttgacctactgggatctgtagatgagatattttatgacacttatgacagatatgtgcccac

SEQ ID NO: 211051 - DNA, 408 bp, Gossypium hirsutum
  unsure (1)..(408): unsure at all n locations
cttggatcgtantccgaaaacttgctgataactgtactgggctccaaggcttcttggttttcaatgctgttggtggtggtactggttctggtcttggatctcttctcttggagcgtctctctgttgactatggaaagaagtcgaagcttggtttcactgtctatccttcacctcaggtttctacatcagttgtagagccttacaacagtgtgctgtccactcattcgctccttgagcacactgatgtcgctgttcttctggataacgaagcaatatatgacatctgcaggcgttctttggacattgaacgacccacttataccaatcttaaccgccttgtctctcaagttatctcatctcttaccgcatctttgaggtttgatggagccctgaatgtggatgtgactg

SEQ ID NO: 211052 - DNA, 381 bp, Gossypium hirsutum
  unsure (1)..(381): unsure at all n locations
gcgagcggaggaaaagtgtcatttaaagtcactcttacctctgatcctaagctccctttcaaagtgtttagcgtgcctgaagcagccccttttacagccgtcttgaaattcgcagccgaggaattcaaagtccctcctcaaaccagtgctatcatcaccaatgatggtgtgggaatcaatcctcagcaaagtgcaggaaatgtgttcctcaaacatggatcggaacttcgcctgattccccgtgacagggtgggagccttttgaaataacaaaaacttcatttgttatctctgagtgagaagactggttatgacttttgttggntatggatccttttgtttggtatgtatgtttaaacttttacttgagtggagaacatga

SEQ ID NO: 211053 - DNA, 321 bp, Gossypium hirsutum
ctccctcaaaacaaaaacccatttcccttccctcgttgcctttttggcccagacgtcagattgggctcaacaagaggaggaaaacgacaccaccctaaccattgatgaccaaggaactgaaagtgaaggaggggaatcaacatgggaaaatgaggagagtgatggggctgaagcaagtttgtctgattgggaacctcaaggtgaggttactggtagtggttcagaagaagaggatgcttccgaaccttctgaggaagctaaattgttcgttgggaatctgccttatgatgttgatagtcaaaagcttggctatgctttttg

SEQ ID NO: 211054 - DNA, 271 bp, Gossypium hirsutum
ccccaagcttattcacttgtggctgattttatgaacttatgcaggagatcgaattcaaattatccacgagtgaggtgttttgatttctacaagctccattcttgggctggagggttgactgaatttgcagatggaaagaatcaagaaagcactagtgaagctgtgaatgcatattacgctgctgcactaatggggttagcctatggagacacccatcttgttgcaactggttcaacacttacagcactggagattcaagcagcacaaacat

SEQ ID NO: 211055 - DNA, 414 bp, Gossypium hirsutum
cccacgcgttcggggtgatccatttactcaaatctgcatagccaatgtcacaattggaatggcagctaaagcaaagaaggtgccgtggacttgcactgatgttgaggggatcacaagtggagttagtcctcggccatgtgacctattacctgatcaaggacagaagaaaatcgcagcttgcgactttccggccaagcccttgtccattgatagagtggtgctcaaaacttgcacctatagggtcaatcatatgtgattgaatcctttaaagtaaaacctaagtcgattgttacatgtggtaagattctcataattatcttatgacaagttgcatcatattataataacgtaaatgcattctcatacagtgatgggttatatagatcatcccttttacaaaaaaagaagtgtttt

SEQ ID NO: 211056 - DNA, 432 bp, Gossypium hirsutum
cttggtttaaaacagaggatggggatgggtcttctttgctctggtgcatccatggtagcatccgcaattatagagtctactcgacggagaatcgcgatcgaagaaggactttccgatgaaccggcagcagctgttcatatgtctgcactatggatactgccgctttatatactaagtggcttggctgaggccttcaatggaattggacagattgaattctgctactccgaattaccgaaaaccatgtcgaccattgcggccaatatttacggattcggaaccttcatttcgaacctggtagcgagttttataacaagcacggatgacaatgttactaaaagacgacgtgaaaggttgatttcaagcaacatgaacgaacggcattatgattactattattgccttctttgctggcttgagcatgcttaaatt

SEQ ID NO: 211057 - DNA, 326 bp, Gossypium hirsutum
gtttacttcatttctaaggtccctaattaattatctcccttcccttcaatcttcaaaactccattaatggctgactctcaacattcctcttctggtaaaacttatgtcaactctcaagaatttagttcagaggaggaaacaagtgaagaatcaaagcttaaattctctgaagatgaggaaacacttataattaggatgtttaatctggttggagagaggtgggctttaattgctggaagaatccctggtagaacagctgaagaaattgaagagtactgggataccaggtattcaacgagtgaatgagaaaaaaaaaacgacatttt

SEQ ID NO: 211058 - DNA, 397 bp, Gossypium hirsutum
ggactcagcggctgaaggaggagtataaggctttgatcgcctacactcagatgaataagtccaacgacaacgattggttccggatatccgcagccaatccggaagggactcgttggaccggcaagtgttggtacgtccataaccttctcaaatacgaattcgatctccagtttgatatccccgttacttatccggccactgctcccgagctcgagttgcccgaactcgatggcaagactcagaagatgtacagaggaggaggaatcaaaggatgacccagttgattccgatgctgaggatgaagatgatgccgatgatactgaagggcacgagtctgattccgataccaaatcagacgatgaggacaaggaagatgcacatgatgagctctaagcac

SEQ ID NO: 211059 - DNA, 362 bp, Gossypium hirsutum
gttgttgggtgtgtcaaagaaagactatgcattcaaaactcatccaatgaatctacggagtgagaggacccttaagggtgctttttatggcaactataaaccacgcactgatattcctatggttgtcgacaaatatttgaacaaggagctggggctggatatggacaagttcatcacacactctgtgccttttgccgatataaacaaggcattcgactacatgctccagggtataggtctgagatgcatgattcatttggatgcttaagagagtgttgctgctgtatatttgcccaaccaaagatcaaaactctaatgttttgtcctactatgtgttatatttatgtgcccacttaaactac

SEQ ID NO: 211060 - DNA, 332 bp, Gossypium hirsutum
caataaaaccgattcagtgctttgtttcactggaaggcaggctcattcaagcctctcattttctggccttactggagagagtagcggagcagattaccaagattgtggggcttcatcaatgcttctcatgggagagcctccttggtgccctccatgtactgagagctccttccaatcatcaactcgaagcaatgctgtaatgcgttacaaggaaaagaagaagacacggaagtaagcatatgccaataacccatataaggaaacgtgtcacctgacatgtctattaggttggtggctttacaaatttctgggacttactgggcttcctttta

SEQ ID NO: 211061 - DNA, 355 bp, Gossypium hirsutum
ccggccggaatccgggcttttatatggtcagtgaattgaggttgaatttaaatattctacagattgcgcaaagcatgacccggaagtgaccgaggatactgagaagaactctgcagaacttttaatggaggaactgaagctaagagaagctgaagctttggaaagtcagcgacgggccgacatggcattacttgaggctaagaagatagcatcacagtaccaaaaggaagcagacaagtgcaattcaggtatggaaacatgtgaagaagcaagggagaaagccgaagcagcactggtagctcagaagaaattgacagcaatgtgggaaacacgagctcgtaaaaagggtggagag

SEQ ID NO: 211062 - DNA, 350 bp, Gossypium hirsutum
cccacgcgtccgaccaagtactgcacttatagatcgtggcattgcattacacacaatgattaggctcgttacaatgggactaggtggagaaggatacttgaatttcatgggaaatgaatttggacatcccgagtggattgatttcccaagaggtgaccagcgtcttcctaatggcgtagtaattcctgggaatggttacagttatgataaatgtcgacgtagatttgatcttggggatgccgactatctcaggtatcgtgggatgcaagaatttgatcaggctatgcagcatgttgaagagaaatatggtttcatgacttccgagcacacatatatatcgcggaaggatg

SEQ ID NO: 211063 - DNA, 307 bp, Gossypium hirsutum
cccacgcgtccgctcagagtagatttggagggtatcaaactcttaatgaaagagaaaaatcattcttagcaaggaatcaaactattcactgtggttttgtgaagggtatgtcaagattatcaagccctggatttgaattgagtgaaaatgataaggcatacatgaatacttgtcgagttgcagtgtcttcttgcatttttggaagctctgactttctgagaagaccaactagcagattgattagtgaattttccaagaaaaatgtgtgttttggtattgttcgggatgagcaaacgctgtccaaact

SEQ ID NO: 211064 - DNA, 268 bp, Gossypium hirsutum
tatctgttcacttagtgcttgccttgttgctgttgtttgttcttcagaacaaccaccgttcagacccctcggaatccctgccggtgatggtgcttcagttattctaaaatccgttctcgaaagagccactcaagtcttaactcatccatccggaaatttcccaatgcctcattacacattctggagagcatcgtttgatgaattcttcactctcctcaccaaatactgtgtcaccaaatacgagtcgataatacaatcgatacacaac

SEQ ID NO: 211065 - DNA, 395 bp, Gossypium hirsutum
  unsure (1)..(395): unsure at all n locations
tgtgaatacatcagccctgacacagtctgagattcgtgacatcatccttggagctgagattactccaccctctcaacagaggcagcagatagcagagattgagaaacaggcgaaggaggcaagccagctaacagctgtgacaactaggactacaaacgtgcatggtgatgagctcattgtcaccaccacaagtccctatgaacaagcagcatttgggtccaagacagattggcgtgttagagcaatatcagctactaatctttatcttcgagtcaatcatatatatgtgaactcagaggacataaaggaaactgggttcacatatatcatgccaaagaacattttaaagaagttcatctgtatagcagatctcaggactcaaatngctggatact

SEQ ID NO: 211066 - DNA, 376 bp, Gossypium hirsutum
ataataaaaaagacttttcaaaagaacacaactatggctcctcatagagaaggatcagatgcttcagtggaagccatggttgctcaagtcgaaaaacacccaatttcatcgatccttatcatcattgctatgcaaacagaagctttgccggtggtgaataagttccagttgattgaaaaccctcattcttcgtttccaaaaggggtcccttggatccattatcatggtgcatacaaggacatcataatcaatctagtttggcctggaaaagatttaacctttggggttgatagtgttggcacgatttctgcctctcttgtgacctatgcatctatccgagcattgcagccagacctaatcataaatgctggcactg

SEQ ID NO: 211067 - DNA, 520 bp, Gossypium hirsutum
  unsure (1)..(520): unsure at all n locations
ccgtccgattaggggttgggtgtttagaaaaatgggcggnntggcagcgccgcccttcagaatccacntnnctccctnnatctttgcacacggccccttttgagaatcacgatnnntccctgcncnnttctcnnacactccnnccagagctacntnncttcaccgaacctcnttactttgccccgagcctgtcgaggggaaatattctacnnttctctgaagaaagggacgacgaatgttaaggtgccctttggnctttgtttgggtggggatctggaaaccctatgcatactgcacctgtnnaccttgcagccgtaaaaaggaaatggctctggacaagggttgagtctgaacttcttggaccttgttcaggcatcaaaaaacagtcaattgttttctcaattcactaaagacttgtcagtacctgcagagacacgggtcaaagccattaatgagatatgtgggcaagctaaattttcagatcttacaaagaactttttagttatactagctgagaatg

SEQ ID NO: 211068 - DNA, 445 bp, Gossypium hirsutum
  unsure (1)..(445): unsure at all n locations
gtttgttacttctggtgaaatacgaaagcgatcagagtttttcgaaccctttattttgggagtaacaaatgcaactgtggaacagttttgcaagtcatccgtagagccaatgggtgaagagagtgatcatgtgcacattactgccctttcagatgctctgggtgtgccaattcgtgttgtgtaccttgatcggagctcttgtgacattggcggtgttagtgtaaaccatcatgatttccttcctacttcgggcgataagtcaaatgctaaaggtggtagcactgttcctgtcaagccttttatttccttgctatatncgccaggccactatgacattctctatccaaagtgatgcatttgcattttctggttgttaacaatgtcctaatcagtggtcctttgggggaaaatttaccttgcaagctgacgtgtgactgtaatgcaa

SEQ ID NO: 211069 - DNA, 303 bp, Gossypium hirsutum
acgcatccctgcccctgaccaagtatcaacttataagggtaaatgcaaaggagatgaatgagggatgcaagtgggtggaaatgtttgaagatgtgcgatctgtagtcttctgcgtggcccttagtgattatgatcagatatcgatatcaccagagagcagtggcagtggaacgctacttcaaaataagatgttgcagacaaaggagctatttgaaacaatgataaggcatccttgcttaaagataccccattcgtgttgatactaaacaagtatgatctgtttgaggacaaatcaatcgggtg

SEQ ID NO: 211070 - DNA, 332 bp, Gossypium hirsutum
gaggtttatcccatataactgttgctggttctctcttgcatgggttgaaagaagttgaggtttggcttcaaacatttgcaccaggatcgcgcacgccgatccataggcactcttgtgaagaagtttttgttgttctcaagggcagtggcactctatatctcgcctcgagttctaataagtaccctggaaaaccggaggagcactttatattttcgaatagcacgcttcatatccctgtcaatgatgttcaccacgtctggaatacaaatgaacatgaggatttgcaaatgcttgtgataatatctcggccgcctatcaaagtgttcatatat

SEQ ID NO: 211071 - DNA, 342 bp, Gossypium hirsutum
cccacgcgtccgggcacaaaacgccgaggaactttctaataagaaagtagtcgatgctatggtccaagttgatgaagcaaatgtttcgaaaatggaaatcttgaagaaagtagaagaggccacggaggaaattaaaacgagtaagaaagccttggaagaagcattaaaccgagtagaagctgcgaacaaaggcaagctggaagtcgaggaagctcttcggaaatggagatctgagcatggtcagaaacgacgttccttacacaaccctaccaagttcaagagttcttacccatctcacaatcgaaaagattctcgtttatttgacgtgaatggattgaatct

SEQ ID NO: 211072 - DNA, 388 bp, Gossypium hirsutum
  unsure (1)..(388): unsure at all n locations
gcaatgagtttggaatcaaagttactcttttccatggtcgaggagggagtattggtcgtggtggtggcccaacttacctcgccattcagtcccaaccacctggttctgtaatgggcacacttcggtcaacagagcaaggggagatggtgcaggcaaaatttggtttgccacagattgccactagacagctagaaatatatacaacggcagtgctgcttgcaactctgcggccccctcaaccacctcgagaacagaaatggtgtaatctgatggaggagatctcaaaaatcagttgccagaactaccgaagcacagtttacgagaacccggaattcctggcttattttcaagaggctacaccccangctgaattggggtatcttaacat

SEQ ID NO: 211073 - DNA, 449 bp, Gossypium hirsutum
ctgactcacttagatggcagacaacttctcattaaaacccaacctggggaagtcgttaagcctgatcaattcaaagcaataaacgatgaaggaatgccgatttatcagaggccatttatgagaggtaaactgtacattcagttcactgttgacttccctgactcgttgaccccggaccagtgcaaggcactagaggctgtgcttcctcccaaggcatcggttcagctgactgacatggagctggatgagtgcgaggaaacaaccctgcatgatgttaacattgaggaagtgatgcgtaggaaacagactcaagctcaacaagaagcttatgatgaagatgaggacatgcatggtggtgcgcagagagtacaatgcgctcagcaatgataaaaaaaagccgaatgttcgagacacaaacgggtggttttggcgatggaatgtactgtggt

SEQ ID NO: 211074 - DNA, 328 bp, Gossypium hirsutum
ataaaaaattccaataacgaacccaaaatctgatcaattagattgcttttctcgagaaaatttgaaaaaataagaggggagatttcgaggttttattctatggtgataagagatgccgcccaagcaagcctcgaaagcagatttagcgaagaagcagaagatcatagaggacaagaccttcggtcttaagaacaagaataagagcaaaaatgttcaaaaatacgtccaaaatcttaagcaatccgtacaaccgaaacccgatccgagtaaaacttctcaaaagaaaaagaaagaggaagagaaggccaaagagaaggagctgaatgac

SEQ ID NO: 211075 - DNA, 424 bp, Gossypium hirsutum
cgacatcatccacttctttagattccaaggcttcttcatcatcaaaaaagtttcctgttttaacctttgatttttgggggaaaccacttgttgtcccagatcagaatggttcaagaaactgcaccaccaaacctgaaaacaaattctcggttcaagctgaaacaaactgtgtgagccgatgtattagatggtggaaaaaaaatcttaaacccaacatggtcaagatccactctgctcaagaacttgtatgttccttacaaaatgctggtgatcgattggtcattatcgacttctattcacccggttgtggtggttgcaaagccctccatcctaaggtatttttgtgtgtattatttttaacaaaaaaaaaagtcttggtttattttccgtgtgtgtaacgtattgtggtggttgggttatgttt

SEQ ID NO: 211076 - DNA, 433 bp, Gossypium hirsutum
aaaaagatagggtccgtgaggcattctaactttgttccagtccgagcatactattggggaccaagggaacaagaaaggcttcttctatcagattatatccagtgtgatagcttggctttgcatctctatgagactactcctcgaaggtaccacccattatctttcagccaaagactgaaagtagctgtggaagttgccaagtgtctgttacaccttcatgatagagggctgccacatggaaacctgaaaccgacaaatatactcctcgctgaccctgattaccatgcttgcctcaccgattattgtctgcaccggctgatgacaccaactggaatcgctgagcagatattgaatctgggagcccttggatatcgtgctcccgaacttgccttcacatccaaaccagtcccatcttttaaagccgatgtgtatg

SEQ ID NO: 211077 - DNA, 421 bp, Gossypium hirsutum
acagattcaaaaagaaataaaggtagaagaagcaatggccactcttacagcgcccacgacagttccttcagtgtctgaagattgtgaacaactaataaaagccttttcaggatggggaactaatgagggcttaatcatagatatattgggtcacagaaatgcggagcaacgaaacttgattcgaaaaacctacgctgaaacctatggagaggatctcctcaaggcactagacaaggaactctcgaatgactttgagaggctggttctgctttgggctcttgatcctgctgaacgtgatgcccttttggctaatgaagccaccaaaaggtggacttcaagcaatcaagtccttatggaaatagcctgcacaaggtctgccaaccaactgctttacgcaaggcaggcttatcatgctcgttat

SEQ ID NO: 211078 - DNA, 422 bp, Gossypium hirsutum
attggagaagccctaaatgcatacaccctaagaagattgcctggttttagcaagggtgtgaaccagaatattgatttcgtaaagtatcggtcattggtggagaccattgtgtggctgctgccaactgagaaaggagttgtttcttgtagcttcttgcttagattattaagagcagcaatttttttggattgtggagaaacagagagaaatgagttgatgaggagaattgctcagcagcttccggaggcaacgatgaatgatctattaattcgagctccacctggtgaagcaacagtatttgatgttgacatagttcaaaacttggttgaagggtttgtgactcacagttctcaaactgaacccgtagataatgaattcctcgggagtagaagccccaagtttggacctgatgcttctaaagt

SEQ ID NO: 211079 - DNA, 439 bp, Gossypium hirsutum
attgactcattgctatctctctttccctctctctaatgacgcttagctctggaggatcgagtgtcgtggtgcctcggaatttccgattgctggaggagcttgaacgtggagaaaaaggtatcggagatggtactgtcagctatggaatggatgacggagatgatatttacatgcgctcttggaccggcaccattatcggtcctctcaataccgtacatgaaggtcgaatctatcagctgaagctattctgcgataaagattatccggagaagccaccgagtgtccgttttcattcaaggatcaacatggctcgtgttaaccatgacacagggctggtcgattcaaagaagttcggacttcttgcaaattggcgaaaggagtatactatggaggatatattgacacagctgaagaaagagatggctgcctcacataatcg

SEQ ID NO: 211080 - DNA, 389 bp, Gossypium hirsutum
tctcttcccctatcctaattgatcaaaaatattgcccatggagtaaatgcaagataaatgaagaatcgaaagttaaactaagcaacattagcttcaagaacatccgtggcacatctgcgcttccagaagctgtcaagtttatttgcagcggttcttcgccatgtcaaaatgtggaacttgcagacattgatattaagcacaccggacctgaacccgcaacatcccaatgtttgaatgtcaagcctaaaactagtggcaaattaaacccgactccatgttccagccctgtcccaaaaaccctaagtgccaccgcttaaaccataccaacagattcaatgcaattgtaattaatatatttattcatattacataaaaacagttctttttca

SEQ ID NO: 211081 - DNA, 454 bp, Gossypium hirsutum
cccacgcgtccgcccacgcgtccggctgaaagtcggtttgttttctaacacagcctatataaagccattgtttccatactacttgcactcattactcatggaatcccactttgattcccatgttgagcaacataacgaagatgagtttcagaaatctttcaaagagatgatttctactctccctaaagggaacagctggggtcttcccgatcatctatatcagtatcaagatttttggttcacctcacctttcctacaaggagtcctgttagctcaacaacagtttgaggctcaacccactgatatcatactttctagtgcccctagaaccggcacagcctggttaaaatctctcactgtcgctactattacaagaacttcatacgatgattctaccacccctttgcttttcaggatgcctcatgatgttgtgcctttcatggagcttgatcat

SEQ ID NO: 211082 - DNA, 353 bp, Gossypium hirsutum
tgactgatgtgccttttggagttctgttatctggaggacttgattcatcattagttgcttccatcacagctcggtatttggctggtaccaaggctgccaaacaatggggaagccagctccattctttctgtgttggcctagagggttcaccagatttgaaggctgcaagagaggtggcagactatttgggcactgttcatcacgagtttcacttcaccgttcaagatggaattgatgccattgaagatgttatttaccacattgaaacctacgatgtcaccacaatcagagcaagtactcctatgtttctaatgtcacgaaagatcaagtcacttggtgtcaaaatggttatc

SEQ ID NO: 211083 - DNA, 406 bp, Gossypium hirsutum
cattttctgactatgaaaatattatcatcttcaaaaagggtcgtgagcaatgaggttaaaggggacatagagtgggagcttaggcctggtggaatgcttgttcagaaaaggaacatggcggatgctgcttctgctcctatgattaagatcaaagtttctcatggttcttatcaccgtgatatagctgtgcctgctcaatccacttttggggatttgaaaagggttcttgcacaagaaaccggtttggagccaaaggagcagagactcttgttccaagggaaagagaaggatgatgaagaatgtttgcatatggtaggagtaaaagacatgtcaaaggtggtacttttagaggacccagctagcaaagagaggaagcttgtggagatgaatagcaaccaaagtgtgc

SEQ ID NO: 211084 - DNA, 411 bp, Gossypium hirsutum
tgaaaactccatactgttttgaagatgactgcaccaaggaagacccactgtcacaggaaaacttccggaagttagcgatgccattgccctactcgaagcagcatcattcaaagcttgtttgctacataaccaaagagttaatggatacagagaacccacctcaagtcctgcctaacggctatgtctacagctctaaggctctcaaagaaatggctgagaaaaacaatggtaaaattacatgtccgagaaccggtctggtctgcaattattctgacctggttaaggcctatatctcataaactacactatcaacactgcaaaggtaaaaaagaaaactcttcctggcctgtttcctcttaatgttagtgctaaattttatgcatcatctgtagatatttctcttttgctttc

SEQ ID NO: 211085 - DNA, 424 bp, Gossypium hirsutum
ctaggaaccctcgaagggttccttcggcaggccgataatctacgccagcagacacttcaacagatgcaccggatcttgacgactcggcaatcaactcgtgcccttcttgcaataaacgactatttctctcggctccgagctctgagttctctatggctggctagacctcgcgagtgagaagcaagataataaaatccatctcctatgaacaaactgattgcccgcaccgcagccgctgccgctgctcttcctcaacatcaagcatcgaaatcttcccgagaaacatggatacattgtgtcttaatgtttttttggtaacaataacatgacatttataaatgttggcaaaaagatggtgtatgttaattacttaaaatgttaaaaacatttagggcaaaaataataatgtgatttagtttgatgc

SEQ ID NO: 211086 - DNA, 396 bp, Gossypium hirsutum
cccacgcgtccgctttattgaagtacccacagattactggcggctccaaagggcggccttccggtggaaaagcaggtttagctgccggaccagctgttgaaaaaccagaaaaattatcgggcggaaaagattttcgggatagatttggtggagtcgaaggggttcccagaagacacatttcgacaacgagacagaaggctgttgaggatgtcaatttgtcaaagcatgtgcatcatgattcagataaaagacgtagtgcctctcgatacggcagcacttcaagaagagctgtaatagcaagcagggctagttcagccggtgaagccaatgacattccacaaaatcgacggctgtcaactggcagtcgtatccataacccagcagaaagaatccaac

SEQ ID NO: 211087 - DNA, 434 bp, Gossypium hirsutum
caattttcttgttggatttgaagcagtaatccttttccgaatcgttgaattcctctgtgaaaatttctgatcggtgtttcatcgctccgttgaagaatgccgtcgtcgccacgaaagaattagtaaaacggaaaacaaacggataaaactagaatgcgaaccatttgcgacgtctgcgacagcgccgccgcgatcatattctgcgccgccgacgaggctgctctctgccgttcctgcgacgaaaaggttcacatgtgtaacaagcttgccagcagacatgtcagagttggtttagccgaccccagcaatgtcccacgctgtgatatatgtgaaaatgcacctgctttcttttactgtgaagtggatggtagttccctttgcctgcaatgtgatatgattgtacatgttggaggtaaaagaacccatgggaggta

SEQ ID NO: 211088 - DNA, 453 bp, Gossypium hirsutum
  unsure (1)..(453): unsure at all n locations
caggaagtggagaaaatatgtctgactttacctatgcggagaacgttgctcatgctcatatctgtgcagcagaaactctagagtctcggatagtctctgtggctggaaaggtactccttaagagtgttcttagtatgtaaaactctcttgtactgtattttatattgaattatgtatcacggaggtgttctcaatatgtaggccttttttatcacgaatctcgagcctatgatgttctgggaatttgtgtctctgatacttgaaggcttanggtatcaaaggccattcataaaaattcccacttggattgttgcctatgttctctcacttcttcaacgtatacatgaggaatcacacttcagaattgataaatattcacctcattacattgttcaattagcttcatgtaccacaacttttgactgctcaaaggctcaaaagcatctgggatat

SEQ ID NO: 211089 - DNA, 361 bp, Gossypium hirsutum
accacgcgttcgcgcaatactcaacccattcaacttgatgaagcgttcgaattgttttatgaaggtataagttcgtatgggccttattgggaccatgttttggggtactggaaagcaagtttggaacgtccagacaagttaatgttcttgaaatacgaagatttggttgaagatactgtgttgtatcttaagaaaacagcagagtttatgggttatcctttctcgtcagaggaacaacaacaaggggtgcctgaaaacattgtgaagatgtgcagtttcgacaatttaagtggcttggaagtaaataaaaccgggagacatcgtgaagggaaaggaaatatggagacggaaaataacattt

SEQ ID NO: 211090 - DNA, 448 bp, Gossypium hirsutum
cccacgcgtccgcccacgcgtccgcccacgcgtccggataagtgggagttatctggtgatgagcgatgttgttgtgtgaccactactaaaataaatgcgaagggatccggtggtgcttcagacgggtacacttgggtgagtgtgcagcagaagtggttagaaggatatgaaaagaaggatacatcaatttggcttttctaaggtactccgcaacatcgactctggaatcagcataaaaaattctataggaataaatgtatccaaatttcaatagctttactattttgacatatatttgattaattcataggcaacttaggaaatggctctataattagataaactgagatacataccttggcttatctcttgtgtgattcatcttattttttatgctctcgcagtgtacagcatctgtgtcaaaaatttgcattatcctttggatttc

SEQ ID NO: 211091 - DNA, 373 bp, Gossypium hirsutum
cccacgcgtccggaaagagtcgtcgtcgacatgacacatgggcgttattgttcatgttgggcgcctgaccctgttacggggtattaccggccggagaactgtggggctgagatcgatgcggcggatctccgggagatgatgttgcatcacagggttagatcacagtagaaacttgccaccgcatgtgatcaccgtagcagagcagagccagaatgttttgcagatgtttgggtgcctttgtattttgttttggttttgagttcaaaatcttttatcttaataatcggtagtatttcttatttaaaaaaaaaaataaaaaaagcggagttggaaaaaaaaaaattttttttggggtaccaaaaattaatttatt

SEQ ID NO: 211092 - DNA, 401 bp, Gossypium hirsutum
aaggcggagccctatatcaattgcagctgcagttatttatataataacacagctttcggatgataagaagccacttaaagatatttctgttgctacgggagttgcagaagggacaatccgaaattcatacaaggatctttatccccatgtgtccaagataataccaaactggtatgccaaggaagaagatctcaagaacctatgcagtccttgaattacagaacagacaataatggagataccacaaacaaaaccctcaaagtgctgagttctctctctcgggaactcgtggaactctcggtacattccgataatgatcttttttttttttaatcctttttcatttttcttgcataacttcgcccgtgcaagtaaaaacaaaggggggaatggcggaaatg

SEQ ID NO: 211093 - DNA, 367 bp, Gossypium hirsutum
cgcgttcgtctatcgcttcgcttactaacttcaaaatatttgggaacacttgtggaactgatgatggggctgtaactgtttctgagggtcacgtctgatagaaacagggagcgataagctggtgtgcacggatatctgaaacatatgctgttcctagaatgaaacctgtgtttgatccgacgaaaggcggaaggcctgagttctattttgaagatggagcatattctgagcaagttgactggattggtcagaaaaaccaaataaatgttgctgatgaggctggagtgaaacaaattgtgttggttgggtccatgggtggaacaaaccctaaccatcccttgaacagcttgggcaatgggaacatttt

SEQ ID NO: 211094 - DNA, 351 bp, Gossypium hirsutum
cccacgcgtccgcaactccgtaaattcatgagaactgggaatataagattgaaccaaagctgaccagcgaaataatggagagcacagattcatcgtcggcgtcggcgtcggcgcaacccgaactcccaccggggtttccaattcaccccacccgacaaaaagctggtggttactacttaaaaaaaaaggccgcttttgttctttgctggtccaaaatagttgaagtgaaccttacaagttgatccaatggaacctgccaagaaaggaaattttcgggaagcaagaatggtatttttttagtcctagagacaggaaatatccgaatggagcgaggcctaatagagctgcaac

SEQ ID NO: 211095 - DNA, 448 bp, Gossypium hirsutum
cacaaagtcggggtctcacccaagaacttatttcattgctacctgtttcaaaatacaagtgcagcttattctcaaggaagaaatcaaggaaagagagatgtgtaatttgccagatggaatataaaagaggtgagagacagattaccctaccttgcaagcatgtctaccatgctgggtgtggcaccagatggcttagcatcaataaggcttgccctatatgttatacggaggtgtttggcaatggatcaaaacattaaggggcaatggatcaaaacattaagggacaatgacgatgaacataaagaaaatattcgtatgctataaatatttttgggttggatttgggtatatccccctaatacgaagatgttctatttcgaccttttacgttgtttaacaaaaaaatagttgattttgacttttgcaataattgaaaggaagtatgata

SEQ ID NO: 211096 - DNA, 333 bp, Gossypium hirsutum
cggaaagctgttgttgtccatgtcccatatagattgaggaaagctttccgcaaggttcatgttaagcttgtgagggaacttgaaaagaagttcagtggcaaggatgtgattcttattgccacccggaggatattaaggcctccaaagaaaggttctgcagttcagaggccacgcagccgcacattgactgctgtacatgaggcaatgctagaagatgttgtcttacctgctgagattgttgggaagcgcactagatatagaattgatggatcaaagataatgaaggtgtatttggaccccaaggaacgaaataacacagagtacaagcttgag

SEQ ID NO: 211097 - DNA, 359 bp, Gossypium hirsutum
cggacgcgtgggcggacgcgtgggcgccctttagtgatcagtgaggtgaagaaaaatgtcttgctgtggtggaaactgcggttgcggctccggttgcaagtgcggcagcggctgcggcggttgcaagatgtaccctgagatgaactttgctgagcaaaccacaaccgggacacttgttcttggcgtggcaccccggaaagtgcactttgatggagctgaaatggaaactggggctgaaaatggctgcaaatgtggagataactgcacttgcaacccttgcaattgtaaatgagaaaaaaaagctaagcatattatggaagctgatctaaataatatatgatgtatgtgggtttttacta

SEQ ID NO: 211098 - DNA, 337 bp, Gossypium hirsutum
cccacgcgtgcgcgcacgcgtgcgctatctgtgttatttacaaaggcacccaaaatatcaaactggactgatgtcgatatggcatatgaacctgagtggactattggaacctgtaaggctgctactccagttcaagctcatgaagtacattgtgagttgaggaaaaggctacacgctaatgtacatctcgcagttgatgaatcaacccggattatatatggatggtccgcaactgctgaaaactgctaggtactagcacctcagcttgatcttaacgtttaattgggcagtggagcttcactcaagcaggattacattgacattataaaaactgctg

SEQ ID NO: 211099 - DNA, 378 bp, Gossypium hirsutum
caaaggctctggcaaaggagatggcacctgatacccgagtaaattgtgttgctcctggtttggttcctaccaactttgcagcattcctaacaaaagatgaggtcctgaggaagacggctgaggaaatcacattacttggaaaacttggcaccccgggggatatggctgctgcagcctctttcttggcatccgatgacgctagttatatcaccggagaaactcttgtgatggctgggggagccccctcaagactttagtaagtttctaaaggttaatattacattaacagcaacaatgtaatattccatcaaaattattgcatttgttttgataaaaaacttttcgtaatgcaagatttgtgtcaattttattctttaa

SEQ ID NO: 211100 - DNA, 395 bp, Gossypium hirsutum
  unsure (1)..(395): unsure at all n locations
gaaatgacggagataattggatccatgttcctccaatcaagggttctcttgtgatcaacgtcggagatgcattgcagataatgagcaatggaaagtataagagtgtggaacatcgtgtggttgccaatggaagcaataacagaatttccgtccctattttcgtaaacccaagacctagtgatatgatcggatcattgcctgaattaatcgaaaatggtgagaagccgatttataaacaagttctttattcagattacgtcaaacattttttccgtaaagcacatgacgggaagaaaacagttgcgtttgctgaattataaatattttaatcccatagttgtaaacagtcgtagatttgaaaacaataaattgcaagcataaaagctgnttattaa

SEQ ID NO: 211101 - DNA, 384 bp, Gossypium hirsutum
  unsure (1)..(384): unsure at all n locations
cccacgcgtccgcccacgcgtccgaaaaatttgaaaacaaccgctcgtcttctcgtaaaaaaaccgccttttgcttgtttggaaaagacggcggcttttataatttccggtggtgccttgtcgtcgtcgttgttattgaagtgacagtgtcgtacaagtagaaatgggaacagggaggtggggtacgtgggaggagcctttgttaggcggggcggttctccgtcatggtacccgagattggaacctcgtcgcttcggagctccggaccagaactgttgctcctttcggattcaccccggagatttgtaaggctaagtacgaggatttgcagcaacgttactcangttgcaaagcttggtttgaagagttacgtaaacagcgaat

SEQ ID NO: 211102 - DNA, 402 bp, Gossypium hirsutum
  unsure (1)..(402): unsure at all n locations
aaatccggaggaccgagtgccgtccgcgcccggtcgtactcataaccgcatcaggtctccaaggaccatacatgcctatttctcgtgagaagccttccgttgagctcgtgaaggtcaccgacgacatgaaatcattcaaggcatacaacaagctccgtgttgaacgtacgaacaaacgtcatattggtgctaggttgaagaaggctgccgaggccgagaaggaagacaagaagtaaggttacccttttggggacagtgttttgttatttggcttgctaaaaagaccttaaattttgtattcattttgtcaagtgaactgagacagctttagaaaactttggtattatgacagtaatccattttgttgagcattttattaaattgagaagtttcttgctgnng

SEQ ID NO: 211103 - DNA, 414 bp, Gossypium hirsutum
atcgttcggttcttttgaacactcagacccacacgattatccacgagttcccaatgctacctggcggtgctcgtaattatccgtcatcgggatgcgcttctctccttccaatcatgcttaaacctaatgaagataggaaatcaatccccgccgaggttttggtgtgcggtggaacgccgcatgatgcatatacaaaggccgatttgcaacgccctaaggtgtttttgccagggaacaccgattgtgctcgcattgacatcaccaaaaggaatggcaagtggaagatccaaaacatgccctcagctcgtttattgggagacatggtggtgcttccgacgggagatgtgttacttgtcaacggtgccaagaccggttcagccggttgggatgacgccagggacccgaaattacacc

SEQ ID NO: 211104 - DNA, 404 bp, Gossypium hirsutum
cccacgcgtccgagcaaacaggatattctatctttctgtaccacatgaagcacttccggacgttgcttcttctcttgccgataatgcacaaacaaagaagggttggaatcgtataataatcgagaaaccattcggatttgacgctgtatcttctcaactgtttacgaaatcccttctttctaagtttgaggagaagcaaatttacaggatagaccatctccttgggaggaacctcattgaaaacctcactgtattaaggttttcgaatctagtttttgagccattatggagtcgaacatacattcgtaatgtgcaagtgattttatccgaagacttgagcatgccgctaggaaggtattttgatggttatggggtcattcgggacattgttcacagtcacatac

SEQ ID NO: 211105 - DNA, 330 bp, Gossypium hirsutum
aaaaaccgggccgaccgacacgtacgaccattcattctatcaaacaagatattttatttttccgaaccacaaaaaacacttccggacggttctttttttattgccgaccccccacaaacaaacaatgttttatattattttataattatcaaaccattttgttttgtttctttatattatcaactttttactaaatctcattcttctaaattcttacacaaactaatatactttatataccatctatcttttagtaactttacttataaccttacttttatacaattcttaaacctacatttttactcattatttattcaaacaatacat

SEQ ID NO: 211106 - DNA, 177 bp, Gossypium hirsutum
  unsure (1)..(177): unsure at all n locations
accggccggaattcggtcgaccacgcgncgtaagattactcagcttatgaacgccgtgactgggcacaggggtggtctcgagagaccgactgtccaaaagcccattcatagccgcatacaagagcttccacatcgacgggtgcgagtcgtcggtggaagccaagttctgcgccacac

SEQ ID NO: 211107 - DNA, 262 bp, Gossypium hirsutum
ctggttgcctcattgtttacttcactttttgatgattcttcagtgtgagactcaacctgcgataatttggaagctgtacgtgcatacatgactctcgagaagtgaagttcattcatattcttattaagggcttccttgagagccttattttcttcttccatagcacaaaaaaaaaaaaaaaaaaaaaaaaaaaaaaaaaaaaaaaaaaaaaaaaaaaaaaaaaaaaaaaaaaaaaagggggggccgttttagatgaaccaaa

SEQ ID NO: 211108 - DNA, 383 bp, Gossypium hirsutum
agcaaacttggccgccccgaagaaaatggcggcatgagtattacaactactatgcaagccatcaatgagaagatactctcacttggttatggagaattcactgcagaaataacaactgtagacgcacaagactctcacaatggaggagtacttgttcttgtgactgggtatttaactggaaaggacaaagtgaagaggaaattcactcagagtttctttttggcacctcaagacaagggctatttcgttttaaatgatgtttttagatttgtcgatgatacgaaacatcaacctgggagccaggacccagttaatggttttgaggcttctcttactcctgagcaagaccattctcctgttccagagaatcacattgagcaacc

SEQ ID NO: 211109 - DNA, 391 bp, Gossypium hirsutum
cccacgcgtccggtttctcgatcttcacactggcagccatagctatcttcgtgcattttcatctgcgccagtggtgtccttggcagttgagaggggatggagtgagtctggtagtcctaatgtgaggggtccacccgctctcgtattcaacttttctcagctggacgaaaagctgaaggctgggtacaaggccacaacagatggaaaatttaccgaggctcttcggcttttcctcaacattcttcatacaattccattgattgttgtggagtcaaggagggaagttgatgaagtcaaagagttaattatcatcgccaaggagtatgttcttggtctgcagatggagcttaagcgtagagaattgaaagacaatccggtacgccagcaggag

SEQ ID NO: 211110 - DNA, 439 bp, Gossypium hirsutum
attctggtgaaatctatgattctttatcaaataaatggagtgaaatccagaagctgcctatagactttggggtcgtttgtgctggtgttgtttgtaatgggatgttttatgtttgctctgagaatgacaagttagcgggctatgacatagaaagaggtttctggattggaatccaaacctctgcatttcctccccacgttcatgagtactatccaaaacttgtttcttgtaatggttccttgtttctgctgtctgtctcttggtgcgagggagatgggcaaattggtcggagaaacaaggccgtgagaaaattgtgggagctagatctgatgtatcttacatggaccgaggtctcagtacaccctgatgctccaatggactggaaccctgtttttgttgctgacaggaacttaatatttggtgttgaaatgttaaaata

SEQ ID NO: 211111 - DNA, 429 bp, Gossypium hirsutum
caccaagtaattcgcagggttgcaacagcagcagctgggagaaaagacgatccaaaacccttcctaaaacgagcaaaaatagtaagagttatattaatggatccgtgtccttttgtacggatcctggtaggtaatttggccctgaggtttccactttctacaaagccctcgctttcaaggatccatccttctacttctccatgttactgcaagatcaaactcaagaacttccctcaccaagtgggttcaatccctttgatccatgcaaacacccaaaacccagaaagctgcaacttctctttgcagaaatcgctcgctgcgtgtttcagtttaagcaagtcccaggtggataggatcatctcgaaagggggttcatcatataaactttccatcgaggtttacgctgaccctgatgacagtacctgcgga

SEQ ID NO: 211112 - DNA, 394 bp, Gossypium hirsutum
aaattttctcagcctttcttgctctttccctcgctttctcgggaaaaaaaatggcaagggcggcttcaggaatggctgtgcatgatgattgcaagctgaagtttttagaactgaaggctaaaaggacttaccgcttcatagttttcaagattgaagaaaaacaaaagcaagttgttgtggaaaaggttggtgaacctactgatagctatgaggctttcactgctagccttccagccgatgagtgtcgatacgctgtgtatgactttgattttgtgaccgatgagaactgccagaagagcagaatttttttcattgcctggtctcctgatacatcaaaagtaagaagcaagatgatctatgcgagctcaaaggacaggttcaaaaaggaattgga

SEQ ID NO: 211113 - DNA, 435 bp, Gossypium hirsutum
cggacgcgtgggcaagcctacccacaaaagcccaccctcggcacctgaacagccaggcgcttgccccagagatgcactgaaactaggcgtttgtgctgatttgttgggctcagtgcgcgttgttgttggaccgtcgaggaccaaatgctgctctctcatttcgggtttggctgatctcgatgctgctgtttgcctttgcactgctattaaagctaatgtgttgggggttaacctaaacgttcctgtttcattgtctttgctcctcaattcctgcgaaaagcaaatgcctgctggttacaaatgtgcttaagctcatttccactgtttcctcagcaatgtttgggtttttcttttacgtgttctttttttttctgggcttgtttaatttggtattttgatatgtcaagggttagataaaatggtaaaggtttcttt

SEQ ID NO: 211114 - DNA, 435 bp, Gossypium hirsutum
cccacgcgtccgcccacgcgtccggagcgttccgccttagggggaagcacccgcgtgagcgggagtggacgaagcggaagcgagaatgtcggcttgagtaacgcaaacattggtgaacaagtgggatcagctgaggcacatgatgagatctctgagccaatctccaatatcggcaaaacagctttaagcccaaacctgagttttcagggaacttctctgatgcaaagtgatcatttcctcttgcctagttcaatagaatactatgaaggtagagattttgggtctgtgcaagatgaacaaaaggaaagcctaatccgtttgcctcaaccctcgagcattgatgtcaatggggttcttggtcaaatactttttgatgtctgtgtccccaaggatgtcgaaggttgggatatgaagtcatcagattcctcgagccga

SEQ ID NO: 211115 - DNA, 424 bp, Gossypium hirsutum
cccacgcgtccgctttcacatcttatggagagactagtgaaagggaaggatcagcccagcagtttgtcttcttcagagaaacttgaattatgggacaggctcaaaattttgagttttacaagaatggtggtgtcaatatgggcagtaacgattcttagcttatatattagagttcaagtcaacattctaggaagacatttatatattgatactgcacgtggtcttggaagctcttatttacttgaggaagctgatctcattgacagggatgaccagcaaaaattcttggcaagtgctgactttcttgccaatcatggcttgccaaaattgatctccagtatgcagacagctgcaacagaagttttgaaggcaaagcagttgagagacttcttcaatactgcaatacttcatgaaactatcatgc

SEQ ID NO: 211116 - DNA, 368 bp, Gossypium hirsutum
gcgggtttgagaaggaggctgctgacatgaacaaaaggtcatttaagtatgcatgggtgcggggcaagcttaaagccgaacgtgaacatggtattaccatcgatattgccctctggaagtttgaaactaccaaatactactgcactgtcattgatgcccctggacaccgtgacttcatcaagaacatgattactggtacctcacaggctgactgtgctgttctcattatcgactcgaccactggtggtttcgaagctggtatctcaaaggatggtcagacacgtgagcatgctttgcttgcgtttacccttggtgtcaaacacatgatttgctgctgcaacaagatggatgcaacaactccaaaatac

SEQ ID NO: 211117 - DNA, 393 bp, Gossypium hirsutum
cccacgcgtccgagaagacttataatgactgcggatggagcttcattagtacgagctgcagtttccaaagaagcgaaggccttccgattccaactgtgcaaaatcattgctgatatcctataccaacggatggtcaaagctcttgggcaacttgtgccagctagccagtatagttacaagttaaggctggccggtgggcatcagaatacagagctacacccatccgctagattatccacaagttcaaccgtctatgactaccagtcccttttaagcgaccggcgactgaagctaatcttatccaagatcctcaattccgcaagaaaggaaccagcattgatgttacggttttactgggtttcatttgtcacattcatcgctgcttcagccctg

SEQ ID NO: 211118 - DNA, 300 bp, Gossypium hirsutum
ctgtgcagcggaaaattcggcaaagcattgctgaggagtacccagaacttgaccctgggttggaggatttgcttccgaaaaaggcccttttaattgttgtgaattgtcaaaaccatttgattttggattgggttaatagggttcacttttctttaatttttgtgaaggaccattcaatgcccactttaaaactctttcacacagttccaacacttattgaaaaagtttcatgtggctcggggcgagaaaaaattgtgccttgctggtgcaaacataatgtgtcctggtcttacatcccct

SEQ ID NO: 211119 - DNA, 406 bp, Gossypium hirsutum
aagacgatgaaatcgctgctgacctcaaggagcatgtcatcaagcctgtcatccctgggaagtaccttgatgagaagacaatcttccaccttaacccatctggccgctttgtaatcggtggtcctcatggtgatgcaggtctcaccggacgtaagatcattattgacacttatggtggctggggagcccatggtggtggtgctttctccggaaaggacccaaccaaggtggacaggagtggtgcttacattgttaggcaggctgccaagagcattgtagcaaacggacttgcccgcagatgcatcgtacaagtctcctatgctattggtgtgcctgagcccttatctgtctttgtggacagttacggaaccggaaagattcctgacaaggaaatactccaaattgt

SEQ ID NO: 211120 - DNA, 427 bp, Gossypium hirsutum
cccacgcgtccgcccacgcgtccggcactttaactggagagcacacaaattgttcaatggaagatcttgagcagcattctgaagatagaattgctggattggaaccaatgaattttataacatttgcaacaccgcatcttggttcaaggggacataaacagctcccacttctttgtggtcttccttttcttgagaaaagagcatctgagactgcacactttgttgttggaagatcaggaaagcatctgtttctcactgacaatgatgagggaaaacccccacttctccttagaatggttgatgatggtgatgacttgaaattcatatctgctctacatgcattcaagcgacgtgtggcatatgcaaatgcaaattatgatcatatggttggctggagaacatcatcaatccggcgtcaaaatgaact

SEQ ID NO: 211121 - DNA, 376 bp, Gossypium hirsutum
cgcgcacgcgtacgctcttaaaacctttagtgttgacacacatatacggcaagacctcatgctccaccgatgggggcggtttggccatgaacaaccctacccccgcggcggtcacgcatgttctccataacacgagagatttcccgtcggttaacggcgtggaggacctgctggttatgtctataggcaacggtccctcatgcggaaggtcacaggtccataacaacggtgaatgttcaacttcttccgtcgtcgacattgcgcttgacagtgtctccgatacggtggaccagatgttggcgaactctttctgttggaaccgcacagactacgttagaattcaggcaaacggagtggacactgaaaatacggtggg

SEQ ID NO: 211122 - DNA, 392 bp, Gossypium hirsutum
cccacgcgtccgcccacgcgtccgctaagcgccaccgtaaggtcctccgcgacaacatggagggcatcacaaagccggcaattcgacgccttgcccgtaggggaggagtgaagcgtatcagcggcttaatctacgaggaaacccgtggagttctcaagatcttcttggagaacgtcattcgcgatgcggtaacatacaccgaacacgccaggagaaagacggtgactgccatggatgtggtttatgcactgaagaggcagggtaggactttgtatggatttggcggttagatgatttagggtctagattttaaaatagaggaaaaattgtaggactcagttaaagttacaaggtgggttttgttgttcgctgttataatttctaattcgcat

SEQ ID NO: 211123 - DNA, 421 bp, Gossypium hirsutum
ttttgttttcttccgtcaacctgatagatttctagaatcatatgacaaaaagggatacgtttctggggtgcaccttgagaagacaactctaaaaggtattggctctggaaaacagattgccataggtactggacaatttgaaaatctttcttgtgggattgtgctaaagagtattggctataaatcagtgccagtcgatgatttgccatttgataatcagaaaggtgtggttccaaatgttaaaggtcgaattctaagtgacaattctggagatcctacatcaattgagaatggattgtatgtctgcggatggttgaagagaggaccaactggcattatcgctacgaatctttactgtgctgaggaaactgtcgcaagtttatcagaagatcttgaactaggtgtcttagcatcaacaacc

SEQ ID NO: 211124 - DNA, 423 bp, Gossypium hirsutum
ccttcgccgtgagccacttaagcttgtttatggtggccaatctcagagaacgtttgggtcataaaggatgctattgaagctgttctgttgatgattgaaaacccgggcagggccaatggtcacattttcaatgtgggtaacccaaacaatgaagttacagttaggcaacttgctgaaatgatgactaaggtctataccaaggttagtggagaatctgcactggagactccaacaattgacgtcagctccaaggaattttatggcgagggatacgatgatagtgacaagagaattccagacatgaccataataaataaacaacttggttggaaccccaagacatcgctttgggacttgcttgaatctacactgacctaccaacacaggacttatgctgaagctattaaaaagtcgatggcaaaa

SEQ ID NO: 211125 - DNA, 428 bp, Gossypium hirsutum
cccacgcgtccgtttttcctcatcaccatcgtctgctattcttcacaaaaaagaaaagggaaattacagtgaaaatggcaacccttaaagttccagctcatgtacctgccccttctgaggatgctgagcaacttcgtaaagcttttgaaggatggggtacaaatgagcaattgattatcgacattttggctcacaggaatgcagctcagcgcaatttgattcgtaaaacttatcgtgaagcttatggggaagatctccttaagtctttggatgaggaactttcaagtgactttgagcgagctgtggtgctgtttactttggaccctgcagagcgtgatgcatttctggctcatgaagctacaaagaggttcacatcaagccattgggttctcatggaaattgcttgcactaggtcttcacatgaactg

SEQ ID NO: 211126 - DNA, 420 bp, Gossypium hirsutum
gtcgatgtcggattactacgcactcgctccccgttagccgctgtcggtggagtcgttgccggctcttcatttttgcgatcttcctccagaaatggctctccttttgcttgcttaagcctatccacttctcctgggattaaggaggctgtggcaactgacaaagctccagcagcattgggaccatattctcaggccatcaaggccaataatcttctctttgtctccggtgttctcggtcttattccagagactggaaagttcatctcagacagtgtagaggatcaaaccgagcaggtactgaaaaatatgggagaaatactgaaagctagtggtgctgactattcctctgtggttaagacgacaattatgctagctgacttgaaagacttcaagaaagtaaatgagatctatgctaaatac

SEQ ID NO: 211127 - DNA, 423 bp, Gossypium hirsutum
tgtgatctgatgacacagataaagaagaaaaagaagaagccataagaaggggtctcggggttttcgatttcatcctagatggatgatgttatgagtcgggatttaataagtgacttgcctcaaagcattatagaaagtatcctcacacgtttaccaatacgggatgctgtgaggactagcattttatcaagtaaatggaggtataaatgggcaacacttactcaacttgtatttgatgaaaagtgtgtgattttatcgaatgatcgatgtaaagttgaggatggtcttgtaaatttcatcactcggactctttttcttcaccaaggcccgattcataagttccagctaacgactacgcacttgcagtgctgccccgacattgatcaatggttacttttcctttcaaggaatgacatcaaagag

SEQ ID NO: 211128 - DNA, 415 bp, Gossypium hirsutum
  unsure (1)..(415): unsure at all n locations
gaaaacagtagtgtgggctctaatgattctctgacccacattttaagccaccctggtttaaaacctgtgaaacgtagcaattactctgtctctgtggggcagagtgtgtttcgtcctggtaaggttggccatgcacttaatgatgatgcattagcacaagcattgatggatggcaggtatcagactgaggtattacagaattatgatgagtgggctattgatttaagaaagcttaatatgggtacagcttttgctcaaggtgcttttgggaagttatacagaggtacatataatggtgaggatgttgcgattaagatattggaaaggccagaanatagccctgagaaggcacaagttatggaacagcagtttcagcaggaacttatgatgcttgcaacactaaagcatnctaata

SEQ ID NO: 211129 - DNA, 365 bp, Gossypium hirsutum
cgggcactgacccacgcatccaatcgaattttccactgtttctacccaaactttcaaacacatatatactatattatagcgcgaactttcaacaacccacacaacctcactaaaaatctaccgacagcagcaacaaaaataatacaacgcctcacctaccaaaaagcgtcacaactacgctacaaaatccaatcagacccgggtcgttaagaccccacatggtaagcttgtgtaccaatacaccaataatatttcttatcggtcccaattaccccaacaccgtgaagaagattcataaaatcccccacttgagacactccgagtacaacaagttcaatttgtctaggaaccacacgacttttaac

SEQ ID NO: 211130 - DNA, 395 bp, Gossypium hirsutum
cgtacgtaagcttggatcctctatagtcgacccacgctttcgcgcgcatatgtcctctcttcttacgcgtgctttccccaacggacggagcctcactaggggtctaccggcggcggcaacgagatggcgcaacgcctgacctaccgaaagcgtcacagctacgctacaaaatccaatcagacccgggtcgtgaagaccccatgtgggaagcttgtgtaccaatacaccaagaagagggcgagcggtcccaattgccccgtcaccgggtagaagatccaggggatcccccacttgagacctgccgagtacaagaggtccaggttgtctaggaaccacaggactgttaaccgttcttatggtggagtactctctggaattgctgttatggagagaat

SEQ ID NO: 211131 - DNA, 382 bp, Gossypium hirsutum
gctcttctcccacaggaataagcaggtatattttgggtcaactctgtttgctttacaacagctatctggtataaatgctgtgttttatttctcttcatctgtatttaaaagtgcgggagtgccttcagatgttgcgaatgcgttcattggagttgctaatttatcaggatctatcatcgcgatgcttttaatggataaacttggaaggaaaatgctccttttgtggagcttctttggcatggctatatcaatgctcgtccaagttgctgctgcaaatacttttgtgtcaggctctgcatctttatatctatcagttggtggcatgttgatgtttgtcttaacatttgcattaggagctggtcctgttccaagtctcttatta

SEQ ID NO: 211132 - DNA, 415 bp, Gossypium hirsutum
  unsure (1)..(415): unsure at all n locations
ctgcccccttgtcgttggcattggcacacgctggtgttgaagacgggaaggtagtatttgttccatgggtggaaacagatttcagaaccggtgacggtccatggtggtcttaaatatctccacaaccattggctcaggctgtttgttgggttatatttgagatttattcagccagtatgttttgtagcgttgctaaacatcctgtgccgtacagttatcctctgtatactgcagtttgtaggttgcaagaccgtatttccaaattagaaatggtactagtattcttgtcatattcatggaggataattatttaatacattagcagtggtcttaaattgtatttaaaaggttaaaaagaaaaaaatatgtgataaaatctcaattntgtggaatgaaaacttttccttnnnnaaaa

SEQ ID NO: 211133 - DNA, 332 bp, Gossypium hirsutum
tcgcaaatggtgacctcagtgctacctagagtagaaagcttgtcaagcattgggattcattgaatccctaaagaatatatcaagccttaaaaaaaactttccaacatcagtaaccttttttaataagaaaaaaaagaggaagggcctcaggttccgaccatcgatttgacagaaatcgaatcctaggacaaacaggtccgggaaagatgtcagcaggagctgaaaaaggctgccatgtaatggggtgtgatgcaccttgttaaccatggcatcttccaggagctcatggatcgtgttacgaaagttgggcacaaattctttgaactccctgt

SEQ ID NO: 211134 - DNA, 388 bp, Gossypium hirsutum
cccacacgtccggatcttttctgcttaaccatttttgtttcgtcctcactcaatttcggcgatggggctgaaaatatgagctacgtcacattatgccatgtttactgtgacacttgccgagttgagtttgagaccaaactcagcgaacccatcgctggagcagtaggtgaaactggaatgcaggaatcgtacagacaatcaccttaccttccacagccaagaaatcgtgactgacgaacgttgagactatcacattgtagtggaaggcgattatgaggaatcagactgcgacttcacctttgtgaggagtcccaacccggattgcaaagatcccttctaaatgtggaggatatccagggtggttctcaccacacttgacggcgttagc

SEQ ID NO: 211135 - DNA, 379 bp, Gossypium hirsutum
atcgccctttatgatgaggagtgtaagaataatttcttgctcaggctgaaactaaagatgctcgctaccattcaattacgccatctgctgcggcattttcaagatttaccctgacatgaacttttctgaccaaaccacaaccgctacacttgttcttgatgctgcaccccctaaagttcactttgatggagctcatatttaaactttggctaaaaatctctgctaatgtggatataactggacttgcaacccttgctactttaaatgagaaaaaaaagcttatcttattatgtaagctgatctaaataatatattatatcttttgggttttacctattaaaataatccctctattgttcattaggtgttttgcttcttt

SEQ ID NO: 211136 - DNA, 398 bp, Gossypium hirsutum
  unsure (1)..(398): unsure at all n locations
cccacgcgtncgcccacgcgtncgaatccattcaactcgttgctgaacatgctgctgcaaagaacaacgttttcatgatgaatctttctgctccattcatctgtgagttctttagggatgtgcaggagaaagctctaccgtacatggattatgtcttcggtaatgagactgaggcccgaacattttcaaaggttcatggttgggagaccgataatgttgaggaggttgctctaaagatttctcaatggcccaaggcttcgggaacacataagagaattactgttatcactcagggagctgaccctgttgtggtcgctgaggatggaaaagtgaaaaaattcccggttatcttgttaccgaaagagaagttggttgataccaatggagcangggatgca

SEQ ID NO: 211137 - DNA, 380 bp, Gossypium hirsutum
cggactctttttcggacacttgggccgtctcgtgggttttgttccccttatgaaactggagggctttctgtggtgctgtttactttggaccctgcagagcgtgatgcatttctggctcatgaagctacaaagaggttcacatcaagccattgggttctcatggaaattgcttgcactaggtcttcacatgaactgttcaatgtgaggaaggcgtatcacgatctttacaagaaatcccttgaagaagatgttgcgcaccataccaagggagactaccgcaagcttttggtcccacttgttagtgcattccgataccagtgagaggaggtgaacatgacactggcaaggtcggaggcaaagatactttgtgagaagatatc

SEQ ID NO: 211138 - DNA, 368 bp, Gossypium hirsutum
accacgcgtgcgcccagcgtccgcccacccctcctaatccattcaactctttgctgaacatactgctgcaaagaacggcgtttttatgatgaatctttctactccattcatctgtgagttctttacggatgtgcacgagaaagctctaccgttcatggattatgtcttcagtaatgagactgatgcccgaacattttcaaaggttcatggttgggagaccgataatgttgaggaggttgctctaaagatttttcaatggcccaaggcttccgtaacacataatagaattactgttatcactcaaggagctgaccctgttgtggtcgctgatgattgaaaagtgaaaaaaatttccgtttatcttttta

SEQ ID NO: 211139 - DNA, 400 bp, Gossypium hirsutum
atcaagaaagaaaacgactgttcatggagctatggaagtgacaacaacagttgtgatgtgaacttagatgtctcaagaacaccactgatgagcagtagtaaacatctcttcccaccatcagtgagaccaacaagcatgactcaactccttcaaggttcatcaagaccagacctacaatgcgtaaagcttgatcaagtggttcaagaagaaagcttctgcaatatgttcaatggagttgatgaacagcaagggttttggccatggtctgaacagcaaagtttccattgaaaagtattaaaaaacaccaactactgttgtttatgcactttcatcagctttggctaatatgcaagttaaaaaagaagaacaactaggaaattctttttttccctgtcaactt

SEQ ID NO: 211140 - DNA, 383 bp, Gossypium hirsutum
cgcctctgcatcaggctagggttcaacgaataaccgagaaggcggcatcaagtttccggttatccggtcgccatgagagccaagtggaagaagaagcgcatgagaagactgaagcggaagcgccgaaagatgagacagagatccaagtagacagaaccaccagcccctctgttatacgaggtttctcaatgtcttagctaatatcggtgtacttttagggtccacttagttatctgccatttttatttcagttttaagttttttttttctcttgggtttctattgtctttcaagttggtgctaacccggcagtgggatgatgtatcatcgttgagaacagtgaattgcaaaaaaaaaaaaagcagattttaagattggagttt

SEQ ID NO: 211141 - DNA, 321 bp, Gossypium hirsutum
ctgtcaaccgcgcctaataaccgctcggatttttctcagacgtgaaaaaggtggggcgttctttcaccaagctattcagccggctatttgccaaaaaggagatgcgtatactgatggttgggcttgatgctgctggtaaaaccaccattctttacaagctgaagttgggagagattgtcactaccattcccaccatcggtttcaatgttgagaccgttgaatacaagaacaatagcttcactgtttgggatgttggtggcagaacaagatccgaccatggtggagacactatttccaaaacatgcaaggacttatttttgt

SEQ ID NO: 211142 - DNA, 389 bp, Gossypium hirsutum
atcagagatgggttgaaagcagatcccaagaagtatagaaggatgaaggagagattggggggtgtttctgaagaaactacaactggagttaagaggctttatcagatgcaggccaacggtaccttgttgttccctgccattaatgtcaatgactctgttactaagagcaagttcgataacttgtatggatgccgtcactcacttcccgatggtttgatgagagctactgatgtgatgattgccggcaaggtcgccgttgtctgtggttatggtgatgttggaaagggttgtgctgctgccttgaagcaagccggtgctcgtgtcattgttactgagattgatcccatctgtgcccttcaggctcttatggaaggacttcaggttttgac

SEQ ID NO: 211143 - DNA, 313 bp, Gossypium hirsutum
ggagttgtttatccttgggagactttcaaaggtattcgagatcttgggttcggtccatgttcctcatttgtcataacttttgtaattaatgcagcatttagttatcgcactctcccggggtgggtgccaaatccgttacttcccatatacatagagagaatacacagagataagcatgggagtgattcagcaacatatgataccgaaggaaggttcatgccagtgaacctgtagaacatgttcaccaagtatgcactcacaaagccccgacaattatcactcaaggattgtggcaatgactgaggaaaatcgg

SEQ ID NO: 211144 - DNA, 422 bp, Gossypium hirsutum
  unsure (1)..(422): unsure at all n locations
ggtggttctcgggtcactgttgtgagaagcgaagaaggtggtaacaagattgccactgtggttctacgaggaagtactgatagtatattggatgatcttgaaagagctgttgatgatggagtgaacacatataaggcaatgtgcagggacagtcgaatggtacctggagctgcagctactgaaattgagttggctaggagattgaaagagttctccttcaaggaaacaggattggatcagtatgccattgccaagtttgctgaaagttttgaaatggtaccaagaaccctagcagagaatgctggtctcaatccaatggatatcatatctaagctgtatgaaaaacatgcatccggaaataccaaagtgggtattgacttgnggggaggtgactccgaggatggtgtttgcaaagatgtgtc

SEQ ID NO: 211145 - DNA, 405 bp, Gossypium hirsutum
  unsure (1)..(405): unsure at all n locations
gaanacccggcgcgacccacgcgctgcaagatanaaactctgaattttctccaccttttccaggtacagaaaatacacatgaggagtcagttcaacctatgcgacgcggcggatgccaatgttctgccctgctcatatgatgcttctctgtaatgcccgcgcgaccagaaaatccatgctgccaataagttagctaacaaccaccagcgattccccctctcttcttcttcttcacacatgcctaaatgtgacatttgccaggaagcatctagctttttcttattctttgcaagatcgagctttactctctccaaagtgcaatgctgctatacatacatctaatccttacctctttaatcatcatacatttcttcttactgcaataaaagtttgtcttgaaacaac

SEQ ID NO: 211146 - DNA, 293 bp, Gossypium hirsutum
gttaaaattcctgaaccgggaccccgggggtggccgcaaccttagggaagccggagacctcggcgggggcctcgggaagagttatcttttctgtttaacgggctgcccaccctggaaacaggtcataccgaggtggggtccacccgccggaagagcaccgcacgtcgcgtggtgttcggtgcgcccccggcggcccttgaaaatacggaggaccgagtgccgtccgcgcccggtcgtactcataaccgcatcaggtgtccaaggtgaacagactctggtcaatggaacaatgt

SEQ ID NO: 211147 - DNA, 410 bp, Gossypium hirsutum
  unsure (1)..(410): unsure at all n locations
cccacgcgtccgcccacgcgtccgcccacgcgtccgggctatgcaattcaatcccatcgcttctcaaactaagaaactcccttcatatgctcttccacccatggcaagtcttagatctcccaaggtttctatggtctccactcttccacctcgctccaaaggggttgaagatctgaaacggcctttcatggctccaaagctggtacaccaggcttcccacaccatgccacctgagaagattgaaatctttaaatctttggatgattgggctagggataacattctgattcatcttaaacaagttgataaatgttggcaacccaaggattttcttcccgatccttcgtccgatggatntgaagatcaagttagagaacttagagaacgggcaaaggagattccggatgagt

SEQ ID NO: 211148 - DNA, 426 bp, Gossypium hirsutum
gggtttctctcttcaggtaaattcttggttgtttcgttcgttttaagaacagagattcgaagatgagtaagcttcagagtgatgcccttagagaagctatttcaaccattgtggctaattccaaggagaaaagtcgcaagttcaccgagaccattgaactccagattgggctgaaaaactatgatccccaaaaagacaagcgtttcagtggttccgtgaagctgccacacattcctcgtcccaagatgaagatttgcatgcttggagatgctcaacatgttgaagaggctgagaagattggtttggattatatggatgttgaagcattgaagaagctaaacaagaacaagaagttggtcaagaagcttgctaagaaatatcatgcatttttggcctctgaatctgtcatcaagcaaatcccccgtc

SEQ ID NO: 211149 - DNA, 342 bp, Gossypium hirsutum
cggacacgttggcggactcgttttctgacaccttttcttgctcgatacttttggtggggccagctcttttctagtctctggaatgactgcacgaacagctgttattttcttctgttttgctgtgattaaaactgtggatgatcattgtgggctattgttgcccggtgatatttttcatatatttttctggaataactctgcttatcatgacatccatcatcaactccaaggcacaaagtattactactctcagccgttcttttcccactgggataagctactttgaactcatattgcttatgatctttttaagcgacccgaggggggttttttagtaaggct

SEQ ID NO: 211150 - DNA, 429 bp, Gossypium hirsutum
gtcaaaaagttatcttgaatgtgtatgacttgagccaaggacttgctcggcagctttcaatgaccttattagggaagcctattgagggaatatggcacactggagttgtggtttatggcaatgaatactattttggcggaggaatccaacattctcctgctgggacgacaccatatgggacaccaattagagtgatcgatttaggagtcactcatgtgcctaaggatgtgtttgagatgtatttgcaggagattagtccccgctacactgctgagacctatagtttgctcacccacaattgcaacaacttcagtaatgaggttgcgcaatttttagttggttccaacattccggactatattttgcagctacctaatgaagttatgagcagtccgatgggtgcacttttaatgcccatgatacagaatc

SEQ ID NO: 211151 - DNA, 407 bp, Gossypium hirsutum
cggacgcgtgggcggacgcgtgggcggacgcgtgggcttgctcgatacttttggtggtgccatctctttcctagtctctggaatgactgcacgaacagctgtaattttcttctgttttgctgtgattaaaactgtggatgatcattgtgggctatggttgcctggtaatattttccatatatttttctggaataactctgcttatcatgacatccatcatcaactccaaggcacaaagtataactactctcagccgttcttcgccaactgggataagctacttggaactcatatggcttatgatcttttgaagcgaccggaggggggttttgaggtaaggctaaagaaagactagtcacattctgttgatttgtcttgtgtagttagaggctctcgcttcacactgt

SEQ ID NO: 211152 - DNA, 407 bp, Gossypium hirsutum
ggagtgaacacatataaggcaatgtgcagggacagtcgaatggtacctggagctgcagctactgaaattgagttggctagaagattgaaagagttctccttcaaggaaacaggattggatcagtatgccattgccaagtttgctgaaagttttgaaatggtaccaagaaccctagcagagaatgctggtctcaatccaatggatatcatatctaagctgtatgaaaaacatgcatccggaaataccaaagtgggtattgacttggggggaggtgactctgaggatggtgtctgcaaagatgtgtcaatcctgaatattagggatctttatgtcaccaagtttttcgctctcaaatatgctgctgatgctgcctgcactgttctacgggttgatcagattataatggc

SEQ ID NO: 211153 - DNA, 437 bp, Gossypium hirsutum
ccgatacgagtatctgccatcgatgatccagcattggctactttctgtgaaccggttgagaagtcaaattcgagccactctttcactgcaggattagctcacagtgttggccttaggaagcaaccgctgcgtgtatacagcatggtgaaatatgcagcaatagcacgaggcgatgctgaaatattcatgaagtttgcgaggacagggtacaaggaaaagatatgggatcatgcggccggcgtgatcatcatacaagaggctggtggtgtggtaactgatgcgggaggttccccattggatttttccaaaggtatcttcttggaaggtcttgatcgaggtataatcgcttgtggtggagcttaactacatgaaagaatcaccaaatctgttgatgctaggtggaactgttctagtctatagtcatttttataaatttt

SEQ ID NO: 211154 - DNA, 432 bp, Gossypium hirsutum
cttggctgttatgtgaagtcttgccgcagaagctatcatttcccttgtgcaaaagagattccaaaatgtcgatgggactatgaggactttcttgtgctttgtcctgcccattcttcagtcaagtttccaagtgagaagtctagaaaggcccattctgcagccaagttcccaaatgagaagcctggaaactgtctatctgctgatgatagagtgccaactgaaagtggccagctgaaatccaacactttctggggccagccagagaataagaaagattgggttttctgtggatctgctttgtctcctgaggagaagtttcttctggtcaagtttgcaaaaatgattggtgtaactgtatccaagttttggaggccggatgtcactcatgtgattgcctctacagatgagaatggtgcatgcactaggacactt

SEQ ID NO: 211155 - DNA, 341 bp, Gossypium hirsutum
gagacgcttggtctgactcttgggcttgctcgatccttttcgagggggcagggtctttcctggagctctggaatgacagcacgaacagctggaattgtcttctgatgcgccgtgagaaaaaccggggacgatcattgggggctatgggtgcctggttatattatccatatattattctggaataactctgcttatcatgacatgcatgatccactgcaaggcaccaagtttaactactctcaaccgaacttcgtcgactgggataaactacttggaactcatattgctcatgatctttcgaatccaccggaagggggttttgaagcatgctaaagaaagac

SEQ ID NO: 211156 - DNA, 421 bp, Gossypium hirsutum
atgaccactctcgtgaccggtgtgtttctcctcctactatccgtcgccggcgtcgtctgcgctgctagatatatcaccggtgatgtcctccggttaccttcggaagcttcaaggttcttccaatggaggagcgatgatgatgaagttggtggcacaagatgggcggtcctgattgctggatctaatggatattggaattacaggcatcaggctgatgtttgtcatgcttatcaactcctaaggaacggtggtttgaaagaggaaaatatcattgtctttatgtacgatgatatcgctttcaatgaagaaaaccctaggcctggtgttatcattaacaatcctcatggcgatgatgtttataagggagtcccaaaggactatactggagaagatgttaatgttcacaacttttttgcggctc

SEQ ID NO: 211157 - DNA, 349 bp, Gossypium hirsutum
gggcgagccacgcgttcgcgcaataaagctgtttcttgttaagctaactgttgaactctgttgcaagactctgtctgtccggggctccaaatggtttcctcaatcccatcttgtaaactcatcaaggaaacttgtgaaaggaatttttcaatgcactcttactaccgcactactgcaagccccgattttatctctttagacaagacaacttttaggaatattattcaccatccggatctaactgtaatatctgaagaaagagttctcgatgccattttgatgtggtacatgaaatcacaaaaaattgttggatgggaagtggtgaatgagcttaattcaaaattcaact

SEQ ID NO: 211158 - DNA, 467 bp, Gossypium hirsutum
atctaatactaatagaatactaatctaatactctaatactaatagaatagaaaaaatagaatagggaatactaatataatagaaagaactgtcttttctgtatactttccccggttccgttgctaccgcaggctttacgcaatcgatcggatcatatagatatcccttcaacacaacataggtcgtcgaaaggatctcggagactcaccaaagcacgaaagccaggatctttcagaaaatggattcctattcgaagagtgcataaccgcatggataagctcacactaacccgtcaattttggatccaattcgggattttccttggggggtatcagtaaggaattggaatgtaataatattgattcatataggaggaaaaggttctctattgattcaaatgctgtacctatgggatagggatagagaaagaggaaaaaccgaagatttcacatagtgcttttgatcga

SEQ ID NO: 211159 - DNA, 399 bp, Gossypium hirsutum
ggagatgacatttacatgcgctcttggactggcaccattattggtcctcataatgctgggcatgaaggtcgaatctatcagctgaagctgttctgtgataaagattatccagagaagccaccaagcgtccgttttcattcaagaatcaacatgacttgtgttaaccacgaaactggagtggtggaaccaaaaaagtttggacttcttgcaaattggcagagggagtataccatggaggatttactgacacagctgaaaaaggagatggcagcaccacataaccgaaagctggttcaacctcccgagggtacctacttctagctctcaagattatcggacatcctggatctaagtgcatttctggtatgcaatatataagttgtaatgcttgttgatctt

SEQ ID NO: 211160 - DNA, 376 bp, Gossypium hirsutum
cttttctctctcttttttcaaccctaaccctacctcaccaaccaggattcaacatgaagggaggaaaatctaagtcagatactaagagtgccaagctatccgtgaaatccaaagctggaaagaaatcggggaaggctgccaaggatccaaacaagccaaagaggcctgctagtgccttcttcgttttcatggaggagttccgtgagcaatacaagaaggatcaccctaaaaacaaatccgttgccgctgtcggcaaagctggtggagataaatggaagagcttgtctgaagctgaaaaagcaccttatgtagccaaggcagaaaagcgaaaggtcgagtatgaaaagaacatgaaggcctacaataagagacaagc

SEQ ID NO: 211161 - DNA, 439 bp, Gossypium hirsutum
cccacgcgtccgcccacgcgtccgaagagaagccccttcactcctgctaagagtgatggcactagaagctacctaagtggttactcagaccatccaaattacatgtcttacactgaatcgtcaaaagctaaggtaaggtctttcagtgctccaaaacaaaggcctcattatgaaagatctagttcaacaaagaggtactccattcatggttttggtgaattgaaatcaactacacaaaggtctgccatgcatgcaaacttcgccagcaaagcttaccccggttcgggtaggttggacaggctaggaatgccccttgggtatagatactaaataatggttttaccatttggctaaggaatgttatgtagtttatgtttagatgttaacgatgatgactctcacctaccctaatgtatccatcctttaatgtttagtgcat

SEQ ID NO: 211162 - DNA, 437 bp, Gossypium hirsutum
  unsure (1)..(437): unsure at all n locations
caagtccatagctatgggaccgtggactttgaaagaagacccatggtcaaatggaacgctctatataagaaaatatcgctcatggaaaaccctgaattgggttctgcctctgtgttgaatgagtgggaaaaaggaggtaggaagctcaccaagtgggagctttgtagggttgtcaaggagttaaggaagtacaagcgtttcaagcaagcacttgaggtgtatgagtggatgaacaatagaggagagaggtttagattttctgcaagtgatgctgcaattcagttagaccttatttctaaggtgcgtggagtttcaagtgccgaagatttcttccttcaactccctgatactttgaaggacaagagaatctatggngcccttctgaatgcctatgtgcgggcaagaatgcaagaaaaggcagaatctttaattgacaa

SEQ ID NO: 211163 - DNA, 404 bp, Gossypium hirsutum
cttgcagaagaagaaaagaatgttccatcattctagcttcttagctggtggagcaacgctagctgctggtagattggtggtggagaaagggatactaaagtccatctctgcatatagcggacattaccggccaacggatgatagtctcaacagttttctttcctttctgaaggggaacggagtgaaccttgacaaagttgagattcgccgttcaaccgatgattctgatagctacgatgatggaaattccagcagtagtgttagtacttttggattttcagcaagctcagtgccgactgaacccaaaatcaacaaagaagagaagaatctgtcattagaatcatatgatactaaacaaccggagaccacaaatacttacgaaaggactttatctggtggtcttc

SEQ ID NO: 211164 - DNA, 430 bp, Gossypium hirsutum
cccacgcgtccgcatcaccatcgtctgctattcttcacaaaaaagaaaagaaaaattacagtgaaaatggcaacccttaaagttccagctcatgtacctgccccttctgaggatgctgagcaacttcgtaaagcttttgaaggatggggtacaaatgagcaattgattatcgacattttggctcacaggaatgcagctcagcgcaatttgattcgtaaaacttatcgtgaagcttatggggaagatctccttaagtctttggatgaggaactttcaagtgactttgagcgagctgtggtgctgtttactttggaccctgcagagcgtgatgcatttctggctcatgaagctacaaagaggttcacatcaagccattgggttctcatggaaattgcttgcactaggtcttcacatgaactgttcaatgtga

SEQ ID NO: 211165 - DNA, 381 bp, Gossypium hirsutum
cggacgcgtgggcttccgtgaatgcaccatctctggaacaatcgatttcgtattcggcgagtcggcggcggtcttccaaaaatgcaaattccttgtccggaagccacaatcaggacaacaaaacgttgttacggcacaaaaaagattggaccataatcagcccacagcttttgtgatcatggacagtgaaatcatcccagatgctgagcttgcaccagcgaagaacgaattcccagcattccttggtcgtccatggggtaagctatccagagctatcatcatgcaaacttacattgacgatatggtacaccccgaaggttggactagttgggatcccaaaaaaccgacaaatctttgccaatacgccgagttcaataacac

SEQ ID NO: 211166 - DNA, 427 bp, Gossypium hirsutum
ccgcggacgcgtgggttccactagaattccaaaggtccaacaacttttacaagatttcttcagtgggaaggagctttgcaagagcatcaaccctgatgaggccgttgcatacggtgctgcagtccaagctgctatattgagtggtgaaggtaatgagaaagtgcaagatctcttgctcttggatgtcaccccattgtctctcggtttggaaaccgctggtggtgttatgaccgttttgattccaaggaacaccaccattccaaccaaaaaagaacaagtcttctcaacctactccgacaaccaacctggagtgttgatccaagtctacgaaggtgaaagaacaaggaccagagacaacaacttgctcggtaaatttgagctctctggcatccctcctgctcctagaggtgtcccacagatcactgtc

SEQ ID NO: 211167 - DNA, 428 bp, Gossypium hirsutum
ggacgcgtgggtaccactttgttggaacctcgacctttagccaatatactgtcgtccatgttggccaggttgccaagatcagtccaaccgcccctcttgataaagtctgtcccattagctgtgggatatgtacaggttttggggccactgtgaatgttgctaaacccaaaaagggtcaaactgttgcagtttttggactgggtgccgttggtcttgccgccgctgaaggtgcaagggtttgtggggcttctcggatcatcgctgttgatgtgaaccccagaagatttgaagaagctaagaggtttgggattacagaatttgtgaatccaaaagactacgataagccagttcaagaggtgattgtggagatgaccggcggaggagtggatcgcagtgtggagtgtacagggagcgtccaagccatgatt

SEQ ID NO: 211168 - DNA, 433 bp, Gossypium hirsutum
gtaatcgccaacctgaacgagccgacactgtgtactacggagaatacaaatgcacgggggaaggcgcgactcctgctacacgagagaaattcgtcaaacaactatcggatgcggaagctaaaccattcttggttcttgactacgttgaaggtaccaaatggttacttcctcctccgacagtacctaaataattcattcattcccaactttttcatgccggcaacatatcctcacagtattgctaattcaagcagactctcgtctacctctttgctgggtggaaataactagccatccattttattttatttattttattttcccttcccatggcttgtattttaacaaatagccaaatgtcaataagaagcagaatttgtcttatttttattaatagttaggatgttgatatttgccattatgtagaaaattt

SEQ ID NO: 211169 - DNA, 260 bp, Gossypium hirsutum
gctgttactgcaaaattccaagagataaacgaagcttacaacgtgttaatcgatcctgataagcgctttgggtatgatttaactggaatatatgaaattgataagtatactttgagggaatatcttgccagatttaagggaatgattcttacctgcaatgggcttggttttagtcatacatcaacatggacagaacaactaacagacagaaatgaatttgctgaggaaggttagcttttgtttacaaattacaaagactg

SEQ ID NO: 211170 - DNA, 425 bp, Gossypium hirsutum
cccacgcgttcggtgccccggagtatgcaatgactggtcagttaactgtgaaatccgagggttgtagctttggagttgttcttctagaaatcataaccgggaggaaagccattgataattctaaagctgctggggaacagaatctagttgcatgggcaaggccattattcaaagacagaaaaatgttctctcaaatggctgatccaatgcttcaaggtcaatatcctccaaggggtttattccaagcacttgcagtggcagcaatgtgtgttcaagagcaaccaaatatgagacctctcattgctgatgtagtcacagctttgacttaccttgcttctcaaaaattcaaaccagatacacagccaatacaaggttctcgcttgatgcctggtactcccccttggacaaagagagacatagataag

SEQ ID NO: 211171 - DNA, 387 bp, Gossypium hirsutum
gcgaccacgcgtccgatcactggtgatgagactaattttaaactctgcaaaattaggtctgtccaaacggggcagaagggttttccatacctgaatacctaccattgtcgcacaatactctacccataccctctgatcaaagtcaacgacaccatcaagcttgacttacagagcaacaaatttgtggattaaattaagcctgatgttgagaatgttgacatggtcactggtggaaggaacaggagacgtgttgtagtgaataaaaacagtgagaaacacaaagacagcctcgccacaatccatgttcaatatgctaatagacactaattttcaacacttctatgccatgaattaacattcttacaaagaacaaatcctttgatttca

SEQ ID NO: 211172 - DNA, 424 bp, Gossypium hirsutum
caaaatcttagagatggatatttgatagatttccctttcatctccttttctctttaaagaaaaattggttttcgattccattttcaatttatatattttggattagattcggttggtcttagggaaaaacaaaggaaagggcaatgtcaaccccagcaaggaagaggctgatgagagacttcaagagactacagcaagatccacctgctggtattagtggggctcctcaagataataatatcatgttttggaacgctgtcatttttgggcctgatgatactccttgggatggcggtacgttcaagctgactttgcagttcatggaggattatccaaataagcctccaaccgttcggtttgtctcacggatgtttcatccaaatatctatgcagatgggagtatttgtctcgatattttacaaaa

SEQ ID NO: 211173 - DNA, 434 bp, Gossypium hirsutum
cgaattcgcagacatgacaaatgatgagttcagagctatgtatttgggttaccaaagcataagatctccatgtgagagcaacagcaaaggcttcgcatatgacaaatatcacaatttgccaaaaagcatagattggagaaagaaaggtgctgtcgctccaatcaagaatcaaggccaatgtgggagttgttgggcattctcagcagtggcagccatagaagggatcaatcaaattaaaacagggaacttgacatctctttcggaacaagagctcatcgattgcgacaccgactctatcgaccaaggctgcaacggtggacacatggtccaagcgtatgaatttattataaagaacggtggaatcaccactgagaaagactatccatacacgggaagagatgacaccttgcagcggacacaagctaaaaaccatg

SEQ ID NO: 211174 - DNA, 411 bp, Gossypium hirsutum
cggcccttttggaacttggaaaggtggaagggagaaggctccagctgccttttgcagaaaggctattacttccattgacaagtttgagatgtggggagatggtcttcagactcgatctttcactttcattgatgaatgtgttgaaggtgtacttagattgacaaagtccgatttccgtgagcctgtgaacatcggaagtgatgagatggttagcatgaacgagatggcggagattgtgcttagctttgaagataaaaagcttccgatccaccatatccctggtccagagggtgtccgtggtcgtaattcagacaatacattgatcaaagaaaaacttggttgggcccctacaatgaagttgaaggatgggctgagaattacatatttctggatcaaggaacagattgagaa

SEQ ID NO: 211175 - DNA, 422 bp, Gossypium hirsutum
cccacgcgtccggttctcagagaggtttctagcagtgttttgaaggctgagagtggggtgagggttcatgctttagctcactttccagctgccaaaatcactaccattcttgtgggtgatactattctttgtcaaaatggtaaaggagaagaagacagtttgggttttttactaccatccctcaagaacatttatcactctcttacaaagtggggtctagagaaagacatcaaagtgtcggctgttttttcttccgattgtttgatgcaaaactctgttgtttttactgatgatttgggtaagaaggtggtcaaatctctgttggagttcttccaaaatacaaactccacttactccattgttgcttttccaaatttgtcttcctcttttcatgaaacattggttttactctcctcccacct

SEQ ID NO: 211176 - DNA, 326 bp, Gossypium hirsutum
gggcacgcgtgcgggaacctactgtgatcgatgaagtcaggactggtgacttaccgacaactttttcaccctgaacaagttatttttggctatgaagatgctgccaattactttgccagatgccattatacaattgggaaggaaattgaggatctttgccttgaccgtgttaggtagttagctgataactgcactggtttacaagggtttcttgtgtacaatgcttgtggtggtggaactggttcaggtctgggatctttgttgttagaacgcttgtcggtggattatggtaaaaagtttaagcttggtttaaccatttacccttc

SEQ ID NO: 211177 - DNA, 424 bp, Gossypium hirsutum
  unsure (1)..(424): unsure at all n locations
ccacgcgtccgcccacgcgtccgttcaaaaccaaataaaaacatggcaccacaccttaatattgttccttccatgtttgtgcttttattattattcatttcagcctctaaagttcaatcaggcgctattgatgttgttgccaagtttggcgcaaaagctgacgggaaaacggatctgagtaagccatttttggatgcttggaaagaagcatgtgcctctgtaaccccatcaacagttgtgattcctaaagggacatatttattatcaaaagtaaacttagaaggtccatgcaaggctcctattgagattaatgttcanggcactataaaggctccggctgatcctggtgctttcaaggaccctaattgggttagattctatagtattgaaaatttcaaaatgtccggcggaggaattttcgatg

SEQ ID NO: 211178 - DNA, 358 bp, Gossypium hirsutum
cccactcttacttccacacctcccttcaaaaccaaataaaaacatgtcaccacaccttaggatggtttcttccatatatgtgcttttattattattcatttcagcctctaaagttcaatcatacgctatttatcttattcccacctttgacgcaaaaactgacggtaaaactcatctaagtaagccatttttgtatgcttgaaaagaaacatcttcctttgtaaccccatctacagatattattcctaaatggacatatttattatcaaaagtacacttagaaagtccattcaaagtatcctatctatattaatgttcaaaacactataaaagcttctcctcatcctcatactattat

SEQ ID NO: 211179 - DNA, 427 bp, Gossypium hirsutum
cccacgcgtccgtgcgactccaatgccaccatctattcttagccgtggtattggttggcagggagttgcaattttggtgtcgggattgtttggaactgccaatggttcctcagtttctgtagagaatgctggccttttagccttaacacgagttggcagccgaagggttgtccaaatctcagcagggtttatgattttcttctctattcttgggaaatttggagcagtctttgcttcaattccagcacctattattgctgcattgtactgcctattctttgcatatgttggtgctgggggtcttagttttcttcagttttgcaacctcaacagcttccgtacaaaatttatattaggcttctctgtttttatgggcttatctgtgccacagtacttcaatgagtataccgcaattaatggctatggt

SEQ ID NO: 211180 - DNA, 344 bp, Gossypium hirsutum
cccacgcgtccgtggaaatggagtccttatctatgggaaaaaagctactaacatctgttgtcgtaggactagtagttgcttcagctataacccaaaccgcgttggctcaaaactgtggctgtgcgccaaacttgtgttgcagtcaacatggttattgcggtcagggtaacgattactgtggcactggatgcaaagaaggcccttgtttctgcaagtctcccactggtgcttcagttgcctccattgatccacctcagttcttcaacggcataatcaaccgagctcgtgcggattgtgcaggcaagaaattctatacacgacaagctttcctgactgcacttgat

SEQ ID NO: 211181 - DNA, 399 bp, Gossypium hirsutum
ctgaaagtttgctcacaaataggtttgtgttcatttgatggaactcgagatgtaagtatgggaattgaaagtgttgtgaatgagaatgctggaaaagcctctggtaatgtccatgatgcaatgtgttctgtttgtgagatggcagtcatatgggtgcaaagccaacttaaacagaaccagactcaggagcgtatacttgattacgtcaatgagctctgtgaccggttgcctagtccaatgggagaatcagttgttgattgtaacagcctatcttctatgcctagtgtcgccttcacaatcggtggaaagatacttgagcttacccctgagcagtacattctaaaagttggtgacggagagctagctcaatgcattagcggattcggtgctcttgatgta

SEQ ID NO: 211182 - DNA, 435 bp, Gossypium hirsutum
  unsure (1)..(435): unsure at all n locations
catctctcaaatgctcgagcagtcttgcattttgttttcccttttttttccccacacctttttttaaacccatttgctaaaaatgcactgggttcttccagtgttgcttgccgttatcggagttactgcactgctcgttgtaactccggtaagtgggtaccgtccatggccgtacttaaaacccaacagctccgacttaatgttcggaggctctaagaaatttgagggctcatcggagtttatccatatgagatatcatatgggtccagtccttactgctaatatcaccatccacccaatctggtacggccggtggcagaaatcccagaagaaaatcatccgtgagttcatcaactcgatctccgccgttgattccaaacacccttncgtggctgggtggtngaagaccgtacagctttacaccgaccaaacggg

SEQ ID NO: 211183 - DNA, 363 bp, Gossypium hirsutum
  unsure (1)..(363): unsure at all n locations
cccacgcgtccgcgggccctcgaagaagccttcagtgcgtttggtgaaatcgtcgaatcgaagatcattaatgatcgtgagactggaagatcccgaggctttggattcgttactttccgtgacgagaaagctatgagggacgcgatcgaaggaatgaacggtcaaaatcttgatggaaggaacatcaccgtcaacgaagcccaatcgcgcanaattggaagcggtggcggatgatttggaggaggaaacggtggttacagccgcngtggatgcngcggcggatattgtggtcgccaaggaagatatggtggcggacgccgtgaaggtggatacggaaatggtggagggtatgtggtggtgggt

SEQ ID NO: 211184 - DNA, 382 bp, Gossypium hirsutum
tacaaagacacaggacagcatgttaacggtgagttctcgatggcggtggttcaagccaacaatttacttgaagatcaaagccagctcgagtccggttgtttgagtacacacgagtcaggtccctatggcactttcgttggcgtatatgacggtcatgggggaccggagacttcacgctacgtcaacgatcatctctttcaacatctcaagcggttcacttatgagcaacagtcaatgtcggttgatgtaatacgaaaagcatatcaagcaacagaagagggtttttcgtctctcgttgctagacaatggcctatgacaccacaactcgcggctgttggatcatgttgcctggtcggtgttgtctggtgcacgaacctttatg

SEQ ID NO: 211185 - DNA, 322 bp, Gossypium hirsutum
ccgaaaccagatcggaaattccctttcgttttcccccaaaaagtttccaatttctcctggttcaggatcgacgctagactatccatcgccaccgttcatcatcgtctcagccgcctctcttaaaaccagggataagaaaagatgggagctttcatatcgaagttctggttcatgttatttcccgcaaaggaatataagattgtggtggttgggttagataatgctggcaaaacgacgacgctttacaagcttcaccttggtgaggttgttactacccatcctacttgtggcagcaacgttgaagagcttgtttataaaaaca

SEQ ID NO: 211186 - DNA, 430 bp, Gossypium hirsutum
atcctggtgcacttggaaatggaagatggtacgcaacacaagtaaccttaggcgatggtagattcatggtgttcggcggtcgagatttcccaacatacgaatttgttcctccacaaggccagaaaaacacccttaaggatgtggtcgattttaatttcttggtggaaacacacgatcccgtggaaaataatttgtaccctttcgtttacctttcgactgatggaaatgtcttcatcttcgctaacaatcgttcggttcttttgaaccctaacacccaaacgatcatccacgagttcccagtgctccccaatggtgctcgtaattatcctgcgtcaggaagtgcttgcctccttccgatcatgctcaagcctaatgaagatcgtagagtgatccccgccgaggctttgatatgcggtggtgcatcacatga

SEQ ID NO: 211187 - DNA, 315 bp, Gossypium hirsutum
gaagaccaagatttccacacacaactagtgaatggatttcaatctctcacagcagagctatctcattacatccctgcaattctatcagagctctgataatgttgtaagcattacttgctccgaaatatctttctggtgcaagctgttcataaagattgtgacacattctttttgtagatctgtgctcaaatgatgattgttgatgtatgtaataaccaatttgcttgcgtgcaatggtggattacttattgtcgaatgatgttaaaaccaccaatcctactgtacgcggcaaccaacaagagctcgtctataaaa

SEQ ID NO: 211188 - DNA, 420 bp, Gossypium hirsutum
gaattttccagtataatggtggtcacagtcgagaaatctaccatacgaagagaatgcaaagggtattctgtgtgaagtatagctgtgatgccagttatgtcatttcgggaagtgatgatactaaccttaggctctggaaagctaaagcatcagaacaattgggagtggtacttccaagggaaagaaagaaacatgagtatcttgaagctgttaagaatcgttacaagcatctgcctgaagttaagcgtattgtgaggcacaagcacttgccaagaccagtttacaaggcagccaaccttaaacgcactatgattgaagcagaaagaaagaaagaacaaagaaggaaagctcacagtgcccctggaagcattgtgactgaaccagttcgtaaaagaagaataattaaagaggttgagtgag

SEQ ID NO: 211189 - DNA, 282 bp, Gossypium hirsutum
cccacgcgtccgcccacgcgtccgcgctgagtttaagcatatcaataagcggaggaaaagagacttaccaggattcccctagtaacggcgagcgaaccgggaaaagcccagcttgagaatcggtcgccatcggcgtccgaattgtagtctggagaagcgtcctcagcgacggaccgggcccaagtcccctggaaaggggcgccggaaagggtgagagccccgtcgtgcccggaccctgtcgcaccaagaggcgctgtctacgagtcgggttgtttggaatgc

SEQ ID NO: 211190 - DNA, 394 bp, Gossypium hirsutum
cgcaggatgaattcgacaaaaccttttcaatgaaccaagctagatctatcagatggaatgtatctgccagtggtgctcgcccgaacccacagggatcgtttagatatggttcgattaatgtgactgaagtttacgtcttgagaaacaaaccaccagagactattgatgggaaaagacgagcgacactcagtgggatatcctttgtcaatcctgctacaccaatccggcttgttgaccagtataagattaaaggagtatataagcttgattttcccaataaaccacttacagagccacctaaaatggaaacatctgttattaatgggacttataggggatttatggaagtcatcctacaaaacaatgacactaagatgcatacttatcacatgag

SEQ ID NO: 211191 - DNA, 426 bp, Gossypium hirsutum
  unsure (1)..(426): unsure at all n locations
ccagtacatggttacatcaattcatgaaaattggttctgtgcgaggtgcctgaacacgtcaaaatctgctggggaaggtgccattgtgatgcaggcatcagtgtttctgttggttgcgctgtatgatgggtcagttggcttagcatctcgtgctatggcatctgtggatcaacttgtttggcagctgaatcgaaagaacctttgagcctggcttccacataaaaaaaaaaaattattgtaagtttcggtgctaaaaggttgggctgcctctgtgctgtatctgactctatctatttatttatctaagnggcattgtttagctttggtaatgagaaatgacaagggccaaatgtcagaaacggactaattgttggaagcaagttgcagagatcgttgtgtcagactccagttgcaacatctgatcgt

SEQ ID NO: 211192 - DNA, 383 bp, Gossypium hirsutum
gaggattttccatcactgagagaatacaatgattacttggaagaagtggaagacatgatttttaaattgattgaaggaatagatgttcaagctattgaggagaaaattaccaattatcagcaagaaaatgctgagcagattatgatcaatcaagctcgtaaggctgaagatttagctgctgcaatggcagcaagcaaggggatcccagtacaggccgatactgatgggaactcacaagcagggtttgtagctggtacccaaggtcaatatgcaccgacagttgctggaggacagccacgaccaacaggcatggcaccacaaccggtaccacttgctggtgggcttgacatgcatggctatgctcttgatgatgaagaaatgat

SEQ ID NO: 211193 - DNA, 280 bp, Gossypium hirsutum
gcaacatggagtttcagaagaaaaggcatatgaagagttaaagaagctaattgattctgcttggaaagatataaaccaggagttgctgtttaagccagctagggctccatttccagttcttacttgcgttctcaatcttgcgagggttatggatttcctttacaaagaaggagatggttatacacacgtcggaaatgttacaaaggctgggattacttcactgttgattgatccggtgccgatttgatgacgaattttggatttgagaaagctgacaaac

SEQ ID NO: 211194 - DNA, 297 bp, Gossypium hirsutum
gtggatccttacttcataaagctagctgatgccatggttacttggattgaagcttggagagatggtcaattgtcctggagaaaagcctgcaatgacttctttacccaacgccacttctaaaaagtaaaaaagcattttgattgagcagtacctttgttatcattaccatcatttatttgttttttctttgaccttttgagacatttccccccaatatttcatgcgttgggttgttgttcaacagcaattgttttagttttaatacagcaaggtgaatttgaatcacaaaacaatgac

SEQ ID NO: 211195 - DNA, 356 bp, Gossypium hirsutum
ccccaatgacttggtttttcacccttgtgtagtgcaccatcgcccatgctttggagaagacaaaatatccagattcagatatctattggaagaagcttgaagacaaataccatttctcttgccaatttacagctgatctttttgcaatgaaccatacagatttcatcatcaccagtactttccaggaaattgcaggaagcaaggacactgttggtcaatacgagagccacactgctttcactcttcctggtctctaccgtgttgtacatggtatcgatgtgtttgatcccaaattcaacattgtttcccctggtgctgatatggagatatacttcccttacaccgaaagagaaagc

SEQ ID NO: 211196 - DNA, 428 bp, Gossypium hirsutum
caaaggtgttatatttttggctgctacaaatcgtagagatttgttagatcctgcacttctcaggccaggtcgttttgatcgcaagataagaattcgtcctccaaatgctaaggggcgattgcaaattttgaaaattcatgcaagcaaagtgaagatgtcagagtcagttgatttgtcttcttatgcaaataacttgcctggatggactggagcaaaattggctcaactagtccaagaggctgctcttgtagctgtcaggaaaaggcatgaatctattcttcagtcagatatggatgatgcagtagatcgactaactgtaggacctaagcgtgttggtattgatctgggtcatcagggacagtgtcgcagagcaactactgaagttggagttgctataacttctcatctgcttaagcgatatgaaaatg

SEQ ID NO: 211197 - DNA, 351 bp, Gossypium hirsutum
ggaacagcggtaaagaggaagaaagcttctcacgccgggatgtttgacattgcaaagacagcaaatagaccgatgatacacattggtggctgaggtacttatgtaccttctaatgttttaaggaatctggtagctcggtttcttttttgttggtcttgtttttagttcttgcttgttgaggttgaacgattatagtaccgttttatagtgggataacataggctctcttcttcatatgtattgctccgaatagcataggaagactgttacctgttagaatacagaatggtgttgtaagtcaactaatgtttatacccatatttgattggtacaagatcacagatcctgtta

SEQ ID NO: 211198 - DNA, 433 bp, Gossypium hirsutum
gtgtccctaacgtggttgtgtttttgaacaaacaagaccaggtagatgatgaagagcttttgcaattagtggaattggaggtgcgtgaattgctctctagttacgaatttcccggtgatgatgtccctattatttctggctccgcacttttagctttagaagctttgatggctaagcccagtattcctagaggtgaaaaccaatgggtggataagatttatgaacttatggatgctgttgatagttacattcctgttcctcaaagacaaacagatttgcctttcttgttagctgttgaggatgtgttttccatcactggtcgtggtactgttgccactggtcgtatcgagagaggtactgttaaggttggagagactgttgacattgttggattgaaggatacaaggaacgtcacagttactggtgtggaaat

SEQ ID NO: 211199 - DNA, 369 bp, Gossypium hirsutum
gaagaactgtgctccactcatgctccgtctagcgtggcactcagctggaacttttgatgtcaagaccaagaccggaggtccattcggaaccatgaagcaacctgctgagctcgctcatgctgctaacaacggtctcgatattgcagtcaggcttctcgagccgatcaaggagcagttccctatcctttcatacgctgacttctatcagcttgctggtgttgttgctgttgagatcaccggtgggcctgaagttccattccatcctggaagagaggacaagcctcacccaccacctgagggtcgtcttcccaatgctactgagggagctgatcacttgaggcaggtgtttagtcatcaaatgggtcttag

SEQ ID NO: 211200 - DNA, 427 bp, Gossypium hirsutum
gattcggaaggattggacgtttggttgcgagagttgctctccaaagcaatgatattgagctcgttgctgttaacgatcctttcatcaccactgattatatgacctacatgtttaagtacgacagtgttcacggtcaatggaagcaccatgaacttaaggtgaaggactcaaagaccttgctctttggcgaaaggcctgtcactgtttttggcatcagaaaccctgaggaaatcccatggggtgaaaccggagctgattatgttgttgagtctaccggtgttttcactgacaaggacaaagctgctgctcacttgaaaggtggtgcaaagaaagtggtcatctctgctcccaataaggatgcccccatgttttgtgtgggtgtcaatgaagaggaatacaagtctgacctcaacattgtctccaatgc

SEQ ID NO: 211201 - DNA, 399 bp, Gossypium hirsutum
ctcgacgagccgtttctcacttcagcgaccagacagtcagagatcctcccaatcaaacagcaatgacaaagagaaccaagaaggctggaattgttggaaaatatggtactcgttatggtgccagtttgaggaagcaaattaagaagatggaggttagtcaacacagcaagtacttctgtgagttctgtggaaagtatgcggtggagagaaaagctgtcggtatctggggatgcaaggattgcgggaaagtcaaagcaggcggtgcttatactttgaacactgctagcgctgtgactgtgaggagtaccatcaggaggctgagggagcaaactgagagctgagccaccactggtgattgatttatattctactttcataggatgtttgtttgcatgtttt

SEQ ID NO: 211202 - DNA, 380 bp, Gossypium hirsutum
ggggaattctttgcttctgttctttcatggaggaccagtgttttgcttttgttctttcatggaggaccagtgttctttcatggaggaccaaacttttaagggatccttcagatcggctatttggtacctttgggagcaggggtgctaagcagaattcaaagaagaaatctttggatgcattgataaaaagactccgggatgtgagctaatttggcctggaggaggtgtatgtatgtctatgttcttctgcctgttgcctttgttgattgcaattggctatatttcttaccttatggttggtcaattggttcattaaaattaaaagggtggctggcctttttacttggtggattaaaataattaggggccagtgaaaaatt

SEQ ID NO: 211203 - DNA, 390 bp, Gossypium hirsutum
cccacgcgtacgaccacgcgtccgcccacgcgtccgtccacgcgtccgccctggtgaaagtgaaaatggaggtttacagcacaaggctaatggttctggtgtttgcatttgcactagtcagcatagggtacgcgcaagagtcgaactcgaccactcttgttccagcaatactgactattggtgactcagcggttgatgtgggcaataatgattatctccccaccatcttcagggctaattacgctccttatggtaggcacttcagtaaccaaaagcctactgggaagtttagttatagcgagatggccactgacatctctgactgaactcttgagtttactacttatacaccaccatatctaagcccttaagcattaacgagcaaccttc

SEQ ID NO: 211204 - DNA, 422 bp, Gossypium hirsutum
ccgaaaaatctggatgaggaagtttcagaaccctcaagtataaggaatcattgggccggcatctagaattctcgttatttgcaacaactaagcgaagcgagacaaaaatggcgacttcagccatgtcggaaaaacgggtcgtcctgctctgcggcgactatgccgaggactatgaggttatggtccctttccaggctctgttggcttatggtatatcagtggacgctgtttgtcccggcaagaaggccggcgaaacttgccgcaccgctattcatcaactttccggccatcagacctataccgagatccgtggtcacaatttcacactaaatgcatcatttgaagatatagaccatactaaatatgatggtttagttatagcccgaggacgagctcctgaatatcttgctatggatgcattt

SEQ ID NO: 211205 - DNA, 373 bp, Gossypium hirsutum
ctggcatcagtctcttcttcagagaacctgcagcagacaaatgtaaatcaccagattcatggaacctctcgccagaatgaatcagcaactgcaggatcccaagcatccttttctgagttacgctccggttccgtccctgtaggtgtttatgcattgcagagagagaatgtattcccggagagacctggcgagcctgagtgccaattttacatgaagactggtgattgtaaatttggtgcagtttgtaagttccatcacccaagagagagagttcttcctgcccctgattgtgtgttgagtcctataggccttcctttacgcccgggtgaacctctatgcatattctattctcgatatggaaattgcaaatttg

SEQ ID NO: 211206 - DNA, 421 bp, Gossypium hirsutum
cccacctaagggtctgaaaatggcatccactttcatcggaaattcaacttcgattcaggagatgtttaggagggttagtgagcagtttacagctatgttcaggaggaaagctttcttgcactggtacactggtgagggaatggatgagatggagtttaccgaagctgagagcaacatgaatgatttagttgcagagtaccagcaataccaggatgcaactgctgacgacgaggagtatgaggaaggagaggaagaagaagaggaagctgcttgagtgaataacgatatgtatatatgtttgttgggtgatgtttatgttgtcaaatcaagattgacataacataatatgtatggttgctgtgggtttgagggttcttccttgtatctttgatggattgatttcttgtgtctctgcatttgc

SEQ ID NO: 211207 - DNA, 408 bp, Gossypium hirsutum
gacaatgagaggaacattgacgttgacttggattctgatggtctgcctctcccaagtagcggtgcagagccaatactactcggagagcttaccatatgatcccaggccggttaaggtcactaatctttacttctttttgcatgaaactctccgcggtaagaacccaacagtagtcatggtagcccaagctaacaacacaagcaacgacaactactcatcagtgccatttggcaccctatatgccattgatgatcccctcaagataggtcctggggacaactcacaggtgattgggaatgctctgggacttgggatcttgtccggcaaaaattcaacgactggggtgatgtacttagattttggatttactgccggaaagtttaagggcagctctattagcatattttc

SEQ ID NO: 211208 - DNA, 413 bp, Gossypium hirsutum
cggacgcgtgggtgtggctgaaaattttgtgaatactattaaggagataagagtgcagtgtgcgggagacacttctagtaattacccggcaattattaatgactatgatattaatgggggggctcctcagtgtgtatattttgtaaatggatgtcgcaacaggggtagtctgtgcatattttctcattcactccaagcaaaaaaaccagcctgcaagctctttttctctctgcatgggtgtaggaatggagatatatgttccttctctcatgagtcgtatcagccaatctcatcatatggctcaaatgtatgtcagccagaagctgatcatgctgatgcctcatcacttgtacgactatttggaacctcgtctgctggatacatccttttgttggatgatgctaatatgcatt

SEQ ID NO: 211209 - DNA, 327 bp, Gossypium hirsutum
aaaaaaacacctgcgccttgccgacttctctcacttcgactggacagatccttcaaaggcagagagaggagctgacgcaaccaactaagagttagatatccttaatgcatgcatggatccgagtattaaacagcacttaacagaagcagttgagcagaaaaatggtgaatatgcacttattagagatgcggaaatctcctagctgaccatttatgagaaacctattccttgctttggctgatggatacggagggtctctcttctgctaggatcatctatcccatcgatgctgtattatgccaccattctctactttggaaactacta

SEQ ID NO: 211210 - DNA, 406 bp, Gossypium hirsutum
accgggaatgaattgctcgaccgacgcatgcgttcattctccgataattgaggagcgtgcatgtggggaggctagcgaagcatctacaccgccatgaccacgtaggaaagttcctaagacacccattaaggggcgtgatgctccatctcttgatgatgatttctatttgtaccttgatgattggtcatctcaaaatgtactggctgacgggctgggtacttgtgattatttatggactgcatacattagtgaagtcacaaagtggtgtgatttgtgaccaaatgataatgtctgtgctgttcaatggacccggcaaggttcttacatatcgagtggtgcaaatctcagtcaataacacggttgcgatggaacttattcgaagtaagtccaaagcatgggtggacat

SEQ ID NO: 211211 - DNA, 338 bp, Gossypium hirsutum
  unsure (1)..(338): unsure at all n locations
cgtttcaaggctgatgacaagatgggacatgcttatctgaaccttcaaccacttgtctcagctgctagattaagccatgctcttcgagtttcttctggtgagatgacattgaggaaggttgtacccgacactgataattgtcttgttagagagagttctattagtttgataaatggtgaagtagttcaaagtgtctggttaaggctttgcacagttgagtccggggaaatagagctaaaggtcaggttaattgagacacgcgatggaccttcaaggtagttgagctatatccgctgatgagataangtgttgggagctcnaagtcaggtgattcccgc

SEQ ID NO: 211212 - DNA, 434 bp, Gossypium hirsutum
  unsure (1)..(434): unsure at all n locations
ggccatgtctaagaagtacttaaaggtgtcaatggctgctactgtaaaagaggcaatgaaatgcatgcatgacaaccatcagaaatttgcgcttgtggtcgatgaagataattttctggaggggattatcacacttggtgatattagatggtgtctgtctaagaagcagcctagtgatatctccaagggtgattcaacagctgatgtgaatccatgtcttgtttcgtctgtttgcacgaaaggaataagctaccgtgggcagaagcgcggacttctaacctgctttgctgatactgacttggcaattgctagggagttgatggaggctagtggagtaaaacaattgccagtggtgaaatcgtgggggagacccccacanaggaatggatacgggagagtcattgctgttcttcattacgaatcaatctggaact

SEQ ID NO: 211213 - DNA, 425 bp, Gossypium hirsutum
cttattctccttcaattttggggcatgatagtggtttctctagcgaagcatctacacctcctaaaccacctaggaaagtccctaagacaccccataaggttcttgatgctccatcacttcaagatgatttctatttgaaccttgttgattggtcatctcaaaatgtacttgctgttgggttgggtacttgtgtttatttatggactgcatccaatagtaaagtaacaaagttgtgtgatttgggaccaaatgatagtgtttgtgctgttcaatggacccgggaaggttcttacatatcgattggtacaaatctcggtcaagttcaggtttgggatggaactcagtgtaagaaagtccgaaccatgggtggacatcaaacaagaaccggtgtcttggcttggaatttcgcgatactgtcatctgga

SEQ ID NO: 211214 - DNA, 242 bp, Gossypium hirsutum
cccacgcgtgcgattccaatggcgactacatcttcggatgttcatgctggtgagcgcgtgcagcgtgcatgctccgtgaagcaaccgcaactagttgctccacttgtccagacgcttgcgtactcttaagctgtacctgctgcatgggctcggcttgtatctatggaacggcttcagaaccgtatcaaaggccaacataaatgaatgatcgggtgcttatactcgggtcatgatgctgagcg

SEQ ID NO: 211215 - DNA, 282 bp, Gossypium hirsutum
cccacgcgtccggcttgcccgttccaagccaagagttggaccaaggggcacgagcgtaggcttgtgtttcgtggttcttagagagggggaaaaagcgtgaggctggtttcacagagcagcgaacacctcccgctcctggcagtggaagaataatgtttgggtgatagttaatggggagaaggtttctttatcaaagactgcattgctgaaatactacaaccaagcgtctaaaaatgccaatggtactaacagatcccataatggaagaagttggcaccgtga

SEQ ID NO: 211216 - DNA, 378 bp, Gossypium hirsutum
  unsure (1)..(378): unsure at all n locations
cttggcttcagaggaagtccaagaattctgaggttgatgtacgccttattgatgatgaagttacaatcaaacttgttcaaagaaagaagatcaactgcttgctgtttgtgtccagactcctcgatgagcttcagttggatctccaccatgttgccggtggcaacattggtgactactacagctttctcttcaacaccaagatatatgaaggctcttctgtttatgcaagtgccatagccaacaagctcattaatgtggtggataaacaggatgcagcagctgctccaccaaccagtagcacttgtctctagtttttcagtgaaggaagagtttcatatttatgtctatctatgttntctagggaaataaagtagcttc

SEQ ID NO: 211217 - DNA, 368 bp, Gossypium hirsutum
gtcaaacctgaagtgcaaaagtcaccaccacctatcgaagttcctgcactatcgttggaagaattgaaagagaaaacggacaattttggatcaaaggctttgattggtgagggttcttatggaagagtttattatgccagcttgaacaatggaaaagctgtggctgtgaaaaagcttgatgtttccactgagtccgagtcgaatgtggagtttttgacccaggtttccatggtttcaagattgaagcatgacaattttgtcgagttgcaaggttactgtgttgaaggaaatctccgtgtgcttgcttacgagtttgcaacaatgggttcacttcatgacatattgcatggaaggaagggagttaaagg

SEQ ID NO: 211218 - DNA, 397 bp, Gossypium hirsutum
  unsure (1)..(397): unsure at all n locations
gaaaatgaaggcatcgaggttaatcaatggtggaatcgccttgccaaacgacaagtccaatatggccgagcgagagcttgaagagagacctctttgtgatcaaaaggtttgcagcaatgaggtctcggatttaaatcttgagtctgaatccaatactcatctaattgaaaacgcgaaaatagtgctccgacttttgcctatatggacgatgcttctagtgtttgcagtaattttccaacagcctgctactttttttacgaaacaagggatgacaatgaaacgaaacattgggaagaacttcaagatcccgnccgctacgctacaaagcgctattacattgtctataatcctttgatgcctttatacaacaaagttttcatcccgatcacaaagatgg

SEQ ID NO: 211219 - DNA, 348 bp, Gossypium hirsutum
aaagaagaaaaacttaatcatggctcggttgacgttggtgtcctccatcatccttctgctatgctccgtcgccgccggatcaactttcgaggactccaaccccatccagatggtatccgatggcctcagcggcttcgaatcctccgttcttcgtgtcatcggtcacactcgtcatgctctctccttcgcccgttttgcatacaagcatgggaagaggtatgaaaacgtggaggagatgaagctatcggttcagattttcaaaggcaacttggatttaatcagatccactaacaagaagggactgccttacactcttgctgtcaatcagtttgctgattggagctggga

SEQ ID NO: 211220 - DNA, 355 bp, Gossypium hirsutum
cccacgcgtacgcccacgcgtccgggtatctccaaggatggtcagactcgtgagcacgcattgcttgcttttacccttggtgtcaagcaaatgatttgctgttgcaacaagatggatgccactacccctaaatactcgaaggctaggtatgatgaaattgtgaaggaagtctcttcctacttgaagaaggtgggatacaaccctgacaagattccatttgttcccatttctggttttgagggtgacaacatgattgagaggtctaccaacttggactggtacaagggccctactcttcttgaggctcttgaccagatcaatgagcccaagaggccttcagacaagcctcttcgtc

SEQ ID NO: 211221 - DNA, 306 bp, Gossypium hirsutum
ttcaaagcatgatgtttaccttatgtgcaattattcagttatgcattggtcatgcttatcatgtaatctgtccgaggaacttaattttgctgggcatgtggcacctaccgataaacatcccgcaagttcgttaaaaggttctacacaaactcaaataagcacgctcgcggtcctcgataattttatggttgcaggaagcttcctaggagagcttgcttttaagcacttggacagaaaaggcatggccttctgttctcgggcaacacatgatgattatgcaattgcaactgctatggacagatatga

SEQ ID NO: 211222 - DNA, 402 bp, Gossypium hirsutum
acgagaaaaacttaatcatggctcggttggcgttggtgttctccatcatccttctgctgtgctccgtcgccggcggatcaactttctaggactccaaccccatccagatggtatccgatggcctcagcggcttcgaatccttcgttcttcgtgtcatcggtcacactcgtcatgctctctccttcgcccgttttgcatacaagcatgggaagaggtatgaaaacgtggaggagatgaagctacggcttcagattttcaaaggcaacttggatttaatcagatccactcacaagaagggactgccttacactcttgcttgtcatcagtttgctgattggagctgggaagagttccagaaacacagattgggggctggttaaaactgttctgctaccacaaagg

SEQ ID NO: 211223 - DNA, 445 bp, Gossypium hirsutum
  unsure (1)..(445): unsure at all n locations
gttctttcactttatgccagtggtcgaacaacaggtattgtcttggactctggtgatggtgtgagccatactgtgccaatttatgaaggctatgccctcccccatgctattcttcgtttggaccttgctggacgtgatcttacagattccttgatgaagatcttgactgagagagggtactctttcacaacaactgcggagcgagaaattgttcgtgatatgaaagaaaaacttgcttacgttgctcttgattttgagcaagaattggagactgccaagagtagctctgccatcgaaaagagttatgaattgcctgatgggcaagtgatcacaataggggcggaaaggttccgttgtccagaagtactctttcagccatctctgattggaatggaagctgctggaaatcatgaaactacttacaactncatcatgaagtgtgatg

SEQ ID NO: 211224 - DNA, 419 bp, Gossypium hirsutum
cccacgcgtccgcccacgcgtccggtgactacattgaccctaacttcacctggaagaacttcaatctcgaggagcaggccaaagttatcgtagccccgagaagcaacaacaaacttgatgcgaccaaattgaagacagaattccctgagctcctttcgattaaagagtctcttattaagtatgtattcgaaccgaataagaagactggtggagcttgatcagttactttgcctgttaaaaagtttgtcttcaaaggtaaactatgtgagactagttgagcttgagattttaggttatgaattcattgattttcctctctttttttatcatcttttttatgaatttggttcgtgtgggtcgatatggatggtgataacctcgggcgatacgcacgcacgcctcttcccagatgactcgaa

SEQ ID NO: 211225 - DNA, 435 bp, Gossypium hirsutum
cccacgcgtccgggacaatattcagttaaatccgatgtttacagctttggagtattgggtgtggaaatcattagtggtaaaaaaatcagtagcttctccaaccaagaagtgggcgactctcttctaacccatgcatggagaaactggagagaaggaactcctttggaagtagtagatccaatcctgagggatggctccagaagtgaaataatgagatgtatccatcttgggttgctttgtgttcaagacaatattgattctagaccaaccatggcctctgtcgttctcatgcttagtagctattccatatcactgccattgccatcaagacctgcattgtccatgctttccaccatggagacagaaacgaagtctcagtcatcatcactcttcaatccatctatacgaagaaacatttcaagtgtcagtcaacga

SEQ ID NO: 211226 - DNA, 427 bp, Gossypium hirsutum
cccacgcgtccggccaaatggccatttcaagaagcattggcagaactatgtgaaaacgtggttcaatcagcctgctaggaaggctagaagaagaattgcaaggcaaaagaaggccgtgaggatcttcccaaggccaactgctggacctctacgccctattgtccatggacagactttgaagtataacatgaatttgagagctggcaagggtttcacccttgaagagcttaaagctgcgggtatttcaaagaaacttgcacccaccatcggtatctcagatgatcaccgtcgtaagaaccgatctctcgaaggtcttcaagccaatgttcagaggcttaagacttacaaggccaaacttgttgtcttccctaaacgtgctcccaagtctaaggccggtgattctactgcttgaagagcttgcaactgc

SEQ ID NO: 211227 - DNA, 408 bp, Gossypium hirsutum
cccacgcgtccgcccacgcgtccgcccacgcgtccgcccacgcgtccgaaatcgaactgctcatcttttcattttcttgactctgagaaacagtgactttgagaggaaaaggaagaaactttgttttttgaaagcgagatagggtttttattgtgtatttgataaagggatttgtagctgtgtttctttttttggattttttggtcatgggagatgagaaatcgacgatcgtgatggcgagtagagagagtagagatcgagagcttcttatcccagtctctgacttcgttcatgatgattcctccaaaccgtcttcttcatcttcaccgcgtcatgccggtcacgagaccttttacaaatttgtcaagagttgggcttctaagaagtttatgacaggatgtgtcattt

SEQ ID NO: 211228 - DNA, 384 bp, Gossypium hirsutum
cttcaaaacacctgtctcacctattaactctctcggcactggaattgctcttgctggagtgttcttgtactcaaaggtgaagcgcataaagcccaaaaccaaggcagcttgaaagtttagccggtaagtttatattggtttaggaaatgttcagtggcattaattgaaggacatgtttgcagtttaggccagaaaagtagtaggcttggtttgatttctatcttttaaaaaaaaatagttttctaatttttggtccatattcgtcattgggatatttcatttttggaatgccacttgattttagcaaagagcaaatgtagctgagaaaaaaaaaatatcattttttggtttaagcttaatgactttcctgatggttcattgttt

SEQ ID NO: 211229 - DNA, 398 bp, Gossypium hirsutum
cccacgcgtccgcaagattccgtcggcgtcgttttggtggaaaacgacggagaaatacaagtccggttcctccactttggtcgtgggcaaacaaatcctcctcgaaaattacccgctcggtaaaatccttaagaacccacacttgccagcgttggccgggaaattcaacggcgtaggtacggttagcgttatcctcacggccaaagacgtcgccgtcgatgggttctgcatgaggtgcgggactcacgggtcggacccgggtggtcgggttcgaggtacttttatctgggtggggaactcgagactcaatgtctggtcaatgcgcctggcattcaccagctattatggtcccaactccacgtgtggctccatgaacgtgggatgacggatgatcatac

SEQ ID NO: 211230 - DNA, 424 bp, Gossypium hirsutum
cccacgcgtccgaaagtggatagtgaagatgcttattcatcgtgcattctggatataaacattgagaaagagactcccgacctactgaaatctaatgatgaaactgttggtaattcaaaaagtgaaggcgtggttacacatttgcagaaggtgttacagagacaagcaagcttaaacgtagaaagcagctgataacaatctcagcaaccagtgtggagctggaaaagaagaaagaaaatttctttgtcacacaatctggatggtgccattacctacaaaaaggtcattgatgcaaaagtttgatacattgacaggagagaaatcatcgaacgagagggttcatgatgcaccaagcaacagatggagaagatacaaaagagctgcatcatttgattcgaagaaaattgtcctccttttctcaatc

SEQ ID NO: 211231 - DNA, 426 bp, Gossypium hirsutum
cccgagactaacccttttggaaatggagcaattcgggtttatttgcgtgaagtgagggactgtcaagctaaggccagagggattccatatcgaaagaaaaagaagaagaagactcaaattaaacccaacgtcgacgatcctatgccttcttccaaccagcagccctcttctcagctagctacctagggtctttctttggattcttcacataaacggatgatgagcattcagaaaacatgcatggcagagtggtggggaagggtttataaggcaaggcaaggcaacgagtatatatgaagttaaatttagcactacaactactatacaagtaggcattaagcactggtttctgagtctctggcgcctttccttgcataatatgaagcactacttgcattatgatcaattaatgcccttgtcttactt

SEQ ID NO: 211232 - DNA, 332 bp, Gossypium hirsutum
ttcttatagttaaccgaagacactatatcacactagcgctctcactgaacccaatcattcagcttgaaatacttcttgggtttctttgctaaaaagctcctcctcctgacgccttaatagagcagaatcctccttctgttccaacattagtggctgtaaagtgggcgagctcattgagaaaatcggcattcattgttgattggcataattgtggatataccttacttggattggctgggggaagaagcagcccatttgtctcaatataccattggtttgagaagcattatgggcaaatggcaaatggttccctatgtgtaacaagggcaatg

SEQ ID NO: 211233 - DNA, 423 bp, Gossypium hirsutum
ggataattaataaattactgtcgggcgaaaaaaaagggtaagagatggctcgattaatggtaatatcgatgctatttctcttggcaggatcaatgcttatggtccaaggcggagatcccacccttttttttcgaatggaacgtcacctatggcaccattgctcccttgggagtgccagtaaagggtattcttattaacgggcaattcccgggaccaaatcttaactctaccaccaacaacaatatcgtggtcaatgtgttcaataaccttgatgagccattccttgtaacatgggacggcgtgcagcataggaagaactcttggcaagatggtgttctgggaaccaactgtcctatcccccctgggaagaattacacctataaattccaggtgaaggatcagattggcagctacatgtactat

SEQ ID NO: 211234 - DNA, 422 bp, Gossypium hirsutum
ggatcgatgttattgtccggaccttgcacttttcaacctccgttgatggttcaattcaacggaaaccttttgccgcaaggttcaacgtccacggccgaaaatgcagactggatcacattcataaactttaatggcttgttcataagtggaaaaggtaccatcaatggcctaggcgagaaggaggcatggaaggctgtatgcgatggttgccgtcgaaaggctgctaatttgaagttaatcaagttgaacgacgtgctcattagtggcattacctccgtcaacgctaaagggttccatatgatgatcagcgtttgcaacaacttcgtgatcaccaacgttaatatatcggctccggatgaaagccccaacacggacggcattcacatgagcaaaacaaataaggtcagaataagcaacagtac

SEQ ID NO: 211235 - DNA, 424 bp, Gossypium hirsutum
cggacgcgtgggggaagatattgagtttattaccaagactttgaattgtttgcctattgctaatattgagcactttcgagtggagaagttggggcacgcagatcttgttgaggaggtttcgctcggggatggaaagattgttaaggttactgggatcaaggatatgggaagaacaactactgttttagttaggggttcgaatcagttggtcctcgacgaagctgagaggagtttacacgatgccttatgtgtggtcaggtgtttagtgagtaaaaggtttttgattgcaggtggtggtgctccggagattgaattgtcgaggcagcttggtgcttggtctaaggtgttgcatgggatggaggggtattgtgttaggtcgtttgctgaggcacttgaagttattccttatacgttggctgagaat

SEQ ID NO: 211236 - DNA, 413 bp, Gossypium hirsutum
aggaagtatccgaatggagcgagaccgaacagggcggctacctcgggttactggaaggcaaccgggacggataagccggtgttgacttcgggagggactcaaaaggttggtgtgaagaatgcactggttttttatggagggaagccccctaaagggatcaaaaccaattggatcatgcatgaatataggcttgctgataataagactaacaacaaaccccctggatgtgacttgggcaacaagaaaaactcactaaggcttgatgattgggtgttatgtcgaatctacaagaaaaacaacgcgaatagacctctggaacatgataaagatgactccatggatgacatgcttggtactgtaccaccttcgatatcaatcggtagccaacataatccagaattccacttcttaac

SEQ ID NO: 211237 - DNA, 383 bp, Gossypium hirsutum
agaaattcgacgaggagatcgcagctacaccaatgccggaacagtaccaaaacaaaatggtctcgatcctttgcaacgattgcgagacaaaatctctagttcggtttcatgtcctggctcagaaatgcccgaattgcaagtcatacaatactaggcaaacacgaggctgaagtggcttagagtgggatgtagaaaccgacttggatggcatattttccaaatcgatgcatcaagcattgggttctggttaagcttctgcaacgtgtattggtaccagtcgtggcgcatggttccttcgggggttcggtttagtgcttggtattttcaattcttttgtagatgattcaatcaataggccaacaaataagcatttgcttttatgt

SEQ ID NO: 211238 - DNA, 267 bp, Gossypium hirsutum
gagaagaccatggccgatcaacttacggacgatcagatctctgagttcaaggaggctttgagcctttttgacaaggatggcgatggttgcattactaccaaggagctggggactgtgatgcgatcacttggtcagaaccctactgaggcagaactccaagatatgatcaatgaagttgatgctgatggaaatgggaccattgattttcctgaattccttaacctaatggcaaggaagatgaaggatactgattccgaggaagaactt

SEQ ID NO: 211239 - DNA, 363 bp, Gossypium hirsutum
gtacatgagtatttatgttaccccagatggcccatagcgtgcaacaacatagtttgcagagaggttgagtttggggaacaagggtcttggacaatgacggaaaagatggttcatcgtttctagttcttccccacatcgagggcataatgtactgtttgtcagtttcctacaaagaatgttcactcgagtaggcagataattccatgaaatcttccagatggtgattaaaattttatgtggtagatcgaggctccataattttttataaaattccttgtagttggtttgtaaagcgtatgctctaggatctaagctttgtaatagtttataggcactacgaactgaaaattcacccaaaggttc

SEQ ID NO: 211240 - DNA, 211 bp, Gossypium hirsutum
cggactcgtggtctgacgcgtgggcggacgcgtgggcggacgcgtgggaaaaaaaaaaaaagggtttaataataataacaaaaaatttaataaaataacgaaaaaaaaaaaaataaaaaaaaaaataggggcgcccgttttaaaggatccaagcttacttacccttgcattccaaatcatagtttttttttagtgccacctaaattcaatt

SEQ ID NO: 211241 - DNA, 425 bp, Gossypium hirsutum
ttcaaaataaaacaaatggggtcacaccaagaagatggatccgtttctgcaatccagagttgagtaacattataacgagctggacaggctcagaagactgggttttaaatactgaaaagttgtctgaacttagaaagtttgcagataacgaggatcttcagatccaatggagggcagcaaaaaggagcaacaagttaaaagttgcatccctcattaaagaaaggacaggctatatagtaagccctgattcaatgttcgacatccaggtgaagcgcatccatgaatacaagcgtcagctgctgaatattttgggtattgtttaccgttacaagaagatgaaagaaatgagtgcttcagaaagaaagaaaaaagttcgtccacgtgtttgtatattggggggaaaagcatttgccacttatgttcaa

SEQ ID NO: 211242 - DNA, 409 bp, Gossypium hirsutum
ctcaaatttccgattttatcatccaaatcgttcgtctcttaattctggttggatatcggggatgtcaggaagaggaaagggtggcaagggtcttggcaagggaggagctaagcgccaccgtaaggtcctccgcgacaacatccagggcatcacaaagccggcaattcgacgccttgcccgtaggggaggagtgaagcgtatcagcggcttaatctacgaggaaacccgtggagttctcaagatcttcttggagaacgtcattcgcgatgcggtgacatacaccgaacacgccatgagaaagacagcgactgccatggatgtggtttatgcactgaagacgcaaggtacgactttgtatggatttggcggttagatgatttagggtctagaattttaaataaaggaaaaa

SEQ ID NO: 211243 - DNA, 376 bp, Gossypium hirsutum
gcgtccgatcattatttacttcaaaaaaaaaaagaacaagaaaaagaaaaggaaagttagggttttggtttgaaatcggatgcggtagagattaagcaatggctggagaaagggccttgttcaagttccttaagcctgggcaacgtctacagcccgccgacgttcaagctgccgccatgtggggcgtcgctgccactaccggcgctctttggctcattcagccttttgattggttgaagaagacctttctggagaaaccagagtcggagtagaagcaaatgggacatcttgcaactcattgcggttttgtctatcaagtttgctgatgaacaaatcatggaaagaataaaaataataatgtagtaagtgtaatttt

SEQ ID NO: 211244 - DNA, 413 bp, Gossypium hirsutum
ctgacgcctgggctggtggttttgaagctggtatctctaaagatggtcacactcgtgagcgtgctttgcttgcttttaccctcggtgttaggcagatgatttgctgctgcaacaagatggatgcaacaaccccaaagtactcaaaggcaaggtttgatgaaattgtcaaggaagtctcttcttatcttaagaaagttggttacaaccctgagaagatcccatttgtcccaatctctggctttgaggttgacaacatgatcgagagatctacaaaccttgattggtacaagggtcctactctgcttgaggctcttgaccagatcaccgagcccaagaggccctcggataagccactccgtcttccacttcaagatgtctacaagattggtggtattggaactgtccttgttggt

SEQ ID NO: 211245 - DNA, 427 bp, Gossypium hirsutum
ccgaaagcaaaacccaagcctactcaaagcaaagaaaaacacagcaatggagagaagcaaagcaatgatgatggcagtggcagctgtcggattggctttagtgttaatggtgccacaggccgatgctacaaggtacattgttggagggggaggcatcggttggactactaatgtcaattacactgtctgggctcgaggaaagcacttctacaatggcgactggcttttttttgtatatgatcggaaccagatgaatgtgctggaggtgaacaagacagactacgagtcatgcaatgctgatcatcctcttcacaactggacaaccggagctggaagggatgtggttccgcttaatgtgactcgccactactatttcattagtggcaaaggattctgctacggcggcatgaagctagcagtgcgtgtt

SEQ ID NO: 211246 - DNA, 413 bp, Gossypium hirsutum
gcgaaaatccgagaggaagaaatgatcgtgtgcgtcgccgtcgttggccatcagaacggtcctctctacatacagagcttcactgacgccgatgatgctttgaaactccaccatatcgtacattgctccctcgatgtcgtcgacgaacgagtgaacaatccaaaaaaatcaggaccgacattgaatgagacctttctgggattactttatcctactgagaattataaagtttatggttatttgaccaacacaaaggtgaagttcattttagtgactacggatttagacgttagagatgccgatgttagaaattttttcaggaggttccatgctgcatatgttgatgctgtctcgaacccatttcatgttccgggtaaaaagattacattcaggactttcgcagatagagtgag

SEQ ID NO: 211247 - DNA, 292 bp, Gossypium hirsutum
tgaatttagagctgggtttgaagtaaagcttagagttgattgcttgtgcaaacaggggtgaattcatagagaaggatttaagatcctatggaaagaaccaagattgattttatatgaagtggaagagattgagaagaaaatagacttcttggtgaacacgatgaattataaagttggttgcttagttgaagttccggaatatttgggtgctaatttcgacaaacagatccttcctcgatacaatgtcgtggagtatttgaaatcgcaaggagcactagaatttgatgtggga

SEQ ID NO: 211248 - DNA, 161 bp, Gossypium hirsutum
gcatgatcgagttcctttgcaagaaatgaaagcagattggcatgcttgcttaaaccacagaggtggattcaagaaattccatcttaaatccccttgccaccaaaggggttaattttggccaggtcacgccaccggtttttaaaattttattccaggggaaa

SEQ ID NO: 211249 - DNA, 437 bp, Gossypium hirsutum
  unsure (1)..(437): unsure at all n locations
cgcgtncgtgaaaattcattttctttggactttctctgaaatccgagtcctatgaaagatgcgtgaggtgtcttcatattcaggcagggcattgcggcaaccagatcggtgccaagttttgggaggtggtttgcgccgagcacggcatagattcaacgggacgctatcaaggggacaatgatttgcaactggagcgcgttaacgtttactacaatgaagcgagttgcgggaggttcgttccacgagccgtccttatggacttggagcctggcactatggatagtgttagatccgggccgtacgggcagattttcaggcctgacaactttgttttcggccagtccggtgcaaggaataactgggccaagggtcattacacggaaggggccgagttgatcgactcagtgctagatgtggtgaggaaagaagccgaaaac

SEQ ID NO: 211250 - DNA, 410 bp, Gossypium hirsutum
aatcgatcagatccagaaaaccttggggatcgatttctggaacacccactatgataaagtgcgggagcagttgaagcagctgaaagaggttcacaggaacctgcgcaaagagattaggagaaggatgggcgactgtttgaatgatttgagcattgaagatcttggtgctctggaacaagagatggagagctgtgtcactcttattcgagatagaaagaatcgtgttctctccaaccagatcgatacttccatgaaaaaggtgaggaatgtggaagagatacacaaaaatctcttacatgaactggaatccctgaaagaagatccatattgattagttgataatggaggggattatgataccctgatcgggtatcaaaatggaggtcctcgtatatttgctttacgcctgc

SEQ ID NO: 211251 - DNA, 426 bp, Gossypium hirsutum
cccacgcgtccgcggacgcgtgggtccatagcagcaacaacaggtttcatacacagtggagcagcttgtagccgtcaatccttacaatcccgacatcttacctgatctcgagaactacgttaatgaacaggtttcatcacaaacgtatagcctggatgctaatctctgccttcttcgcctctaccagtttgagcctgagcgtatgagcacacaaattgttgcacgcattttggttaaggctctcatggcaatgccagctccagatttcagcctctgtctctttttaattcctgagcgagtgcaaatggaggagcagttcaagacactgattgttctttctcactatctggagacaggaagatttcgtcagttctgggatgaagcagctaaaaatcgtcatatagtcgaggctgtaccgggttttga

SEQ ID NO: 211252 - DNA, 419 bp, Gossypium hirsutum
cccacgcgtccgattgattttactcaattttgaaataaaattaaaatttgacttcaacttcttgtgaaatttatgaaattgaaaagaatgaaagagaaaataggatggatacttcttttaatcatttctctttagactaatttgaaaaacaactaagtgaaaattggtgggttttgtttgctttagtcactacttggggtacaggggacaagttatcgtaacaaaaattattgagttagaatttgttgtgttctacagcaattgagacgacactgtggtcgatcgagtggggcattgctgagctggtgaaccaccctgaaatccaaaagaagctgcggcttgaacttgacactgttctaagacctggtaaccagatcactgaacctgacacccacaaacttccctaccttcaagctgtg

SEQ ID NO: 211253 - DNA, 392 bp, Gossypium hirsutum
cccacgcgtccgggtgccgactgctccgttctttgtagcatagcaaagttttgtgaagcgtggccgtcgggaagaacaagaggatttccaagggaaagaagggaggaaagaagaaggcagcggatccttttgctaagaaggattggtacgatatcaaggctccttcagttttcactaccagaaatgtggggaaaactctcgtcacccgtactcatggtaccaagattgcttctgaaggactcaaacaccgtgtgtttgaggtttccctggctgatcttaaagtggtgatgaggatcatgcttacagaaaagattcgtttggaaagctgaagatgttcaaagaaaaaaagttttgaccaacttttggggaatgaaatttacaactgacaaact

SEQ ID NO: 211254 - DNA, 446 bp, Gossypium hirsutum
cccacgcgtccggacgtcgttgaacttgttgtgagagaactggaaacagacccgctgttgaactccgggcgtgggtctgctcttacggagaaaggaacagtagaaatggaagccagcattatggacgggcctaaaaggagatgcggtgccgtttctggcttaaccacggttaagaacccaatctccctcgcccgtctcgtcatggagaaatcaccgcattcttatttgaccaccccgggagccgaagagtttgccaagaaacagggcgtggagatggtggacaatgattacttcatcacagaagataacgtggggatgcttaagttggctaaagaagcaaactcaatcctgtttgattaccgtatcccgacagttggcacctgcggtgcatctgtggacagccatttgcagatgaacgggctcccgatcagcgtctacgcaccgga

SEQ ID NO: 211255 - DNA, 330 bp, Gossypium hirsutum
gggcggacccacgcgtccggtttggggtcaccgagtagcacactgatttctgggatctattctttatccgaggaggggaaaagtatatgtcggggtggaattgcttatgttgaaggcgatgcttcaagtgccagttacttccttgcgggtgcagcagtcacgggtgggactgtcacagtagaaggatgtggaacaagtggtttacagggtgatgtaaaatttgccgaggttcttgagatgatgggtgccaaagtcacctgtaccgagaatagcgtaactgtcaccggacccccaataaatttcctcgtggaggaaacacttgcgtgctat

SEQ ID NO: 211256 - DNA, 408 bp, Gossypium hirsutum
gttctaccatggaatctctgcgcatggaccattttttgatcatgtattgggatattggaaggcaagccaagaaaaccccaacaaaatattgtttttgaactttgaagatcttaaggaagatatggattcccatttgaaaattttggccatgttcttaggagttcctttcacagatgatgaagagaaacaaggagttgttgaaaaaatagcgaaaatttgtagctttgagaacttgaaagaattggaagtgaacatgaaggacgtacatacttctggagttccacacacacatttttttaggaaaggagaagtgggagattggagcaattatctcacacccttcatgattgaatgtttggagaagcttattcaagagaaattgaatggctcgggtttaacatttaaact

SEQ ID NO: 211257 - DNA, 341 bp, Gossypium hirsutum
ctctcctctcttccaaaccaaatttctgacgcaatgagcagatccggccaacctccagagctcaaaaagtacatggacaaacaactccagatcaagctgaatgctaatcggatggttgttggtacacttcgtgggtttgatcagtttatgaatctagtggttgacaacaccgtggaggtgaatggcaatgagaaaactgatataggcatggtggttatcagaggaaatagcgttgttactgttgaagcacttgaacctgtaggcagaatgcagtgattcggttttttctactggaaatttcggatcacttgatggtatctggtgggtgaaaacatagatgc

SEQ ID NO: 211258 - DNA, 383 bp, Gossypium hirsutum
tgcttgctacacatgacaatatctgcgttgctgttgtggttcagagccctcccaacaggagagcggactgtaaagaaatactggaggaaaccaccatgaaccaagcggagatcgtcgcactttttgctgccctgaacacacaatacggaacgacggggaccaaagtcttgcttactgtacttagtgtatgttaaacggatctccctctcatcagtttttgatgcgcttactcaccggcgcttcatccgacgatccttttctttttgaggtcaaccctgttttagtcaccgcctttggatccaccgacattgtcgaaggctgtgacaacagccagtcgatctcctgggttcacgcttggactgttcgtgatgggacaatcaccc

SEQ ID NO: 211259 - DNA, 366 bp, Gossypium hirsutum
atttaactgggcaatatgtcctgtatttaggggcttatagtgcattctacattcgtgaggggatttatagatattggacggagcagcattttacttgatggatagcatgtgtctgttgtattgtactaacagccactcatgcatatttttaatactattatttcgtcagtcggaaaaacaatgctgaactgaagataccactttgagccgagagaagttgtttttcactatatagaaatctaagttatggagcaaaggtagtgttggaacaccactcgtcgcgattgatattttgaaattagaagaggaagatgtagaggaaaattcattacatatatgtgtagatatacagataggtagatatag

SEQ ID NO: 211260 - DNA, 281 bp, Gossypium hirsutum
gactcacgcgtccgcccacgcgtccgctgtttcaaagacacaagtggtgggttggccgtcggtgagaggcttggcgaagagaggaaagaggagttgcaaatatgtaaaagtggcggtggacggcgctccatatttaaggaaagttgatctcgagatatacaatagttatcagcagctgttaacctcccttgaagacatgttttcatgtttcaccataagaaactatttgaacgagaagaaaatagagcaagtgaatggaattgagtatttgcctacatatg

SEQ ID NO: 211261 - DNA, 382 bp, Gossypium hirsutum
atttcgttcgttgtacttagtagacgttgataaggaaacaattggcagagctctgaaattgaattctgtaaggaatggaaatctatggaaagaaattgatgttttgatattcaacacttggcattggtggcaccgtagaggactgaagcaacaatgggattatgtgcaatttgatggaaagattcgtaaggacattgatcgcacggttgcttttcgtacagctttgagaacatgggctaaatgggttgattcagatgtggataccaataggactaaagttatatttcaaggaatttccccttctcactacaatggcagagattggaatgagccaggagtaaggaattgctcaaagcagacaacaccatctaagggatcgagt

SEQ ID NO: 211262 - DNA, 391 bp, Gossypium hirsutum
tgtttatcttcagcagccaaaagtaaggggtcggccaaattcgcgcttcctcaccgctactgtgcttggtgtacagcaagctaaccgagctgttgaagtgaatgagatgtggcgagttcgacaaaaggagattgaattaaacgataggctaaaaggaagatcaaaaaaagataccagccacatcaggagttatggggacactagcaattcctccagaagaaccagtgggaagcacgagagtgattttagtgcttcatgctcatcaagcaagagaccagatgagagttctcgttcaagggaagatgatgaaggtctaagagacgaagagatcgaggaatttcctcagtcaaaggtgaagcgcggtcgagggtctataggttcaaggatggat

SEQ ID NO: 211263 - DNA, 422 bp, Gossypium hirsutum
cccacgcgtccggttcagaatattccagaagtacctcatgagctgaaagcaatttacaggactgtttgggaaatcaagcaaaagacattggttgacatggctgttgatcgtggatgcttcatagaccagagccaaagcttaaacatacatatggaccaacctaattttggaaaactaacttccttgcacttctatgcctggtctaagggtctgaagactggtatgtattatctaagatctcgagctgcagctgatgcaatcaaattcacagtcgatacttccatgcttaaggaaaaaccaaaggtagcagatgatgatacaaaaatggcacaaatggtttgttccctgacgaatcgtgaagagtgcatggcttgtgggagctaagcagcaacagcagcactttttgaagcttttggaagtaa

SEQ ID NO: 211264 - DNA, 409 bp, Gossypium hirsutum
gcgagccttagagaatgaaatgcttctaaggataaagaggcaaggacttgatattactcccagaattcttattgtgaccaggttaatacctgatgcgaagggaactagttgcaatcagcggctggaaagagtcagtgggacagagcatactcatattctgcgagttccttttaggtcagaacatggagttcttcgtaaatggatatcaaggtttgatgtatggccttatctggagacttatgcggaggacgtcgcaagtgaaattgcagcagagttacagggtattccagattttattataggaaactacagtgacggaaacctggttgcatctttgttggcttacaaaatgggcgtcacacagtgtaccattgcccatgctttggagaaaacaaaatatccagattca

SEQ ID NO: 211265 - DNA, 433 bp, Gossypium hirsutum
  unsure (1)..(433): unsure at all n locations
ggcttttggttttcacctcggttgcctcgaaggaagcagaggaagggattgcttaccaggggaagtacatattagaaaatgaagctggagatccaggggtaaagccaggctcatgcccgaatagaaaagaatcacggccactcaattcaaaaagcgcttctcttttcctcatgaattatttcccaagttacccggttgaaaccgaagcttgcaaagagcattcagcacgactagctgacatgatcggcacctgcttcaaagcagcagggagtatgatgccaaactttttagcagtcaacttctacatgaggagtgatggaggcggtgttttctatgatttggatagcatgaatggccaaagattatgtggatgtaatacanatgctgcttgccaggctggagcaccatttggatcttgcaagaacattacaat

SEQ ID NO: 211266 - DNA, 351 bp, Gossypium hirsutum
  unsure (1)..(351): unsure at all n locations
agaaggagaaagttgaaaccgcagtgaaagaggcacttgagtggcttgatgacaaccagagtgccgagaaggaagactacgaggagaagctcaaggaggtagaggcagtatgcaacccaatcatcacagcagtgtaccaaagatctggtggagccccaggtggtggatcaactgaagaagatgatgattctcatgatgaactttaaaaaactggtaatgccattttgattgctgaaacaagcaaagaaaagcaaagggtgagaaggatgagagcatangtaggtgagatgaggatatactgtaattgttctccatggtagaagttaaaaaaaggagaagtatatccccctt

SEQ ID NO: 211267 - DNA, 424 bp, Gossypium hirsutum
attttacgtcagatcactcagcacaaatgggcacatccctttatgcatccggttgatgttgaaggtcttggtttgcatgactattatgagattgttcagaagcctatggactttggtacaataaaaagcaagatggaagctaaggatggtactgggtacaagaatgtacgcgaaatttattctgatgttaggttggtttttaagaatgccatgaaatacaatgatgaaagacatgatgtccatataatggccaaaactttattggaaaaatttgaggagaagtggctgcaacttttgcctaaagttgctgaagaggagaaaagacagcttgaggaggaagcaaaagcagagctagatgtgaagctggcacaagaggcagttcatgctaacatggccaaagagttgagcaatgaactgtgtgacg

SEQ ID NO: 211268 - DNA, 391 bp, Gossypium hirsutum
agaaggagaaagttgaaaccgcagtgaaagaggcacttgagtggcttgatgacgaccagagtgccgagaaggaagactacgaggagaagctcaaggaggtagaggcagtatgcaacccaatcatcacagcagtgtaccaaagatctggtggagccccaagtggcggatcaactgaagaagatgatgattctcatgatgaactctaaaaaactggtaatgccattctgattgctgaaacaagcaaagaatagcaaagggtgagaaggatgagagcataggtaggtgagatgaggatatactgtaattgtcttccatggtcgaagttaaaaaagggagaagtttttccccctttgttcggatgtaattttgggtgaatgaatacgttttacgg

SEQ ID NO: 211269 - DNA, 422 bp, Gossypium hirsutum
cttcgtttgcagagtttgtatctgacttcgatgtgccatccagtgattctaaattgaagaaaaaggatacagcagttcttgagattggaagacctttcagccctgtcatgtttgaatccgtacttaaaagttttactccggatgtgccaaatagcatatctggtaggccaaggcaggaagatgctcaggagtttttaagttttatcatggatcaaatgcatgatgaattggttaagcttcaagggcagtccggtagctcaaatggggtcagatcatcactagtttcgtatgcagaagatgatgaatgggagacagttggaccaaaaaacaaatctgcagtcactagaactcaaagcttccttccttcagagttgagtgatatttttggaggacagctaagaagtgtggtgaaggcaatagga

SEQ ID NO: 211270 - DNA, 420 bp, Gossypium hirsutum
cttaaggcccgatgaacgtgttgatgtaatgtttggaaacatcaagcatgccttcttccagccagcagagcgagaaatgatcactctggtgcactttcatttacataatcacatcatggttggtaataagaaaaccaaggatgtgcagttttatatagaggtgatggatatagttcagacattgggcggtgggaagagatctgcctatgaccctgatgagattgaggaagagcaacgcgagcgtgaccgaaagaataaaattaacacggacttccagaactttgtgaatcgggttaatgatttgtggggacagcctcaatttaaagcatttgaccttgaatttgatcagcccatgagagagcttggcttccatggggttccccataaagcctctgctttcattgtgccaacatcaaactg

SEQ ID NO: 211271 - DNA, 408 bp, Gossypium hirsutum
cgagccgaggatctgctgcatagccttctttcctcgaacaacagcatgacagtcatcagatgatgaacatagagttttgttagtagtaatagaggcttattaaggccctgagcccctgactgctgtgctgggtcatgtcttgcaatgggatggcttttttcccagcaaatttcatgctccaatctcctcatgaagaagatcatcaaccctcaacttctatcaatcaaatgcttccttcttgcccgccccaagacttccatggtgtggcatcatttcttgggaagagatcaatgtcattttcagggatagatgtgtgcgaagaagcaaatggggaggatgatttatcagatgatggctcacaggcaggagaaaagaagagaagacttaacatggagcaggtaaagactc

SEQ ID NO: 211272 - DNA, 428 bp, Gossypium hirsutum
cttgccgtgagtttattcttgtttcacctaaagtttttctctaggctatttgttaaatgtgtttgattcacttttatccatataaattaggccgctgaaggtgcaagggtttgtggggcttctcggatcatcgctgttgatgtgaaccccagaagatttgaagaagctaagaggtttgggattacagaatttgtgaatccaaaagactacgataagccagttcaagaggtgattgtggagatgaccggcggaggagtggatcgcagtgtggagtgtacagggagcgtccaagccatgatttccgcttttgaatgcgtccatgatggttggggtgtttgtgtgctggtgggtgtgccaaagaaagacgatgcattcaaaactcatccaatgaatctactaagtgagaggacccttaaaggtgcttttta

SEQ ID NO: 211273 - DNA, 418 bp, Gossypium hirsutum
caaaaaaccgcttcgggcaagcccttcgttgatgttttgaaggaaggtggtgtcctccctggcatcaaagttgacaagggtacggttgagcttaatggaacccatggcgaaactttcacccagggtctagatggccttgcacagcgatgccagaagtactatgaagctggtgcccgctttgctaaatggcgtgctgtccttaagattagtgctaatgaaccaaccgagcttgcaatccaagaaaatgccaacgggctagctatgtatgctgccatctgccagcaatgtggccttgtccccattgttgagcctgaaattcttgttgacggatcacatgacattaaaaagtgtgctgcggtgacagagcgtgttcttgctgcttgctacaaggctttgaatgatcaccatgtcatgcttg

SEQ ID NO: 211274 - DNA, 368 bp, Gossypium hirsutum
ggaagctcctgctgccatggcccgggacatgatcatcgaggtcaccaccaatggggggtgtccggatcatctccaccactaccatcctcactctctccaacaacagcagcaaatgatcttgggcgaaagcagcggctatgacccataagtcaaagcccccaagaaacgagccgagatctgggtcctagacgaaacccgtagccttatcggtttccgaaaggaaatggacggccgcttcaatacttttaaatcgaacaagcacctttgggagaagatatcatctatgatgaggaagaaaggattcgatcgatccccaactatgtgttcggacaagtggaggaacttgttgaaggagattaagaaagcta

SEQ ID NO: 211275 - DNA, 428 bp, Gossypium hirsutum
cttcaaagaatttttgagggaggttgcaataatgaaacgtctacgtcatccaaacattgttctttttatgggagcggtcacacagcccccaaacttgtctatagtgacagaatacttatcaagaggtagcttgtttaggcttttgcataagcctggtgtgagggaggtgttggatgagaggcggcggttaagtatggcttatgatgtggcaaagggaatgaattatcttcatagacacaatccccctattgttcatagagatttgaagtctcccaatctgttagttgataaaaaatatacagtcaaggtttgtgattttgggctttctcggttgaaggcaaacacatttctgtcatccaagtcagcagctggaactcctgagtggatggctccagaaagtcttcgcgatgagccatcatacgagaagt

SEQ ID NO: 211276 - DNA, 431 bp, Gossypium hirsutum
cgccggtgtttccgccatgcatttgatattgcttcctaagatcaaccaggctttgatgttcgatgccacagtgtggaaaatctcaaagatgaaattaccaggaccgccatgccgacgcgtcgagggaaccaataaagaagattgctatgttcattcgattctcatggacgttgaaacaggaaagattaggccacttaggttgaactatgacacttggtgctcatcgggtgcccttgatattaatggccgattggtaagtactggcggttataacaatggctctgacactgtgagaatcctcgacttatgcgatacttgtggctgggaagaatatcctggtgcacttggaaatggaagatggtatgcgacacaagtaaccttaggcgatggtagattcatggtgttcggcggtcgagatttcccaacataca

SEQ ID NO: 211277 - DNA, 402 bp, Gossypium hirsutum
tttagttccagttcgtgaggtgaatttcttaaggttttgcaagcggcatgctgaaggggtttgggcagtggtggatgtgtccatcgacaccctccgagaaacttcaggtgcacccacaacatatgtcaaatgtaggaggcttccttctggttgtgttgtgcaagatatgcctaatggatactccaaggtaacatgggttgaacatgtagaatacgacgagagtcaagttcaccatctctaccgccctttactaagctccggcattggctttggtgctcaacgttgggtcgccaccctccaacgccaatgcgaatgtcttgctatcctcatgtcctccactgttcccactggagaccatactgctataacggcaagtgggaggcgaagcatgttaaagctagc

SEQ ID NO: 211278 - DNA, 424 bp, Gossypium hirsutum
cttcaaagaatttttgagggaggttgcaataatgaaacgtctacgtcatccaaacattgttctttttatgggagcggtcacacagcccccaaacttgtctatagtgacagaatacttatcaagaggtagcttgtttaggcttttgcataagcctggtgtgagggaggtgttggatgagaggcggcggttaagtatggcttatgatgtggcaaagggaatgaattatcttcatagacacaatccccctattgttcatagagatttgaagtctcccaatctgttagttgataaaaaatatacaggcaaggtttgtgattttgggctttctcggttgaaggcaaacacatttctgtcatccaagtcagcaactggaactcctgagtggatggctccagaagttcttcgcgatgagccatcaaacgag

SEQ ID NO: 211279 - DNA, 422 bp, Gossypium hirsutum
gttgaagatatattctacaagtatggtcgtattttggatattgaattgaagattccactccgccctccatgtttttgttttgttgagtttgaggatccccgggatgctgaagatgcaatcagaggtcgagatggttataactttgatggttgtcgtttgagggttgagcttgcacatggtggtagaggacaatcctcaagtgatcgtcgaggcgggtatggtggcgctgcggctaagtttggtgtatcacgtcattctgaatatcgagttatcgttcgtgggctcccttcttctgcttcctggcaagatttgaaggatcacatgcgaaaagcaggtgatatgtgttttgtggaaatttcacatgacagtgatgggacatttggtatagttgattttaccaattatgatgacatgaaatatgc

SEQ ID NO: 211280 - DNA, 424 bp, Gossypium hirsutum
cccacgcgtccggagaactttaccgatacatttgcgacacgaaaggagcctttgtacagcctgcattgtatgaagcctttggattgacagttgtggaggcaatgacttgcggtttgccaacattcgcaacctgcaacggtggaccagccgagattattgtccatgggaaatctggtttcaacattgatccttaccatggtgatcaagctgctgacatactggtcgatttctttgaaaagtgtaagaaagatccatctcactgggataagatctcccaaggaggcttgaaacgtatcgaggagaagtatacatggaagatttactcggagagactattgaccctgaccggagtgtatggattctggaagcatgttttcaaccttgaacgccgtgagagtcgtcgttaccttgagatgttttatgc

SEQ ID NO: 211281 - DNA, 419 bp, Gossypium hirsutum
tattgctggaggtgctactcaaaattcaatcaaagttgcacagtggatgcttcaaattcctggtgcaactggttacattggctgcattgggaaggacaagtttggggaggaaatgaagaagaactcaaaagctgctggtgttaatgttcaatatcttgaggatgaaactgcaccaacaggaacctgtgctgtttgtgttgttggtggtgaaaggtcactcattgcaaatctatcagctgctaactgctacaagtctgagcatttgaagaagcctgagaattgggcgttggttgagaaggccaagtacttctatattgctggatttttccttactgtatctccggaatccatacagcttgttgctgaacacgctgctgcaaagaacaaggagttctcaatgaatctttctgctccattta

SEQ ID NO: 211282 - DNA, 390 bp, Gossypium hirsutum
atgggtgccaaagttcttttcttctttgctttgctttccttttcagctgtctcggcatttgcacatgatgaggaagaccaaggtcttgttatgaacttctacaaggattcttgtcctcaggctgaagacattatcaaggagcaagttaagctactgtacaagcgacacaaaaacactgctttttcttggctgagaaacattttccatgactgtgctgtccactcatgtgatgcttcactgctgctggactccacaaaaaggagcttgtctgagaaggagacagacaggagcttttgcctatagaatttcaggtacattgagaccatcaaagaagctgtcgaaagggaatgttctggagttggttcttgtgctgatttccttgttctgtct

SEQ ID NO: 211283 - DNA, 407 bp, Gossypium hirsutum
ctttgcagcagttgcttccagagatccctttgtgggtcaaaaatccagattttgaccgtgttgactggcttaacaaatttatcgagaccatgtggccttatctagatacggcgatttgcacaactgctaagaatatagcaaagcccattattggtgagcaaattccaaaatacaaaattcaatcagttgaatttgaaacacttactttgggtaccctgccaccaacttttcaaggaatgaaagtctatgtcactgatgagaaggaaattattatggaaccatcacttaagtgggcaggcaatcctaacatcattatcgcagttaaagctttgggattaaaagccactgttcaggttgtcgatttgcaagtttttgccgttcctcgaattactctgaagcctttgctc

SEQ ID NO: 211284 - DNA, 406 bp, Gossypium hirsutum
cgacatgccagcggataagttattgggtcattttgcacagtatggggaaattgaagagggtcctttgggcttcgataagcagaccgggaaatcaaagggatttgctctttttgtttataagacggcagaaggggctcagtcggcgttggtggagccggtgaagaatattgatgggagacaattgaattgtaagcttgctattgaagggaaaaaagggaagccaggacaagatgggatgatgcaaagtggagttggggctccaggaaatacagagatgggggttggaggacatggtggaggttacggtggccctgtggggcctggtggaccaggtggcatgggtggttatggtgggtttcccggtgggttgcaagggccgcccggcccaatgggtcatcctcatcac

SEQ ID NO: 211285 - DNA, 426 bp, Gossypium hirsutum
cttgtaccggtgcattaaggaagccctgagacttcaccctccagtgattatgcttctgcgcagctcacacagtgattttagagtaaaaacacgagacgggaaagagtatgacatcccgaagggtcacatagttgcaacatcaccagcatttgcaaacaggcttccttatatttacaaggatccagacacatatgatcctgatagattcagtgttgggagggaagaagacaaggcagcaggggctttctcgtatatttcctttggaggcggcaggcatggttgcctaggtgaaccgtttgcttaccttcagataaaggctatatggagccatttgttgaggaacttcgagtttgagcttgtgtcacctttccctgagattgactggaatgctatggtggttggcgtgaaagggaaggtgatggttcg

SEQ ID NO: 211286 - DNA, 422 bp, Gossypium hirsutum
attgaggtaaaaatattgagaagaaaaatgaagaaagaacataatatatttgcattggcaatgttattttgccttgccatagtgccagtctatggccaatactactcgaaaactgttatgcgagctactcagcgggcgaaaaagatgacccgactccacttcttccttcatgataccgtcagtggtgaaaaccccagtgcagtcgtcatagcccgtcccaacatcacgcaaccatcctcattcgggtttggcacattgtttgcaattaatgacccccttaccgtaaggcctgcactaacatcaacgttgattggaaacgctcaaggactctatgtatcatccagtcgagaccctgctgtgtttactacagttatgtacgctgatttcgcatttacgagtggcaggttcaatgagagcttttt

SEQ ID NO: 211287 - DNA, 408 bp, Gossypium hirsutum
gaaaactgaaaaacaaaaacgcaaacaaagccctaacaatcttagatcagaaaagaaaagctggccaccatggaaaaggaggtagagtttgagaaaaagaagcacggcctgaagcacatagctttcgtgagggtggctgcgatccgcactctggtttacgtctcgaatctttacgggtatgctaaacagaattctggtccgttatggtccaccgttgggactgtcgaggttgctgtcgccgccatcgttggccccgtctacgagaaatataaggacgttcccgatcatcttcttgtttttcttgattccaaggtagatgaggcttcacagaaatatgacgagcatgtcccaccagcgggtaagcaaatggtgaaccaagccaaatatttggttcacatggcagcacaa

SEQ ID NO: 211288 - DNA, 390 bp, Gossypium hirsutum
cccacgcgtccgatttacactagcagcataggttgcaccgactattatctttgaggatgaggttgatagtatgttggggcagaggactcgagttggggaacatgaagcaatgaggaaaatcaagaatgagttcatgacacattgggatggcctattgaccaaagccggtgaaagaattctagtccttgctgcaaccaacatgccatttgaccttgatgaagcaataattagacggttcgagcgcagaatcatggttggtcttccatcgattgagagcagggaaatgatattgagaaccctactgtcaaaagaaaaagctgaaaacttggactacaaggaacttgcaaccatgacagatagatacagcggaagtgatctcaaaaacttatg

SEQ ID NO: 211289 - DNA, 400 bp, Gossypium hirsutum
cacaaaaccgcaccaaaacaaaactcatttgcctctttatctcccaaaccaaacccctatctctcgaggattcaccatgaaaggcagtcaaacaaagtccgattcgatgcatgctggaaacaaactgaaaggcaacggcgcaagcgccgggaaacgtgcgaagaaagccgtcatggatccaaacaagccgaagaggcctgccagtgctttcttcgctttcatggaggagttcaggaaacagtacaaagaggcgaatcctgataacagatccgtgtctgctgttggcaaagctggtggagaaaaatggaaaagcatgacagatgctgagaaagctccttttgtacagaaggcagagaagcgcaaaagtgaatacaataagaagatgcaggcatatagtctg

SEQ ID NO: 211290 - DNA, 365 bp, Gossypium hirsutum
acgccccccttttatttagggtttttgattccttcatctttatcttcgatcaatcaaccatgactggcaaagccaagccaaagaagcacacagccaaggaaatagcggcgaagatcgacgccgccacaaccaatagaggcggcggcaaggccggatttgctgaccgttcgggtgtggagaaaggtggacatgctaagtacgagtgtcctcattgcaaaataacagctccagatttgaagtcgatgcagattcatcatgatgccaagcaccccaaggttccctttgaagagtcaaagcttgtgaatctacatgctgttcatgtggttgagacttccaagcctcgtcctggtgttaggggcagcctt

SEQ ID NO: 211291 - DNA, 412 bp, Gossypium hirsutum
gaaaagaaaaaggaggtgtgtggaatcttcaaagaagaccaggaggaagaatccttcccttttttctttttttccccagaaagagcgattcctttcccttcccttctagttcctcgtttactttttcttcttctttcccttctgattataataagatttgggtttcgttatcctctgaaactctcgtctctggtttgaaaggagattgaaaaaatatggctgaagaacatagatgtcaagcaccacagttatgtgccaacaactgtggatttttcggaagcccgacgactcaaaatctctgctctaaatgttatcgcgatcttcaacttaaagaacaacaatcttcctctgccaaacaagcctttaatcacactttcgttccttcgtcgtcttcattgccatcgtcatcatc

SEQ ID NO: 211292 - DNA, 423 bp, Gossypium hirsutum
  unsure (1)..(423): unsure at all n locations
cccacgcgtccggaaatatggaagagttgatgtctctggtcctaatgagtgtcctgaagagggcaggctacctgctgctggacccccttcgcctgccgatcatctgcgagaggttttctaccgaatgggattgaatgacaaggaaatagttgcattatctggtgcacacacgcttgggaggtccagaccagaacgtagtggttggggtaaaccagaaaccaagtatacgaaagatggaccaggagcaccaggaggacaatcctggacagtgcaatggttgaagtttgacaattcatacttcaaggatatcaaagctaaaagagatgaagatctgcttgtgttgccaactgatgctgttctttttgaagatccctctntcaaggtatatgctgagaaatatgctgaagatcaagagacattctt

SEQ ID NO: 211293 - DNA, 429 bp, Gossypium hirsutum
gttgccaagcttgaagagcttaagaagcaaggggatcctatagaagaacgttacaaagagtatatggagaggggaactgtcattgatcaacttgcttactgtattaacagttacagggaggcagcaatgtcaaatgatcccaaatttgatcacattgaacttgctgaaaagcaaaaggtcttgaatgagtgtgtagaagccgaggcctggttgagagagaaaaagcagcagcaggatctacttcccaaatatgccactccagttctcttgtcagctgatgtgagaaagaaggctgaagcactagataggttttgcaggccaataatgacgaaacctaaaccaactaaaccagcctcgcctgaaacacgagctaacccaccacctcaaggagagggccagtgccaatgagcggatgccaatgcaagccct

SEQ ID NO: 211294 - DNA, 421 bp, Gossypium hirsutum
cccacgcgtccgcccacgcgtccgcccacgcgtgcggctaaactggctactaaccgctggaatttatgtcgttcaactccaagaattcgatgctcaagttccagtgcagaagggcctgtaactgctgataaacttgaaaatgattatgccttgactggttctgcttatgattttgaaagaggtaccatatcgattactcgtgagtccttatcttctccaaagaaggtaattcttgtaaggcatggccttagcacttggaatgaagagggtagagttcaaggcagctcatacttatttgtgctaacagaagccggagtgaaacaagctgaaaggtgtaggcatgcccttgcaaatatgcactttgatcagcgttttttaagtccgatatccgtgctaagactactgctgaagtgttatggca

SEQ ID NO: 211295 - DNA, 412 bp, Gossypium hirsutum
cccacgcgtccgtgcttttcccccatgtaaaaagtatctctgctagaaggaagatgaaaagtatattcagtccagtttttgcttaagcagttatttctggggcataaaaaaaaaaaaaaaaaaaaaaaaaaaagaatgacaaagaaataattaaattaataaaaagcacacacacttgaaaagtacaaaacaaaaacgtaatgattgaaagtaaaaacaaaaaccaagtatacgaaaagatggaccaagagcaccaaggaggacaatcctggacagtgcaatggttgaaggttgacaattcatacttcaaggatatcaaagctaaaagagatgaagatctgcttgtgttgccaactgatgctgttctttttgaagatccctctttcaaggtatatgctgagaaatatgctga

SEQ ID NO: 211296 - DNA, 398 bp, Gossypium hirsutum
ctcagagtcctttcggaatatcccatcgtcaagcattggcacaggttacagctcaagctgccctagcacaatctcaagttcatccacaaaccgaatatcaagcgttgacggtatcagctccgtcggagtcattgatccgtcatccatccttcactcctgaagaaacttcacagttgatgcctcctttggcctcagaacctcaaagttctgcaatagaatactcggaagcttcccaatctgataggaaaaaccagcttcctattgctgtggataaacctgctgaagatggctacaactggcgtaagtatggacagaagcctattaaaggctgtgagtatccacgaagctactacaagtgtacctatcttaattgccctgtgaaatagatggtggaacga

SEQ ID NO: 211297 - DNA, 412 bp, Gossypium hirsutum
tttagttccagttcgtgaggtgaatttcttaaagttttgcaagcagcatgctgaaagggtttgggcagtggtggatgtgtccatcgacaccctccgagaaacttcaggtgcacccacaacatatgtcaaatgtaggaggcttccttctggttgtgttgtgcaagatatgcctaatggatactccaaggtaacatgggttgaacatgtagaatacgacgagagtcaagttcaccatctctaccgccctttactaagctccggcattggctttggtgctcaacgttgggtcgccaccctccaacgccaatgcgaatgtcttgctatcctcatgtcctccactgttcccactggagaccatactgctataacggcaagtgggaggcgaagcatgttaaagctagcgcagcggatg

SEQ ID NO: 211298 - DNA, 387 bp, Gossypium hirsutum
aaaaaaaactgcaatcccgagtggtgtgatgaagtgagtctttcaatcaaagatgttagtgatccaatcgagtgagtaagtaatatatctgattctgcaatttgtatgcatgtatatacatgaatgaatgtgaataccattcaccactactacttgcatggaattccatttgtgttttgcagacggtgtacgacaaagacacgttgggtgcggatgatcctatgggaactgcagagattgacttaaaaccatacttacaagcatcgaggttaaggaaagagttgcaagaactcccaaatggctgtgcactcaagaaagtacagccaagcgggacaaatgacctctctgatgaaaagccgattctatgggaaaatggcaggatcaccc

SEQ ID NO: 211299 - DNA, 428 bp, Gossypium hirsutum
catctctgaggggtgctaattgtaatataatatgtactcagccacgtcgcatatctgccatatctgttgcagcgagaatatcctcagaaaggggagagaatgttggtgaaactgttggttatcagattcgcctagagtcaaagcgatcttctcagacacggctgttgttttgcacaactggagtgttactcagacagttggttcaggacccatatttaaatggcgtgagtcatttgctagtggatgaaattcatgaaagaggcatgaatgaggacttcctgttaataattttacttgaccttcttcctcggcgtccagacttgcgtcttattttgatgagtgcaaccatcaatgctgatttgttctctaaatattttggaaatgctccaactattcacataccggggttgacctttccagtggctgag

SEQ ID NO: 211300 - DNA, 363 bp, Gossypium hirsutum
cttatgattacatattattgtgcttttttttcagatcttgatactgtctacatcaatgtagaagatccgcactgatgaggttgttgtaccatcagctttggtggaatcagttgcccaagcattctttgatccggagaataccaaccaggatcagaaaagtgacctggaggatctctacatttattcaccaatccatatcgatagtgtctaggaagcctgaaagctgttgttatacatgtgcccgaccaatagaggaaagctgctagcatggttgatgttaagctcgcgagggagctagtaaagaagtgcaagaggaaggatgtgactctcattgccacccggaggatattgatgaccccaaag

SEQ ID NO: 211301 - DNA, 378 bp, Gossypium hirsutum
cccacgcgtccgcggacgcgtgggtgcagccacaatttactgagctgctacacggactaatgaggaactggaagataatgttggaatcacacgaaactcaaaaccgaatcatgtttgaagtaaagtctttcaactgtcccacttacggaaagttttgcaacgactctcaccgtcttgccactcttcagctcgtggcagaacttcataattggcgttctagctttgttgcgtatttatgttcacaaaagtcatacattgaagctcttagtggatggctagcgaagttcgttgcacccgaagtagaattatgctccaagaagaggtcttcagcccctacgctaagagtcaatggaccaccgttattggcaactcgtcatg

SEQ ID NO: 211302 - DNA, 407 bp, Gossypium hirsutum
aaaaaaaactgcaatcccgagtggtgtgatgaagtgagtctttcaatcaaagatcttaatgatccaatcgagttagtaagtaatatatctgattctgcaatttgtatgcatgtatatacatgaatgaatgtgaataccattcaccactactacttgcatggaattccatttgtgttttgcagacggtgtacgacaaagacacgttgggtgcggatgatcctatgggaactgcagagattgacttaaaaccatacttagaagcagcgaggttaaggaaagagttgcaagaactcccaaatggctgtgcactcaagaaagtacagccaagcgggacaaatgacctcgctgatgaaagccgcattctttgggaaaatggcaggatcacccaagacatgcgtctcatactc

SEQ ID NO: 211303 - DNA, 421 bp, Gossypium hirsutum
cccacgcgtccgaaaaaagatcgagaaaaaagacgaggccaaaagagaaaaatacaaaagagaagagaaaatgaggatagaaatagcagaagcttgggatagtcttttacttgctcaagtaataaggggctccgtgttaataacccaatcaattcttagaaaatatattatattaccttcactgataatagttaaaaacattgcccgtatgttattatttcaatttcctgagtggtctgaggatttaacggattggaatcgagaaatgcatgttaaatgcacttataatggtgttcaattatccgaaaccgaatttccaaaaaactggttaacagacggtattcagataaagatcctatttcctttttgcctgaaaccttggcacagatttaaactacaaccctctcataaagatccaatg

SEQ ID NO: 211304 - DNA, 410 bp, Gossypium hirsutum
cagatctccagatttctctttgcaaagaagtggtgcagtggactcgtgctgagaagcgaactttccttcgccaacgagttgaggcaaagcttgcggcacttttgatggagaacaaggagtactctgaagcactgaatctcctttctggtctaatcaaggaggtcagaaggttggatgacaagcttcttctagtcgacatagacttgttagagagtaagcttcatttctctcttcgaaacctgccgaaagcaaaggcatctctaacagctgcaaggacagcggcaaatgcaatttatgtgccaccagcacaacaaggtaatatagatttgcaaagcggaatcctccatgcagaggaaaaggattacaaaactggttatagctacttctttgaagcatttgaagcattcaat

SEQ ID NO: 211305 - DNA, 409 bp, Gossypium hirsutum
gtcgtcgggtccaatgaatcgggtcaattagaattggtttgttggagtgataaattggctgtttcgattcttgaaaagaaggctatggaaggagggtctgggtattccaaagggatgcctttagcatttccagtgaagttttcaaagggatttgagatggataagaaggtgaaaaaatggtgggatgattggcagaaattgccttacgtttcaccatacgagaatgctcttcatctttcaccaaaaactgatgaatctgataaatgggcagctgctgttttgcatgaaattttgaatcttttcgtagctaaaaaggcagaaaaggatgatgtgttgtgtattggggagtatttggggataaggtcaaggttcaagagagttttgctttaccatccacaacatttttact

SEQ ID NO: 211306 - DNA, 428 bp, Gossypium hirsutum
cccacgcgtccgcccacgcgtccgcagtatttgatcggttcaggaatggatccgggtacggagaatagtccttatctgggattcatctacacaacattccaagaaagggcaacttttatctcacatgggaatacagctaggctagccaaggtgcatggtgacatgaatttggctcaggtatgtggttcaattgcggcggacgaaaagcgccacgagacagcatacactaaaatccttgaaaagctctttgagatcgatcctgatgggtcagtcttggcatttgctgacatgatgaggaagaaaatctccatgccagcccacttgatgtatgatggccgtgacgaaaaccttttcgaccactactcgtctgttgcacaaaagattggggtttacactgccccggactatgctgatatagttgaatatct

SEQ ID NO: 211307 - DNA, 367 bp, Gossypium hirsutum
cccacgcgtccgactatgtatagggtaactgtcggaggtcctagagttactccgttcagtgattctttgtggagaacttggatccctgatgatgagtatttgaaatcgagtgagggttccaataaggtgtacttcggtggtcggattaagtaccaagatggtggggcgagtcgtgaggttggtcctgataatgtgtacgattcagctcggttgattcgaagcaagaatgcttccatccctaatgtgaacctcacttgggaatttccagtgagtgaggattataagtatcttgttaggatgcatttttgtgatattgctagtatatccctgggattgtggtatttaaatggttatgtcaatgaacatt

SEQ ID NO: 211308 - DNA, 351 bp, Gossypium hirsutum
ccctgctgcctgtctcagtgcctgcttatccatagtactgaataatattggggcttgggccactttatgagcttcacaacttcccaatttaattctgtgttattccttccaaagtgtccttaagcagctgtcttcaataaccgaccattgccacctcttttgaggtccattttgatggtgatcattccattcctaaactttaaaatctcctctacaataaagagtatatcctttttacgaattttcccatttctctttcacacttttcttatctgtaccccacatgatgagactgtttactactatcaaatccattcttacctcatacttcatttccttataccttttctt

SEQ ID NO: 211309 - DNA, 421 bp, Gossypium hirsutum
cgtcactactgatcatattcaacagtatctggatgagaacaagtcattgatcttaaagattgttgagagccagaattccgggaaatttagtgaatgtgctgagaatcaagcacggctgcagcgaaacctcatgtacttggctgcaattgcagattctcaaccgcaacctccggccatacatgcccaggctggagggcactacatgcagcaacagcaacaaactcaacagatgacaccgcaatcgctaatggctgcacggtcctccatgttgtatggtcagcaaccattttctgatctccaacaacaagttctgcatgatccacttggcatgagctccggtggaagcacgggtcttcacatgctgcaaagtgaagctagcactacaggtggcaatggagcacttggagctggagttttccct

SEQ ID NO: 211310 - DNA, 370 bp, Gossypium hirsutum
ggaccttcaatttttcgtaggagagagcatgcatgatgatggatgcttggtgtttgcttactacaaggatggtgctgttgacccaacatttttgtactttgcatatgcattgaaggaggtcaagtgctgaggtttgaagcaaagaaaaaaaaagtggttgctgaagaatttagtcctttttattattgcttttgtctcttgttttcagtactctgctaaagacataaattatttgtggtttttgatgtttttgatttaattgtttgttgttttatcatggaatggtttctatttatatgggttggctaaacaatacttgaactctttgttctatgactacttgattttattggaaagacttttttgggac

SEQ ID NO: 211311 - DNA, 422 bp, Gossypium hirsutum
ctcaacacatctctatttctatcgcacttttattcccctattcctctctccctctctcatccgggactctaaccctagccctctatcaggattcaaacatgaaaggaggtaaatccaagtcggatgccaagagcgccaagctctccgtgaataagaaatcaaccacgaaagctggaaagaaatcggggaaggcagctaaggatccaaacaagccaaagaggcctgctagcgccttcttcgttttcatggaggagttccgcgagcaatacaagaaggagcaccctaaaaacaagtccgttgctgctgttggcaaagccggtggagataaatggaagagcctttctgaagctgaaaagcgaccttatgttgataaggccgagaaacgaaaggtcgagtatgaaaagaacatgaaagcctacaat

SEQ ID NO: 211312 - DNA, 400 bp, Gossypium hirsutum
agaatcttgtttaaaatataagaaaaaaaatcatacgcaatgagcactgctggtcaggtgattcgttgcaaagctgcggtggcatgggaggcggcgaagccactatcgatagaagaagtggaagtggcaccaccccaaaagcatgaagtccgtattaagattctcttcactgctttatgtcacactgatgtatactactgggagtgtaagggttacactcctctgtttcctcgtatacttggtcatgaagcctcaaggatcgtggagagtgtgggtgaaggtgtgaatgatttgaaacctggagatcatgtgctccctatcttcaccggagaatgcaaagaatgtcgtcactgtctgtcagaagaaagcaataacatgtgcgaactgcttaggatcaact

SEQ ID NO: 211313 - DNA, 406 bp, Gossypium hirsutum
  unsure (1)..(406): unsure at all n locations
cccacgcgtccgcccacgcgtccgcccacgcgtccgcaaatcccactaatgccaggacagtcgggatgtgagagtggggagtgttgccgtcagggttgcggtgggacttgtgctgagtgtggtcagcccaggtgcgcatcaggatgttgccaggctgaaactgtaaagagcaaagggatagaagaggttatggacagtgaacccagtccaccaaagtagggagatgataccatattaagatgaaataatgaggaagagttggttgtcgtcgtattaattatacaaaataagaagtaatgatgttgcagaagggcttgctataaaatcctgttggataaaaagagtaattatgaagaataaatagctcanaacaatatttgatttacaatatcctaaagtcccttga

SEQ ID NO: 211314 - DNA, 472 bp, Gossypium hirsutum
  unsure (1)..(472): unsure at all n locations
gaaacccagaagaaatgaagagagtccaacaggagctggcggaggtggtggggctcgacagccgtgtggaagaatccgatttcgataaactaacctacatgaagtgcaccctgaaagaaaccctaaggctccaccctccgatccccctcttgctccatgaaacggcggaggacgccgcggtggcggggtaccaaatcccggcgaagtcgcgcgtgatgatcaacgcttgggccattggcagggacagaaactcatgggaggatcctgatagtttcaagccatccagattcttgagggaaggagtcccggacttcaaaggcagcaacttcgagttcatcccgttcgggtcgggccgcaagtcgtgtccgggtatgcaactcgggttatatgctcttgatatggcggnggctcatttgctcactgttttacgtgggaattgcctgatggaatgaaaccgagtgaattggacatg

SEQ ID NO: 211315 - DNA, 410 bp, Gossypium hirsutum
tctgatcagacggtgaaaatgggtagccttgaaactgagagaacaaccacaggatgggctgccagagatccttcaggagtattgtctccttacacttacactcttaggaacactggtcctgaggatgttttcgttaaggttatgtgctgtggaatctgccacactgatcttcatcaagccaaaaatgatcttggcatgtcaaactacccaatggttcctgggcatgaagtggttggtgaggtgttggaagttgggtcatatgtaagcaagttcagagttggtgatatctgtggtgttggttgtcttgttggatgttgcataaactgccgaccatgcgactcaaacaatgaacattactgtcttaagaagatctgttcgtacaatgatgtttacactgactgcaaacccac

SEQ ID NO: 211316 - DNA, 425 bp, Gossypium hirsutum
ttttgctcctcttcaccttttatggaagatcgttctagaattctcttctttttttaaaaacaaaaattctgtctgatcagtttgtgtgaatcctattttttgcttgatgattgaaaaacttaagacaaaaatcataaacaaatacatgttgaaggagatctagttccgaaggagatcacagaaaaatggtgaaagcagtggctgtccttagcagcagtgaaggtgttagtggaactgttttcttcactcaagagggagatggcccaactacagcgacggggaacatttctggtcttaagcctggcctccatgggttccatgttcatgccctaggggacacaacaaatggttgcatgtcaacaggacctcacttcaatcctgctggaaaagagcatggtgctcctgaagatgtgaatcgccatgct

SEQ ID NO: 211317 - DNA, 445 bp, Gossypium hirsutum
  unsure (1)..(445): unsure at all n locations
cgcaatagggctgttgcttgtgaagctaactgttgaactttgttgcaggactctgtctgtccgatcctccaagtggtttcctcaatcccatcatgtaaacttatcaaggaaacttgtgaaaggaattttgcaatgcactttgactaccgcactactgcaagccttgatttcatctctttagacgagacaacttttaggaatattattcagcatccggatctaactgtaatatctgaagaaagagttctcgatgcaattttgatgtggtacatgaaatcagagaaattgtgtggatgggaagtggtgaatgagctaattacaaattcaactttagaaagtgtgttcaaggacaggcttcaactggtgaatgacttgcttgcatcagtacggttctctttattgccatacccnctgctaaagaagttagaanataccagtctaagca

SEQ ID NO: 211318 - DNA, 461 bp, Gossypium hirsutum
cacctctctcaaagccccctcctccccctctcctttccctctctctcattggtggcaagggggcgaactcagcatcgggcatggcagtaaacgatgaatgtaaaaccaagttcttggagctaaaagcgaagcgaaactacaggttcatcgtcttcaaaatagaggaaaacctccaacagattgtagtggagaaagtaggtgcacccaaagacagctatgagaaattatgttccagtttgccgtccgatgagtgtcgttacgctgtctacgatttcgatttcaccaccgatgagaattgccaaaagagcaagattttcttcatcgcatggtcaccagacacatcgagggtgaggagcaaaatgttgtacgcaagttccaaagataggttcagaagagaactggatggtgttcaagttgaattgcaagccaccgatcccagtgaaatgagctttgatatcgtc

SEQ ID NO: 211319 - DNA, 423 bp, Gossypium hirsutum
aaaagataagtgaaagatgtcaactgcttcttcattgtgttcatcaactcagattaatggctttggagggggacttggggttctaagaacccatgtttctcaacccaagacactttcttttacaagaaggagaatttctacggtagtgaaggcaacatctcgagttgataaattctcaaaaagcgatatcattgtttctccatctattctctctgctaatttcgcaaagttgggggagcaggtgaaagcagtagaagttgctggctgtgattggatccatgttgatgtaatggatggccgatttgttccaaacattacaattgggcctcttgtggttgatgctttacgacctgtgacggatcttccgctggatgtgcatttgatgattgtggaacctgagcaacgagttccagatttcatcaa

SEQ ID NO: 211320 - DNA, 425 bp, Gossypium hirsutum
cgccgatggtgcagttgaagatatgaaggagtttctctttggctccctagatatgcctggagtgaacctcgagagaagtctaaaaaattatgagccatctgaagagtcttttgacattaattctgtaccaaaggaggtcaagattcagccacttgctgagaagaaagctcctggtaaaaagccaactggtcttggcggtcctcctcccgcccccccctcaactattgatgcttatgagaagcttctttcatcaattcccgagttcgcaaactttggcaaacttttcaagtcctctgcacctgtggagctgacagaagcagaaacagaatatgcagttaatgttgtcaaacatatttttgatggccatgttgtgtttcagtacaactgcaccaatactattccagagcaattattggagaatgtca

SEQ ID NO: 211321 - DNA, 361 bp, Gossypium hirsutum
tatacttcaaaagctcatctgccaccccagagccccttctctccgtcgaatctccttgtgggcccgtaaaaaatgtctctggtggccaacgaagattctcagcacattttgcgtgtgctgaacaccaaccttgatcgaaagcagacaaatatggttgctttgacctccatcaagggaatcgggaggcgttttgtctacactgtttgcgagaaaggcgcaggccacacgaacaaaagggcttgtgaactgactgcacccgaattggacaatctcatgactattggagcgaaccccatgcactataaaataccataatggcttttgtacaagcagaatgattactacgattgaaagtattccc

SEQ ID NO: 211322 - DNA, 480 bp, Gossypium hirsutum; identical to SEQ ID NO: 195501

SEQ ID NO: 211323 - DNA, 412 bp, Gossypium hirsutum
cttgattttctcaaactggctgttgatgtatctctcagataaagaggttgagaatttggccgaaaggatgctcaagtggttgaaggttggtgggcatattttcttcagggagtcttgctttcatcaatctggtgattgcaagagaaagaacaacccaactcactatcgcgagcccagattttacactaaggtctttaaagaatgccaagcaactgatgattctggaaattcatttgaactttctcttgttggctgcaagtgcattggagcttatgttaagaacaaaaagaatcagaatcagatttgctggatcttccaaaaagttgtttcagataatgataagggattccagcgcttcttggattctgttcagtacaaatctaatagcattctccgttatgagcgtgtcttt

SEQ ID NO: 211324 - DNA, 409 bp, Gossypium hirsutum
cccacgcgtccgcccacgcgtgcggccaaaggtcagctgaagatttggcgtactcagttgctcgattcttctccaaaaatggaagcatggtcaactactatatgtactatggtggcaccaattttggcaggacaagtgcctcatttacaacaactcgttactatgacgaagcccctcttgatgaatttggtcttcaaagggaaccaaagtggggtcatcttaaggacgtccacagggccttgagtttgtgcaaaagggctctattttggggggttcctactactctaaagttgggtccagatcaacaggctatagtctggcaacaacctggaacttcagcctgtgcggctttcttggccaacaataacactcgtctggcacaacatgtgaatttcaggggccacgacat

SEQ ID NO: 211325 - DNA, 423 bp, Gossypium hirsutum
cccacgcgtccggcaacagagaggaagaactaacaaccgtagatcaaggtctttctccagatctcggcttgctgtcgaaggattttagttccccttttcactccccattaaaaaaaaaaaaaaaatcaattcctctcagagctcactagagatcttctctgttaaccatggcggctaacggatttgtaggagatgaacgcaaagttcaaaagaattactggattgaacactcggttgatctgacggtggaggctatgatgctcgactccaaagccgctgatattgacaaagaagaacgtcccgaagtgctctccttactccctccatatgaagggaaaaccattttggaactaggagctggcattggccgatttactggtgacttagctaagaaggctggtcatgttatagcattagacttca

SEQ ID NO: 211326 - DNA, 419 bp, Gossypium hirsutum
aaaagtccagaattagggtttcgataaccctaaccccagcatagcccctacaactccggcgtcatttgggtcccttttgtccttcaattagatcacagcttttcgttcaaaaatatattctcttgttattgttcttaatttcaagcaacaatggcggagcacttggcctcaatctttggtacggagaaggaccgcgtgaattgccccttctatttcaagattggagcatgccggcacggggacaggtgttcacggctccacaaccggccgacgatctctgcgactctcctcctttccaacatgtaccagcgcccggacatgatcactcccagagtggatgcccacggccagcccatctatccccgcaagatccaggagcacttcgaggacttctacgaggacgtcttcgaggagctcat

SEQ ID NO: 211327 - DNA, 391 bp, Gossypium hirsutum
ctgagttgcttgggaggggaaccgtagggacgacgtacaaggcagtgcttgataatcggacggtggtgacggacaagaggctggatgccgggaaattagcacgccacgacgaaggaaatgttcgagcaacacatggaatcagttggcggattaaggcatcccaatttggtccccctcagggcttatttccaagccaaagaagagaggctgcttatctatgattttcagaccaatggcagccttttctccctcattcactgatcgaaatcaacaatggcaaagccactccactggacgtcctgcttgaagatagccgaggacgtagcgcaaggtctctcctatattcaccaagcatggaggcttgtccacggcaatctcaagtccactaacg

SEQ ID NO: 211328 - DNA, 422 bp, Gossypium hirsutum
aagggccccaaagatgatgcttgatctgcaatctagtggaagtcacagtgttgatgggaactggagagcccttggaaaactgcttatctattgttcaggttgtagcggtggtcgcttgttcaatagtgttcagatccctggtcattttgtttacaggaccaggttctctaggacctcagggaagagcttccttttaccacaatgccggactgatattttatatgtgtctgacccttgtgaacatctggaccaaggggacgagggtgatgtgggatttttccgaggagttttcaagtcattcttggtgtccaaggttcggaagatgttgattgacagggcagccaagcttcatccaacagcagtttgcccttattgtaaggcaaagttgtgggacatgctgcaagctaagatgataccgcaaa

SEQ ID NO: 211329 - DNA, 456 bp, Gossypium hirsutum
agggacgacgccacgcgttcgattcacaaatactatgctgctcttttcctctccagtattgggatgttgattcatttgtggaaggggttagatacaacaacaaaacttcacttcttgttggaatgtctttggcccaaattggggaatttgcttttgttcttctcagccgagcttctaatcttcacctagttgagggtaaactttacctgctacttctgggcacaacggctctcagtttggtgactacaccgttgcttttcaagctcatcccacctgttgttcatcttggcgtgctcttgcgatggttcccccctgatattcacagcgagatgggttttaaaggagatagtctccgctcatacagtgttaagcaaagcaatattcttcgctcagacagcggtaagcaaagtaataattttcgctcatacattgcgaaacgtatcacgttgttggttc

SEQ ID NO: 211330 - DNA, 421 bp, Gossypium hirsutum
  unsure (1)..(421): unsure at all n locations
gtgaaattggatttgatacagcttctgcttcttttaccgagtacactgctgggatcaacttgaacaagccagatttctctgttgctcttttgctgactgataaaggtcaggcattgaaggcatcttatatccattctgtcaaccccttcacttgtgttgccgctgaaatggctcatagattttccacctacgaaaacactttcaccattggaagttctcatgctgtggatccttttaccgtggtaaaaacacggttctctgacaatggaaaggttggaatgctgtgccaacgtgaatggaggcccaagtcacttgtaacattttcggcagagtatgattcanaggccataaatgcatcccctaagatggggcttgcccttgctctcgagccttgacgggaaggtctcattttggattccat

SEQ ID NO: 211331 - DNA, 329 bp, Gossypium hirsutum
attcaacacttcattcactcggcgacgtcaagcacttaaaggttgtagcttagagaagtgtacttttctacgtgctaaataccaacccgaggtttgaagatggaaattgttccaagggagggtgaaagtgctctgtcagggcccaaggccaatggaatggccaattgtccggattctcttcaagggcccaaccgaaatggaaacaaacgttcgtcaagtcttgaatcaccaataatgttgcttaccggacatcagaattctatatataccgtggagttcaatccacctgggactggtgttgcatctggatcgcatgacaaggaaatttt

SEQ ID NO: 211332 - DNA, 416 bp, Gossypium hirsutum
caattacatgccatgaatctttgtatgatcataaattaccgtattttttaggcactcgaggtggctggtcaagttgcagcaacatcagtctctacatcacctctcccgtacgataccatggctagccaatgtgaagcattcggcacaggtacaaggaagaagctctccaactggttggcccatgaaaatcatcaaaatgaagctgctgataaaactatactgacaaccgctgctgctgatagacacacgatgatgctgaagaagagttcaaacgggaatgcttttaacggtgctgtctcgcagctcgacccatgcttgtcaatgaggttgcctcctgctagcccgttcgacaatttccttaaagcagccagacattaaacaaggatattgtagttgtttttatgttgaaaagttgt

SEQ ID NO: 211333 - DNA, 305 bp, Gossypium hirsutum
caaagacggtgggctatttaagaagatactgactggaggagagaagtgggagaatcccaaggaccctgatgaagtgttagttaactatgaagctaagcttgaggatggaacagtggttgcaaaagctgatggcaaggagttaactgttatggagggtcatttctgtcctgctttggttaaggctgttaaaacattgaaaaaggggaagaaagtcctttttacagggaagccgcaatatggctttggtgagaaggggaagccagcagctggtgctgaaggtgcagtgcctccaaatgccacactcc

SEQ ID NO: 211334 - DNA, 437 bp, Gossypium hirsutum
gtcaagagggtgattttatggccaaacctggatcgcctatttttaaatgctctcgaaggatggaggtggtatatagtgacgtatacatgctggatgacgaaatgaagtggaaaacgttacctccgatgccaaaaccagattcacatatcgaatttgcttgggctattgttaacaattctctggttattgctggaggcacaaccgagaaacaccctataacaaaaaagatgattctggttggagaagtgtttcagtttaatctagatacactggagtggtctgtgatcggaaaacttccttaccgagtgaagaccacacttgtcggattctggcaagaatatttgtatttcacgtccgggcaacgagacagaggtccggatgatccatcaccgaggaaagtgatcggagaaatgtggagaacgaagttaaaactgaac

SEQ ID NO: 211335 - DNA, 421 bp, Gossypium hirsutum
gaacgatttgcatggtcttattagcccagttcctcaaggaactcccgttccacttgttctgctaggaaagtcaaagaatgcactgttgtcaactttcttatttctcgatcaaattgtgtggcttggcagaacaggcatctataagaacaaagaacgtgctgagttgattggacgaatatcccttttctgttggatgggatcatcaatatgtaccacattggttgagcttggggagcttggaaggctatctgcatcaatgaaaaagttggaaaagagacttaaggatagtgacaagtacaagaatgaggagtatcgtgcgaagctccaaaattcaaatgagaggactttggcccttgttaaagcgggaatggatatagtagtagcagttgggcttcttcaattggcaccgaagaaagtcacc

SEQ ID NO: 211336 - DNA, 409 bp, Gossypium hirsutum
cttgaagaggaggctgctgaagagttggcaccgaggttggaagtgattttacagcatgggatgtgcgcttttggcaagtatcagagacggaatatcagaattgtttatgatgctattggaactctagcagatgctgttggagagaaattgaatcagccagtttatcttgaaattctgatgccaccactcattgcgaagtggcagcaggtttcaaattctgacaaagatctctttcgactgctggagtgcttcacgtccatagcacaggcattgggtactggattctctcaatttgatcagcctgtattccagaggtgcataaatatcatccagactcaacaactggccaaggttgatcctatttcagctggagttcattgtgagctcacttgaattgctctctggactt

SEQ ID NO: 211337 - DNA, 392 bp, Gossypium hirsutum
ggctttcaggttttttgaccggaatcgagttggctacgttagggtcgaagatatgaggttgatgattcatagcttgggaaagtttctatctcatagggatgtcaaagaactagtgcaaagtgcattgttagagagcaacacaggaagggacgatcacattctttacgataacctggttcgtatgtctgacatataaaagcctttggggtccaataagatgctataatctgttttgcatctaatgaggcatgcccattcaaggtgcgattcctaggagctaaacttgagtcactgacgttcaaatagagggttttagcttctattagtgtataagctattggtatatgcaagagattgtttgctcatggcatatatcatgtcaagagattagt

SEQ ID NO: 211338 - DNA, 422 bp, Gossypium hirsutum
ggacaagtccatgagagtttcgccgtggaatcattaccagttggtagaccaagaacctgatcctgatcctgacctccaactggcttccatcaagaaccggctttcccgcgggtgcgcctcttttgtctgctttggtcgcacttccgccgggcttgacacaccgtcgcctttgaaagttggccctgttcaacagcaggatgtcttgccagggtcctttgcttcagataagagtaatgatcaagcaactcagcttgatgatggcaatagcgatgcaagaaaggttgttttcaaaagtagtttgaagaagcaatcacatactactcaagttcctcttgaggatggtaatgaccgtgaggtatcaggggaaaaggatggtgatatcccgagtcatacagtacgaagaaaggtgcagtggactgatg

SEQ ID NO: 211339 - DNA, 352 bp, Gossypium hirsutum
gtgttctcaatgaatctttctgctccatttatttgcgagttctttaaggatgcacaggagaaagcactaccgcatatggactttgtctttggcaacgaaactgaagcaagaaccttctcaaaggttcatggctgggagactgatgatgttgcaaaaatagccctgaagatttcgcagtggccaaaagcttctggaacatacaagaggactactgttattactcagggtgcagatccagcaattgatgccgaagatgggaaagtgaagcaattacctgttattttgttacccaaggaaaagcatcgtgatacaaatagtgcaggtgatgcctttgatggaggctttctttcac

SEQ ID NO: 211340 - DNA, 421 bp, Gossypium hirsutum
cggacgcgtgggcggacgcgtgggttacaaagcactgattcgaggatgaaagccattaaagaaaacaccattctttccttcaattccgctgctaaatttcccattgatttcattgaattcgacgttcagattctaaaaaagaaaataaaaagctatggaggtgataaaaactggccatgagccaatcacaggaaagtaaagaaagccattgtggttttttgtaggtgacgaaagatgactgccctgtcattttccatgacgactttatcttctctgaagaaaatgtaagttacatattttccttcaaaacttgcatcttatttagcgaggttatttaagcttgtcaaaattaaatttttatttcagggtactgtcttcgaaaaaagagtcacagagttatctctggaggaatttctatgct

SEQ ID NO: 211341 - DNA, 360 bp, Gossypium hirsutum
  unsure (1)..(360): unsure at all n locations
gctgattttctcatcagcatttttagtgaattggttgaacggtnnggaaaaaacaaaaggggagacaccataaattgcatataaaacaacaacaaaaatggccattccctctaaaaaaaaccaaacttacaaaccctaacatacaaaaaaaaaaaaaaatggggccgccccttttaaagaatccaactttccttccccttgcttgcaactttatagttttttttttgggccccctaaattcaattccctgcccgccgttttccaccttcgtgactggaaaaaccctgcctttccccaacttattcccctttcagcacatcccctttttcccagttggcttattaccaaaaaggccccccc

SEQ ID NO: 211342 - DNA, 429 bp, Gossypium hirsutum
gagaaatccaagtttttgttggaggaagtaggcatgccaagggggcttttgccacttagagacatcgaagaatgtgggtacgtgaaggacacaggtttcgtgtggctcaaacaaaagaagagcatcacccacaggttcgaaaagatagggaagctggtttcctatgcaactgaagtcacggctgtcgttgagaaaggcaagatcaagaagctgactggggtgaagaccaaagagcttttggtttggatcacactgagtgatatccaagtggatgatcctcccactgggaagatcactttcaagactccttcagggctgtttaggactttccctgtatcagcttttgagattgaaggtgaacaagttaagggttctaagggtaaggatgaagagaaacaagtgaatggagctgtcgaagtgaaggaagtc

SEQ ID NO: 211343 - DNA, 423 bp, Gossypium hirsutum
  unsure (1)..(423): unsure at all n locations
cccacgcgtccggattactggaggctcattattgagggaagtgggaagacttggaagcaggatcaaaagatccggcttcaacatgtggacactggtggttacctccatagtcatgataagaaatatgccagaatagctggtggacaacaggaggtttgtggtgttcgagaaaaacgtgttgacaatgtatggttggctgcagaaagtgtgtatctccccgttaccaaaagtaagtagtatatatgtttaacggatcactacttcagaaaagcaggtacatgggttnattggatttgtatgtgggtggtgccttgttatttagtacctataaccatcttatgaaatcaagtagtatatttgcaggacaattctctgctaagtactttataatgcatacttatgtaacttgagagttgagactat

SEQ ID NO: 211344 - DNA, 436 bp, Gossypium hirsutum
  unsure (1)..(436): unsure at all n locations
cggacgcgtgggttcaagacccttggctgccaagctgctcaatgcaagcaggtaccaaaccccacttgcggcggaagcgcgtgcgcattcaacatgacctacggtggctcaaccatagccggtaacctatcacaggacaccataaccttagccaccgacccaatcccaaactacactttcggttgcctccaaaagacagcaggcagctcagtgccaccacaaggtgtattgggcttgggccggggcccattatccctcctttcccaatcccaaaatttgtaccaatcaacattttcatattgcttgcctagcattaggtcacctaacttttctgggtcattgagacttggaccaagtgggcaacccgtgaggatcaaatacaccccgttgcttaagaaccctangaggccctcactttattacgtcaatttgattg

SEQ ID NO: 211345 - DNA, 193 bp, Gossypium hirsutum
atgaaacccttaacacccaccctgtctcttcctctttatcagtcggtcccggtgccgatgttaatgatggggaaatggagcaaggtggggtgacccatcattcaccgacgcaagtacttagaaatttcaacgagattcgtttcctccggatcgaattacccagcggtgagttagggatcgatgaatgggttct

SEQ ID NO: 211346 - DNA, 328 bp, Gossypium hirsutum
cccacgcgtccggcacattggacgcaatcagagagaggatgaagagtatgcaactagcagctgccggtgggaacatggatgattatggaacccggcccttgatgtctgtcaatgacaacttaaatcttggactctcaactcagactcgtacattagatcctcatcctggtatggagaacccagccttgcgagatcaatggctactacatccccaaaaacaccaggctgagtgtcaatatttgggccattggccgagaccctgacgtgtggggcaacccactggatttcacccctgaaaggtttctgagtgggagatttgccaaaatcg

SEQ ID NO: 211347 - DNA, 410 bp, Gossypium hirsutum
ataggattcaagaggatatgggaatgcgaaaggtacatatatatgagtttagtcgattgagcatggtctatacacttctcagcaagcgtaaactactctggtttgtgcaaaacggtaaagtagacggatgggatgatccctgtttcccaactgtccaaggaattgttcgccgaggtctgaaaatagaggccttgatacaattcatcttggaacaaggggcatccaaaaatctcaatcttatggaatgggacaaactttggacccttaataagaagatcattgatcctgtttgtcctaggcatacagcagtgattgaagaacgacgtttgttattgaccttaactaatggtcctgataagccatttgttcgcattatccctaggcataagaaatatgatggtgctggagag

SEQ ID NO: 211348 - DNA, 408 bp, Gossypium hirsutum
  unsure (1)..(408): unsure at all n locations
cccacgcgtccgtgcacgaattatgaatgccatacttgtactgcctgagctggatgcaggctccttttggcatgatgaaagtggtttccaaggtatctatgatgttgagcattttatccagacattgaagtatgatgtacaaattgtggaaagcatacctgaaatccgacaaaatggcaaaaccaagaagataaaagggtatcagcttcgccccccgagggatgctcctatcgagtggtatacaacagtcgctctcaagaaaatgcaagaacatggtgctatttatctgactcccttttcacatcgtcttgctgaagaaattgacaatcccgagtatcaacggttgaggtgtagagttaactatcatgctttgaggttcaagccaaatattatgcagntaagtgagtc

SEQ ID NO: 211349 - DNA, 408 bp, Gossypium hirsutum
ggacgaggctgctcgtgtagtggaggacgtgaggaaaaatcccgaggcagccaccaacggaatcgttttgaggaggagattgcagctgatgatgtacaacaacatgtacagaatcatgttcgacacaagattcgagagtgaggatgatcctttgtttgttaggctcaaggctttgaacggggagaggagccggttggctcagagttttgaatacaattacggggattttattcccatcttaaggcccttcctcagaggatacttgaagatctgtaaggaggttaaggacaggaggttgcagctcttcaaggaccatttcgtcgaagagaggaagaaacttggaagcacaaaaagcatgaacaacgatggattgaaatgtgccatagatcatattttggatgctcaaca

SEQ ID NO: 211350 - DNA, 421 bp, Gossypium hirsutum
gttttgccgaattctgaatccagaactagctattcagcacattcttccttgtgtcaaggaactatcaacggattcatcccagcatgttcgatctgctttggcctcagttataatgggaatggcacctgttttagggaaggatgcgaccatagagcaattgcttccaatatttctttctcttctgaaagatgaatttccagatgtccgactgaacatcattagcaagcttgatcaagtcaaccaggttattggaattgatctgctgtcccagtccctattaccagccattgtggagcttgcagaggatagacactggagggttcggcttgcgataatagaatacatccctttattggcaagtcagttgggtgttggctttttcgatgacaaacttggtgcactctgcatgcaatggttgaaa

SEQ ID NO: 211351 - DNA, 408 bp, Gossypium hirsutum
aagagtgccaaggtcaggcagcaagcagctgatcttatttcaagaattgcagtggttatgaaacaatgtcaagaggaacaattgatgggccatctaggggttgttctatatgagtatctgggtgaggagtaccctgaagttttgggatctattttaggtgccctcaaggcaattgtcaatgtcattggtatgactaaaatgacccctccaatcaaggatttgcttccaaggttgacaccgattctgaaaaatagacatgagaaggtccaggagaactgtattgatcttgttggccgtatcgctgatcgaggtgcagagtttgtaccagctagggagtgtatgaggatttgttttgagcttcttgagatgcttaaagctcacaagaagggtattcgaagagctactgtc

SEQ ID NO: 211352 - DNA, 412 bp, Gossypium hirsutum
gcagccgcagccagcaagcagcagtagcaacagcaggagcggaagaatgtctcacaggaaatttgagcacccaaggcatggttcccttggatttcttccaaggaagcgagcctctcgtcacagaggaaaagtgaaggcattcccaaaggatgaccctaccaaaccttgcaagctcactgcctttctggggtacaaggctggtatgacacacattgtcagagaggtcgaaaaacccggatctaagcttcacaagaaggagacatgtgaagctgttacaatcattgaaacccctcctatggtgattgttggggtggttggatatgtgaagacaccacgtggccttcgctccttgaacaccgtctgggctcagcatctgagtgaggaagtcaagcgccggttctacaagcactgg

SEQ ID NO: 211353 - DNA, 424 bp, Gossypium hirsutum
aaggcccgacccaacccacccgttccttgactgggtttcaggactattaattgtattattatacaggtgtcactgagatttggcgaggaagcattgacatctcttcctgtgaaaattgggtctcacgatgtcaatgatgtactcacagctatagatcatgtcattgagaaaggacttgtcaacccatctaaaatcactgttctcggtgggtcacatggtggctttctaactacgcacttgattggtcaggtaccgaataagtttgttgcagctgccgcacggaatccagtttgtaatctttcatccatggttgccacaacagatattcctgattggtgttacgtggaatcttacggaagcaaaggaaaaactatctttactgaagcaccttcagctggacacttgactcacttttacagcaagt

SEQ ID NO: 211354 - DNA, 436 bp, Gossypium hirsutum
ggaaattacaatgagtactttggatatgcaactgatgtagatgctgttgtttatctgatgctggttaatgacatgattcatggactctatcctgaggctgtcaccattggtgaagatgtgagtggaatgcctacattttgccttcctgtgcaagatggtggtgtgggatttgattaccgattgcacatggctgttgctgataaatggattgagcttctcaagaagagggatgaagactggaaaatgggtgacattgtttacacactcgtcaacaggaggtggttggaaaagtgtgttgtttatgctgaaagtcatgaccaagctctagttggtgataaaacaatagcattctggctgatggataaggatatgtatgattttatgtctctggatagaccaagttctccaattatagatcgtggaatagcattacata

SEQ ID NO: 211355 - DNA, 439 bp, Gossypium hirsutum
gtagagaatgctgatgaatgcatggttcttgataatgaggcactttatgatatttgcttccgaactctgaagctcactactccaagctttggagatctaaaccacttgatttctgctactatgagcggtgtaacatgctgcctaaggttccccggacagctgaactctgacctccgaaagttggctgtgaacctgatcccgttcccacgtcttcacttctttatggttggttttgcaccacttacatctcgtggttctcagcagtacgtttctctcactgtcccagagctaactcagcagatgtgggatgcgaagaacatgatgtgtgctgctgaccctcgccatggtcgctacctgacagcgtcagccatgttccgaggcaagatgagcaccaaagaggttgatgaacagatgatgaatgtccagaacaagaattcat

SEQ ID NO: 211356 - DNA, 388 bp, Gossypium hirsutum
  unsure (1)..(388): unsure at all n locations
gcaaaggacaagataatgaagctccttgaggaatacgaaagtggaggtgttgtagctgaagcttgccaatgtatccgtgaccttggaatgccattctttaaccacgaagtggttaaaaaagcactagtgatggccatggagaagaaaaacgataggatgctaaatctgttacaggtatgtttcgacgaagggctaattaccattaatcaaatgagcaaaggcttcacccgagtaaaggacggccttgatgatctagctcttgatattccaaatgcaaaagataaattcagtttctatatggagtatgcccagaagaaagggtggcttattacatccttcgggtcatctgcaatggaagctccaccaatcgccacagnctcctgagata

SEQ ID NO: 211357 - DNA, 402 bp, Gossypium hirsutum
ctttgggatcaaagttggcaaactgcagtggtgatggagaatcctagtttcactcttttacttgtctgtgccttgtgcatgtcctcagtggtacaatgcaaatacaactgccccgaaaagtacgatccccatgatatgcaagaacgataccaacgatgggtggcccgacatggccgaaagtacaagagcaagaacgaatgggcattgcggttcgggatatacaaatccaattctcagttcattgattgtgtcaattcacagaacctatcattcaagttgaccgataacgaattcgcagacatgacaaatgatgagttcagagctatgtatttgggttaccaaagcataagatctccatgtgagagcaacagcaaaggcttcgcatatgacaaatatcacaat

SEQ ID NO: 211358 - DNA, 413 bp, Gossypium hirsutum
cccacgcgtccgctaaattttaatggagcagtaaaatcagaagccgtagaagaagaaaaggaatcgccgaagttcggcctgacatctgtttgcggaaggcgacgagatatggaagacaccgtttcgattcacccttcgttttgcaaacaaagccggcaagttcaaatgtcgtcggatattcacttttacggcgtcttcgacggccatggctgctctcatgttgctatgaagtgtaaagatcgatttcatgagatattaaaagaagaaatcgaagcgtgcggcggagagaaggcggtggagtggaagcggacgatggagaggagctttgagagaatggacaaggaagttcaaaaatggacggtggacgctaatgagcgttcaagttgccgatgcgaacttcaaactccacagtg

SEQ ID NO: 211359 - DNA, 396 bp, Gossypium hirsutum
tgttgatactaaactcgtgtccgaaatgacccgtttcgccagagagttttttgctttgcctgctgaagagaagcttcgggtcgatatgtctggtggcaagaaaggtggtttcatcgcctccagccaccttcagggagaagcagtgcaagattgtcgggagattgtgacatacttttcatacccattgaagagcagggactattcaaggtggcctgataagccagagggttggattgaagttacaaaggagtacagcgagaagttgatgggcctagcttgcaagcttcttgaggtgttgtcaaaggccatggggttagagaaggaggctttgactaaggcatgtgtggacatggatcagaaagtggtggttaacttctatcctagatgccctcaacc

SEQ ID NO: 211360 - DNA, 389 bp, Gossypium hirsutum
ctggtttggacactgaaaaggctacagttttttacaaagacgaatcgacctcggcggcttcgatgaccatgaagtctggcataaggaacatacttccaaactctgaaatatgcgattttgagttcgaaccttgcggctattctatgaattcaatcgaaaccgatgctatttcgaccattcatgttacacccgaagacggttttagttatgcaagcttcgaagctgtgggctatgatctgaaagagttgaatctggagcagttggtgcaaagggttttagtttgcttcaaaccaagtaatatctctgttgccgtgcatgtggatgttgattgtcactcatttgaacagacctgtctgcgttatgttaaaagataccgatgccggaagagt

SEQ ID NO: 211361 - DNA, 78 bp, Gossypium hirsutum
gtttgttttggttgcttaaatttatagataaatgcttaagactgttattgccttttttatatgtaatcgtgttttttc

SEQ ID NO: 211362 - DNA, 254 bp, Gossypium hirsutum
gcagcattcaagagattatctcgactggagggcataatcccaatgttggagacgtagtgtgcgctggcatacttagagaaactgtgtccaactttaccaaatggtaccaaatttgtggttaactgcagtggcagaggtgataaggatgttcaaacagcaaataagcatttgcaggtataattagactgatgatgatgatgtttttggccattaatttttcttcattcaccttgaccaatgaagattattgctat

SEQ ID NO: 211363 - DNA, 411 bp, Gossypium hirsutum
ccagaagataatagagcgtttgtctcagatctcagaagatggcccgtaccaagcaaaccgcccgtaagtcgactggtgggaaggctcctaggaagcaacttgctaccaaggccgcccgtaaatctgccccaaccactggtggtgtgaagaagcctcatcgataccgtcctggaactgttgctcttcgtgaaattcgaaagtaccagaagagtactgagcttcttatcaggaaattgcctttccagaggcttgttcgtgaaattgcccaggatttcaagactgatttgcgtttccagagccatgccgttcttgctcttcaggaagctgcagaagcataccttgtgggtctctttgaagacaccaacctgtgtgcgatccacgccaagcgtgttactataatgcccaaggaca

SEQ ID NO: 211364 - DNA, 405 bp, Gossypium hirsutum
aagagcttcgtgacatgaccttagaagaccaggttgaactgctgactcaggttgctggattatcttctactgaaaccaaagatgtggagatggttcttgaaatgatgccttccttgacagttgatatcacgtgtgaaacagaaggtgaagaggggatacaagagggtgacatagtcactatgcatgtttggatcacactcaagcgtgggagtggcctagttgctgctcttccccatgctccttactaccccttcttcaaggaggagaacttttggttactgcttgcggaccctgtctctaatgatgtgtggatctcccaaaaagtgagcttcatggaggaggctgtggccataactgcagcgtccaaagcaattcaagagttgaaggaagtgtcaagggcaagtc

SEQ ID NO: 211365 - DNA, 227 bp, Gossypium hirsutum
cggagatgataccctcgaaacctctctagccaatgatggaattggcaatgcaaatatgattgaggctgcaactacgtttaaagggagttgggaattgttccttgagaatggcggtgtttccgccatgcatttgatattgcttcctaagatcaatcaggctttgatgtttgacgccacagtgtggaagatctcgaagataaaattaccgggaccgccatgccgacacg

SEQ ID NO: 211366 - DNA, 409 bp, Gossypium hirsutum
  unsure (1)..(409): unsure at all n locations
gaagccttcagtgcttacggcgagatcgtcgattcgaagatcattaacgatcgtgagactggaagatccagaggctttggcttcgttactttccgtgatgagaaatctatgaaagatgctattgaaggaatgaacggtcggagtctcgatggaaggaatataaccgtcaacgaagcacaatctcgccgaagcggcggcggcggtggtggtggaggatttggaggaaacggtgggtacaaccgtggaggcggtggatatggtggtcgccgtgaaggtggatatggaggtggtggttacggaggtggacgccgtgatggtggtggatacggtgacggtggatctcgttactcaagtggcggcggttcttgcgcttatgttaaggacgtttangatttgagtgagcttcggc

SEQ ID NO: 211367 - DNA, 436 bp, Gossypium hirsutum
cggagatgataccctcgaaacctctctagccaatgatggaattggcaatgcaaatatgattgaggctgcaactacgtttaaagggagttgggaattgttccttgagaatggcggtgtttccgccatgcatttgatattgcttcctaagatcaatcaagctttgatgtttgacgccacagtgtggaagatctcgaagataaaattaccgggaccgccatgccgacacgttgagggaaccaatgaagaagattgctttgctcattcggttctcatggacattgatacaggaaagcttaggccacttaggttgaaatatgacacttggtgttcatcgggtggtcttgatatcaatggtcgattggtaagcactggcgggtataacaatggctccgacaccgtgagaatcctcgacttatgcgatacttgtgattggaaa

SEQ ID NO: 211368 - DNA, 418 bp, Gossypium hirsutum
aaaagaaaaagtttgaaacccggaaatgtcggacgaggaacaccattttgaatccaaggccgacgccggtgcctccaaaacctacccacaacaggccggaaccattcgtaagaatggttacatcgtcataaaaaaccgtccctgcaaggttgttgaagtttcgacctccaagactgggaagcatggtcatgctaagtgtcactttgttggaattgacatcttcaccgccaagaagctggaagatattgttccctcttcccacaactgtgatgttccacatgttaatcgtactgactaccagttgatcgacatttctgaggatggatttgtgagtttgctgaccgaaagtggagacactaaggatgatctgaggctcccaactgatgagaacctgttgaaacagatcaaggatggtttt

SEQ ID NO: 211369 - DNA, 421 bp, Gossypium hirsutum
  unsure (1)..(421): unsure at all n locations
gtaaatttttgtctttggtgggagaaatggagtttgaggatcaagaggagcaagaagaagagatgggtttggcaccgagttatgacccgcttgcaaactcatctcgagtcaaaatgtcaggtgtcgaaccgggttcgataactccaacgggtcagcagcagcaacagcagcagaggaaaccaaggtatagagagtgcttgaagaaccacgcggtgggaatcggcggtcacgccgtcgacggttgcggtgagttcatgccagctggaaccgaaggtaccctcgatgctctcaaatgcgcagcttgtaactgccaccggaacttccaccgtaaggaaacggagctgggttccccacactccgtccccatgacggacctctacttncaccacccccaccaccaaccaccgcaattcactcctta

SEQ ID NO: 211370 - DNA, 433 bp, Gossypium hirsutum
gaggaccctcaagacaggggcagattgataagaaagaaactcctcaagagcggctaaaaaggattatgaacagacagttaaacaagcaaattaagaaagacactgctgcggaaatggctaagaagcgagagcaggagcgccaaagactggaaaaacttgcagaaacaagccgattaagtcgtcaaaggcatcgcagccgcagtaggagttacagtcgctctcctccaagaagatatcgacggagtagaagtccaagtaggagtaggagttctagaagatattattctcggtcacgatcacgatctaggtcccactcttactctcattcacgttcacgctcaaattcccgttcacccagggtaagaagccgttcaaggtactgagaaggtgattgacataaatgttgcaggcaaagctatttgatatattatgt

SEQ ID NO: 211371 - DNA, 415 bp, Gossypium hirsutum
  unsure (1)..(415): unsure at all n locations
cagtgcgcggtttgtatggacgagttcgagcaaggggctgaagcgaagcaaatgccctgtaagcatctttatcacaaggactgcatacttccgtggctggaattgcataattcctgccctgtttgtcgtcacgagctgcctaccgatgatcctgattatgagaggagggttcgtggggcgcaggctactggtggaggtaatgacggcgatagtagtggcggtgataatgagcagaggtcgggggataatcggacggcggagaggagttttaggatatcgctgccctggccgtttcgggctcgtgggtcgggttcaggatcaggatcaagtgataatccgcagaccaggcaagaagatttggattgaaaactccttgaagtgctngcaaatatcangcatttctatcatgagacgt

SEQ ID NO: 211372 - DNA, 426 bp, Gossypium hirsutum
cccacgcgtccggatgattcccaccaagcccatggttgtggagaccttctccgagtacccacccttgggtcgttttgctgtgagggacatgcgtcagaccgtggctgttggtgttatcaagaatgttgagaagaaggacccaaccggtgccaaggtcaccaagtctgctgctaagaagaagtgaaccgtgctggctaaacctaatgaagtttccgcagatggagtattttattatgataataatagtttgatagactttatcatttatgatatagttggtcttttgcttggttttgcatgttatagtgtggtgccattgttgtctggtaactgttctcagtattgggtgcttgacagacggtggcatagctatggcaggtggtctctagcgttatctggttttgtttaatttactactgtatcttg

SEQ ID NO: 211373 - DNA, 415 bp, Gossypium hirsutum
cccacgcgtccgaggagattaaacaatttgacaagtatggcccagagagaagaggttgtccgtaggactgtttatgtgtctgatattgaccaacaggtcaccgaagagcagcttgcaggtttatttgtgagttgcgggcaggtggttgattgccgcatatgtggtgatcctaattccgtgcttcgttttgcctttgttgagttcactgacgaagaaggtgcgcgagctgctctgaatcatgcagggactatgcttggattctacccagttagggtgctaccttcgaaaacagctattgcaccagttaacccaacatttttgccgaggaacgaagatgagcgccagatgtgtgcaagaactatctactgtacaaacattgacaagaaggttactcaagctgatgtaagctcttttt

SEQ ID NO: 211374 - DNA, 420 bp, Gossypium hirsutum
atgagcatctcattctttcttgctcgggttgagagtctactgggttttattataaaaggaaaggagattattataggtactcggcggagtttaagatgggtgatgagaggaaagaggccgctgatcagtccatgaaagcatatcagtctgcaacaactacagcagaagctgagttgcctcctacgcatccaatccggttgggtttggccttgaacttctctgtcttttattatgaaattatgaactctcctgaaagggcctgtcaccttgctaaacaagcttttgatgaagctatctctgagttagatactttaagcgaggagtcatacaaagatagcacattgattatgcagcttttaaaggacaaccttactttatggacttctgacatcccagaggatggagaagaagccgcaaagc

SEQ ID NO: 211375 - DNA, 421 bp, Gossypium hirsutum
cccacgcgtccgcccacgcgtccgcggacgcgtgggtggcccgtgcttgtgcggcacaaacaaatgcaacatttctgaagctagcaggtccgcaactggttcagatgttcattggagatggagcgaaacttgttcgtgatgcctttcagcttgcaaaagaaaaatctccatgcatcatttttattgatgaaatcgatgcaatcggtacgaagcgtttcgatagtgaagtgagtggggatagggaggttcaacgaacaatgttggaactgctcaaccagcttgatggctttagcagtgacgaacgtattaaggtaatagcagcaactaaccgagctgatatccttgaccctgctctcatgcgttctggtcgattggatcgtaaaattgaattcccgcatcccactgaagaagcaagagcccg

SEQ ID NO: 211376 - DNA, 394 bp, Gossypium hirsutum
ggtttttcttgggaaaaattaaagaagtgagtacaaatgcttggtggtttgtacggagagctaccgccgccgtccgatgaggataaccaaccaagcagtaacgccacggtatggtcaagcagtacaaagatggctcctcccactctccgcaagcctttctccggctttgctccgccgcagactatcctcagatcccaaaacaaacccaaaaaccctattcccaaaacaacaacctcttcttccgtttccatctccgtgtcgccttcccccgtggcggttgcacccgacggaatggtgcaacatcagcctgcacttgtgggcgtcacttccagtgtaatcgaagagtatgacccagccaggcccaatgattacgaggaataccggagggagagga

SEQ ID NO: 211377 - DNA, 335 bp, Gossypium hirsutum
gagatagacagtattggatctgctcgaatggaatctggaagtggcaatggtgacagtgaggtgcagaggaccatgttggagcttctcaaccagctggatggatttgaagcatccaacaagatcaaggttctgatggctacaaatcggattgatatcttggatcaagctcttcttaggccaggccgaattgacaggaagattgaatttccaaacccgaacgaggagtctcgtcaggacatcttaaaaatacattctagaagaatgaatttgatgcgggggattgacctaaaagaagattgcttgagaagatgaacggtgcttcttggtgcggagct

SEQ ID NO: 211378 - DNA, 422 bp, Gossypium hirsutum
cccacgcgtccgtctcgatgtcgtatataatgcctcgaacaatgagcttgttcgcacacagactctggtaaagagtgccattattcaagttgatgcggctccgtttaagcaatggtaccttcagcactacggcattgacattgggaggaagaagaagatggcctctaagaaggaagctactgaggaaccagaaggggctgccgaggaaaccaagaggagtaagcatgtggcaaggaagcttgagaaacgccaaaaagatcgcaaataacttgatcctcacgttgaagaacaatttggtggtggtagattgttggcatgcatatcttccaggcctggtcaatgtggcagagctgatgggtacatattggaagggtaagaattggagttctatatgaagaaaatgtataagaaagagggcaagg

SEQ ID NO: 211379 - DNA, 414 bp, Gossypium hirsutum
agcgaaggttctgaaactagagcttaatatcatagtgaagtcgggttgtctgtgctggcggcttatcaagtcaaagctttggcaccttacgaacatgttaccacctgtggagctcctgaaaattccgatggtcttagtggggaatgtgaggaagcgagcaaggagggagcagatgttgaatctaaaagtaaaagaaggaaaaatgagaatcaatcaagtgaagtgggcaccttaggggaatgcatacaagaacctcgtgtggtagtgcaaagttgtactgattctgagattatgggggacggatttcgatggagaaaatatgggcagaaggtggtgaagggaaacccatatcccagaagttactacagatgcactaatgtaaaatgccacgtgcggaagcatgtggaaagagca

SEQ ID NO: 211380 - DNA, 430 bp, Gossypium hirsutum
cttttatctcattcctccgtcgcttttgagaatagaggcagcagtggcttgacgttcccctttgctcccttcttccagaagccaaaagtttgagttaagaacaatggcttttgctgcaatgaagccgacaaaacctggtttggaggagtcccaggagcagattcacaagatcaggatcactctctcctccaagaatgtgaaaaaccttgagaaagtttgtgctgatttggttcgtggtgccaaggataagagactgagggttaaggggccagtgagaatgcccaccaaggttcttcacatcacaacaaggaagtctccctgtggtgaaggaacaaacacatgggatagatttgagctccgtgttcacaagcgagttattgatcttttcagctcccctgatgtggtcaagcagatcacatctatcaccatt

SEQ ID NO: 211381 - DNA, 366 bp, Gossypium hirsutum
gttgctggatatgacgacaatggtccacatttgtatcaggtggatccatctggctcttgttggtcatggaaagcctcagcgatggggaagaatgtctctaatgcaaaaacatctcttgaaaagagatacactgatgatatggaacttgatgatgctgtgcatactgctattttgactctcaaagagggatttgaaggacacatctcacggaaaaacatttgaatcgggattatcggtactgacagaaaattcagggtgcttaccccagctgacattgatgattatttggctaacatggagtaactggtctttttattccagacttatctacaagtggttattttttatgcaacaattgtttttgag

SEQ ID NO: 211382 - DNA, 369 bp, Gossypium hirsutum
gaataattaacaaactctgcccagggacataatgtatcgatgctattggtacaggctggatggtttaatatatcccaatgcttgagttcgactgtcggggttttcctttggcttcagagggttatgcttactctgaaggcctcttgcggatcaatctttaacctttaagcaagccatgagatacatgttacacccttgctccctatattgcatactttgaatctctacctgtgcatgaaaacactgaagaatataggagcaagacagaactctttgtagacgcataccttgtgaatgtgaagcctgtccaacagcatgaacatgaggtcacaactttcataggattatatagatacaaagtgagggaca

SEQ ID NO: 211383 - DNA, 419 bp, Gossypium hirsutum
gcgtgagcgtggtatcaccattgatattgccttgtggaaatttgagaccaccaaatactactgcactgtgattgatgcacctggacaccgtgactttatcaagaatatgattactggtacgtcacaggctgactgtgctgttttgattattgattccaccactggtggttttgaggctggtatctcaaaggatggtcagactcgtgagcacgcattgcttgcttttacccttggtgtcaagcaaatgatttgctgttgcaacaagatggatgccactacccctaaatactcgaaggctaggtatgatgaaattgtgaaggaagtctcttcctacttgaagaaggtgggatacaaccctgacaagattccatttgttcccatttctggttttgagggtgacaacatgattgagaggtcta

SEQ ID NO: 211384 - DNA, 462 bp, Gossypium hirsutum
aaggcattgaaagccattttggagaaagattaaggcttgatcaacatcgtgtagcttggagtcctcagcgtgttctggcttcaccaggtcaaacagatatcagttcttccgcagtcagacctgctccatcttcactcgaaatcccaaagcattctcgagatacatggggctctgatacaaacctaccttctcctactccgaaccaaaatcccactggtgggaataagggacaagcatttgaaagcaaatggtcacctacccctggtcagtcatcaggtcctcttccggtacctaatccattccgaggaggtgctgtagggctgcaaccccctactgttgtttcagagagtgggagcccagctgctcctgtagtgcattcacatccgatggtgtcaagtgaatcacataggagacaggtcaatgttcaggcttcagttaatttaggtgctgatttgaaaaatg

SEQ ID NO: 211385 - DNA, 244 bp, Gossypium hirsutum
gggagtttagggtatactgtattgcacaatagttcttgtcagcatgctgctccaacctttatcaacttgatgaactctgcaattcttaggcttgctactagggacaaaaatatgacgattcgagcacgttatcatcctctttcgatgacaaaaagcctgcgtttacagcatcaagatcttggtgcattctctgctgcaattatagttaacatagcctatttattcatatcctgcttcatttgct

SEQ ID NO: 211386 - DNA, 461 bp, Gossypium hirsutum
cgggcgaaaggcttatttaaaacaagacctgtctgtcatctgctccatgtcttgcaatggaatggctttcttcccagcagatttcatgctccaaacgcctgatcatgatcacgaagatcatcaacgctccactaattctatcaatcaaatcctcccttcttgcacggcgccccaggagtttcatggtgttgcatcatttctggggaagagatcaatgtcttcatattcaggtatagatcatgtgtgtgaagaagcaaatggagaggatgatatatcggacgatgggtcacaggcaggtgaaaagaagaggaggcttaacatggaacaggtaaagacactagagaagaactttgagttaggcaacaagctggaacccgagcgaaaaatgcagctggctcgagctcttggactgcaaccaagacagattgctatttggtttcaaaacagacgagctagatgga

SEQ ID NO: 211387 - DNA, 417 bp, Gossypium hirsutum
aaaaccgggccgaccgacgcgtccgatactctagcgacgcatttggaggatttgttcaagttaatttggttaatgttaattgataggtatggattaggggatgactgagtgaagatgaactacacaacgttagtgcggatgatgaaatatatggcccctccgccaggggagtatgagagaggactctttgctcatactgataaaccagtaagcacactcatttgtgaggatcaaatttcagggctggaaattgaggtcaatgatggtcaatggatcaagctgactaatttatctccttcttcctttgtatttgtggttggagatcctctcaaggcttggagtaatgggagattgaaatcagtgaatcacagagtgatgatgagcggagacaaagatcgatactctatagcaactttt

SEQ ID NO: 211388 - DNA, 452 bp, Gossypium hirsutum
cccacgcgtccgcccactcgtccgcccacgcgtccgcccacgcgtccgcccacgcgtccgcgcacgcgtccggcttactttaagcggtttcaggttccatacaaaagaaggagagagggaaagactgactaccgggctaggattcgcctaatcaatcaagacaagaataagtacaacactccgaagtaccgattcgttgtccgatttagcaacaaagatgtcaccgcacaaatagtttctgctaatattgctggtgatatggttcttgcttctgcttactcacatgagcttccacgatatgggcttgaagtgggtcttacaaactatgccgcagcttattgcactggtttgctgttggggcgccgtgtgcttaagatgcttgaaatggatgaagagtatcagggcaatgtagaggctactggagaggacttctcagttgagccaactgacac

SEQ ID NO: 211389 - DNA, 310 bp, Gossypium hirsutum
tgtctggattatgtagatgatgagagtaagcttgaaagacgccccaccaaacacatgccatcgccagatcaatggactaatgtatttaatcctgcattctcctactatgcgtattatagctactcatacctctataccttaaacaagcttcgtgaatccaagggcatgacatccatcaaattccgaccacattctggggaggcttgtgatattgaccaccttgctgcaacatttctaactgctcattattttgctcatggaatcaattaaaggatatctactgatctactagatctatatttatttggca

SEQ ID NO: 211390 - DNA, 276 bp, Gossypium hirsutum
agaaaatgcatgtatgttgcatcgggtaaactatccaccccgttcgaccatggtgcgggacgtgtggatcctgtttcagcgcttaatccagggcttgtgtatgatttgacagcggaagattatctgggtatcctttgtgccttgaactacacagagttccaaatcagttccttggcgagaagaaactttataagtgattctagcaagtgatacagtgtctctgttcttaactaccctttcattgcagtctattctgattttgttatgtttttgatt

SEQ ID NO: 211391 - DNA, 234 bp, Gossypium hirsutum
  unsure (1)..(234): unsure at all n locations
cccattcgtctcgttcattctaattnttctttgtactcgagctagggctttactacggtgccctgtttctagtggttttacgatcttcaagcaattagcttcgattctgagtcgtttcgcaatgcctcggtattactgtgattattgcgattcttatttgacccatgactctccatcagtttgaaagcaacacaatgcaggttacaagcacatggcgaatgttagaacatacta

SEQ ID NO: 211392 - DNA, 316 bp, Gossypium hirsutum
gacccacgcgttcgcgaatcaaaaaatatctcaaatctcctccttctccttggaaatcttagtatcatcaccatgggctgaaatcccaaggtcttctttgacatgactatcggtggtcagcccgctggtcggattgtgatggagcttttcgcagattgcactcctcgcactgctgagaacttccgtgccctctgtaccggcgagaaaggcgtcggccgcagcggttagcccctccactacaaaggctcctctttccatcgtgtgatccctaactttatgtgccaaggtggtgacttcaccgactgaaacggttccg

SEQ ID NO: 211393 - DNA, 474 bp, Gossypium hirsutum
  unsure (1)..(474): unsure at all n locations
ggaanataccgggtccgacccaacgcgtctcggcaagtacacaagtactttgatgcaaagtcagtccttattttctctcaagatggcttagagggttgtaagaggacatgttgaagatggctcaatgtcccccaggcatttggatgcttgacaaggcttggtggtagcttttgcacccaagccattcgtttggtccccacaagtccagggaatgcttgccattgatccttattttgcgtaaccgattgatgtttgctctcacctatagagaagtcattgcttttctcatgctgaggcatgttatggttgatgggatggttaggacggtttagacctatccagcttggtttatggttgttgtgtcctttctttaatcatattgttgactttttgatttctttaattccaccaaatggttggttttctttactattgttttatgatggatatttaattcaatgtttaagttttttt

SEQ ID NO: 211394 - DNA, 355 bp, Gossypium hirsutum
caaatctctaatctcacattgatgaattcttcttcctggaatgttcatcctgtttataggggcaatgttgtcgttcaaggatgaacgatcctcgcaccagtaacttctccgaacaccgatgggatcaacccaggtgagaaaccggacattgaatcgggctatacgcatttgaagcttcttcattggtgttaaaagggttcttgtttttcttcagattcttgcacgaatacccggatcgaggactgctacattgtttctggagacgattgtgtagctgttaagagtggctgggatgagtacggtatcaagtttggtatgccaacgaagcagctagtgatcagacggcttacgtgca

SEQ ID NO: 211395 - DNA, 413 bp, Gossypium hirsutum
  unsure (1)..(413): unsure at all n locations
ctttgaggtttgatggttccctgaatgtggttgtgactgagttccagactaacctggtccgatatcccangatccactttatgctttcttcttatgcccctgtcatttcagctgagaaggcttaccatgagcagctatcggtggctgagataaccaacagtgcttttgaaccctcttcaatgatggccaaatgtgacccacgacacgggaagtacatggcttgctgccttatgtaccgaggagatgttgtgcccaaagatgtgaatgcggctgtggccaccattaagaccaaacgcacaatccaatttgtggattggtgccctactggattcaagtgcggtatcaactaccagccaccaactgttgttccaggaggggaccttgccaaggttcagagagctgtctgcatgatc

SEQ ID NO: 211396 - DNA, 270 bp, Gossypium hirsutum
atcaatctactcttttgattctcaggaatggcgagtggttttggtgaatcaacaagcatgcgttcagcaagtccatcttgctcgagctgttataatgcttacgatgctggtgattttgaatgcaatatttgctttgaattggctcaagatccaatcgtcacactatgtggtcatctcttctgctggccatgtctctatagatggttgcaccatcactcgcattctcaagaatgtccggtttgcaaggcccagtttcatgaggaaaaactt

SEQ ID NO: 211397 - DNA, 203 bp, Gossypium hirsutum
aaagcaagtatcatctgtaagatgttattattggcaagatatatttacttctagtgaggaggaagattaagaatatggatctggagatacggtgtatagagtcaacaggatcaggtgcaatttcccatgtagagactgagacactagctaaatatgagttgatggatggtgctccagtcagaggagaatcaaattcaatcagg

SEQ ID NO: 211398 - DNA, 201 bp, Gossypium hirsutum
cccacgcgtccggtgatgtacttggttcaattagccagcacgaaaggctagaagacgaattgcctggcaaaagaaggctgtgaggatctttccaaggccaactgctggaccccttctccctattgtccatggccagactttgaagtataacatgaagttgagagctggaaagggtttctccctcgatttgcttaaggctgt

SEQ ID NO: 211399 - DNA, 456 bp, Gossypium hirsutum
gatttttatagtacataatcctgggtccttgggttacggagaccatatactcaattatggggaaggatccaaaggaatgggacctgaccaacttttcggtaatcccattcatgttatggagaatgttgcacaaccagctatggattagcctttctcgttatcgaactgccaaaggcactaacaggattgtggacaagggtatcgaatttgaccaagtcgacagggaaaggaactgggatgatcaaatattgttcaatggaatcctgtttttcttggctaacaaatacgttcccggggcttcacacttacccctatggagaacagatggtgtgattataaccatgttgctccatgtcggtcctgtggagttcctttactactggcttcatagagctctgcaccatcattatctttactctcgttaccattctcatcaccattcctccattgtcactg

SEQ ID NO: 211400 - DNA, 274 bp, Gossypium hirsutum
cgaagagattggtgaggataagagagaagatagcataggcaatcaagatgaaacgaacaagggagaagagcctgcacagattgtactcaaagttgacatgaactgtgaagcttgtgccagaaaggttgcaagagccctcaaaggatttcaaggagtggaggacgttgccacagatagcatggcaaataaagtagtggtgaatggtaagtctgttgaccccatcaaggtttgtgaaaggctacgaaagaagagtggaagaattgtggaattaatt

SEQ ID NO: 211401 - DNA, 440 bp, Gossypium hirsutum
  unsure (1)..(440): unsure at all n locations
ccgggccaggagattgattcttttgaaacggacctagttgccagactggcttatttcatccgctatgattggcaggggagcggtcacactaatacttatgctggagatgatgcttcccactctaatgaatcatcaagtgaacgtagattagcagtaatagggacagtaacattttctggcacaccatgttatggaattgaggaaagtgtggaaccagcaagtgtatctattggattctcaacagtagagagtgtgacggatgtgattgagatgcaagctgtgggtgcgggagctgttgaaagaagagttagatntgcgattgatgatgatgactctgaatctgatgggcaaaccaaaatgtatgttcagttggaaaaagaactgatggacctgatgacagcccaagaagcaaggactgcattcatactatgacacacaca

SEQ ID NO: 211402 - DNA, 235 bp, Gossypium hirsutum
gtgaccgcaagatctccgtcaagacaaactgtcgaaggcccaagggtattgactctcgtgtgaggaggaagttcaagggatgcactttgatgcccaacatcggttatggctcagacaagaagactcggcactatcttcccaacgggtttaagaaattcgtcgtgcacaatgtccaagagctagtacttctcatgatgcacatcaggacatactgtgctgagtttgcacatgatgt

SEQ ID NO: 211403 - DNA, 228 bp, Gossypium hirsutum
  unsure (1)..(228): unsure at all n locations
gcacttcggacggttcgtttttggctnccatttaactcttngaagcaaacattttagctgggttgtgtgtaattttatcagcttctttagctgaagttttgaatggttaacctgaatttactgttcatattacacataaattgaagcatcatcctggacaaattgaagcagcttctttaatggaacatatacttgttggtagctctattgttaaagctgtttaaaaat

SEQ ID NO: 211404 - DNA, 458 bp, Gossypium hirsutum
gaaatactgtaccattttcaggatgtgttctacttgctgccaaacctaaacgtaaatgaccgtaatcaaggcttttgcagtaaaaaccaatgatatgatgttggttatatatctgtcatctctcatccgaagtgtcattgcgctccataatttgatcaataacaagatgttaaacaaagaacatgagaaggctgaagatgctaagccaacaactgtccaggctacgagttgaatccgaacataaagtcctaatcatgtcaaaaacttgagcatagggtgctattaacttccataggatcctctattcttgagattttgtattcttcatagctcaatcagaagatatcagtaggcttaaaaaatttgagagtttttctctttgttttccatacactatagactgtattaatgaagtgcatctccattaagcatcatgttatgctgaattaatcatttga

SEQ ID NO: 211405 - DNA, 402 bp, Gossypium hirsutum
caaaaactgtgttgtgttaagagaatggttgtggaggcagaaattgatcggttgccaatagacttgttggctcatatactggtgatgatcacttctttcaccgatttagcccaggcaagtggggtttgtaggaaatggaaacaaggggtgaaacaggctctggctagaagacacaccctgagttttgctggttgtaaaatggacgatgactccacttctcgtcttgttcgtcatgcttatagcctcgaagaactcgacatttcaaggagtcgttggggttgccaaataactgacaatggactataccaaatctcattagcaaagtgtgttagcaacttgacatcagtttccctttggggtatgacagggatcactgataaaggtgttgttcaattgataacc

SEQ ID NO: 211406 - DNA, 187 bp, Gossypium hirsutum
gcttcttgattacgatttttatgctcgaatttctgatttaggtctagcatgattgatggggtctcgggtttcgaatgacagttcttttatgaatggggatttaggggagtatgtatttgaggctcctgagtattctagttccatggatgcattcttgaaaggggattgttatagttttgttgttttg

SEQ ID NO: 211407 - DNA, 118 bp, Gossypium hirsutum
caaaatcagttgcttcacaatggcctctacatccatggctctttcttccccatcattcgccggtaaggcagtgaagttctccccttccacccctgaaatccggggtactgtacgtgtt

SEQ ID NO: 211408 - DNA, 423 bp, Gossypium hirsutum
ctgaagggcaccaccatgtagtggagcctgctttttaatttgacccaacacggggggctctgggagcttctataagactctttgaacgcgtatatgctcatgtggacgagagtgcatgagttattggtcttcgcgaggtcaaggggcaacgtaaacttattggtatgccactttatattctattggatgcccgtgtgattgatggttgttttttagaagttatgtgatgcatgttcatcctttggtggttaatttttttatgtccaatttcttttttgttatttagttagaatttgattttatttgttttaattttttatttttaatatttaagttttctatacttttatttaattttaaactttttatttttattaatattctattattattattctataatatatttttaatttatcatta

SEQ ID NO: 211409 - DNA, 405 bp, Gossypium hirsutum
cgcttagaaagagggttttagctgtggtttttagaaacagtaaagatggctggggacagaggtgaggatgactatgactatgttttcaaggtggttttgatcggtgattccggtgtcggaaagtcaaatctgctctcgaggttcaccaggaacgagtttagcctcgagtccaagtccactattggtgttgagttcgctacacgtagcttgaatgttgatggaaaggtcatcaaggctcagatttgggacactgctggtcaagaaaggtatcgtgccataacaagtgcctattatcgaggagctgttggtgcacttcttgtgtatgatgttacacgacactccacattcgaaaatgtcgagaggtggttaaaaagttgaggatcacacagatcccacattgtagtc

SEQ ID NO: 211410 - DNA, 383 bp, Gossypium hirsutum
ctcccagatgaccacgtttacagttgagcattccaccatcatgcaccgcaaaattggttctgtcgtaatccccgcaggatctgtctccgcttttctcatcatcagcattctcctcttcacttccctaaatgaaaaacttttcgttcccttggctcgaaaaatcacccataatcctcagggaatcactagcctccagaggattgggattggactagttttttcggtagctgctatggtaggggctgctattattgagaaagaaaggagggaaattgctgtagagaaagaagtcaaaataagtgctttttggctacttgttcagttcttccttgttggtgctggggaagcttttgcttatgttggacaacttgagttctttatta

SEQ ID NO: 211411 - DNA, 362 bp, Gossypium hirsutum
ctcagatcctgttttcatacttcctcttcactctttcacaactctacaaacagtaccctactgccctgcttttgctgttgttgcagaggaggagtaagaatagaggaacccaaaggcttttgtttgattaaattgaaagcatttccatttttttttctttgcgtgtagttttgagagtgggagggaaaaaaaatggagaggagcactccagttaggaagccacatacttctacagcagatctgctcacttggtctgagactcctcagccggacaccgacacctacgccgctcgcttcgtccgacctcaccagccgtcggatgggatcagaaaagtggtgtttggaggccaagtaactgatga

SEQ ID NO: 211412 - DNA, 425 bp, Gossypium hirsutum
ctctctcctttggtttctccttttgtctctttctctctttttccaaccctaaccctacctgaccaaccaggattcaacatgaagggaggaaaatccaagtcagatactaagagtgccaagctatccgtgaaatccaaagctggaaagaaatcggggaaggctgccaaggatccaaacaagccaaagaggcctgctagtgccttctttgttttcatggaggagttccgtgagcaatacaagaaggatcaccctaaaaacaaattcgttgcggctgtcggcaaagctggtggagataaatggaagagcttgtctgaagctgaaaaggcaccttatgtagctaaggcagaaaagcggaaggttgagtatgaaaagaacatgaaagcctacaataagagacaggctgagggtcccaaaaacgaagatgt

SEQ ID NO: 211413 - DNA, 344 bp, Gossypium hirsutum
cgcacgcgtacgttcatttctacattgcttaggccccgtaactggaaagctacggtaaataggaggttattcttggattcttatgaagtgggggagctctgctatgctgccgaacagctatttatgcaagaacccaccgtacttcaattgaaagctccggtcaaagtatttggtgatcttcatggacagcttggtgatttaatgcggctatttgacgagtatggatttccttcaaccgcaagagatattacgtacatcgattatctgagtctaggagattatggcgatcgaggacagcacagcttggagacaattacattgctccttgctcttaagattgagta

SEQ ID NO: 211414 - DNA, 353 bp, Gossypium hirsutum
tgacagaatgaactttgctgaaatcgagaaaggaataaacatccttgctaagaaggcaaatgatgggtctttatcaattgatgagatggctgggggctcattcacaatatccaatggtggagtttatggaagcctcttaagtactccaattattaatccccctcagtcggctattctgggaatgcactccatagttagccgtccaatggttgtcagtggagaagttgttccaaggccaatgatgtacattgcactgacatatgaccatcgactgattgatggaagggaagcagtattcttcttgcgtcgcattaaagatgtcgtggaggatccacggagactgctgcttgatg

SEQ ID NO: 211415 - DNA, 369 bp, Gossypium hirsutum
attcccactctctctccccatcttgaatccaaacaaattaaaagtaaaacacctctttcattctcatatctttaattgtttgaccagatggctcttctaattaacgaagtcgactcccttactaaccagatcttctccatccttgaaaacaaatttcttttcggtgatcacgagaataatgctgctgcaaaaacccatgaagaagatcacttgaaatctggaaatcagatttccgggaaagtaagaatcctatccattgacagtgggagcttttccgatggtatattggccgcccaatccctccttaccctccagacttttctccgtcaaaagtcggggaatcccaatgctgtcattgcccagtatttc

SEQ ID NO: 211416 - DNA, 397 bp, Gossypium hirsutum
  unsure (1)..(397): unsure at all n locations
gaaacggttggtgttgtcactgcaaagacgagtgaaattggccagaagacttggggcatgatgaaaggagtcatggcaatagcttcacagaaggttgaggaatacactaaagatggcatgaactggaaaaatgatggtaactggcaacgaaacgatagcgagaagaatggatattatcaggagtttaaacaggagaataagggatggaattctacttctggtggacaaacctcctctggtgtaaattataattcttataactcaaattcttgggatgattgggacacaaaagacaataggaaggaacatactacaaaagtgactgcttctcatagcaatgatggttgggcttgttgggatgaccccaaggatgatggatatgatnagttctataatg

SEQ ID NO: 211417 - DNA, 368 bp, Gossypium hirsutum
  unsure (1)..(368): unsure at all n locations
ttaaaaaaagatggcattggtggtaatttgtgggcagccgtgcagtgggaagtcgacagctgcgaaatgtctagctgaagctctgaatgaatcagagtgcaaacagactgtaaggatcatcgatgagacttcatttcatcttgatcgtaatcagagctatgctaatatgccatcagagaagaatttacggggagtgcttaggtccgaagttgataggtctgtctccaaagataatatcattatagttgattctttgaacagtatcaagggttatcgatacgagttgtggtgtttggctcgtgctgctgggataaggtactgtgtgttgtactgtgatgttggagaatcgcactgtangaaaatggatg

SEQ ID NO: 211418 - DNA, 410 bp, Gossypium hirsutum
cccacgcgtccgaaaaactaagagtgatggtgaagagatatcgagttcgaacaaagctgtgcaagctctatgtcaacccacaaattataaagagacgtgccaaaaaagcttggcgtcgtcaaattctagcgacgttaaggagctgataaggacaggtttccaagccgggctagttgagataaaaaacgtgttggcccattcagtaacagtccaagagttgattaaggatgagaacaacaaagcggcacttggtgtttgccaagaggtgttggacttagccattgatgactttcaaaagtcattcgacatgctaggggaatacgaaatgagcaagatcggaaaataccttttggaactaaagacctggctaagcggtgcattcacgagtcaacagacatgtatagactcat

SEQ ID NO: 211419 - DNA, 336 bp, Gossypium hirsutum
ctcaaggttgctaaaagaaagttgggaactcacaaaagggcaaagaagaagcgtgaggagatgtctagtgtgctccgcaagatgagggctcaccctggaggtggagaaaagaagaagtgaagctctctggtgacaagtcaccttgatgatttcattagagaactttgtttagcatatgttttaacgtattggtttgagactgaaaactatgcactgaatctcgtttgtttaattttataatgtatgctaaatttttgtgtttagttgcatgtccttgacatgttgggtattgccttgttttcttagccgtatggatttggaagttcatcattgagt

SEQ ID NO: 211420 - DNA, 319 bp, Gossypium hirsutum
  unsure (1)..(319): unsure at all n locations
cccacgcgtccgcccacgcgtccgcccacgcgtccgcccacgcgtccgatcaagatcaaatttccattatttttgttgtcatatgcattgaaggtgaagtaaaaatatcttcagctctcatacaacatgtactctgttggggaactaaatttggtaaaagtgatgttggtatcaatgggttaatgcccttaacattacaggtttgatatttattaattcaatcgatggggaaaattacaccntnnnaaaaaaaataaaaaaaaaaaaaaaaaaaaaaaaaaaaaaaaaaaaaaataaaataaaaatattaaaataaaat

SEQ ID NO: 211421 - DNA, 338 bp, Gossypium hirsutum
  unsure (1)..(338): unsure at all n locations
tgtacatcagaatttgagttctctttaaaggaaatgatgttcatatcagcatccgatggcaaagattacaggttgagcagtttttctgaaaatgttgaggttcactttgcatttaggaagaaaacagaaatcttgggaaaagctagaaattcactccttcaatgtgatttctctcttcctcaagattacacttccaaaggccctttactgaagaacgatggaatggctataaattcttccaaccaagttgttgatttgattttttcatctgagaggtgtgtggtatcaaaagcagccttccaactgatggagctcgtgcatcaaacacttcangatgt

SEQ ID NO: 211422 - DNA, 363 bp, Gossypium hirsutum
gtcctcagtgctgttcgaatccaccaacattggattctgcaagtggagctggtcacgttgagaatcttgctggtctcaacacttatgtttctgggtctcttcaatctaagcttgctgtttttcttatctctgatattttcggatatgaggctccaaactttagaaaactcgcggacaaggttgcagcctctgggttctatgtggtggctcctgacttcttttatggagaaccctatgaccctaataaccctgatagacctttatctgtttggataaaggatcatggaccggataaaggttatgaggatgcaaagctcgtaattgacgctttgaaaaagtaaggagtttcatccattggagctg

SEQ ID NO: 211423 - DNA, 379 bp, Gossypium hirsutum
cccacgcgtccgcccacgcgtccgtgttgaccatcttaacgaggaagtattacatccattacttcaggatcttgttaaaactccattttttcggtatttcaaggttaaattgtggtgtaactgtccattttggcctgatgatggtatgtgccgtttgcgggattgtagtgtttgtgaatgtccagaaaatgaattccctgaattatttaagaagccctaccatcatggccttccatcagatgaccttaagtgccaagaaggaaagccgcaggctgctgttgaccgcacactagatagtaaggcttttagggggtggacagaaacagataacccctggacatatgatgatgagactgataattctgagatgacatatgtg

SEQ ID NO: 211424 - DNA, 370 bp, Gossypium hirsutum
cctttttcaggtcaaaatggggatgtcaggtctccgaagagacaatgcactgactacaggagtgtattggttgaacggaattcttttacatcaccagcgaaggaccgtctattagctttcagcgaccttcggaaggctcctttgcaatctgtgtttgccagtccaacacgccctaaccctgttggtggaggagaaacatgtgccgaaacaggaattaatatattctttagtaagattaataagttggctgctgtctggattaatggtatggttgagaggctacaactgtctcaagagattagggagagtgtatattttctttttcaacaaatacttagccagcggacttctctgttttttaaccatcata

SEQ ID NO: 211425 - DNA, 428 bp, Gossypium hirsutum
cccacgcgtccgggtggatatagtgaagatatgatcccaacggtgagtcatcttgtctaagaggatctgtatttgcatcttcacttttttttttcttctttttaaatttgtgaattggtatgatattactttccaaggctttttttttttctgtcatagaagtaaggtaattaaggcctactggcttacattcaggttggattcaacatgaggaaagtgactaaaggaaacgttacaataaagttatgggatcttggaggtcagcctaggtttcgcagtatgtgggaacgatattgccgttcagtttctgcaattgtgtaagaactaagaagcttcttctttattttcagacttgttattttcagtaactcccttctaattgctttaacaattttagggcctgaaaaagtttgccttttatgcaagaa

SEQ ID NO: 211426 - DNA, 364 bp, Gossypium hirsutum
cccacgcgtccgggaaaaggattttctgtaggaagatactgctataagtcaacttgttggatttgtttaactgattggatgcatctaatgttcaccagttttgaaactcttttgtttggatcaggttcgattagaggcgtcaacaggaagcagaattgaaactgatagaagaagagactgctaagagggtggaagaagcaattcagaagaaggttgaagagagattgaactcagaagaaatcaagcaggaaattcagaagcgactagaggaaggacggagaagacttaatgatgaagttgctgcacaacttgagaaagaaaaagaagctgctattcttgaagccaggcaaaaagaggaggtagc

SEQ ID NO: 211427 - DNA, 357 bp, Gossypium hirsutum
ggaaaaacccgccgccgacggcgggaaaagagattccgcagagtaaaaaggatagagctaagctagatgggatgtatgagtgtattttgtgtgcttgttgtagcactagctgtcccagctattggtggaatcccgagtcttatctaggtcctgctgctttgctccatgcaaacagatggataagcgacagccgtgatgaatacacaaaggagagattggaggccataaatgatgagtttaagctgtatcgttgccatacaatattgaactgtgctcgtgcttgtccaaaggggctgaacccgggaaagcagatcgcacacatcaagcatcttgagcttactgcttgaagtcttaatc

SEQ ID NO: 211428 - DNA, 328 bp, Gossypium hirsutum
attcaaatgagtttggtcatacatgtggctttcagaaacatgtggttcatccaatcctcgatcagaatttctttcttgatacaagtcacaaaaggaggctgaaggaggagtatgaaattgagccctggacatttgaacaacatgttggagaagccataataattccagctggctgtccataccagattagaaacgttaagtcctgtgttaatgtggttttggactttgtttcaccggaaaatgtgaccgagtgtatccggttgatcaatgaatttcgtctgcttccagacgatcataaagccaaagcaaaaaagtttgaggttgagaa

SEQ ID NO: 211429 - DNA, 306 bp, Gossypium hirsutum
  unsure (1)..(306): unsure at all n locations
cgagcgaaccgggaaaagcccagcttgagaatcggtcgccatcggcgtccgaattgtagtctggagaagcgtcctcagcgacggaccgggcccaagtcccctggaaaggggcgccggagagggtgagagccccgtcgtgcccggaccctgtcgcaccaagaggcgctgtctacgagtcgggttgtttgggaatgcagccctaatcgggcggtaaattccgtccaaggctaaatacgggcgagagaccgatagcgaacaagtaccgcgagggaaaatggattataagaatcaannnnnaaaannnaa

SEQ ID NO: 211430 - DNA, 395 bp, Gossypium hirsutum
  unsure (1)..(395): unsure at all n locations
ctttagaaagttctgactacattaaggatgattgcctaatcatgaactgcactgttggagtagtcagaactcgccttgagggaccaaaactgtcttctattcctgtaccgccatcagacatgggtcagaatcttagagctttgttagaatccgaagttgggtgtgatataatgtttcaagttggtgatgagacatttaaagcacataagttgatccttgctgcacgttcacctgtttttaaagcacagttttttgggctcgttggggaccctaacttggataaaatagtagtaaaagattttgagccttctatcttcaaggcaatgctcttgtttatttataccgacaagcttnctgatgtacaagaaattgtagactccacatctatgtgtaca

SEQ ID NO: 211431 - DNA, 341 bp, Gossypium hirsutum
cccacgcgtccgaatggctccttcaactctcacagagcttgcagggaaggaaaccttacaggcaagctttgttcgtgatgaagatgagcgtcctaaggttgcttacaaccaattcagcgatgaaatccctgtgatctctcttgccggtatcaattatgtaggtgaaaagagggcggagatatgccagaaaatcgtcgaggcttgtgaaaattggggtatcttccaggtcgtggatcatggtgtcgacactaaactcatttctgagatgacccgtcttgccagagagttcttcgctttgcccgccgaaaataagcttcggttcgatatgtcttgtggcaaag

SEQ ID NO: 211432 - DNA, 402 bp, Gossypium hirsutum
  unsure (1)..(402): unsure at all n locations
cccacgcgtccgcccaaaaaacacccaattgaccaccatgtttaaattaatcaacatcctaaccatccttgtgctacttacatttagttcggaaattgcagatgccgcacctccgtgccaggaggttatcgtgtcgattaccccttgcttgagcttcataaaaggccaacccgatccggcaccaggatgttgttcgggtgctaaagggcttgctaagcaagctaacaccaaactagataggcaaggaatatgcgagtgccttaaaggtgtattgccaaaaataggaccatatgaccctaaaagattccctctttattgcccaaaaatgtggtatcaatactttaatttcctccatttctgccactactgattgcaccaagtgtgaanaagtgagtgggggga

SEQ ID NO: 211433 - DNA, 336 bp, Gossypium hirsutum
gtgaaagaaaatcgagagaaaaaaaatggggcttgaagaaaatctcaaatcaatgaacatcaacgaagaagagaacaagaaccctaaccctaacactaaagatgaagaagatggtgaacttgaagaaggggagatcgcaggtgaagaagatgatacgacgtcgtcttcgttaaagaaaggtgtcgtcgaacagcctcaccagttggagcattcatggaccttttggtttgataacgcttctgctaaatcaaaacaagctccttggggtagttctatgcgcgctatttacactttctccaccatcgaacaattctggagtctatacaataacataca

SEQ ID NO: 211434 - DNA, 371 bp, Gossypium hirsutum
tccaccccacctatcggttgcaggctaccgagcacctgaagtgcttgaaacccaaaaagttctttcaagtctgatgtgatagctttggagtgttgttgctagagtcaaccggcaaagcacctaatcaagcatcgtaggcgaagaagggattatcttcctcgtgggtccaatccgggttcgggaagaatggacggcaagttttcgacgtggaattgatgagatatcacagcatcgaagaggaaatggtgcaactattacaaatcgcgatgacttgtgtgtcaacggtgccagatcaaagaccctccatgcaagaagtggtacgcatgattgaagaaatgaatagagtggaaacagacgacggattacgacaa

SEQ ID NO: 211435 - DNA, 379 bp, Gossypium hirsutum
tgcaaatgtcaaaattctccttgtattctgatgatcgtcagaagtctggtctggatgccatttctgatatatattcaatattacgagatgaagctgcaagggctaacaagatggacgtgagctatgcccatgcattgaattggatatctagaaagggatatagcgaagctcagttgaaagaatgtttagaggaatatgctgccttaaacgtgtggcagatacatccccacacttttgatatccgatttatagatgcttgaagttgctataaaatcacttggaagagtaagctgcatccatctgctgccaagttcgaaattaagagatagttgtccgctgtaccattttaagttagtagttagtatttgcagagttgagt

SEQ ID NO: 211436 - DNA, 269 bp, Gossypium hirsutum
  unsure (1)..(269): unsure at all n locations
tcgcccacgcgtncgcccacgcgtncgaagaatccgaacacgagcacagagaagatgaagaagctcctgccgccgaggatgaagacactggagctcaagtcgcccctattgtcaagttagaggaagtcgctgtcagtacaggcgaggaaaatgaagatccgatcctcgatctgaagtcgaagctgtatcgatttgataaagaagggaatcaatggaaagagagaggtgctggtactgtgaagctgttgaagcacaaagagacaggaaaa

SEQ ID NO: 211437 - DNA, 316 bp, Gossypium hirsutum
cccacgcgtccgatcaaaacaacacattgcaaagagaaagggaatattatcaaaagaacccaaccatggcatttgcaggaacaacccagaaatgtatggcttgtgacaaaactgtgtatttggtcgataaattaacagctgataacagggtttatcacaaggcttgttttaggtgccatcactgcaaaggtactttgaagcttggcaactacaattcctttgaaggagtcttgtattgcaggcctcattttgatcaacttttcaaaagaactggtagtcttgagaaaagttttgaaggtacaccaaagattgcaaa

SEQ ID NO: 211438 - DNA, 382 bp, Gossypium hirsutum
ctcccttgacatttagcgttggcaacaccatgaaacgtatatcagttatagtctcttccatcatcatcttccacacgcctgtccagccaatcaatgctctaggagctgccatcgctatcctcggaaccttcttgtattctcaggcaaaagcgtgagaaaaaccaggggttcgagaattttgattcatcatacaacatagatgatgaaagacaaaatcggtctccgaaagaatttagcttagatgagttcttatagattactactgtcttttagaattgatgaatgctgggatttggacagataaagtctgtcatagtgtagatattttacaataatgatgattataaacaatgtcatataggaatggtattttttctcttca

SEQ ID NO: 211439 - DNA, 390 bp, Gossypium hirsutum
cccacgcgtccgaatcgctcaagatttcaagactgatttgaggttccagagtagcgctgttgccgctcttcaagaagctgccgaggcttaccttgttggactgttcgaggataccaatctctgtgccattcacgctaagagggttacgatcatgcccaaggatattcaacttgctaggaggattagaggggagagagcttagagtttgattttcggctgggtaacgtctaaagctggagatctaagcttttcatcatttgtacgttttgctttctcagcaaatgttcatttaaattgatggaaaacagttggaagctttatgatttcgttggttaaaattgccttttgcttttttggtaactctttaatatcctttttttggggtatgtg

SEQ ID NO: 211440 - DNA, 385 bp, Gossypium hirsutum
cgatggagaccggaccaaccggcggtggcctaggtggtgacgatctatcccaatcgtatcctgcgaccgctatatcgcggtggagcttcgaggtgtcgcggcggtaccagcacgttctggacaagactgtcccgcacattctgtaccgttggatagcatgtctggtgctggtgctgatctacgccgtacgcgtctactttgtgcagggtttctacatcatcacctacggcctcggcatctacttgctgaatctcctgatggggttcctttctcctcaagtggaccccgagatgcaggatggcccctcgctccccacccgcggatccgatgagtttcgccctttcgttcgccgactccccgagttcaaattctggtactctattac

SEQ ID NO: 211441 - DNA, 378 bp, Gossypium hirsutum
  unsure (1)..(378): unsure at all n locations
cccacgcgtncgcccacgcgttcggtccgtggagctcgttccgagaggctgttcttcgagccaggcggtgacacgagttccatcctcgaagaagccaaagcagcccgtggtggtggtgatgggttgttcccgttcaaagaaagcgtgattctagctatggaatctgatgatccgtacgtggactttcgtaagtcgatggaagagatggtggagacacatgggatgaaagattgggaatggttagaacaactgttgggatggtatttgaaggtgaatgggaagaacaaccatggatttataatcggagctttcattgatctgcttgtagctatcacttcttcctcttgatccactttcttattctctgctctctcttct

SEQ ID NO: 211442 - DNA, 368 bp, Gossypium hirsutum
attagagatgactacaagaaaaactctacgtgaaatttggagggatggagggatgaagggactgtttgctggacttggtcctcgtgttggtcgcactggtccgtctgtggggattgttgtttcattttatgaagttgtcaagttcgctttacattacagacacgaagatcatgagtgaaagacttggatttgtgccacaactatggttgatttaatgattcaagtatagtcacccgactcaatgatgtaaataaaagaattaacacacttctggtcccccataaaaaattccatcatgtcgcttcaaaccactttggcaaagcttttttcgtggatacccatgctcatgactcaaatgattccaagat

SEQ ID NO: 211443 - DNA, 260 bp, Gossypium hirsutum
atggttatttagttgataaggttttggacaaaactggcatgaagggtactggtaaatggactgtacagcaagctgctgatttgtccattgcagctccaacaattgcagcttctctggattcaaggttccttagtgggttgaaagaggaaagagttgaagctgctaaagtcttcaaatcaagaagatttggtgatgtcttgaccgaccaagttgtggacaaagcaagattaattgatgatgtaaggcaagcactttatgca

SEQ ID NO: 211444 - DNA, 380 bp, Gossypium hirsutum
cccacgcgttcgcaccattggacaattgttatgattgcagctgggcacctatttttgtcaggcaatcaaacttcaaacttccttcaaacactaaagtgccaattattatgattggccctggtactggattggctcctttcaggggattccttcaggaaagacttgccctaaaagaagctggagctgatctgggtccatctgtattgttctttggctgcaggaaccggaaaatggattacatttacgaagatgagctcaacaactttgtcaacagtggtgcactttctgaacttgtggttgctttttcacgcgagggacctaccaaggaatatgtgcaacataaaatgatggagaaggccttggacatcttgaacatgatt

SEQ ID NO: 211445 - DNA, 381 bp, Gossypium hirsutum
cggtttttctcgaattctcttcatattaattcgtcgttctttgttaaaagtacataggaatttgaagctctctctacagcttcatttcctctgttctttcaggcgacgtattttttagcttttcggccaaatttcgtaaatgggctgcttgcaatgtaaagcaaaaagactatgccccaaacgggaaaaccctgtcaaacttgcttcacagactgcttttagtgtcagtgaagttgaagcactctttgagctatttaagatcattagcagttctttgattgatgatgggctgattagcaaggaagagtttcggttagctctggttcacaataataagaagaaaaacatttttacagatcggatctttgatttatttgatgc

SEQ ID NO: 211446 - DNA, 414 bp, Gossypium hirsutum
cagagagatacaaatccgaagatgaagaacataaaaagaaggtcgaggcaaagaatgcattggaaaactatgcatacaatatgaggaacacagtgaaggacgagaagattggtgctaaactcccagcagctgataaaaagaagattgaagatgctattgaacaagccattcaatggctagacagcaaccaactcgccgaagccgatgaatttgaagacaagatgaaggagttggagagtatttgcaaccccatcattgctaagatgtaccaaggtgccggcggtgacatgggtggtggcatggatgaagatgttccggctggtggaagtggtgctggtcctaagattgaggaaagtgactaaatcattgattttcttcacctgggttctctattggtctcttatgttttttggg

SEQ ID NO: 211447 - DNA, 363 bp, Gossypium hirsutum
agcaaatcttgtttctccatcatcaacaacagcaagagcaacagttgtatgcaagactggaaactcaagtactacgagagcagcaagggcaacaacaacagcaagagtacccacaaccacccaagaaacgctcttatctgccgtcggcttctacttcaacttttggttccaaatcaacccaacatgcaagaaaaatgggagatagccaccaccaagctgcaacatcgtcaagattggggataaggcactctggaggggagatcgttgaggtccaaggaggtcacattgttcggtcaactggaaggaaagaccgtcacagcaaagtttgtactgccaaaggtcctcgagaccgacgtgttcgtc

SEQ ID NO: 211448 - DNA, 375 bp, Gossypium hirsutum
taaaatataagaaaaaaaatcatacgcaatgagcactgctggtcaggttattcgttgcaaagctgcggtggcatgggaggcggggaagccactatcgatagaagaagtggaagtggcaccaccccaaaagcatgaagtccgtattaagattctcttcactgctttatgtcacactgatgtatactactgggagtgtaagggttacactcctctgtttcctcgtatacttggtcatgaagcctcagggatcgtggagagtgtgggtgagggtgtgaatgatttgaaacctggagatcatgtgctccctatcttcaccggagaatgcaaagaatgtcgccactgtctgtcagaagaaagcaataacatgtgcgaact

SEQ ID NO: 211449 - DNA, 424 bp, Gossypium hirsutum
cccacgcgtccgcctgaggaaggttactgatgatatgaaggcgaagaaccgtactgatagaacaggcgttgttagcaccagcgaaaagcaaacaagttccacaccctctactactacccctactgtcaaaaaagtcgcaccaccaaaactagagctgcaaatgggtcgtaagtgggctgttgagaaccacataggaaacaagaacttagttattgatgattgtgatgccaaacaatctgtgtatgtttttggatgcaaggattccgttttgcagattcaggggaaagttaacaatataacacttgataaatgcactaagatgggagtgttatttaaggatgttgtggccgcttttgagatagtaaattgcaatggcgttgaggcacaatgtcagggtttcgctccaacaatttcagtggacaac

SEQ ID NO: 211450 - DNA, 296 bp, Gossypium hirsutum
ggtattcttcacctcttttccgtgtaaggacagcaaatgctatccaggaacgagtacaggtccacaacaccggtccatcatgggtccctggcttcattgtgatgagtatcgaagatggtaatgaaggcattccagggctatctcagttagatccaatcttttcatacgttgtggttgtcttcaatgcatgttcaacagaggaatcattcactatccctacactgcgaggaaggactcttcaactgcatgccatacaagtaacgtctactgatgaaacagtcaagaagtcatgctat

SEQ ID NO: 211451 - DNA, 369 bp, Gossypium hirsutum
gcttggagttctttctattccttccctcgcatattttgggttaactgtattctacttgcctgaatcaccaagatggctagtaagtaaagggcgaatgaatgaggcgaaagcagttttgcaaaggctacgtggcagggaagacgttgctggtgagatggctttgttagttgagggactgggtgttggaggtgaaacatcaatagaggagtacataattggcccagcaaatgacgacattgaagacgaagatatatctgctgataaagatagaatcaagttatatggacctgaagcaggtcagtcctgggtggccagaccagtcactggacatggtagcagtataggccttgcgtctcggcatggaagtgt

SEQ ID NO: 211452 - DNA, 332 bp, Gossypium hirsutum
ggggttttgtttctctctaaatcaggacaaaagggtttttcgatctataccaaaagaccacagggattgatctatggaattcctttttcagcagtgtattttctttttcctttttcagttttattcgatttttttacttattttctttctctctccactgtttcgaagccagcttctcttttgtcgaagccatcggagctcggtatttgttctcagcttcaagtgattcagcttcgttcgaatcgattgatcggtaatgtaacggcggatttctctcggttgtctcatttaaaagagcttgatttgggttctaacacgttaaatggtgaaat

SEQ ID NO: 211453 - DNA, 346 bp, Gossypium hirsutum
  unsure (1)..(346): unsure at all n locations
tacataccgtatacaataagtcttgtgagcaagtatataatagactgaccttctgataaaaggaaactagattggaatacaatgatgaaaatagctagcacgtgctgcaaacggtatggagtattaggacgacacatgcaagactactggcatatatcgcgatgtaaaatgcttaaatatatcgatcggtgcgggctatcatacaaaactatctgattttgactgggcccaactgcgacctgttggggataagactcatgtctccacaacagtgataagcacttatcgatattggagcacaaaataatcatatgccggtcngcttacattgaaatcggacgtttat

SEQ ID NO: 211454 - DNA, 389 bp, Gossypium hirsutum
cccacgcgtccgctaagccagctgcttcatggcttgatgattttcttgtatggttatcacctgaggcatttggttgttgtcggaagtttacaaatggatcttactgtccaccagatgatcaaccaccttgctgttcaccagatggaggttcttgtggcttatgcggagtctgcaaagactgtacaacgtgcttccgccattcagatttggttaatgatcgcccatctacagagcaattcagagagaagcttccttggttccttaatgctctcccatctgctgattgtgccaaaggtggtcatggggcctacactagcagtgtggatttgagtggttatgagagtggtgtaataaaagcatcagagtttcgtacttatcacacaccactt

SEQ ID NO: 211455 - DNA, 389 bp, Gossypium hirsutum
caaaagttcacttgcgctgtagtcctggacaatccatctctttcattaaattcgccagttttggaactcctttgggaacttgtggaagttaccagcaaggcccttgccatgctcctgctacatatgccatcgtggagaagaaatgtgtagggaagcaaagatgtgtggtcaccatagccaacagtaacttcgggcaagatccatgcccgaacgtgttgaagcggttgtctgtggaagctgtttgtgctccgatatcttcaacaacagcacagccaaactggggaggctaataagattgaaacactcacaaaggaactctatagcgcttgcatctagtaatttaaccatacagaagcaagcaccaaaagagaaaaataaaaaagaagagt

SEQ ID NO: 211456 - DNA, 389 bp, Gossypium hirsutum
cccacgcgtccgattgtttcttcgaaaaccataaacggaaccaaatatggccgagaaagcaatcgagtcggttcaatgcttcggccggaagaagacggcggtagccgtaacgcactgcaagaggggccgtggtttgatcaagatcaatggttgtcccattgagcttgtcgagcccgagatcctccgttttaaggccgtcgagccaatccttctcctcggccgtcagcgtttcgccggcgttgacatgaggatccgagtcaaaggtggaggtcacacttctcagatctacgctatccgtcaaagcatcgctaaagcccttgtcgctttttaccagaagttcgttgatgagcagagcaagaaggagattaaggatattttggtcgggtacg

SEQ ID NO: 211457 - DNA, 358 bp, Gossypium hirsutum
attgtttcttgctgctttgttctttgtcctgtcttcttcttttgctgctgataaacgccaacagtttagggctattggagttccatttccagcttctgtatactatatttacagtgccatataactgttccctggcacagtgttctatggtgttaatgtttgaaggatttcactacacaaccaacttaagggccgatgtctatgtactatagctgatcttttcaagagaagtaagatacattcagtgttgtattggcatcactccaacttacgtcgtgctgcagctacatatgttactaacactacaatattacccacgcttggccatccatcgaatcaacaagcagctgctgaagct

SEQ ID NO: 211458 - DNA, 310 bp, Gossypium hirsutum
ctttgatctttctttttattgtatattatacggagaaagcatttctcaaacaacccaaggtgtttttaagctgtaaaaaaattgggaaaggaaagagacctggaaagggagggaatcgcttctggaaaagcattgggttaggctttaagacacccagagaggccattgaaggaacatatattgataagaaaagcccatttactggcactgtttctattagaggccgtatccttgccggtacttaccatagtgcaaaaatggtaaggactattatcgtccgaaggaactaccttcactgcatcaagaaata

SEQ ID NO: 211459 - DNA, 335 bp, Gossypium hirsutum
ccgagaaggatgaaacagctgaacaactttacatttcgaagaaagctatcgaagatttaacacagaagattacttctgaagggcagagtttacaatctcagatttcttcactaatggaggagaataacttgctcaacgaaacacatcagaacacaaagaaagaacttcaatctgtaatatcacagcttgaagaacaattgaaaaacgaaaaagaaaatgaagaatctctaaaatcagagattaacaatctcaaggctgagattgcggagagttccttactgcaaactcatgtcaaaaaacttgaagaacagttggtgacggttgaagctcaattg

SEQ ID NO: 211460 - DNA, 314 bp, Gossypium hirsutum
cccacgcgtccgcaaaacatgagggaaatcataagcattcatataggtcaagctggtattcaagtcggtaactcatgttgggagctttactgccttgaacatgaaatccaacccgatggaatgatgcccagtgacacctctgtaggtgtagcaaatgatgctttcaacactttctttagtgaaactggttcagggaaacatgttcctagagctgtgtttgtggatctggaacctactgtgatcgatgaagttaggactgggacttaccgacaacttttccaccctgaacagcttatttctggcaaagaagatgc

SEQ ID NO: 211461 - DNA, 353 bp, Gossypium hirsutum
cgttgggacaaaactccttgtgtggttgttacatcaaaatacggatggagtgctaatatggagaaaatcatgcagtctcaaaccctatctgattctagcaagcaagcttacatgcgcggcaagaggatcctagagattaacccaagacacccaatcgtcaaggagcttcgtgagagagttgccaaggactctgaggatgaaggtgtgaagcaaacggctcagcttatttaccagacggctctaatggagagtggttcaatctacccgacccaagatttgcttacgcattacagctcgtgaaatctagcctaaaattagtcccgatgcaacaatgaggatgatgatgatgatgt

SEQ ID NO: 211462 - DNA, 317 bp, Gossypium hirsutum
acagaacggtcaaaacgcgatcaacacacagaaaagccccattctgatccacatttgctttaaaatcctctcaaacatcaaaatttgtttgcaaacagaccaaaaaaatccagctatgggcaatacggagaagctgttgaaccagatcatggacctcaaattcacctccaaatcgctgcaacgccaggccaagaagtgcgagaaggaggagaaatctgagaaattgaaagtgaaaaaagcgatcgagaaaggtaacatggacggtgctcggatctacgccgagaacgccatccgtaagcgcactgagcaaatgaact

SEQ ID NO: 211463 - DNA, 347 bp, Gossypium hirsutum
gactgcttctatatggaccagcaccctttagagaacgattctgacagcaagtccaattgttggatttccaaagatacaatggcgtgcactagatgagataaatgctggagtatgtgatggaatgacttatgaagaaataaagaagaatatgccagaggaatatgaatctcgcaagaaagacaagcttagatatcggtatcctcgtggagaatcttacctggatgttattcaaaggcttgaacctgtaattattgagcttgaacgacaaagagcacccgttgtagtgatatctcaccaggcccggttgagagcattatatgcttattttgctgataggcccctcaaag

SEQ ID NO: 211464 - DNA, 400 bp, Gossypium hirsutum
aaaagagatcactctttcttttattttcttcctataaacagttctaaagcacttgttcttctttttcttttcgttggagatctcggcggagatggggaaacgacgctgtgttgtggcggcattagcagcgataatgttgatgatggagttagcggcgttgacagtagcagaacacagaagaagtatgttgagtaatggtcttggaatgactcctcccatgggttggaacagctggaatcactttggatgcaatattgatgaaaaaatgatcaaagaaactgctgatgctctagtttcaaccgggctctccaagcttggatatgaatatgttaatatagatgattgctgggctgaaatttcccgtgatgacaaaggtaatctagtgcctaagaagtcaaca

SEQ ID NO: 211465 - DNA, 353 bp, Gossypium hirsutum
  unsure (1)..(353): unsure at all n locations
gttcgtccatggcgctttttggaagagttggtggaggcatctatacgaaggctgctgatgtgggtgctgatcttgtaggcaaggtggaaaggaacattcctgaggatgaccctagaaacccagctgtgattgctgacaatgtntgggataatgttggtgatatcgctgngatgggatctgatctttttgggtcctatgctgaatcatcttgtgctgcacttgttgtcgcttccatctcttcttttggcatcaatcatgaattgactccgatgttatatcctctcattataagttccgntggtatcattgtttgtttaatcaccaccttatttgctactgatttctttgagatc

SEQ ID NO: 211466 - DNA, 393 bp, Gossypium hirsutum
  unsure (1)..(393): unsure at all n locations
aagtntcttcccaagagagaggggtagcccttattatggtcgtggctctagtcgtagcccttataggaaggagagggggagccctgattatggtcgtggccacggtccaagtctttataagagagatagaggtagccctgagtatggccagatcaccagccgtagtcctcagagaagagagaggaccagctttgaccatgctcgtggctccagccgaagtcctttcaggaaagagagggctagccctgagaatatccaaagctctagccgcagtccttataggaaagagaagcgtagtgctgaaaatgatcgtagccccagtcgcagtccatatagaagagaaaggcccacttctgacaatggtcgtgcacccagccatagcccatatggaag

SEQ ID NO: 211467 - DNA, 402 bp, Gossypium hirsutum
ctgaaataccctccttctgtcccatctgacaagcttactcatgtctacactgccatattgaagcctgacaatgaggtcagcattctgattgatggtgaggaaaagaagaaggctagcttcctttcagcagaagattttgagcctccacttatcccttccaagacaattcctgatcctgatgataagaagcccgaggactgggatgagagagcgaagattcctgatccagatgccgtgaagccagaggattgggatgaggatgcacccatggaaattgaagatgaggaggctgtgaaacccgaaagttggttagatgatgaacccgaggagattgatgatcctgaggcaaccaagcctgaagatggggatgatgaagaagatggtgagtgggaagccccccaa

SEQ ID NO: 211468 - DNA, 369 bp, Gossypium hirsutum
aaaacccggcccgacccacgcgtccgttgaatatgttggttttagtggattttgttgataaaactagctgggagtatctgtttaaggtgtactgggatcttttaaaagagaagctagctttaagtttacatgagcttactaacgctacaaatccatggaaggaacttagagaagcttcagctaatatagaaccaaagcatcaaatcgacgttgcatatttaataaatagttacaaaagtttatacccaaaatgggtttttgatctcagaggttcagtgttaagcaaaaggagaaggttgcatcttttaagacttcagttgaggttcttactttctttgaaacacctattacccataaacgcttaaattt

SEQ ID NO: 211469 - DNA, 388 bp, Gossypium hirsutum
ggagaattaaggtccatttaaacgcattgaagaagtacacttacgggaagcatattgttgcgcgtgtagagaaacttgttgctgctggagagaggagaattgctgctcagtctgtgcacccttcttaaatcggtgtaggaaagagacatgtttgtacagctaacagaatctatgtgaagctttcccttcttccccccatatgtagggtcatggttcttctacctatcttcttagacaggtaagtaagaactgtatgaaaatataagttgttgcttgccttgtaccaggaaaaaaaactgtacattgtgtagcttaagggtttatacatagaaatggagccaaagctgagagtttcagtgttgcaatagaactgatgatgccccccccc

SEQ ID NO: 211470 - DNA, 397 bp, Gossypium hirsutum
gcgagtagcccacgggaaagggggagaaagacgcctcttcttagctcgaatccctccaaatccaaatctaaatccaagttcctctcctcaatctaattgcatagcatactgaagttagagtaaccatgtacgttgaacatgccttctcgatatccgacgaggatatcatgatggacactccccacgccattaacaatcggcctccgtacaaggagatcggcctcgctgtcgctcttctcgtctttggcacccttgggatcatcctgggtattttcatggccgtcaacaaagtcggcggtgaccgcgcccatgggcttttctttgcaatactcggatccattttgttcattccaggcttctattatacaaggattgcatattatgcatttaagggata

SEQ ID NO: 211471 - DNA, 430 bp, Gossypium hirsutum
  unsure (1)..(430): unsure at all n locations
atttccccaacttccactttgggttttccttgttctttttttcgatttggtcgagggtttttttttagcaatggctgtttcaggtttcgaagggtttgagaaacgcttagagctccatttctttggggacgataatgatccaacggtcaccacaatgggacttaggctgcttgattttgaatcactggaaaatgtgttacgtgtcgttcaatgcactgtcgtttcggctgtcgggaaccatttcttcgatgcttacgtgttgtctgaatccagtttgtttgtttaccccactaagatcatcatcaaaacatgtgggaccactcagttactcaaatcgattcggccgttgattcacttggccaaaaatctncgccttacgatatgcgggtgtaggtacacccgaggtactttcatcttccctaaatcacag

SEQ ID NO: 211472 - DNA, 405 bp, Gossypium hirsutum
ttcccaccctcaaaacagacaacaattcccccttccccaaaaataaacaataaaaattatgagcactggcgaaggaaaaaccgtgtgcgtaactggagcctcaggttacatcgcttcatgccttgttaagcaccttctccttcgtggttacactgtcaaagcctctgttcgtgacccaagtgatccaagaaagacacaacacttacttgcacttgagggtgctgaggaaaggctcaagttgtttaaagcaaacttattggaagaaggttcctttgattctggtgttgaaggttgtgatggtgtttttcacacagcatctcccttttatcatgatgtcactgatccacaggcagaattacttgatcctgctgtgaggggaacactgatgttctgaactcatgtgct

SEQ ID NO: 211473 - DNA, 386 bp, Gossypium hirsutum
gtccttctctttctcaccctattattttgtatttcgctgttcctctagtttgattttatgattcgaattttagattgtagatctgatctttaagaaaattaaaatttaacagatcgagagaaaaaaagaatggcagaggagcatagatgccaagcgccagaaggccatcgtctttgcgtcaataactgcggctttttcggaaattcggcgacgatgaacctttgctccaaatgttacagagatctctgtctcaaggaacaggaagcttcttcgatcaaatccgctctttcctcttccccttcgtcttcgtcaacggttgtcgaatctatttctcaggttcctctttttggctctccctgaagtcaacagagaatcggcggtcccgg

SEQ ID NO: 211474 - DNA, 429 bp, Gossypium hirsutum
cccacgcgtccgggatctctcagctactttttctctcaaaatttctccaattagctctggtttaggcgatggcttcaaagcggatcttgaaggagctcaaggatctacagaaagatcctcctacctcttgcagtgcaggccctgttgctgaagacatgtttcattggcaagcgactattatgggtccacctgacagtccatatgccggtggagtgtttctagtcaccattcatttccctccggactatccatttaagccacccaaggttgcattcaggacaaaggtctttcaccctaatattaacagcaatggcagcatttgcctcgatattttgaaggagcagtggagccctgccctcaccatatccaaggtattgctctcaatctgctcacttttgacggaccccaaatcccgatgatccccttgtg

SEQ ID NO: 211475 - DNA, 416 bp, Gossypium hirsutum
gcgaaaagaggaaaagtgaagtctccgacgccggtttcaaaagctaagttcgaggtggaaaatataggggaatgggtttcatgctctgttggggctaattttacgccgcatatcatcacagttaatgccggtgaggatgtcacgatgaagattatttcgttttctcaacaagggcctcgagctatatgcattctttctgcaaacggggtgatctcgagtgtcactcttcgtcaacctgattcttccgggggtacattgacatatgagggtcgtttcgagatactgtccttatccggttctttcatgccaaatgacactggtggaacaagaaagccgatccgaaatggtccctaaacagatcaaaatcgtggatgctaagtcttcggtgaccgtaaaatccgacgtgtatgccggat

SEQ ID NO: 211476 - DNA, 313 bp, Gossypium hirsutum
gaccaaactgcttattgagtgacctgcactgagcctttcagaggctggaacctaccaagacctcctatttggaaaataaaacacccggaatggatttactcaagatttctctttgcaaaccaccaaaagtgtctgatggtgtttcagtttgggagtggtccggctctgcattagatgaaggtgatgaggcttcaaaatggtttacaaattatctcgggaaacccataggatggttcgttttaatgcagcatcagaaactatgcctgtgaaacctgtgtatgctcaaggtattccataatgttttctgacatgt

SEQ ID NO: 211477 - DNA, 431 bp, Gossypium hirsutum
cgaacctgcaaagaaatatatcagtcactgtccgttctctgcattcagttccatagacaaggggttataccaatggctttcttaagtaaaattggaagtatacttaggcagaccacaagtatgcatgtcaatgctaagttgtctgcatcaggaccaggcctatttcaagtgttgagaagcatgtcaacatcgccaagctcgaaactttttgtgggaggtatttcgttccaaacagacgatcaaagtctgagagaagcttttagcaaatacggtgaagttattgatgcacgaataattatggatcgagaaacaggcaggtcccgaggatttggctttgtcacttacaccagttctgaggatgcttccagtgcactacaggccttggatggtcaggttcttcatggccgtcaagtaagagtaaactatgcaaa

SEQ ID NO: 211478 - DNA, 381 bp, Gossypium hirsutum
cccacgcgtccgctgcaggggagtggtgatgacggtgaagggggtggtttcatggggaaggttgggaatctggcactacagtttcttaaacaaaagctggatgatgacgaaggatacgggaaaccggcacttgagactgaagtgagtagcaagcaagaggcttatgcaggagctggtaagcactctcttcctgacagtggaattcttatcagcggctgccagaccgaccaaacttcagcggatgccagcccatcagggaatgcaagcaaagcttatggagcacttagcaatgctattcaaaccataattgccgactcagatggctcaattactaataaagagcttgttctgaaggccaggcagatgctcaaaaaacagggc

SEQ ID NO: 211479 - DNA, 415 bp, Gossypium hirsutum
  unsure (1)..(415): unsure at all n locations
attctcttctttcccaacctttccttctctatcagataaggtaatcccttctcagttccccgccatggcggaagcttctagaatcttccattcaacactctttccaacactctctctacaactcagcaagccatgttacaattctcacgtttacccttcactctctctcaagaaagcaccacgcccagttcaatgctcagtttccacaagcgaaaccaaatcgacgtcgtcgaatgcgacccaggaagtgccttggggctgcgacattgattccttggagaacgcagaggcgcttcagaaatggctttcgaattcagggttgcctccccagaagatggccatagacaaagtggcagtaggggagagaggattggttgctttgaagaacatcangaagggtgagaagcttctcttt

SEQ ID NO: 211480 - DNA, 423 bp, Gossypium hirsutum
cccacgcgtccgcccacgcgtccgttcaaattcccaataaattgggatgtttgatttcatgctattagctctcaatacttgcaaattatttttgatttgttcaactttacccaatttcaattctatctaaagagcagaaaagaaaattgggttgccgtgagatgaagatcgaggatttggatgacgtggagaatgaagacggcgattacggcgcaaagcagttgcagatagtcagagtggacgacgccaaacgactcctagtcggagccggtgctcgtatcctcttttaccccacccttttgtataatgtcttcagaaacaaaatccaatccgaattcagatggtgggacgaagttgaccagtttcttttgctgggggcagttccatttcccaaggatgttcgacgattgaagcagttgggcg

SEQ ID NO: 211481 - DNA, 430 bp, Gossypium hirsutum
  unsure (1)..(430): unsure at all n locations
tgctttggagccataatttggctccattctacccctccttgtcaagagcaaaagagggtttctcttctaatggcatcagcagtttttgaaggagcttcaattggtcctctaattgacttggccattcaaattgacccaagtgttctggtagctgcattcgtgggaacagcattggcctttgcatgcttttcaggagctgccatgttagcaaggcggagagagtacctctaccttggtggcttgctttcatctggtgtgtccatgcttctctggttgcattttgcttcttctatctttggtggttctacagccctctttaagatggagatctacttagggctcttggtgtttgttggctacatggtagtggacacacaagacataattgagaaggcacactntggtgatctggattattgtaagcatgctt

SEQ ID NO: 211482 - DNA, 215 bp, Gossypium hirsutum
catgaactctagagtggtattagctgcgaatttgttatttattactttctggcctttccctttttgacagcatgaaactggatccttatttttattatatatatatgtgcgtatatgcaaataagatgtgtattttccctttcaagttttgagtgggaaaaaaacataataagctttgtgtattgaatatcaggtatttatttatgccttttttt

SEQ ID NO: 211483 - DNA, 425 bp, Gossypium hirsutum
cccatctcctcaggtctccacttctgttgttgagccttacaacagtgttctctcaactcactcccttttggagcacactgatgtggctgttctccttgacaatgaagctatctacgacatttgcaggcgttctcttgacattgagcggcccacctacaccaatcttaaccgtcttgtctcccaggtcatttcctccttgactgcctcactgaggtttgatggtgccttgaatgtcgatgtgactgaattccaaaccaacttggttccctacccaagaatccacttcatgctttcctcgtatgccccagtcatctctgctgagaaggcttaccacgagcagctctcagttgctgaaatcaccaatagtgcctttgagccctcatctatgatggctaagtgcgatccacgccatggaaagtacatgg

SEQ ID NO: 211484 - DNA, 415 bp, Gossypium hirsutum
  unsure (1)..(415): unsure at all n locations
aaagggttctttatggattcaaatgctgtccctatgggatagggatggagaaagaggaaaaaccgaagatttcacatagtgcttttgatcgaaaaatcaatctgatttatttcgtacccctcgctcaatgagaaaatgggtcagattctataggatcaaacctatgggacttagggaatgatggaagggaataaaataaaaaaaaaaaagaaatcaaaaaaagaggggaaaaaaataataaaaataataaataagtnaataaaaatgaagtagaagaacccagattccaaatgaacaaattcaaacttgaaaaggatctttctgattctcgaagaatgaggggcaaagggattgatcgagaaagatctcttgttcttattataagatcgtgtgattggatccgcagatgttttgt

SEQ ID NO: 211485 - DNA, 390 bp, Gossypium hirsutum
cagtactttgtttttgagctccaaaactgaaaaaactctccattttttatcaaatgttctagacaacgatgggatctgaatctcaagttgtttgtgttactggtgcctctgggttcattggttcatggctggtcatgaggctactcgaacacggttacactgtccgcgccaccgtccgtgatcccgataatcaaaagaaggtaaagcacttgcttgatctaccaaaagccaacacccatttgacattgtggaaagctgatttatctgaagaaggaagctttgatgcagccattaatggctgttgtggtgtcttccatgttgccactccaatggattttgagtccaaggaccctgagaatgaagtgataaagccaacattaaatggagtat

SEQ ID NO: 211486 - DNA, 427 bp, Gossypium hirsutum
cgatggacccaatgagatccccagctggagcacgaaggatacggtgaagcttgtgtccgccggtgaaaaagtgagcggcgggatgctactcatcgtaccccgaggcaagcacgccgtcagattgggcaacgacgcggagatcagtcaggaagtgacggttgagaaaggatcggcgtacgcggttactttcagtgcggcacgcacttgcgcgcagatggagtcactgaacgtgtccgtaccacctgcatcgcaaacggtggacctgcagacattgtacaacgtgcaagggtgggacccttacacgatttcttttgaggcgcaggaggataaagcccggttgatttttaggaatccgggaatggaagatgacccggaatgtggacccatcatcgatgatatagccatcaagaaactcatcacccctgat

SEQ ID NO: 211487 - DNA, 428 bp, Gossypium hirsutum
caggattactgtgatgattactacaaatacatgtatccatgtgcccctggagctcaatactacggccgtggtgctttgccaatttactggaactacaactatggagctgctggcgatggtataaaagttgatttgttgcaccaccctgagtatctcgagcagaacgcaactattgccttccaggctgccatctggaggtggatgaccccaatcaagaagaaccaaccttcagcacacgacattttcgtgggtaactggaaaccaaccaagaatgacacagaggaaaaacggggtcctacttttggctccaccatgaacgttctctacggagattacacttgcgggcaaggcgatatcgatcccatgaacatcatcatctcccattaccttcattaccttgacttactaggtgttgggcgagaggaagc

SEQ ID NO: 211488 - DNA, 391 bp, Gossypium hirsutum
gcctgaaccaccgtcttcttctagaagccaagatgattcttcatcttcttccagtttgattgggaagagaacgaagcattctcaggatgatgagctctcttctccggttaaccgtccaactcctgggtcatctggtgcgtcgccagagtctagatatggaaagaattcttcctggggctgttcacttagtttgaccgagtataaggtttgtaagaatgatgggttagctgatgcttcaacacagactgaggaaaacacagacagacctaagtcacgagaaacttgtacaaggggtgtttcgactgatgatgggtctttagaacccgaatgcaatgagaatttccaaaacctggtccctaacgcttgtgtaaaagataatcccgagatatgc

SEQ ID NO: 211489 - DNA, 392 bp, Gossypium hirsutum
cccacgcgtccgggatatgcccttccacatgccatcctccgtcttgaccttgcaggtcgtgatctaaccgatgccttgatgaagattcttaccgagagaggttacatgttcaccaccactgctgaacgggaaattgtccgtgacatgaaggagaagcttgcttatgttgccctggactatgagcaggaactggagactgcgaagagcagctcatctgttgagaagaactatgagttgcctgacggacaagtcattactattggagctgagagattccgttgcccggaagtcctcttccagccatctttcatcgggatggaagctgctggaatccatgaaactacctacaactctatcatgaagtgtgatgtggatatcaggaaggatctcta

SEQ ID NO: 211490 - DNA, 416 bp, Gossypium hirsutum
gtcaacaaatggctcgtacaaagcaaactgctaggaaatcaaccggcggcaaggctccccgtaagcagctagccacgaaggctgcccggaagtcagctccggcgaccggaggagtgaagaagcctcaccgtttcaggccaggaactgtagctcttagggaaatcaggaagtaccagaagagcaccgaactcttgatccgaaagcttccgttccagaggcttgtgagagaaattgctcaagatttcaagacggatttgaggttccaaagcagtgccgtcgccgctcttcaagaggctgccgaagcttatctcgtcggactgttcgaggatactaatctgtgtgctattcatgctaagagggttacaatcatgcctaaagatatccagcttgctaggagggatagaggagagagagct

SEQ ID NO: 211491 - DNA, 342 bp, Gossypium hirsutum
  unsure (1)..(342): unsure at all n locations
cttgaagtgctttgtgttctctcttatctcgctccacttcaagatcaagcctatttgaagattgataatcctcttccatgcagaggtgtcacaagggctgttttcactgttcctgctattggtatagcttccattttgcttttaattaatttaaatggttaagctaagggtatgtttgtaggagtgattacagtgattttggaactttggggggaaatgtaggtctgaaatggaaatttctggtatttaggtatattaaaggctttttctccattgactatttaggtatattccttgaattattatcatgaattaactttttaatctaaaacttnttgagct

SEQ ID NO: 211492 - DNA, 307 bp, Gossypium hirsutum
caaagagtgatgccgaagtgaaagttttgggcacatgggcgagtccattcgtgatgagggtaaggattgccctgaacatcaagtctgtggcctatgaatttcttcaggagaggttatgggaaggcaaaagcgagcttctcctcaaatcaaacccagttcacagaaaggtccctgtcctcattcatggtgatgacaccatctgtgagtctctcattattgtccaatacatcgatgaagtttggccttctgctcccattcttccttctgatccccatgaacgtgccaccgctcgtttttgggctgctta

SEQ ID NO: 211493 - DNA, 422 bp, Gossypium hirsutum
  unsure (1)..(422): unsure at all n locations
gattaatatgaaactgggattagcattgcagggaacaattaacaaatagctggttgtattgttgttcagagaaaagcaaagtggatgaggaaatatgttagcaatagcaaggcaaaggatgttggggcaatcatttaagaagattctgcctgcagtgtctgtcttgagaagttactcatctgctgcaaaacaggtaccgaatgctaagtcgaccatatgcttttaattgcatactaagattgaggacatctactgaattcaagcctggccattcttatggtcactttttcccagatccacaatatgaaaatgttcagcacatcatttgttgtgatttttttgcaacatatgcttatgattttgatttcgctaataatgtttgattttacagatattaattactcngtacaatttcgttcttt

SEQ ID NO: 211494 - DNA, 417 bp, Gossypium hirsutum
taaggatccaaaggaatgggacctgaccaacttttcggtaatcccattcatgttatggagaatgttgcacaaccagctatggattagcctttctcgttatcgaactgccaaaggcactaacaggattgtggacaagggtatcgaatttgaccaagtcgacagggaaaggaactgggatgatcaaatattgttcaatggaatcctgtttttcttggctaacaaatacgttcccggggcttcacacttacccctatggagaacagatggtgtgattataaccatgttgctccatgtcggtcctgtggagttcctttactactggcttcatagagctctgcaccatcattatctttactctcggtaccattctcatcaccattccttcattgtcactgaacctatcactttctgtataca

SEQ ID NO: 211495 - DNA, 417 bp, Gossypium hirsutum
taaggatccaaaggaatgggacctgaccaacttttcggtaatcccattcatgttatggagaatgttgcacaaccagctatggattagcctttctcgttatcgaactgccaaaggcactaacaggattgtggacaagggtatcgaatttgaccaagtcgacagggaaaggaactgggatgatcaaatattgttcaatggaatcctgtttttcttggctaacaaatacgttcccggggcttcacacttacccctatggagaacagatggtgtgattataaccatgttgctccatgtcggtcctgtggagttcctttactactggcttcatagagctctgcaccatcattatctttactctcgttaccattctcatcaccattcctccattgtcactgagcctatcacttctgttataca

SEQ ID NO: 211496 - DNA, 366 bp, Gossypium hirsutum
gtcccgttcaatccaagtatctaacaatgacaacccgtttcaagaagaatcgtaagaagcgcggccacgtgagcgccggtcatggccgtatcggcaagcaccgcaagcacccggggggtcgaggaaacgccggaggtatgcaccaccaccggatcctcttcgacaagtatcaccctgggtatttcgggaaagtgggtatgaggtacttccacaaactctgcaacaagttttactgccccatcgtcaacatcgacaagctttggtctctcgttccacaagacgtgaaggcaaaggccaacaaggattcggcgccgatgatcgacgtgacccagtttgggtactttaaggtcttgggaaaaggtgtgc

SEQ ID NO: 211497 - DNA, 400 bp, Gossypium hirsutum
tagcccaaggtagtactagcggttttatatctaatggcactattattaccctattacactctcacttattcactaattacgggagctcggttatcaacagaagattatactcacacccttgtattaacaaatgttaatattgcttttatgaattggtttaataataatgcaccttctttctctaccctacattctatggctatcctaaaccctcatctactttattttctacatcatcttacaatattttttctcttcatcacaattaattaatactatctcctataacttattcgcggccacacaccactttatctctttcaataactagcggattaaatacctcacaccaacgtactaccaatactttaattacatctcttacaataccattctcatc

SEQ ID NO: 211498 - DNA, 401 bp, Gossypium hirsutum
aacccttgataccctttagctaacccaactcttcttatcaccccaatcctttcccagggcgtgctgtttctcatacaattagccagccccacaactactccctacttctcgccttaatcccagtccttactgcagcaatgtttccaccaactcaagcaattgtatcctcaacacctttaccaagccatcttccactttatcctccaatccatccttcaacatcaacctcaaaactgtcaactcactttgcttttttctatccacatatcgcaacaacttacagcaaatttccgccttcaacaaccgactccatgcccctacccttcttcccactgtgttccccactaaaaaaactattttctttattaaaccccttgcctactatctattttaataattta

SEQ ID NO: 211499 - DNA, 221 bp, Gossypium hirsutum
  unsure (1)..(221): unsure at all n locations
gtacgtaagctttgatcctctataatttacccactccttttcattacccctatcctataccagggcgcgtattttcttattcatcaacgcacccccacaaccacnccctactgctctcctcaatgccaatcgatgcggcaacagtgttgtcatcagctcacgcaggtggagccgcaacaccagtaccaggccatcttaggctttgtcctccactccatcct

SEQ ID NO: 211500 - DNA, 374 bp, Gossypium hirsutum
  unsure (1)..(374): unsure at all n locations
cgggcgcgtacgtaaacttggatcctttttagtctacccattctttcttccaccaccattccttccccaactgtnncggtctgtatcataacctccctccacaccggacacgcccctatccaaatccaggggcgtaacatggcatcaaaacgtatcctcaaggaattaaaggacctgcaaaaggaccctccaacgtcatgcattgctggtcctgctggtgaggatatgttccactggcaggcaaccatcatgggtcctcctgatagtccatatgctggaggtgttttcttaatgaacattcattttcccccggactaccctttcaagcctccaaaggtatcttttaagacgaatgtctttcatccaaacatcaa

SEQ ID NO: 211501 - DNA, 219 bp, Gossypium hirsutum
tacaagagaaatttatccttacccacttttacaaaattttaatggtaagtttatacgctcctctcatggcataaaacgaattttttagaatccacatttgattgatattcttaccagtctaaccatctatactgatcctcatagaagaaaatatttattggtaaactatcaaataataccttcccctcgtatgttttggaggccagaaatttacttttt

SEQ ID NO: 211502 - DNA, 333 bp, Gossypium hirsutum
cccgaccgcacgcgtgtcgcgaagctaacatgactgaccttttatgatacgtgtgagcgcttcatattaccacagcctgaacggaacgtcgggggatatggtactcgaaaactaaatccttgcctaggattcacgtttttattctgtggcggtatatgatccagtgaatctaccgttccgatttttctgtatacacatttaagcaaaggtctggacgagtttatacatctatccttgtcctgctagaacagatagttattgattatttattcctatattaaatggtcttctatgtattgtggaccataatgtttttttcgcgctctgacctac

SEQ ID NO: 211503 - DNA, 430 bp, Gossypium hirsutum
gctctagcccgggagagcacacattaaaggtactcgatatcgtttctctattctctttatatactagaataacgtattggaggggaggggtttcacaattaaaacgagaaatttatacaaacccattgttagaaaatattgatggtagtttattaggctagactcagggcatataatgaagtattaatattacacatttgatggatatacttaacagtataaccatctatacggatgcttatagaggataatattattgatcatggcatcaaatactggcttctcctgtagggttttcggcgccagaattcacttcttcgctatatggaactatgtgaaatgcatcttcacaacaacgtattgttgctaaactaggtcagagcgtgtatagaacattatcctcctctttatatagaagaccttttaatat

SEQ ID NO: 211504 - DNA, 430 bp, Gossypium hirsutum
agcccagagatttaacgctagcggtattagatatcgtttctctatttccgaactatgatagtagaacgtatccaattcgagcagttggccaattaacaagagaaatttatacaaacccagtattagaaaattttgatggtagttttcgaggctcggctcagggcatagaaggaagtattaggagtccacatttgatggatatacttaacagtataaccatctatacggatgctcatagaggagaatattattggtcagggcatcaaataatggcttctcctgtagggttttcggggccagaattcacttttccgctatatggaactatgggaaatgcagctccacaacaacgtattgttgctcaactaggtcagggcgtgtatagaacattatccgccactttatatagaagaccttttaatatagggat

SEQ ID NO: 211505 - DNA, 346 bp, Gossypium hirsutum
attatacatgaagacattatatgcaaacccagacttagaaaagtttgatggtcgtttgcgatgcttggctcaaggcctataaggaactataatcagtccacatttgatggatatacttaacagaataaccatctataccgatgctcatacaggaaaatattattggtcacggcatcacataatggcttatcctgtagggttttacgcgccagaactcacttttgcgttatatggaactatgtgaaatgcacctccccaacaacatattgttggtcaactaggtcatggcgcttatagaacattatcgtgtcactttatatagaagaccttttaatatttgggataa

SEQ ID NO: 211506 - DNA, 408 bp, Gossypium hirsutum
cgctagcgatattaaatatcgcttctctatttcctaactatgatagtagaacgcatccaattcgtgcagttgggcaattatcatgagaaatttatacaaacccagttttataaaattttgatggtagttttcaaggctcggctcaagtcatataaggaattattatgattccacatttgatggatatacttaacagtataaccatttatacggatgctcatagaggataatattattggtcatgtcatcaaataatggtttcttctgtatggtattaggggccagaattcacttttccgctatttggaactatgggaaatgcagcttcacaacaacttattgttgctcaactaggtcatggcgtgttaagaacattatctgtcactttatataaaagaccttttaata

SEQ ID NO: 211507 - DNA, 375 bp, Gossypium hirsutum
atcccgtgctatttctgggaagaagggaattcattctgcgaaagatcctccggtcatgcacattcaagaccttacaatggcatcagccaagaaagctagggatttcctgccattcctgaatcgtggcaggattccagctattgtggaatatgtcctaagtggtcatcgtttcaagttgctgatcccaaaggaaacttgtagcattgccttttcattttctggtgtcagatgtcctggtcgcgaggagccctactcagatgaagccatagctctgatgagacgaaagatcatgcagagagatgtggcggttgaagttgaaactgttgatagaactggaacatttttgggatctttgtgggaatcaaaaaccaatgt

SEQ ID NO: 211508 - DNA, 273 bp, Gossypium hirsutum
cccacgcgtccgagcatggaagtctccttggtttatcaactcttttgttccaggcccaaggattgatacagaaataacaattgaggacattggatacctgatgagccctccagatagaagctacgatgccatcgggttgatgaaacaattaagtgagcatactgcaactacttatgctgatgctttggaagttttgggaaatgaaactccagaatcaattgtgaagggaagacgctccaacaattccaaaatggacaaagagaaatatcaaat

SEQ ID NO: 211509 - DNA, 371 bp, Gossypium hirsutum
cccacgcgtacgctcggtggtgcatgccctgcaggtaattcatctgacttcatgaggctagaacttggtgatatggccattcctgccatgcttctagcattagacctctgttttgatcacctaaagactagggaaacggtaagtcttgtaaatttacattcatcgaatgggcacaaactcatattagttgcccttcctggctatgcttctggattaataactagccttgctgtcggcattttgactcactcggactaaccagctctcttttatctagtacctccaacatctgggacctgtgattttcatctcgtggataaggaaggatctagatgtattatgggaaagaacaatgccaaatctcatcgaca

SEQ ID NO: 211510 - DNA, 430 bp, Gossypium hirsutum
ggatgttcctggaggatcaacatacagggaaagcagctttactgaaccagggaaggatattgctgcagtagacagtcctattggacgtttgggattgacgatctgctatgatttgagattcccagaaatttaccagcagttgcggttcaatcatgatgcacaggtcatattggtaccttcagcttttaccccggttactggtcaggcacattgggagattcttcttcgtgctcgcgcaattgagactcagtgttacgtcattgcttccgctcaagctggaaagcacaacgagaaaagagaaagctacggtgacacactaataattgatccatggggcacagtagttggccgattaccagatcgattatcaactggtatcaccgtagctgatatcgatttgtcattgatagattcagtgaggaaaaagatg

SEQ ID NO: 211511 - DNA, 437 bp, Gossypium hirsutum
  unsure (1)..(437): unsure at all n locations
cgcagtaccccattcattacgaaatttagctgctgccactgaaggacgaagcatgctcgtcgtacctgagattcgcaatgtcttggatctcatgcgtaggggtgagaactcgcgtatcgaggatgttgcgagtcctcatcaatcagcattttttggggtagctgatattcatgaccggcataaggatatgcggctcgatgttgattacatgtcattcgaagagttactggctctagaagaacgcattgggaatgtaaacacgggggtgagtgaagaaatgatatcaaaccagttgaaacgaccaaagtactcttgtgtaccaagaactcaattagagacagaaccatgttgtgtttgtcaggaagaatacaaccaccgtgaagatcttggaacactctgatgcggncatgactttcatgctgattgcattaaacaat

SEQ ID NO: 211512 - DNA, 433 bp, Gossypium hirsutum
ggagttcaaagaagctgctgataagattgatggtcctttgagacaaatcttcgttgagttcttggagaggtcttgtactgctgagttctctggttttctcctctacaaagaacttggaaggaggctgaagaaaaccaatccagttgtggctgagattttctctcttatgtcaagggatgaagccaggcatgccgggtttctgaacaagggtttatccgatttcaatttggcattagaccttggcttcttgacaaaagccaggaagtacacttttttcaagccaaagttcattttctatgccacttatttatctgagaaaattgggtactggagatacattacaatctacaggcatctcaaagaaaacccagagtaccaatgttatcctattttcaagtattttgagaactggtgccaggatgaaaaccgtcac

SEQ ID NO: 211513 - DNA, 223 bp, Gossypium hirsutum
ctcagtttccctacgttcttcattccccttaccaaaccagctcgcctatctatggctactccactaaggagcaacagcaggctgtccactgccatggagaggaccggccagtgggttttctcccaagagattcctactgatgttattgtcgaagttggtgaagccaatttcaatctccacaagttcatgctggtggcaaagagcaattacataaggaagttga

SEQ ID NO: 211514 - DNA, 401 bp, Gossypium hirsutum
cattaatggggatcggtactgcaactgttaaaacacgggcaagagatgctgcgctaaatgctatccagtcacctttgttagatcttggtatagaaagggctaccggaattgtttggaacataactggtggaagtgatttaaccttgtttgaggttaatactgcagctgaggttatatatgatcttgtggatccaactgccaatttaatatttggagcagtgatcgatccgtcaattagtggccaagtaagtataaccctaattgcaacaggatttaaacgtcaagaagaaaccgtaggaaggcaccttcaggcaggtcagctagcacagggagataccggtcttggaatcaatcagcgaccttctttcaacgaaggcagttcatttgacatcccggagttc

SEQ ID NO: 211515 - DNA, 381 bp, Gossypium hirsutum
tcggcctctcttaccatctttggcaccgactcttgtgcagctgctattgaagctgccaggaagttccacaggttgatacatcctgttattcatcctgctgatacacagtctgtcaccttttctattagctttcctggtaggtcgcatggtgcgactactggagcccttgatgagccctgccatgcacccttccagcctgcattgcccccagttactccctgggtttctggcttcatacatggtagcatacatgctattatgaatgggatgatggctgggatgtttgctgatccatttgaagaaccaggtcaagattacagtgcaacatacaatgcttcagaagatcttgtgtcagctttgcattatgcttgataccattct

SEQ ID NO: 211516 - DNA, 332 bp, Gossypium hirsutum
agcagatgcttgttcaaagtggcagccctgtccctcctgagctggcaaagcatgaagcttctaagtttaaaccaggaacaattcctgatagacctcctaggcgcaatgacactgtttttgctcactgagagtttttattgacatgtgaaaattcaagcccccaatttgcttagctgtagtatggtattgtagttgccaatatattgatcattgctgctcacaagtaattgcactggcattccaattgtaaaatttgaacttggtatttgtcaactttactttaaagtgctgcagcagtacttggtaataggaaagatgttgaacttttttga

SEQ ID NO: 211517 - DNA, 404 bp, Gossypium hirsutum
cccacgcgtccggattgctgctatatcgccattctcccatcggctagcgtttgacaagttgcctgtggaaatccaacatttacgttgtaaagtaaacttcgaagctttagcttttgttcctcggataagattaattggagagacccttgttaatcgactccgtgatccttctgggaagcttcaagcatcaggcactgaggttctacgagagagaacagatgatacagagaaagagagagctggaaagtttgttgtattacatcttcgctttgacaaagacatggctgctcattcaacttgcgattttggtggaggcaaagctgagaaactggccctagctaaatatcgccaagttttatggcagggaagggttttaaactcttcattcactgatcatgagctga

SEQ ID NO: 211518 - DNA, 363 bp, Gossypium hirsutum
  unsure (1)..(363): unsure at all n locations
cccacgcgtccgtatggctaggctcttcctcaacacttgttgaacatcaatgaaattgaaagcaaacttgattgatactttgaaaacttgatggacaaatgaagggctctcccaaaatttttatttatccacctcctattttgaaaataggttgttgaacttaaaaattcttcattgaataaggaaactcattttagagaaaaaaaaaaaaaaaaaaaaaaaaaaaaaaaaaaaaaaaaaaaaaaaaaaaaaaaaaaaaaaaaaaaaaaaaaaaaaaaaaaaaaaataataaaaattcaaaattaaaaaaanattttattaaaaaaaataaaaggggtgggggttttaattaaaaaaatttaa

SEQ ID NO: 211519 - DNA, 195 bp, Gossypium hirsutum
aatgcaactgaaagaagattcagtagttggataggagggattatattggcatctcttaggttcattccaacaaatgtggctctccaagtcacagtatgaagaacatggagcttcatatatacaaagaaaatgcccttaatatgaggatgacaggcttttgcatttatcctcattggtcaagatctttttcagatc

SEQ ID NO: 211520 - DNA, 418 bp, Gossypium hirsutum
caaaaacaaaaaatctgaaaaaaaatcctaacagcgacaacataaactagtgtttctgtttttctcaaaaagaacattggttttttttcctaacctgttgttcctgtttctaagatctcattaaagttatggtttttgtatagtttgtctttttcttaagagctaaaagattttggacggctaagatggaccgggaaggaggatcccacggcggatcttgttactacactattctcgggattcgcaaggacgcctccttctccgatatccgtactgcttaccgtaagcttgctctgaaatggcacccggacagatacgtcacaaatccggcggtagccggcgaagcgaaactcaagtttcagcaaatccaaaaagcttattccgttctctcaaacgggtccaagagatcaatgtatga

SEQ ID NO: 211521 - DNA, 345 bp, Gossypium hirsutum
cccacgcgtccgctactttcaattcttcattccttctgtcattttgggttttactccttttttttgtgaaatcagggaaatggatcttgatctttctccaaagctggcaaagaaagtgtacggtgacgatggtggaagctactacgcatggtgccccaatgaactccctatgttgcgtcaaggcaacattggtgcagccagttgctgcaccggttgctaagtctccaacagtgcaatctccgtcatccgtagcagtacgtgtttccctcaaagaattccattattaggagtattggtgtctaatcttcatcactttatgacgataatcatctgcctacacccagt

SEQ ID NO: 211522 - DNA, 355 bp, Gossypium hirsutum
cgtcaggcgtacattgatggagcatatgaagttttttgtggaacatcctgaagagatcagcaaacttgccaaagtgaaggcccaagtttctgaagtcaatggtgttatgatggaaaatattgacaaggtcacttgaccgaggtgagaagattgagttgctggtggataaaactgagaaccttcgttcacacgttactcttattcaaactgcatttcattggttgcatttcggggaaagtgtttccttaccaaacttgggttcttttttttctttttcaaaatgatttaattttcctcaatgtaaaattccaattatacctcttatgctgatgcactgtatgatgcattttaagtg

SEQ ID NO: 211523 - DNA, 432 bp, Gossypium hirsutum
gtccaaattgaaggagcatatgaagtattttgtggaacatcctgaagagatcagcaaacttgccaaagtgaaggcccaagtttctgaagtcaagggtgttatgatggaaaatattgagaaggtacttgaccgtggtgagaagattgagttgctggtggataaaactgaaaaccttcgttcacaggttactcttattcaaactgcatttcataggttgcatttcggggaaattgtttccttaccaaacttggtttcttttttttctttttcaaaatgatttaattttcctcaatgtaaaattccaattatacctcttatgctgttgcactgtatgatgcattttaagtggatgtacaatgatgctgcattccagcacaagattttaggcagcagggaactaagataaaaagaaagatgtggattgagaacatg

SEQ ID NO: 211524 - DNA, 296 bp, Gossypium hirsutum
ccaatgcaacagggtggaatgatctccattgaagccacaatgacacccttcactctcatagtgagtttccctgctggtgcaagcaaaggaaaagccaaaggaagcctctatctcgacaatgacgaactcccagaaatgaaacttggaaacgggtattcaacttatgtggagttatatgcaaccctgcaccacggaatcgtgaacgttcggtctgaagtttatgaaagcaagtttgcttttaacgaaggctcgatcattgaaaaaggtacttgggtgggggtttgacgaaggaaaaa

SEQ ID NO: 211525 - DNA, 431 bp, Gossypium hirsutum
cccacgcgtccgcccacgcgtccgctggtttgaaggtggatggaatggatgcttttgctgtgaagcaagcttgcacgtttgccaaagaacatgctttgaagaatggaccaattattcttgaaatggacacttataggtatcatggtcattccatgtctgatcctggaagcacctatcgaacccgtgatgagattactggtgttagacaggagcgtgatccggttgaaagaattaggaagctgatattgtctcatgacctagctactgagaaagagttgaaggacattgagaaggaaataagaaaagaggtagatgacgcaattgctcaagctaaggaaaatccactgcctgaatcttctgagctcttcacaaatgtgtacgcaaaaggttggggtgttgagtcatttggagcagataggaaagatgtaaga

SEQ ID NO: 211526 - DNA, 432 bp, Gossypium hirsutum
agaaagcattggagcaactgaaggtgacagaaaacaagacagctgctgttgggcaaaagatggacttggtcttctactcgttgcagataggctttttctatatggattttgatcttatttctaagagtattgatacagcgaaaaacttgttcgagaaaggaggtgactgggagagaaagaaccgtttgaaggtgtatgaaggcttgtattgcatgtccactagaaattttaagaaggctgccaatctatttttggattccatttctaccttcacaacttacgaacttttcccttatgacacattcatatgttacactgtgcttacaagcatcatatcattggatagagtttctctgaaacaaaagggtggtgatgctcctgaaatcttgactgtgattggaaaaattccacatctttccgaaatttttaaat

SEQ ID NO: 211527 - DNA, 440 bp, Gossypium hirsutum
cccacgcgtccgctttcgaggacaactaatgatcttgctgatattcgaggttcggtggaatcactaaacaagaaattagagaaggaaaggaattctctcgaaaagactcgagacaggctaagtcagaattctttgaagatatcgtcgctcgaagaagagttaactcaaacaagactgaaactgcaagtagcaaaagaggctgaaatcaaaactggggttgataatcctttggatatatcaagggaacttcaaagactaagttccgaagctgaacaattcaagaaaataggacaagcagcgaaatcggaggtttcaagagcagtatccgagattgaacagactaaaacgagaataaaaacgactgagatgaggatacttgctgctaagaaaatgaaggaagctgcccgagctgctgaatctttggctcttgctgagataaa

SEQ ID NO: 211528 - DNA, 229 bp, Gossypium hirsutum
cagagctagaatgttttcaagcattacattagcaggagcacttagcagcatcacacagaataaatggtctctgggaggaagtccagaaacagaaggagcttgaacaaaccttacaaagacgctacgggaatctcatgtctgagttggaaaggatgcaaagacttatgaatgtatatagagcacaagcagaaaagcaagaagaggtaggtgaaaaagaatcatgctcttg

SEQ ID NO: 211529 - DNA, 330 bp, Gossypium hirsutum
tccatttattgggtgtttggactttggattctctgatgtagcatgcaatagcttatgtggatgaagaaaagtactatggagcaaaggcaaccattaacgtttgggaacccaaaatacaacagcctaatgagttcagcttgtcccaaatctggatcttgggtggttcttttggtgaagatctcaatagcattgaagcaggctggcaggttagcccagatttatatggtgacaaccacactagactcttcacttattggactagtgatgcataataagccactggttgctataatctactttgctcaggcttcattcaaaataacaattaaa

SEQ ID NO: 211530 - DNA, 299 bp, Gossypium hirsutum
  unsure (1)..(299): unsure at all n locations
ggctaacaagatcttagaggatgatcatgtttaagccattaaagaggaaaataacaaagttggtgacctttaagaagagctagacatttatggacgggttcatggatagcctagcagaaatggcattgttgagtactgtggtgagcgcttatctcgtnttgctttcactgataacggattggagcactattatgggtctcgatctgtcaagacaccaatcatatactgagatcagagcctccccaaatcaaaaactgttttctggtcctctacttgccaaagcattacttatcccccaa

SEQ ID NO: 211531 - DNA, 413 bp, Gossypium hirsutum
catgatataaccaccaaagacagcaaacagtttaatgttaatgttttgggatgcaaaaacattactttcgagcatttcaccgtcactaaccccgagcatagcttaaacaccgatggaattcacatcgggcgatcagatggagtcactattctgcactcggagataaaaacgggggacgattgtgtttctttgggtgatggttctaagaatgtggtcgtcaatggaattagctgcggtcctggtcatggtattagtatcggcagtctcggaaagttccaaggtgaagaaccggttgccggaattaaaatcgcgaactgcaccatcactaatactatgaatggtgttagaatcaaaagttggccagcctcttatcccggcacagcatcggatatgcattttgaagatataacgat

SEQ ID NO: 211532 - DNA, 287 bp, Gossypium hirsutum
ggctaccacgatcttggacgatgatcatgtttaagccattaaagaggaaaataagaacgttggtgaccttataagaagagctagacatttatggacgggttcatggatagcctagcagaaatgatatggttgagtactgtcgtgagcgctgatctcgatttgcttcacactgataacggactggatgcaatattatggttctcgatctgtcaagacaccaatcatatactgagatcatagcctcaccaaatcaatgactgtaatctggtcatctacttgccaaagca

SEQ ID NO: 211533 - DNA, 398 bp, Gossypium hirsutum
atcttttcaaagcaaaaaaaaagaaaaagaaacaaaagcaaagagataattaagagaggaattcgaggaagaagaagggttttttttttcaaaaaaaattgctttttttctcttttgtgtgaagaagctggagctatcaaagatgatgcagattgagcagcaacaacagcagccccagcaacaacaaaaccagttaatggttcaaaactctgggagtttaagctttagcagtcacttgtctaaagaagatgaagagatctctaaatcagctctttctacttttagagctaaagaagaagagattgaaaggaagaagatggaagttagagaaaaagttcagcttcagttaggtcgtgttgaagaagaaactaaacgtctggctgtgattcgtgaggagc

SEQ ID NO: 211534 - DNA, 359 bp, Gossypium hirsutum
caatgaccgtgcaagatatcgacaaccagatagcacagctcaaagcacatcgagccgagctcacgaaactgatagacaagaagaaaagagacaaggatgaattgacatataaccaaaagttggtggcaaactcgataccgaaagtggtgcatgaggttcagctggctaatgctaaaaaaccagaatgggaggtaaagaaggaaaatgcattaaagcgtgaaggtgaaatactagctaaatttgctcctttaaaaggggtttccctttgaaagaaaatatgtggtatcatatcattggctggtgggaatattttgaacaccataaggatgggactagttttaaatttatttaatggtaat

SEQ ID NO: 211535 - DNA, 432 bp, Gossypium hirsutum
cccacgcgtccggagcacttatgtgtactaaaagaccgcaacaagccgattctgtttaccatggcaaggttggaccgagtgaagaacttaactgggctcgtagagttctatgccaagaacagccggctgagggaactggttaacttggttgtagtaggtggagataggagaaaggaatccaaggacttagaagaaaaggctgaaatgaagaagatgtatgaacttatcgaaaaatacaagttgaatggacaattcagatggatatcgtcccagatgaaccgagtgagaaatggtgaactctatcgttatatttgcgacaccaagggagcattcgttcagcctcctatatacgaggctttttggcttgactgttgttgaggcaatgacctgtggactaccaacatttgcaacatgttaccgggggccctgctg

SEQ ID NO: 211536 - DNA, 414 bp, Gossypium hirsutum
cggacgcgtgggttttgtttggtctcatttccgggactgttttcctcttatgtactggtttcttcttccatttatacggatgggaatttctacatgaggcattgctctaccatcttactcgcacggatgcaagacataatttttccatctatttctaccatatctatcttaactatgaacgtgagctttcggttcttgaaaagctcgtctcctttttgcctcagtttatagtgcagctagtcctcattttatgtttcgcaaaggatcttgtattctgcttctttgtacagacagtggcatttgtagcattcaataaggtaatcacagcacagtacttcgtctggatcttttgtgtcttgcctcttattttgccatggagcaatatgaagcttaaatggaaaggcctatgttgca

SEQ ID NO: 211537 - DNA, 339 bp, Gossypium hirsutum
cttccaaaggatctgtttgaagctttggggttttgctttcgagtctttaaagaaggggggaaatggctagaagtaatgaagtcaacctcaatgaatgcaagagtttcttgatcgcagagtccctgctaatgctaacccagttgatggggtcttctcgttcgatgttctcattgatcgaggtacgagcctactgagtcggatttatacgccaactacagctgaagagcctcaaccgaatattgctgaactcgagaaacctgttacagcggccgtggtccctgttattattttctttcatggtggaagctttgcacattcctcagcttatagtgctatata

SEQ ID NO: 211538 - DNA, 400 bp, Gossypium hirsutum
gtttcgatatttgtattaagaatcgccctttagtgatcagtgaggtgaagaaaaatgtcttgctgtggtggaaactgcggttgcggctccggttgcaagtgcggcagcggctgcggcggttgcaagatgtaccctgagatgaactttgctgagcaaaccacaaccgggacacttgttcttggcgtggcaccccggaaagtgcactttgatggagctgaaatggaaactggggctgaaaatggctgcaaatgtggagataactgcacttgcaacccttgcaattgtaaatgagaaaaaaaagctaagcatattatggaagctgatctaaataatatatgatgtatttgggtttttactattagaataaagcagctatggttcattaggtgttttgcttctt

SEQ ID NO: 211539 - DNA, 426 bp, Gossypium hirsutum
ttacctattagtagcgataatctcgaagcttgcttttccgttttagatctcaaaatgcaaaaagctctctttttcatctcatggctgctactattgtctccgtcaaagctaggcagatcttcgacagccgtggaaatcctacggttgaggttgatgtggaaatatcgaacggcataaaggctagggccgcagttcctagcggtgcatccactggaatttacgaggctcttgagttgagagatggaggttccgattacctcggtaaaggtgtatcgaaggctgttgctaatgttaacacaatcatcggccctgcattgattggaaaggacccaaccgagcagactgcaattgacaatttcatggttcaacaactggatggaacccaaaatgagtggggttggtgcaaacaaaagctcggtgcaaatg

SEQ ID NO: 211540 - DNA, 225 bp, Gossypium hirsutum
gagaaatgaggcttgtttttggatcaatatattcaagtggctctgttgcatatgcaccacaggttccatggatcttatctggaacaatacgtggcaatatattgtttggaaagaatctagattcccaaaggtacgcagatgttttagaggcatgtgctctacatgttgatatttcattgatggctggacatgacttggcttatattggagagaaaggaactaatt

SEQ ID NO: 211541 - DNA, 234 bp, Gossypium hirsutum
ctttaatagctgcgagattaccgggaagaactgacaacgagatcaagaactactggaacacgcacatcaaaaggaagcttataagcagaggaatcgatccacaaactcatggtccactcaatcaacccaccaacaccaataaatccactgaattggatttcaggaacgtacccaaagcttcaaaatccaactttgctccaaacccatctcgggatttcaatttcaatgaatttc

SEQ ID NO: 211542 - DNA, 358 bp, Gossypium hirsutum
gcagggttccctggcacgttgaaggtgcaatttcattttcgtatttttcagtgtttagttatgtactgttatattccttttctgacatggagacacatctgaggcatatttcaggtggcaaacttctgttagagctcaaccgagtcctccgacctggtgggtacttcatttggtctgctactccagtttaccagaagcttcctgaagatgttggcatttggcaagagatgtctcgactaacaaaatcgatgtgctgggatctggtgactgtcaaaaaggacagattgaatgcttgtggagctgcaatatatcaaaagccagctttcaacgactgctactacaaaaagtctaaaaatgc

SEQ ID NO: 211543 - DNA, 307 bp, Gossypium hirsutum
atcttttggtcaccaacccaaagagggttgcgaaggctattgccgaaaaaacttgtaatgcccttcttctcaaggtcaatcaaattggatctgctaccgaaagtatcgaagctgtgaaaatgtccaagcaagctggatggggtagtgatggccacccaccgcagtggtgaaacggaggatacttctattgctgatctttcagtcggattggccacgggccaaattaaaaccggagctccatgcaggtctgagcgtttagccaagtacaatcagcttctgcaaattgaggaggaccttgttgcggaag

SEQ ID NO: 211544 - DNA, 423 bp, Gossypium hirsutum
tcgagaaaatgcaagatgttgcaacggggaaaccatccaccccgttcgaccatggtgctggacatgtggatcccgtttcagcgcttaatccaaggcttgtgtatgattcgacagcggaagattatctgggtttcctttgtgccttgaactacacagagttccaaatcagatccctggcgagaagaaacttctcatgtgatgctagcaagagatacagagtcactgatctcaactacccttcctttgctgtcaattttgattcggtcataggtgggtcgaatgttgttaaacacacccgtactctcaccaatgtgggctcgccaggaacttacaaggtatcggtatcaccttgaactccatgagttgagatatcagttgaaccacaaactttgagttttagcccagcaaatgagatgaaatcat

SEQ ID NO: 211545 - DNA, 362 bp, Gossypium hirsutum
aacagccgcacgccagcctagcgtttccataaggaagaaatggcggtccctttgctgtcgaagaagattgtgaagaagcgtgttaagaagttcaagaggccccaaagtgatcgcaagatctccgtcaagacaaactggcgaaggcccaagggtattgactcccgtgttaggaggaagttcaagggatgcactttgatgcccaacatcgggtatgggtcagacaaaaaaacagcccactttcttcccgatggattaaaaaaattcggggggcccaatgtccaaaagctaaagcttttattgatgcacaccaggccttcctgggctgaaatagcccatgatgtttcaccgaaaaaaaggaagga

SEQ ID NO: 211546 - DNA, 236 bp, Gossypium hirsutum
cccacgcgtccgcccacgcgtccgttctcaaacaacccaaggtgtttttaagctctaaaaaaactgggaatggaaagagacctgtaaagggcgggaatcgcttctggaaaagcattgggttaggctttaagacacccagagaggccattgaaggaacatatattgattagaaatgcccatttactggcactgtttctattaaaggccgtattcttgccggtacttgtcatactgca

SEQ ID NO: 211547 - DNA, 346 bp, Gossypium hirsutum
  unsure (1)..(346): unsure at all n locations
aacacgcgtacgcccacgtatcctttacatttcacccatctgatgatgaagttgttgccgcatgttcatgccaagaggattgcattgaagttacagatgcttctatgagagcgcaatttctcatatccctctccctggcaaggccgaatggtcttggtactatgtgctgatgcaaatcaagggatgcactttgattgccagcctttgttatgggtcagacaagagaacacgcctctatcttccctatggatgttagaaattcaaggtgcacaatgtccacgagctacagctattcatgatgcacaacacgacatactgngctgagatagcacatgatgtttcaacg

SEQ ID NO: 211548 - DNA, 379 bp, Gossypium hirsutum
  unsure (1)..(379): unsure at all n locations
gctcgattaccggaatgcttcctttgttataccccttcacctgaggctggacctgtatcaccaactcctgctcttgccaatggttttattacatttggcagctttaataatctggccaagataacacccaaggtatgcaagtttgggcaaggtattatgtgctgttccaaattcccgtctcgtggtaaaatgcaagccattttgttgtgacagtgttcggcagaaatttctatcaacattagagcagctcggtttagaatcgcttcgtgtcgatcttctccctctaattcttcttaaccacgaccatatgcaagcttattctcttatggatattaggttggacacatttncgtatgctggaacaacgacaacatgtgaa

SEQ ID NO: 211549 - DNA, 356 bp, Gossypium hirsutum
ggcagaaattctttgaactccctgtggaggagaaagagaagtatgccaacgaccagagctctgggaatgttcagggctatggtagcaagcttgctaataatgctagtgggcagcttgagtgggaggactacttcttcatctaatttttcctgagataagagagacttgtcaatttggcctaaaatccccagcgagtacactgaagttacaagtgagtatgcaaggcaactgcgagccctagcgagcaaaatactttcagcactatcaatttgcttgggattagaagaaggaaggctagagaaggaagttggtggcgtggaagagcttcttcttcaattgaaaatcaattactaccc

SEQ ID NO: 211550 - DNA, 238 bp, Gossypium hirsutum
cgcagaaccccaatcattacgaaatttagctgctgccactgaaggaagaagcatgctccacgtacctgaaattcgcaatgtcttggatctcatgcgtacgggtgagaacttgcgtttcgaggatgttagcgatcctccactatcaacatttttcgcgtagctgatattcatgagcggcatagggatatgctgctcgatgttcattacatgtcatacgaagagttactggctctagaag

SEQ ID NO: 211551 - DNA, 359 bp, Gossypium hirsutum
cccacgcgtccggtctcatcgctgagaagaactgtgctccactcatgctccgtttagcgtggcactcagctggaacttttgatgttaagaccaagaccggaggtccattcggaaccatgaagcatcctgctgagctcgcacatgctgctaacaacggcctagatatcgccgtcagacttctcgagccgatcaaggagcagttccctaacctcacctacgctgacttctatcagcttgctggtgtcgttgccgttgagattactggtggacctgaaattcccttcatcccggagagaggacagctcaccccctctgagggccgcttctgatgctacaggtctgatcactgagcagtgtta

SEQ ID NO: 211552 - DNA, 281 bp, Gossypium hirsutum
gcaactcctgttactacaaggatgggggcattgatcatcctcataagttaacgaatcatgcatccttggctgaacgtgatgcacaaaataaagaggcaaggcaactaccggttgtgcagctgatgaaaatcttgaccttttggttcagcatcacaatgtcgttctgcacatagccaatacccaaattgtcggaaagtgaaggggctcttccgtcatggaatacaatgcacaaaacgagctcctggtggtagtgtactttgcaagaaaatgtggtatctact

SEQ ID NO: 211553 - DNA, 313 bp, Gossypium hirsutum
gatggtcacatcatgctcacggattttgacttgtcactcagatgtgatgctaatccagtgctgctcaagtccgcttcacccgttgctgagcctgcagagaagatgtcaagtccatgctctcagtccagctgtatagacctttgtgcctcaatccacctttcaagtaccatgcttcactcctaggcttctatcgcttgcttccagatcaaggaagataaaatctgatctagctactcagattagccccatgccacagcttgtactggagccaaccagtgcccggtcaaactcatatgtcggaactcatgaatac

SEQ ID NO: 211554 - DNA, 342 bp, Gossypium hirsutum
  unsure (1)..(342): unsure at all n locations
ggaagatgtagatttgttggcaaatttcaattttgattcttatcggttctcaatttcatggtcaaggatctttccagagggtgttggaagagtaaattgggagggagttattattacaacaggttgatcaattacttggttaagaaaggtattactccgtatgggaacttgtaccattatgatctccctcaagctcttcangagaagtacaatgggttcttgaaccgtcaaattgtggaaaattatgctgattatgcaaagttttgtttcaaaacattgggggataaagtcaaaaactggtttacattcaatgaacccagaatcggggttgtttttggtttt

SEQ ID NO: 211555 - DNA, 273 bp, Gossypium hirsutum
tataaacaaaactcctataatggctacatcctcgggttcatcagcaacacaaatcaactcaggctcagaagaagcattaatggacgaaaggaaaaggaaacgaatgatatcgaacagggaatcagcaaggagatcaaggatgaggaaacaaaagcatttagatgatctaatgactcagttgactcagttgcagaaacaaaaccatgagatcatcacatacataaacttcaccacacaacacctcttgaatgttgagtcagagaactcggtgct

SEQ ID NO: 211556 - DNA, 297 bp, Gossypium hirsutum
cccacgcgtccgcccacgcgtccggggctttcaaagatgtgatcacagagggtgatggaagaacacaatattgacctcaatgagcatcaaatggtcttttttgggtaatgtatgtaatgaatgagggtgggtttgggggcttagtttctagttatggaacatagtttttctatgcttttaaaaacaaccaattaggttttcagtttggtcttatgcaagtcttgtaggtctttagtctagtaatggtatgtaatgggcgaatctaaacttgtttttggtagaatgatgaatgctttc

SEQ ID NO: 211557 - DNA, 243 bp, Gossypium hirsutum
tgctgaacgaattataagtcgactccaatctgaacttgccacatcaatggctgtagctgcggctgccgagttgccttgcacggtgaagcttaaagtgtggtcgtatgatataaaaaatccttgtgcactactaaatgttggcaaatgccgcttaaccataccacatgctgtcctttgtagtgaaatgggtgcacatttttcaccttgtgggaaatttttagctgcttgtgttgcttgtgtgct

SEQ ID NO: 211558 - DNA, 258 bp, Gossypium hirsutum
aactgttacacacagcagcagcagcagcagccatggtgaagtactcaagagaaccggacaaccctactaaatcttgcaaagctaggggttctgaccttcgtgttcattttaagaatacacgagaaactgcctttgcaatccgaaagctacctttgacaaaggcaaaaaggtacttggaagatgttattgcccacaagcaagcaattccattcaggcgcttctgtggtggagttgggcgaaccgcacatgctaagaatc

SEQ ID NO: 211559 - DNA, 364 bp, Gossypium hirsutum
cgctggcatacatagtcagatagtaaaagacgaagtgtttaatgacttttttcagttgtggcctgagaaatttcgaaataaaacaaatggggtcacaccaagaagatggatccgtttctgcaatccagagttgaagaaattataacgagctgacaggctcagaagactgggttttaaatactgaaaagttgtctgaacttagaaagtttgcagataacgaggatcttcagatccaatggagggccgcaaaaaggagcaacaagttaatttgcatccctcattaaagaaaggacaggctatatagtaagccctgattcaatgttcgacatccaggtgaagcgcatccatgaatacaagcgtcagc

SEQ ID NO: 211560 - DNA, 367 bp, Gossypium hirsutum
gtgttttgtccaaacaaacgcaagatttgtagattcatttcacttgtctctcagcctccgtctcaatggctttgccaaaccagcaaactgtacattatccgagcttcaagctcgttatcgtgggcgatggaggaatggaaaaactaccttctgaagaggcatctaactggagagttcgaaaagaaatacgagccaaccattggtgtggaggttcatcccttggacttcttcactaactgtggccaaatacgattctactgctgggatactgctggacaggagaagttcggtggtctcagagatggttactacattcatgggcaatgctccagaattatgtttgatgtaactgcccggttgacataca

SEQ ID NO: 211561 - DNA, 372 bp, Gossypium hirsutum
cccacgcgtccgcaactgcttactatcgtggagccatgggcatcttgctggtctatgatgtcacggatgaatcctcgttcaacaatattaggaattggattcgcaacattgaacagcatgcatcagataatttaacaagatattggtggaaacaaggcagacatggatgaaagcaaaagggctgtgccaacctcaaagggacaagctcttgcggacgagtatggaatcaaatttttcgaaacaagtgcaaaaactaacctaaatgtggaggaagttttcttttcaatagcaagggacataaagcaaagactcgtcgatactgacttaaaggctgagccttcaacaattaagatcaataaacctgaccaggca

SEQ ID NO: 211562 - DNA, 414 bp, Gossypium hirsutum
gtttggggctgctgatatttggtttttctatttcatcccatgctttggctgacatggtaatgctggcagtatgggaaagaagggaagttggttttctgcaattaaaaaaattttctttccacactccaaggaaagctaaataatgtccatctacatctgatggaactgattccactctttcaaaccccctgtgcgaggagtctgctcaaaattcttcaaaatactctaacagacagaagtttgcttttattttcactttggacattaactgtattgttaatgatgctgacaattctagctggcttttcaattgtcagcatacatccaccacctgcctttggctcatcgcctaatcttgaagcccttgcacttgaagcaaataagtctaaggatcaaaatggagatagttcttta

SEQ ID NO: 211563 - DNA, 233 bp, Gossypium hirsutum
tgaatgacctccttgatgcgttggacttcaatcaagttgttatctttgtcaaaagtgtgagccgagcagctgagttgaacaagttacttgtggagtgcaattttccttccatatgcatccactctggcatgtctcaagaagaaaggttaactcgctacaagggtttcaaggaggggcataaaagaattcttgtggcaaccgatttggttggaaggggaatcgacattgaacga

SEQ ID NO: 211564 - DNA, 420 bp, Gossypium hirsutum
  unsure (1)..(420): unsure at all n locations
ttcctagatcatggcacagctcctgcactctcgatgggctaaacctgttggttcttgggggtgggccgattcaagagtactgcttagtgatactttcctgcttgatctttcaatggaaaaacctgtgtggagaagatacctgtagcatggccccaccttcacgcttgggtcacacactgtcagtatatggtggtaggaaaatattgatgtttgggggtcttgctaagagtggtccactccggttccgttccagtgatgtattcacaatggatttaagtgaagaggaaccatgttggagatgtgtaactgggagtggaatgcctggtgctggaaatccaggtggcatagctccccctccaagacttgatcatgtngccgtgagccttcctggtggaagaatcctcatctttggtgggtctg

SEQ ID NO: 211565 - DNA, 422 bp, Gossypium hirsutum
  unsure (1)..(422): unsure at all n locations
cccacgcgtccgcccacgcgtccgctctaatgccagtggcaacatttttcatgggtgtaatgtgtggcactgataaaccaaggtgcgatgtgttcttaaacatggtgctggtcagcgttggagttgtcgtttctcacatggggaaattcatttaatatagttggcacagtttatcaggtcacgggcatcctagctgaagctttgaggctggtcttaactcaagtcctactgcaaaagaagggcttgactctaaatccaatcaccagcttatactacatcgcaccctgcagttttgtgtttcttttttgtgcctgggtgtttactggagaaagcctgngatggaagtttcacagatacaattcaatttctggatctttttctccaatgctctttgtgctttagctctgaacttgtctatattc

SEQ ID NO: 211566 - DNA, 261 bp, Gossypium hirsutum
cccacgcgtccgcacactttattaagcaataaaaagaaagctataatggcaatcccattgtcctttctactgcttttccctctcttggctcccacatttgttttctcctcaccagttcaggaccccgagcaagtagtccaacaagtcaatgagagcataagaaatgctactatggcgaggaggagcttggggtttctctcatgtggaaccggcaatcccatcgatgattgctggcggtgcgaccatcattgggagaaaaac

SEQ ID NO: 211567 - DNA, 302 bp, Gossypium hirsutum
gttgtcgatcgtggccttgatgatcatatttatatatactacactgaccatgggggtcctggtgtgcttgggatgcctaccttcccttatctttatgctgatgactcgattgatgttttaaagaaaaagcatgctcggggacttataaaagctggtattctatcttgaagcttgtgagtcaagttgtatctttgagggtcttcttccttaggggttgaatatctatgcaaccacaacatcaaatgcggaagagagtaactggggaacctattgtccccgagagtacccaagtcctcccccat

SEQ ID NO: 211568 - DNA, 325 bp, Gossypium hirsutum
  unsure (1)..(325): unsure at all n locations
cccacgcgtccgcttttcaatcttttctttcgtttcaaatcttggaaatcaaaattcctatggcaccaaaggccgagaagaagcctgctgagaaaaaaccagcggaagacaaaaaagccgagaaggcaccaaccgaaaaaagcccagagccgaaagaagctccccaaggaagccggcgacaagaagaagaagcgaccaaagaagagcgtcgaaacctacaagatctacatctttaaggttctgaagcaagtgcaccctgatatcgggatttcgagcaaggccatggggattatgaacaagttcaataaatgacatttntcgagaa

SEQ ID NO: 211569 - DNA, 304 bp, Gossypium hirsutum
cccacgcgtccgcccacgcgtccgcccacgcgtccggaattatctgggttacgatgaaagtaatttggatgctgatgttttaaaacaacttgctgaggtagttgataaagcagagatgacaccagctgatatagtgaagttttgatcagaaccggcgttgtaagccaaaagctgtcagtgaattgctagaagccttgaagacaagagcaaacaggaacttgttgcaaaatgggattctgagggagaaaaattcagaagatattatggaagatgaagaacaagagaaagggctttagaagagtct

SEQ ID NO: 211570 - DNA, 219 bp, Gossypium hirsutum
tgagttttgaatctagggatttgcgggtggagaagacgagagctcatctctctgcttcaaagctcctgtccaggtagaattctcttcttcctttgcgttgtgttctttgttgttcagtcgccatggcttcaaagcggattttgaaggaactcaaggatttgcagaaagatccacccacttcttgcagtgctggtccagtagctgaagacatgtttcatt

SEQ ID NO: 211571 - DNA, 298 bp, Gossypium hirsutum
  unsure (1)..(298): unsure at all n locations
gtttctttcaaagttgggtgacctgtatcagactcaaatgtttgcaaagattgagaacatagagggattaaaccattttgatgagattcttcaggaagcagatggtatcattctttcccgtggaaatttgggcttggtctcccacctgagaggtgttcttatttcaaaaagctgctctntataagtgtaacatggctggaaagcctgcagttgtcactcgtgttgtggacagtatgaccgacaacttgaagccaactcgtgctgaggcaactgatgttgccaatgctgttcttgatgg

SEQ ID NO: 211572 - DNA, 400 bp, Gossypium hirsutum
ttggaaatttcgaaataaaacaaatggggtcacaccaagaagatggatccgtttctgcaatccagagttgagtaaaattataacgagctggacaggctcagaagactgggttttaaatactgaaaagttgtctaacttagaaagtttgcgataacgaggatcttcagatccaatggagggccgcaaaaaggagcaacaagttaaaagttgcatccctcattaaagaaaggacaggctatatagtaagccctgattcaatgttcgacatccaggtgaagcgcatccatgaatacaagcgtcagctgctaaatattttgggtattggttaccgttacaagaagatgaaagaaatgagtgcttcagaaagaaagaaaaagttcgttccacgtgtttgtatatt

SEQ ID NO: 211573 - DNA, 247 bp, Gossypium hirsutum
ctatgcccaagagctggtctctgtcggggacaaaacggtatcactgggttacatcattcgtctaactggcgttacccgcgttgggaagggcatggatgctcaagaatggcatgctgcctgtgtcaaatacatacttgtacaatctgatgcagcaactgttgtggaagccatgtcattgtttacggaagatgttgatgctgtggtgcgaacgacttgccactgagatgctactttgatcagctctatt

SEQ ID NO: 211574 - DNA, 214 bp, Gossypium hirsutum
cccacgcgtccggttgtaggtggtgataggcgaaaggaatctaaagatttggaagagaaggctgggatgaagaaaatgtttgagctgatcgacaagtacaacttgaacggccaattcagatggatatcatctcaaatgaacagaatccgaaatggtgaactttaccgatacatttgcgacacgaaaggtgcctttgtacagcctgcattgtatg

SEQ ID NO: 211575 - DNA, 402 bp, Gossypium hirsutum
gaaatactgatgcaaatccacaaaaaaatcagcctggggctcctgggaaaatggaggaggtcaattctattgctgctaagccaacaaccatgactagacctgatgaagcccagggagcacgagctgggcaattagtactggagctaaaggtgctaggaaggtcataggacaggaaagataggttctgggaatgctggtcaaggatacacgtttgaggaggtaaaggttcttttccttattcttatggatctctgtaggcgtacctctggtctaccacacccgttaccagtttctcaggtgggaagcagcagcatccaggtgcggttgcattatattgatggaaattatacggtattgcctgaggtggtagaagcatcccttggcccacatatgcagaacatg

SEQ ID NO: 211576 - DNA, 428 bp, Gossypium hirsutum
tttgaagtgtttcttcctcaactccttttgtatcccaatccatcagacccattgaatggtgaagctgctgctcttatgatgcgtgatcgtactgcttatgaagaaaaagtgaaagaatatcgtgagaaatatgcaaacctgaagatgttgcggagcagaagaagtgaagtcaagtgacgaagaactgagtgaagatgaatatgctgcctcggatgatgaggaaatcgccggaaaaccagatctttaggcagatattatgccctgcatactcgctacgaaaatcatcttgtgttgtacatgatgttcagctccaggaaaattcgaacacaacaaaactggggaacatgtggaaaaatttctatttacccctttttgtcattactttccagggatgtttgtgtaaattaatccactgtgcaataattcaa

SEQ ID NO: 211577 - DNA, 337 bp, Gossypium hirsutum
gtcttgacggtctttcatcccgcacagctgcctactaccagcagggtgctcgtttcgccaaatggcgtaccgttgtgagcattccaaatggtccatctgccttggcagttaaagaagcagcttggggacttgctcgctatgccgccatttctcaagacagtggattggtcccgattgtggagccggaaatcttgcttgatggtgaccatggaattgataggactttcgaagtagcgcagaaggtttgggctgaggttttcttctaccttgctgagaacaatgtaatgtttgagggcatccttcttaagcccagcatggtcactcctggtgctgaatg

SEQ ID NO: 211578 - DNA, 407 bp, Gossypium hirsutum
cccacgcgtccgagacggttgaatgccgtatctgccaggacgaggacaacattaacaatttggagacaccttgttcttgcagtggcagtttgaagtttgctcacaggaaatgtgttcaacgttggtgcaacgagaaaggagacataacgtgtgagatatgtcatcagccttatcaaccaggatatactgtgccaccacctccccctcagccagaggttgctacaattgatatcaggccagtatttacaatcatgcacttacctaaaaatagacatgatgaagatcggtgtcgctcaaactttgcttgctttgtctttcctgtttgtgaggatctatatatgtcggaacctgttcagtgatccgtagggatggattactattgtatgctaatcacctctgacctctta

SEQ ID NO: 211579 - DNA, 361 bp, Gossypium hirsutum
caatttgaagccttcttcgaatttcctcattcaagatgcaaattttcgtcaagaccctcagcggaaagaccattacattggagggggagaggtcttatactattgacaatgtaaaggcccaggattcaggacagggaaggcttccccccaaaccagcaaaggtggatcttcgctggtaagcaacttgaggatggccgcattggctgattacaacatacagaaggagtgcacactccacttagtgcttcgcctccgcggaggaatgcaaatttttgttaagactttgactgggaagaccattacattggaggtagagagttcagataccattgataatgttaaggcaaaaattcacgacaag

SEQ ID NO: 211580 - DNA, 396 bp, Gossypium hirsutum
  unsure (1)..(396): unsure at all n locations
cccacgcgtccgcccacgcgtccgcggacgcgtgggtttattttctctttatttctcttccatttcataaataaactgaatcatcatcatcatcatcatcatagttttgtagtgaaggggaaaagaatgaagcaagagatgagcaatataagcttctgcgatcgacatgtggcaaatccgtgtaaaacattcggacggcggtgcagccggctggtgaaggagcaaagggcgaggttctacattctccggcggtgtgttaccatgcttgtttgctggcatgaatgcggtgaaacttgaagaagcaaacaaaaagaaaaagaactatgntaagaagaaaagatatatagaggaaatagtagacaaaagttgatgtaatatataatatatgtgtagatg

SEQ ID NO: 211581 - DNA, 369 bp, Gossypium hirsutum
ccagattctcgactctgtctcccctatcgctctttttcatcgatcagatctcttcaaacccatcaattcaaacaaccctccactcattccatccatgacgcttggctcaggaggatccagtgttgtggtgcctcggaacttcagattgctggaggagcttgagcgtggagaaaaaggtattggagatggtactgtcagctatggaatggatgacggagatgacatttacatgcgctcttggactggcaccattattggtcctcataatactgtacatgaaggtcgaatctatcagctgaagctgttctgtgataaagattatccaaagaagccaccaagcgtccggtttcattcaagaatcaacatgac

SEQ ID NO: 211582 - DNA, 299 bp, Gossypium hirsutum
cttggaacaaactcaaccattgtgcttcaaaactgcaccatctcgggcgcccctgattacattccaatgaaggatacaaacaaggcatacttggggcgtccctggaaacaattcgcttgggctatcattatgcaatctaaaatcgaccacattattcaaccagagggttatgccccaatgacaggtaccataggaatagacacttcttttattggcgagtttggaaataggggacccggtgctgataccaaccgtatggtagcatggaaaggtgttaaaaagatagatattaatgaagc

SEQ ID NO: 211583 - DNA, 422 bp, Gossypium hirsutum
cggggatcaccaaaactgaagttgggtattcccaagggttcatgcataatccgagttatgaagacgtgtgttcggggactaccaaccacagtgaagtcgtgagggttcagtatgaccctaatgagtgtagctatgacactttgcttcatgtcttttgggctcgccatgatcctactaccctcaaccgccagggtaatgatgtggggacacagtacagatctgggatttacttttacagcccagagcaggagaaggcagcagtggaatccatggaaaaacagcagaaactcctcaacagaaagattgttactgaaattctgccggccaggaaattctatagagcagaggaatatcaccagcagtaccttgcaaagggaggtcgttttggttgtaaacaatctgctgagaaaagatgcaatgat

SEQ ID NO: 211584 - DNA, 411 bp, Gossypium hirsutum
  unsure (1)..(411): unsure at all n locations
cccacgcgtccgcccacgcgtccgcccacgcgtccggtggttatatagatgggaacatcacagtttctggtttccagaagaaacaagaaacatttgctcgaatatctggatactgtgaacaaaatgatattcactctcctcatgtcaccgtgtatgagtccttgctgtattctgcttggcttcgattatctgctgacgttaaagctgaaactagaaagatgttcatcgaggaagtcatggaactcgtggaattgaatccgttaaggcaagcactggttggtttacctggtgtaaatggtttatcaactgagcaacgaanaaggcttacgattgcagtagagcttgtagcanacccttcgatcattttcatggatgagccaacttcanggcttgatgcgagagctgcagcaa

SEQ ID NO: 211585 - DNA, 414 bp, Gossypium hirsutum
cccacgcgtccggggagatcagttagcgtaaggagaagaattcgtgaagaaagcagagaaaaagctaaatggttggggcttgtttagttctaaatatgaagacgccgccgatttatttgataaagctgctaattgcttcaagcttgccaaatcatgggacaaagctggatcaacttatgtaaagttggcgaattgccatttgaaatcagacagcaagcatgaaacagctcaagcttatgttgatgctgctcattgttataagaaaacagctacaaaggaggctatatcttgcttgcagcaagcagagaacttgttttgtgatattggaaggctaagcatggctgcaaggtattataaggaaattgctgaattatacgagtctgaacagaacattgagcaggccatggattattt

SEQ ID NO: 211586 - DNA, 393 bp, Gossypium hirsutum
  unsure (1)..(393): unsure at all n locations
tgaaggacaattttgacatgggagaacctgatacatgcaatcctgctggaagtggcttgccaagtgaggaggcttcggttaagacagcaaagaaaattcataatcagaaattcgctgagctctcaggaaatgacatatttaagggtgatgttcctccaggttctgctgagaaaccactcagtgctgcaaaactgcgggagatgagtggcagtaacatcttcgctgatgggaaggtagagtctcgagactactttggtggtgttcgcaaaccccctggcggcgaaagcagcattgctttggtttaacttcttagctttctctaaccctgtcaaattgcttcagctgtgtctggtgtttgtctttagntgggggtgtgattgtattatgaacttt

SEQ ID NO: 211587 - DNA, 403 bp, Gossypium hirsutum
cccggcaccaagtccacttaggaaaatcatcacggttgcatccattgctgccggcatccagtttgggtgggctctgcagctgtctctcctgacaccctacgtccagacccttggtgtaccccacgcttgggctgctttcatttggctttgcggtcccatttctggccttctggttcaacccatcgtgggatacaacagtgaccgttgcacctctcggttcggccgacgccgaccctttattgtcattggagctctctctgtctccatagctgtcttcctcatcggtttcgccaaagacattggccaccatgcgggagattccttgaagagaacgaccaaaccgagagctgtagccatctttgtcgtcgggttttggatcctcgacgtggctaacaacatgttg

SEQ ID NO: 211588 - DNA, 387 bp, Gossypium hirsutum
  unsure (1)..(387): unsure at all n locations
caacagcctcagttacctacactccacccatgttggctgctgccaccactaaccccaagaagaagaccaacaccaatgtgaattacataacaggcttgaattcttttggtgggttgaaagctcataacaaagtggtctcactaggccaacgtgtatgcaccgagcaatcatttgcaaacgttgttagctcactcaaagctccgacaaagggcaagacaggtaaaagcagcggcggtgcactgtcttcaacctgtaatgctgttggtgagatattcaggattgcagcaatcatgaatggccttgttcttgttggtgttgctgtcngatttgtgctgcttcgaatcgaagcttctgtggaagaggctgagtaagagaatttaaagacat

SEQ ID NO: 211589 - DNA, 291 bp, Gossypium hirsutum
aatactttggagccatttgatagaatagacaccagagcatcgtattggtcgagtgaagggcaaaacaatcctgccgtctccgagactttactttataagttgatgaccaagatgtgtatcgttacagaaatccatgttcagccattccaagcttattttcagtacggcttcccaatatactcgtctaaggctgtcagatttagaatgggtcataaattgcagagcgaaatgacggatagtttgacttctagtaataaattggcagatgacgagttcatttggacatatact

SEQ ID NO: 211590 - DNA, 339 bp, Gossypium hirsutum
cccacgcgtccggggttttcttcttatttatcttcttgaattctctcaagaaagccctaaatacctcggatcaggtctcagcttgtggttgttaagcctatttgatcaactaagtttcatgtctgatctcgacgtccagattcctactgcctttgatccctttgctgatgcaaatgctgaggactcaggtgctggtgcaaaggagtatgtgcacattcgtattcagcaacgcaacggtaggaaaagcttgacgactgtccaagggttgaagaaagaattcagctacaacaagatactcaaagacctcaagaaggagttttgctgcaatggtactgtcgt

SEQ ID NO: 211591 - DNA, 322 bp, Gossypium hirsutum
atccccttgccgtgccagtaaaccttgagtaagagattggagatgggtctgaacagaagccatctgcagtggttcttcaattggctctcgaaaaggaaccgagtacaacagctcaggttgggcgcagtgtgtttgaggttgaatatgtgcctctttggggatctacctctatatgcggaaggagacctgagatggaggatgcctttgctactgtgcctcggtttttaaaggttccaattcagttgttaattggtgatcgggtagttgatggccttagcaaggactttgttcatcagaccgctcatttctttggtgtctatga

SEQ ID NO: 211592 - DNA, 375 bp, Gossypium hirsutum
  unsure (1)..(375): unsure at all n locations
aagctggtttcctatgcaactgaagtcacggctgtcgttgagaaaggcaagatcaagaagctgactggggtgaagaccaaagagcttttggtttggatcacactgagtgatatccaagtggatgatcctcccactgggaagatcactttcaagaccccttcagggctgtttaggactttccctgtatcagcttttgagattgaaggtgaacaagttaagggttctaagggtaaggatgaagagaaacaagtgaatggagctgtggaagtgaaggaagtctagagtcctttttcaattcccaacagaagaaagccttaatgtactaaatatcattattagcaatcaataaaaaaaatgattttattttatggtnna

SEQ ID NO: 211593 - DNA, 407 bp, Gossypium hirsutum
gatgaacttgagccttatgctgaattcagttggattttatcagatttcaaagctaagtatgattccagttgtttgtgtgatggaatggatactacacagcaaacactattcggacaaagtcaagatttctgtccttgtcgtggtggttggtgttggtgtttgtacagtcactgatgtaaaagttaatgctcaaggatttatttgtgcctgtgtcgctgtcctgtctacctccttacagcaaatttcaattggctccctacaaacgaagtactcgataggctcatttgaattgctcagtcaaacagctccaatccaagctctgtctcttttgttgttcggtccctttgttgattactacctcactggcaaattactagcaagttacaagttctcctcaactgcatttt

SEQ ID NO: 211594 - DNA, 415 bp, Gossypium hirsutum
gagaagaccatggccgatcaacttacggacgatcagatctctgagttcaaggaggctttcagcctttttgacaaggatggcgatggttgcattactaccaaggagctggggactgtgatgcgatcacttggtcagaaccctactgaggcagaactccaagatatgatcaatgaagttgatgctgatggaaatgggaccattgattttcctgaattccttaacctaatggcaaggaagatgaaggatactgattccgaggaagaacttaaagaggctttcagggtgtttgacaaggaccagaatggtttcatatctgctgctgagcttcgccatgtcatgacaaatctcggtgagaagcttacagatgaggaagttgatgagatgatccgtgaagctgatgttgatggtgatgggc

SEQ ID NO: 211595 - DNA, 388 bp, Gossypium hirsutum
caaaaattcgactacgttgaaggtttcgtgattgtagctgaagggctcatcaacaattggggatcatctttgttttcccctcaaaaccctgttaaaatctccactctttttcccactagtggtgtcttgtattgcttggaaatcgcaaagaactaccatgaatctactgctcaaaccattgaccaggaagtagagtttctgttgaagaaattaaattttatatcgacatcagtgtttacgactgacctgttgtacgtggatttcttggaccgggttcacatggctgagatgaagctccggtccaagggtttgtgggaggtccctcatccatggctaaacctttttatacccagctcaaagattgctgagttcgataagggagtcttca

SEQ ID NO: 211596 - DNA, 411 bp, Gossypium hirsutum
gaattccagtcagaaaaccattgaagtcttgatcatagatgtaagcaacatcggagacagtatcctgcgacaggagatcgtaaacgaagttaagattgcatcaggggaatggggtttcttccaagtgataaaccatgggatcccattaagtgttttggatgaaatgattgaaggcatacgtttgtttaatgaacaagatttggagctgaagaaggagatatatagccgtgacagtgcaaagaaagtgaaattcctctctaactttgatctttatacttcaaaagctcttgattggaaggacactttgcaactctctttgcttgattttgatcctgacccctccgaaatgccaccggtctgcagaaaatcaacaatggagtatattaagcatttgaaaaaattaggagaaac

SEQ ID NO: 211597 - DNA, 322 bp, Gossypium hirsutum
gttggctgtttttgatcatccgaaaaagtatggtgaccgtggaagaagctcgtaagggtgagcgtgcccaaaggcctgccaccgcgttggccatcggcacatcaaccccacctaattgtgttgatcagagcacataccctgactactatttgcatatcacaaatagtgagcacaagaccgagttgaaagagaaattcaagcgcatgtgtgaaaaatcgatgatcaagaagcgattcatgtaccttacagaagagatcttgaaagagaatcccaatgtttgtgaatacatggattcttcactggatgctaggcaagatatggt

SEQ ID NO: 211598 - DNA, 387 bp, Gossypium hirsutum
gtttaagggatttttttcattcgtttcttctcacgctcgattaccttacaaaaagagaaaatgaccaagtgttacccaactgtgagcgaggaataccagaagtcagttgaaaaggccaagaggaagctcagaggtctcatcgctgagaagaactgtgctccactcatgctccgtttagcgtggcactcagctggaacttttgatgttaagaccaagaccggaggtccattcggaaccatgaagcatcctgctgagctcgcacatgctgctaacaacggcctagatatcgccgtcagacttctcgagccgatcaaggagcagttccctaacctcacctacgctgacttctatcagcttgctgggtgtcgttgccgtgagattactggt

SEQ ID NO: 211599 - DNA, 319 bp, Gossypium hirsutum
agaaaaagtaggtaagctgaagttattttatctgcatattcaaccccacatcttttctgtgaaaaggagacaatatcaacaaacatccctttcgaaggttgaattccggaatcctccatccactgaagaacctcgatatatttccgccaattttcagctgccaacagatttttcaacaagattgagtaggtgttgaaactgactggaacacctgatgctattatcttgtaaaacagcttcatcatggattcagtctttccactcttcccaagcagatgaagaagctgattcaaaagcccaatggaaaccaaagggaacc

SEQ ID NO: 211600 - DNA, 394 bp, Gossypium hirsutum
gcaactttgacaaggtactgggtcaatgggctccgaggacaaagcagacatggccttttgaagcaaggaaatccagagtatgacgccaagaggcaagcattatttgaatactatcatccattagaattctctccagcgattccacttgaagagaaaaccaaactcatggaagagtggtgggggaaaacacatggtcttctcattgaaggaggccttacatatgatgcaataaaaagctctgttgctaactctaatattgcctttagggatggtgtagttgaactctttgagttattggaggagaaagatgtccctgttctcatattttcagcagggcttgcagatattatagaagaagtcctgaggcagaaagttcacagatattttaagaaca

SEQ ID NO: 211601 - DNA, 406 bp, Gossypium hirsutum
  unsure (1)..(406): unsure at all n locations
cccacgcgtccgtgctcaagctttgttgagactttgaactgagcttcgctgaattttcgtgatcgtcgagaaagaaaatgatgggaaggaaattcttcgtcggcggaaattggaaatgcaatggaaccactgaggaagtgaataagattgtgagtactttgaatgctggagaggtgccttctccggatgttgttgaggttgtggttagccctccatttttgttccttcctttggtaaaaacttcactgagacctgagttccaagtcgctgcacaaaattgttgggtcaagaaaggaggtgctttcactggtgaagttagtgcggagatgcttgtcaanttgagcattccttgggttatttatggtcattctgagaggagaacttatttgatggagtcaaatgagtt

SEQ ID NO: 211602 - DNA, 371 bp, Gossypium hirsutum
cccacgcgtccgtccacacgttcggggacgtctgggcggacgcgtgggctgaaaatacgggctcctcgagaatgatgcaccaaggaaatgaaaatcatccctatgccaagttctgaaatgcaaaggaaccactgaggaagtgaataagaaaagagagtactttgaatgctggagaggtgccttctacggatgttgatgaagttgaggatagccctccatttttgatacttcctttggtaaaaacttcactgagacctgagttccaaagttgctgtacaaaattgttgggttaagaaaggaggtgctttaactgttgaagtttgtgcggaaatgcttggaacatttgagcatttccttggggttatttattg

SEQ ID NO: 211603 - DNA, 388 bp, Gossypium hirsutum
ggtgatcagcaggtagcaccagctacgaccgaaccgaaaatttcacaggctcaacaagtcaacagtaaggaagagggttctgtttcaggatccgtagtaaccaaacctgcggaacccgaggaggttgtgtgtcaaggaaaagagtcttgcaaggaatacataaagagcttcttagctgctatacctattagggaaatgcaagctgatattaagaagggtttaatggcatcgacaccgttacatcatcggttacaaatcgaattccactataccgagttctggcaaccaaaacctgagacttctgcaactccgatgacaacaacaaaaccgctgttggtcgaagttccgttaactgaagttgctgcatagagaaaacttactgtaaatt

SEQ ID NO: 211604 - DNA, 373 bp, Gossypium hirsutum
ctatcaatgggaatgtctagtgattttgttctagctattgaaatgggcagtacgaatgtcagagttggatcaaccatctttggagcaagggaatatcccaagaaaaaatgaaacaaagcttatgaagtagaggggcttaatccttagatcttcagtgcgttgtttattaaaagagttgtaggcaaacacaatcctcggtctgttattctcgtacgtgaggagaaagaaaaggtgaaaagatactgatctatcttataatccatggaacttgtttattccatcaaaattaatgctaataaaatgtaatgatttgatcttatatttaattcttactgttccattggaaaattattaatataatatttggttcctg

SEQ ID NO: 211605 - DNA, 342 bp, Gossypium hirsutum
  unsure (1)..(342): unsure at all n locations
cccacgcgtccgcccacgcgtccgggaaacctttgagtttagaagagaagaggaagctgggaggaggctataattcctttatgcaaacctccttaccagaggacctgaggggctataatccagcacaagaaactgaacactcctcacatcttgccttcacaacagctttcccaagaggatttgctttggaagttatccaagtctactctggcccgccatcgattgtgtataagttcaggcacttggggtataagggagggtctttcanaggccatgcccctactggggaactngttcaactntatggaatatcaattnttgaggttgacgatgagatgaaaa

SEQ ID NO: 211606 - DNA, 419 bp, Gossypium hirsutum
cccacgcgtccggttttttcctggtagaattaggatttgaatatgcttacaaaaaaaccctccactatgtcatggacttcattaaaacatcaaagtataaggggttgatcttttttaggacgtccacgccagatcactttgagaatggggaatggcataatggtgggacttgtcctaagacaataccagcttaagaaggagaggttaaaataaaggacttgaatagaattctacgaaatattgaattagaagagtttgagaagacattcgcaaaagtagcccataatgaagtgaatctcaagcttctcgacttcacaaatctcttattatcgaggccagatggacatccaggtccatatcgacagttccaaccgtattcaaagaacaaaacagcagtcggtcaaaacgattgtttacat

SEQ ID NO: 211607 - DNA, 318 bp, Gossypium hirsutum
cccacgcgtccggcttataggaagcctgctcggagttatcatccggatgtgaacaaagatccaggggcggagcagaagttcaaggaaattagcaacgcgtacgaggtgttgtctgatgatgagaagcgatctctttatgacaaatatggggaggctggacttaaaggtgctggcatgggaatgggggattttagcaatccttttgatctgtttgagtcactgttcgagggcatgggtggcatgggtggcatgggcatgggtggcagtagttcaaggaatagagcagttgatgggcaggacaaatattacagtctcgtg

SEQ ID NO: 211608 - DNA, 286 bp, Gossypium hirsutum
  unsure (1)..(286): unsure at all n locations
cccacgcgtncgcccacgcgtccgcccacgcgtccggtttatccgcttctgccttttggggaaccatttgtagctgctgttgtctctcccccgccgcctccatcccgaagccgtccccatcctccgacgacaatggtggccgctaagaagaccaagaagacccatgagagcattaacaacagattggctctcgttatgaagagtggtaaatacactttgggttacaaaactgttcttaaatctctcagaaactccaaaggtaagttgattataattgccaacaact

SEQ ID NO: 211609 - DNA, 403 bp, Gossypium hirsutum
  unsure (1)..(403): unsure at all n locations
gctgagtttaagcatatcaataagcggaggaaaagaaacttaccaggattgccctagtaacggcgagcgaaccgggaaaagcccagcttgagaatcggtcgccatcggcgtccgaattgtagtctggagaagcgtcctcagcgacggaccgggcccaagtcccctggaaaggggcgccggagagggtgagagccccgtcgtgcccggaccctgtcgcaccaagaggcgctgtctacgagtcgggttgtttgggaatgcagccctaatcgggcggtaaattccgtccaaggctaaatacgggcgagagaccgatagcgaacaagtaccgcgagggaaagatgaaaaggactttgaaaagagagtcaaagagtgcttgaaattgtcnggagggaagcggatgggg

SEQ ID NO: 211610 - DNA, 371 bp, Gossypium hirsutum
cgggtcgagaaattctcaccacattacttggaccctaacttggccatgttccgacaagagatcattgccgaaaagtccgataacaaattaaagtatggccagaaattcacagtgcagatccgtggaagcggtgtaatcgaccaacaaaagcttcaagtgacgatttactcgccgccgtttgtgacccacgggatctgcatgaatcagagattgattcaattgcgaatcttggaatctaatagagatgtaacgctcagtacaaacaacacttgtctacaagctccgatgaatggcaacattgcgcaacctggttactacatgctcttcgtaaactacaatggggtgccttgccttcgatcgatatggataca

SEQ ID NO: 211611 - DNA, 416 bp, Gossypium hirsutum
ggccgaccacgcgtccgcccacgcgtccgcccacgcgtccgggttgtcttcaaatatttgaacaaggagctggggctggatatggacaagttcatcacacactctgtgccttttgccgatataaacaaggcattcgactacatgctccagggtataggtctgagatgcatgattcatttggatgcttaagagagagttgctgctgtatatttgcccaaccaaggatcaaaactctaatgttttgtcctactatgtgttatatttatgtgcctacttaagctacctttcccggatatcaagagtgcccatatagaactctctctctctaaaaaaaaaaaagagagttctttatatggagttttatattatgtgatgagagaataaattatctttgtaaagcttgctttgttaatgaa

SEQ ID NO: 211612 - DNA, 408 bp, Gossypium hirsutum
  unsure (1)..(408): unsure at all n locations
aagaacttaaggcaaaaagaacccaccgctttattgttttcaaaatcgaggagaagcagaagcaagttatcgtggagaagcttggtgagccaactgagagctatgaagattttactaaatgtcttcccgctgatgaatgtcgttatgctgtgtacgattttgattttctaacagccgagaacgtcccaaagagcagaatctttttcatcgcatggtctcccgatacatcaaggatcaggagcaaaatgatatatgctagctccaaagacagattcaagcgagaactggatggaatccaagtggaattgcaagcaacagatccaaccgagatgggtcttgatgtcttcaaaagccgtgcaaactgaatacagttcttttaggcttttgcaacggggaagcttncttcct

SEQ ID NO: 211613 - DNA, 193 bp, Gossypium hirsutum
agagaagtacaacttgaacggccaattcagatggatatcatctcaaatgaacagaatccgaaatggtgaactttaccgatacatttgcgacacgaaaggtgcctttgtacaccctgcattgtatgaagcctttggattgacagttgtggaggcaatgacttgcggtttgccaacattcgcaacctgcaacggt

SEQ ID NO: 211614 - DNA, 418 bp, Gossypium hirsutum
cccacgcgtccggtgtggtttctgttgtatggaattggtttgggaaggagaagagagggttgattatgggggtttggacttcacatacatctgttgggaatattattgggtctgttgtggcttctggggttttggagtttggttggggttggtcttttttggtgcccgggattttgattattgtagttgggattttggttttttgtttcttagtggtgagccctgatgatttggggtttgaaatgatgtcgtctggaaaagagattgagatgtgtgtgggggaagaaaatgtggcgaatttagaaaaagtggaatcagaggaagcagggttgctcgagaacaaggattctgattccctggctgccattggattcttggaggcatggaggttgccaggtgtggcaccattttctttctg

SEQ ID NO: 211615 - DNA, 427 bp, Gossypium hirsutum
cttttctatggctttctgatttcctctgctacttttctctccactcatcccttccaattttcacactcttttccttttttttttcatttttattatataaatatatttcagttgatcaattatatcaagttgaaaccctaaactcttcaaattttctggttgcttatctcctcgttcagcattaatttcctggtggtgacaatgtcaactcctgcaaggaagaggctaatgagagattttaagaggttgcaacaagatccgcctgccggtatcagtggagcacctcaagacaacaatattatgctttggaatgcagttatatttggtccagatgatactccatgggatggaggtacgttcaagttgacacttcaattcactgaagattatccaaacaaacccccaacagtgagatttatctcccgga

SEQ ID NO: 211616 - DNA, 400 bp, Gossypium hirsutum
cccacgcgtccgcaaacacaaaacttcatggctcggaaattctttgtcggcggcaactggaaatgtaatgggacaactgaggaggttaagaagattgttacaacattgaatgaagctgaagttccttctcatgatgttgtggaggttgttgtgagccctccatttgtgttccttacccttgtcaaaagtctgttgcggtccgattttcatgttgccgctcagaactgctgggttcgcaagggtggtgcttttaccggagaagttagtgcggagatgcttgttaatctaggcattccttgggttattattggtcactcggagagaagggctctcttgaatgagtccaatgagtttgttggagataaagtagcgtatgcgctttctcaggcttgaaagtgat

SEQ ID NO: 211617 - DNA, 423 bp, Gossypium hirsutum
aaactgtatgaggatggtgcgttgcattgtatatttttgatgaataatattctgtatatagtgcaaaaggtgaaggattctgagctgggtaagcttttgggagacaattgggttcgtaagcggcgtggccaagtacgacagtatgctacaaattatcttcgggcttgttggatgaaagctctgtattgtctgaaggatgaaggaattggtggtagctctaacaatgcctccaaggtgaccttgaaggagagatttaagaacttcaatgcattttttgaagaaatatataggattcagacaggttggaaggtccctgatcctcaacttcgtgaagagcttcgaatttctatatcagagaaagtaattccagcttatagatccttcatggggagatttgggagtcagctagagagtggaaggaat

SEQ ID NO: 211618 - DNA, 400 bp, Gossypium hirsutum
gcttggaggatacatttttgtttgtaacaatgatacaatgcaggaagatctaaagcggcagctatttggtttaccaccaagatatagggactctgttcgggcaattacacctggcttacctctatttctctataactatactactcatcagttgcatggtatttttgaggcagcaacttttgggggttctaacatcgatccaactgcttgggaagacaaaaaatgcaaaggcgagtcaaggtttcctgctcaggtgagaatccgtattaggaaactctgcaaggcattggaagaggatgcatttaggccagtcttgcaccactatgatggccccaagtttcgtctcgagctttcagttcctgagaacgttgatctattagacctttgtgaacaagcaggc

SEQ ID NO: 211619 - DNA, 423 bp, Gossypium hirsutum
  unsure (1)..(423): unsure at all n locations
aagatatttgcacattaagatgcattcggagtgatatggtaactggtgatcagtttctggaagaaagtgtttgggacacaacagatgccaagtttggcactgtaccatttagcatctgggttgttgctaatgagttggggactttttttgtccgtggtggatccagaaaacccccaaggaggtttgctttaaagctggctgatccatatttacacagtggttcagatgatactgtcattgatgcagaaataacaaccttttctgcagccctttttgatgactatggtggcctgatggtgccattgtttaatatatcattgagtggaattgcattcagtttacggngaagacctgattattcaaattctaatgttagcttctctttagctgcgaggtcatataatgataaatatgaatcatggg

SEQ ID NO: 211620 - DNA, 395 bp, Gossypium hirsutum
  unsure (1)..(395): unsure at all n locations
gattaatattttgttgcagatgcgtgcttgatcctggggacaagattgttgactgtcctccaaccttcacaatgtatgaatttgatgctggtgttaacggggcacaagttatcaaagttccaaggaagccagacttcagcttgaacatagaagcaattgctgaggctgttgagcatgaaaagccaaaatgcatatttcttacttctccaaataatcctgatggaagtataattagtgatgaagttctcttgaagatccttgacatgcccattttggtggttctagatgaagcttacattgagttttcaggaaacgaatctangatgcagtgggtgaagaagcatgataatttaattgtctttcgacatttagtaaaagagctgtttaacccggct

SEQ ID NO: 211621 - DNA, 430 bp, Gossypium hirsutum
gcctgcgcagctgttgctctctctcgtgcatcatctgtgaaggcagaagttttctctgcgcaagctgaagatcaagcgcttcaatcgagatcccaagttcaaggttcctcaaaggctcaaggacagggtgaactagatgctacacctagtgaagtcttggctatgtctactacacagacaaaatcaaaggtacaaatgaggcaaacaacaagtgtgtcatcaggagaagattcagatgatgatgaacttagagatactgaaactactgataacatggatccggctgatgcaaaacgtgcaaggagaatgcggtcaaatcgagaatcagctagacgctcaaggagaagaaagcaagcacatatgaatgaacttgaaacgcaggttggccaactaagagttgaacattctacattactcaagagtctcactg

SEQ ID NO: 211622 - DNA, 446 bp, Gossypium hirsutum
gacccacgcgtacggcctgcgcagctgttgctctctctcgtttttcatttgtgaaggcagaagttttctctgggcaggctgaatatcaagcgctgcaagcgagatcccaagttcaaggttcctcaaaggctcaaggacagggtgaactagatgctacacctagtgaagtcttggctatgtctactacacagacaaaatcaaaggtacaaatgaggcaaacaacaagtgtgtcatcaggagaagattcagatgatgatgaacttatagatactgaaactactgataacatggatccggctgatgcaaaacgtgcaaggagaatgcggtcaaatctagaatcagctagacgctcaatgagaagaaagcatgcacatatgaatgaacttgaaacgcatgttgtccaactaaaagttgaacattctacattacttaagagtcttactgac

SEQ ID NO: 211623 - DNA, 429 bp, Gossypium hirsutum
atactttcatcggaatcgacaattataagtcaatcttccgggcgctgcgattccatgggaggatttttttcaaagctctctggctcgacattgtcagtgtatggcagccaatggagaatgtcgtaatggttcgctggaccatccatggcattccacgagtcccatgggagagtcgtggtcgattcgatggcacttctgaatacaaactcgacaagaagggtaaaatatatgagcaccgagtcgacaacatcgcactgaattcaccccctaagtttcaagtgctagctgtggaagatttaatccgatctgtaggttgcccctcaaccccaaggccaacttacttcgagatttcatcagcttcacctccagaaaaaacataataaaaccaccttaagttctttataatttttggtaaataatgtgtttcat

SEQ ID NO: 211624 - DNA, 420 bp, Gossypium hirsutum
  unsure (1)..(420): unsure at all n locations
gcaaaggatgctgtttttgttccccatacaaggcttttgataagagagacttagcagaatttgttgcatatatcaatatgggtaattgctggggatctggttcttccgatagagatgctactagtcatgtttacagctccaccaatcttcctactaccccaggtacatcaaataactgcagcaacaacatggaatcttcagtaaccagtagtattagcaacagcaggagtcaattctcggtatcagtaagtgaaatagtggaggaggaagtaccagatgggcaaatcctggaaacatcaaacttgaaagtcttcacttttgcagagctaaaggctgcaactaagagcttcaatacactgttgggcgaagggggatttggtaaagtttacaaaggttggttggatgagagaactntaacac

SEQ ID NO: 211625 - DNA, 398 bp, Gossypium hirsutum
atcctctcaaaatcctttttctgatgcaaaatttactcctttttagttttgtggagtatgtcaaaagctggggtttttcctggttaactaaggcctatttttgggtgggttgaacttatatcagtactagcagattagaggttctctcaagtttcagacgagatgggaatttgtggggataagggtttcttcagtgctccacttggggaaaaagatgtggcagcctcacaaattgaaccagaggcgacggtggaggatgattatagtgatgaagaaattgatgtggatgaacttgagaggaggatatggaaggacaaaatgcgtctcaaacggcttaaagagcagaataagtgcaaggaggggattgatattgctaaacagcgcctgtcacaagaaca

SEQ ID NO: 211626 - DNA, 351 bp, Gossypium hirsutum
cggacgcgtgggcccatccaagcccatctacgttgcaatcaatggtcgcatctacgatgtgaccgccggcaaatccttctacggtcctggtggtgcctacgccatgttcgccggcaaagatgccagcagagctcttgcaaagatgagcaagaacgaagaagatgtctgtcccaaccttgacggcctctctgaaaaggagatggatgtccttaacgattgggtcaagaaatttgaagctaagtaccctgttgtcggccgcgttgtctcttgaaaatttgcacctttcctctatgttgggtgtaatttggtttgtttttaagtgtccttagactctggttattacttatctat

SEQ ID NO: 211627 - DNA, 301 bp, Gossypium hirsutum
acgcccacgcgttcggagaaatggctactttgggtggaattagccaggtcgatggaagcgccaatagtttggagattgaaaacctcgctcgttttgctgttgatgaacacaacaagaaagggaatacgatgctgcagtttaagaaggtgacgaatgtaaaacaacatgtggtgtctgggactatgtattacataacattggaggcgatggatggtgacaagacgaaagtttatgaagccaaagtgtgggacaagccatggatgaatttcaaggagttacaggatttcaaggatattggcga

SEQ ID NO: 211628 - DNA, 385 bp, Gossypium hirsutum
cccacgcgtccgttgcttttcatactcatttagcccctttcattagcatcaaaatcactccagttttctttatcactgaaaaatgtcttgctgtggtggaaactgtggctgcggtactggctgcaagtgtggcagtggctgtggaggatgcaagatgtatccagacctgaacgctgccgagatgaccacaactgagactctggttcttggtgtagcaccccagaaagcacactttgagggagctgagatggaattcggggctgagaacggctgcaagtgtggagacaactgcacctgcaacccttgcaattgtaaatgattagagaccaaagccaaagctccctggaagcagaggcgcctttgtctttaagaaaaaatatgtttt

SEQ ID NO: 211629 - DNA, 417 bp, Gossypium hirsutum
cttacatcgaagtggtttggagacgctgaaaagctcaccaaggcccttttctcttttgctagcaagctggcgccagtcattatttttgttgacgaggttgatagtttgctgggtgctcgtggtggtggttttgagcatgaggcaactaggagaatgagaaacgagttcatggcagcttgggatggattaaggtcaaaagatagccaaagaatcctcatccttggtgccacaaataggccctttgatcttgatgatgctgttattcgtcgcttaccaagaaggatatatgttgacttaccagatgctggaaaccgcatgaagatactgaaaatatttcttgcacaagagaatataagctgtaatttttcatttgaagaacttgcaaatgcaactgaggggtattctggcagtgatttg

SEQ ID NO: 211630 - DNA, 374 bp, Gossypium hirsutum
cccacgcgtccggcgagagcttatgatgctgaggcacggagaattcgtggtaagaaagctaaggtgaacttccctaacgagactccgcgtacctctccaaagcatgcagtcaagacaaattctcagaaaccactttccaagtcaaatttgagccctgttcagccaaatctcaaccagaattacaattacttgaaccagcctgagcaggaatactttgataccatgggtttcgtagaagagaagccatcggtcaatcagttcgcatacgtggaccctgttcctacgtctatagatgctggatttaatcaatcagataatgcccccttgtacttcaattcagaccagggaagtaactcgatcaattgttccgacta

SEQ ID NO: 211631 - DNA, 432 bp, Gossypium hirsutum
cccacgcgtccggaacaagctgataaagaaatcactaacgaggaggaggcacaatacgccgcgcatcaaattttctcaaatgctgctcgacacgaaagcaaccacaaccacaattacatcgatgaggatgaccttttaaggttcatgatcaaagaggaggtggatcttgtgtttccattgtttgaaggatcaaacaccggaaaaattgaccgaaaaagtttcacaaactgggtgataaaggtttacaaggatcggaaaacactagcacatgctttgagtgacaccaaaacagctgttaagcaattgaataaacttgtaacagtagtccttgttgttgttactgtcatcatatggcttcttttgatggaaattgcaaccacaaaggtgcttttgctcctttcatcacagcttgtagttgcagcttttatgttt

SEQ ID NO: 211632 - DNA, 418 bp, Gossypium hirsutum
ataaatccggaggatgatggtctctacctaaatgcattcatcaccagtatggcagagctacctgggcttcttctgtcagcaatattggttgatagggttggccgcacgcagtcaatggcaattatgttcggcttagcatttattttcctttcaccactgataatccagcagcctgctgtgttaactactcgcttattatatggagctcgtatgaatgccatgggaacctttacagttgcctccatatattccactgagttatatccacacctcgtgcagacaacaggggcgggagttgcaagtgctataggaagaattggtggtatggtatgtcctcttgttgcagtgggattggtgaatgattgtcatcaaacaagcactgtagcgctatttttggtcgctatagttgtttcgatag

SEQ ID NO: 211633 - DNA, 394 bp, Gossypium hirsutum
gtgctttttaaaaaaaaaaaaaaaaaaaaaaaaaaaaaaaaaaaaaaaaaaaaaaaaaaaaaaaaaaaaaaaaaaaaaaaaaaaaaaaaaaaaaaaaaaaaaaaaaaaaaaaaaaaaaaaaaaaaaaaaaaaaaaaaaaaaggggggggccgttttaggggatcaaagtttacttccccttgcttgcaacgtaatactttttttttggggcccccaaatttaatttcatgggccgggttttaaaaacgtcgggattggaaaacccttggctttcccaaatttaatcgctttgaagaaaatccccttttccccagttggcttaataccaaaaaggcccgaaccaatcgcctttccaaaaatttgcccaccttaattggcaattggaacccccctt

SEQ ID NO: 211634 - DNA, 229 bp, Gossypium hirsutum
gttggttatagttggatcgatggtctcaaagctcatgctgctgcaaatgtgaccgataagatgatgcttaatgcttcaaacatcttccctcacaacactccgaccacgaaagaagcatactattataggatgatcttcgaaaggttcttccctcagaactcggcacgattgaccgtcccgggaggagcaagtgtagcatgcagcacggccaaagctgtcgaatgggatg

SEQ ID NO: 211635 - DNA, 427 bp, Gossypium hirsutum
gaaagatgttcaagagagcttgtgagggaggcactgaaacgcaacacttgtgataatttaacagtaattgtggtttgtttctccactgaccctccgcctcgaatagaaataccacagttccgtgttcggaggagcatatcagcggaagggctgaattttctaaagggtgtgctggatagtaactgatgaaacagtggatagatgaaaagaggttgtacatgaaggcattggagggcaaaattggcaggctgcaggctaacattcaatcctccttcaaggacatgctcatcatgttgattctttatgagtttctaaatcctgtacatctgagataactcatgttgtacggattggcaggagtcgatggtcaaccaagttttccttcttggtcttcttctttttttctttttctttttttctccttcat

SEQ ID NO: 211636 - DNA, 423 bp, Gossypium hirsutum
gttttctactcacacggacgggagggagacgagaaaaggaagacaacgatggtgtctctgaagttacagaagcggctcgccgctagcgtcctgaagtgtggccgtggcaaggtttggcttgatcctaatgaaatcaatgaaatctccatggccaactccaggcagaatgttaggaaacttgttaaggatggttttatcatccggaagcctaccaagattcactcccgatctcgtgcacgcagaatgaaagaggccaagagaaagggtcgtcattctggctatggtaagaggaagggtaccagggaggcaagattgcctacaaagatcctttggatgaggagaatgcgagtactaaggcgtttgcttcgtaagtacagggaatccaagaagattgacaagcacatgtaccatgacatgtacatg

SEQ ID NO: 211637 - DNA, 422 bp, Gossypium hirsutum
caagatcataactttcttgtcttctttgctgcaaagagtggcagagtcgaatgatcattgccggttgtttcagtcgcagaagatctcagtttttcatggtcttaccagacctactatttccatcaaaagctatctcgagaggatctttaagtatgcaaattgcagcccatcatgtttcgtggttgcctatgtttatctcgatcgcttcgtgcagatgcaaccgtctttgcctatcaattcttacaatgtgcataggttgctaataaccagtgttttggtttctgccaaattcatggatgacatgtattacaacaatgcctactatgccaaagtgggaggaatcagcacggtagagatgaaccttcttgaagtggattttttatttggcttggggttccaattaaatgtggcacctacaactt

SEQ ID NO: 211638 - DNA, 310 bp, Gossypium hirsutum
  unsure (1)..(310): unsure at all n locations
ggaaaacaagaaaagcagagccgcatcactttttgctagctaagctactgtgggagttattgttcttcagaacagcttctgcagtagctaataataacgttatatattatataaattttatacatcctttttaccctacgactccatatataagcaagtaaaaataaatatggctcgctctgtttcttcctttaagttccttggtgcttctgtttttgatgctctttatgtctccatatcaaggagaggttactcangtgcaccgccggcggcagtgacggctagctttggtaggcctggagcgattggg

SEQ ID NO: 211639 - DNA, 406 bp, Gossypium hirsutum
ccccaaaatcggttccctcccccctcccctctccccaaagaaatcctaaaattttgcctaaaatttcttctctttttttccccattttatttttcccaaaccatttctcccctaccctgattccctttatttttctcccaatttccccaaattggcagccctatgcatctccgtcggcagcccgctgctgtatctccgtcgacatatgctgtcaagtatattgaaagaggacccaagatgaacatgcgcagagggagattatgaaccataggtctttgaagcatccaaatattattagattcaaagagtcttttgcagtgactacctgttcaagcttctgctttttagagattctggtgttggaaaatcttgtcttcttttgagatttgctgatgattcatatgta

SEQ ID NO: 211640 - DNA, 419 bp, Gossypium hirsutum
ctgagagttgcttgtacttgtgtggtgcctaggccaaaggacagaccttctatataccaggtttatgaatcgctgaagatcatgggtgagaaacatggtgccttggaacagtatgatgaatttccgttgatctttgggaaacaacaagatcatgataattatgagcgaacccttgtttggggggaatgagatgcataagcagcagctgaaagaactgaaactgtttatcttctactttgtggttctgagatttgggcaaatatatctgcattggtgaatggtatcttctttttaaaggcattttctgcaattggtatgatttacgcttgaacaggatttcttgtctaaatggtactttgttggagaattctgtatattacatgaagcattatcactcactgtagtgatcactatcttca

SEQ ID NO: 211641 - DNA, 416 bp, Gossypium hirsutum
gaaacttgggagtcatcacttaattctctcctacctaaccatggccgacaaagaggcccaacaacccgaagagctacctgtagtcttccttcatcgtccaccctcattcatccttccttttggagaccatttacgttctcaattccatgtcctggacccttacgagtcgcctgagccgtacgactcctttctggcccgtcatgctccctccataagagctctcatgactatgggccccaccctagtttccgccgagtttctggaccgtctgcccgttttggagctgatagtggctacaagtgctggccttgatcatatagacctccccgcttgtcgaagccgatgcatcgttgttactaacgctagctttgccttcgcagaggatgtaacggattgtggctgtggttgttgatcat

SEQ ID NO: 211642 - DNA, 427 bp, Gossypium hirsutum
gccaaattggagaaatcttctcacaaagctcaggatcaatacgcagtaaataaattgaagcaagtttcacagaagtctaattttacaaacaggtaccctgtgccattatctttcgatattatccagtctaggttggagaacaactattatcgaagtttagaagcagtgcagcacgatatccaggtaatgttgttgaatgcggagtcttacttcgggagaaatgcagagctcttatctaaactcagacgcctatccgacttttttatgcggacattgtcgtctttgcagccgccgtagatagatcttatagtgaagacccatctttgtagataaattagaatttttgctttttcatttttaattttcttttccattgtctcttaaatccagtttttgttattgatttatactttgagattctttcgag

SEQ ID NO: 211643 - DNA, 426 bp, Gossypium hirsutum
  unsure (1)..(426): unsure at all n locations
atcatctccctcttcctctagaggggataaacagtataataaattatattggaggcgtggtcggcaaaaaaaagggttaagagatggctcgattaacattagtatcggtgctatttctctgggcaggatcaatgcttatggtccagggcggagatcccacccttttttttcgaatggaacgtcacctatggcaccattgctcccttgggagtgccagtaaagggtattcttattaacgggcaattcccgggaccaaatattaactctaccaccaacaacaatattgtggtcaatgtgttcaataaccttgatgagccattccttgtaacatggaacggcgtgcagcatangaagaactctttgcaagatggtgttctgggaaccaactgtcctatccnccctgggaagaattacacctataaattc

SEQ ID NO: 211644 - DNA, 400 bp, Gossypium hirsutum
ggatatctcaagcaactctctcagtggatctatccctccctcaattggaaggctagataagcttgttacattcaatgtgtcaaacaattttctggttgggcctataccatcgcaaggtgtcttcagcaactatacagctagctcttttgttggaaatcgtgatttatgtggaaagcagatcaatgtagcatgcaaagatgacaatgggggagctacaccgtattctgagtcacctacttcagctcaagttggtaaaaggaaatactccggaaagcttctcattagtgcatcagcaactgtaggtgcactgcttttggtggcacttatgtgtttttgggggtgcttcctatacaagaagtttggtaaaaaaagaaacagaactctttgccatgatgtcggt

SEQ ID NO: 211645 - DNA, 429 bp, Gossypium hirsutum
ctaaccctaatcttagccttggcctttgcctttgctgcatacaatccacagccgtttaacttctccttttcttcaaccctcgcctccacctggtttctcccatcttcttctcctctctttgaatatcaaggttttgcagattgttccactgttcttttcctaaatgagcggcagaagttatactccatctccgcccagaagctacggccggagaggacggggccctaaccccaaaagcccgtaccggggtcgcgctcgagatcttcctaacagccttttggttcgcaaccttcgccatgactgcaagccaaaagaccttcgcaagccattccaaagatttggccctcttaaagatatatatctgcccaaggattattatactggggaacctcgggggtttggttttgtccaatatgttgatcctgctga

SEQ ID NO: 211646 - DNA, 400 bp, Gossypium hirsutum
aaaaaggaaacgaaaagaaaaagtgattggccaccatgtttcgctcaatcaactttatagccatgctggtgttccttaattttagtcgggatattacagaaactgcagcagcatcaccattgtgcgatgtggttatcttttacttaagcccctgcgagggcttcataaaaggcggagccgatccggcaccggaatgttgtgttggtgctaaacgtcttattaacgaactaaaggccaaagaagataggatagaactatgcctgtgcttgaaagcaatattgccactacttgggccatttgaccctaatcgagtgcctcttcttggccagaaatgtggtatcaagaatttctttccttccatcacccccgctactgattgttccaagatatgaagagagag

SEQ ID NO: 211647 - DNA, 364 bp, Gossypium hirsutum
  unsure (1)..(364): unsure at all n locations
atatccgcaaccattagcgacactctcacagtacagtgaagctgagctcactatatttatactcaacttcccttagctcttcatgattccaccttgtcggcggttctttggagcttaagaggaagaagcattctttcactcccaaaatgtcagatcttcaagcaccccttcgcccaaagaggaagaagggcttggtggactttttggtccagtttcgttggatttttgttatattttttgtccttcctttttcaactctgtattactttctcatatatcttggagatgtcagatccgagatgaagtcctacaagcagcgtcagaaggaacatgatgaaaatgtnttgaaagtagtgaagcgtct

SEQ ID NO: 211648 - DNA, 417 bp, Gossypium hirsutum
  unsure (1)..(417): unsure at all n locations
cccacgcgtccggctacctgctacaaggctctaaatgaccaccatgtcatgcttgagggtactcttttgaagcctaacatggtgacccctggttcggactccccgaaagttgccccaaatgttattgctgaatatactgtccgtgccttgccgaactggcccttgtggaagtccagctattgtattcttgtctggtgggcaaagtgaggaggaggctaccctaaaccttaatgccatgaacaagctccagaccaagaaaccatggtcactctcattctcattcggacgcgcccttcagcagagcactctcaagacctgngcaggaaaagaggagaatgtgaagaaggcacaagatgctttgctcgttaggtgcaaggctaactcagaagccactttgggtacatacaagggtgatgc

SEQ ID NO: 211649 - DNA, 192 bp, Gossypium hirsutum
acgcaactcttgaaggctgaggaaattgataccagtcagcctccatatgttttcaaatgccaggtgtacgatctgactggagtacctgctgaaaggcataaaattatggctaaaggtggcttgttgaaggatgatgcagattggtcaacagttgatctgtagcagggtcaaaagatgatgatgatgggaact

SEQ ID NO: 211650 - DNA, 419 bp, Gossypium hirsutum
cttgatacacgccctcatttattttatttttcaaacaaattttcccttcagttttcgtataatttcctaggaaaagaaaaatgagagagtgcatttcagttcacattggtcaggccggtattcaggtcggaaatgcttgctgggaactttactgtctcgagcatggcattcagcctgatggccaaatgccaagtgataagactgttggtggaggagacgatgctttcaacacctttttcagcgaaactggtgccgggaagcacgtccctcgcgccatctttgttgatctggagcctactgttatcgatgaagtgaggactggtacgtaccgccagttgttccaccctgagcaactcatcagtggcaaagaagatgctgccaacaatttcgctcgtggccattatacaattggcaaagag

SEQ ID NO: 211651 - DNA, 268 bp, Gossypium hirsutum
acggtatgctattgcttgtgttcttgaaaatgttcctttcatcaatggccgcccacaaaacacctttgttccagggttgattgatttggctattcaaaggaactggctgattggaggagatgacttcaagagtggccagaccaagatgaaatctgtccttgtggatatacttgatggggcttggatcaaaccaacatctattgattgttacaaccatctgcgaaataatgatcgcatgtatgtatccaaagcccaaatcttccggtcc

SEQ ID NO: 211652 - DNA, 425 bp, Gossypium hirsutum
aaaaaaaagagcagagaatcattatttccttttcttctcgttatacgaatttggttgtaccatgcaaaacctggattcatgagcttctcaattctaaagagattacctttattttctccaccatttgtcaacgtaatggcttcatcatctttctactgtggagttcaatcaaagagattcttagtgttagcccagcagctgcgtcattataagcctccaccttgttcctgggatgacaacgaggaacgaatcatcgaggaagccgccgggaaatttgtttcccaagtgggttttcaagaatccgttacccgagtggctcaaaacccagaaaagtttagatccaaaagagctgctgttttgatctgtctctttgaaggggatgctggggatttgcgtgtcattttgaccaaaaggtcttccagatt

SEQ ID NO: 211653 - DNA, 427 bp, Gossypium hirsutum
ccaaggcactggtggcaaagattgaccgaccaatgggaatagtctgcttccaggtagcaaaggatagcaatgaaattctcaattcgtgggcttcgaacttggaaaaacttcttgatcttgtcgagaagagttgccaccaaatacacaaagaaaccatggttcacaaagctgctctgaaagtatgaaaacgatgaacattcaccaaactacaggttgtggccaagttgaaatgtgctttttggagacaagtggtctaatagatggtaaaaaaaaagtatgttgctatgaccttttctataactgaagtttggttactatggggaaaaccaaaagatggtgcttgttttttatagcagttgggaggaaaacaattaggtttggtatttttattcttcatcactattcgacaatttcgcatctttcacat

SEQ ID NO: 211654 - DNA, 420 bp, Gossypium hirsutum
cccacgcgtccgcccacgcgtccggtcagaactcttggattgggaaaggtggggcttttaccggagaaatcagtgtggagcaattgaaagatattggctgcaagtgggtcattctcggacattctgaacgcagacatattattggtgaagatgatcagtttataggaaagaaagctgcttacgctttgaacgagggtctcggagtaatagcttgtattggtgaattactagaagaaagagaagcaagcaaaactttcgatgtatgtttccagcaactgaaagcttttgctgatgttgtacccaattgggacaatataattattgcttatgaacctgtattggccatccggaccggccaaggtgctacaacccaacaagctcaagaagtgcatgtagcttgccgtgattggcttaaaaaga

SEQ ID NO: 211655 - DNA, 420 bp, Gossypium hirsutum
cccacgcgtccgctcgctcacttccttgttacttaccacttctttcactggaagaagggaaccccgtttgctgatgatcaaggaatttacaatggcttgacttggtgggagcagatagacaatggaaagcagctaacacgcaacagaaagtttttaaccgttgtacctgttgtgctatacctgatagcttcgcatacaacagactaccaacatcctatgctctttctgaacacgcttgcagtgatcatcctcgtcgttgccaagttcccaaacatgcacaaggtccggatcttcggaatcaatgcagacaagtgagtttatctccccgttcagaacagttgatttcaccagctagaaaagccatacatacagctccttcacctctgttgaaaatgggtatatctctttgtatagaacatt

SEQ ID NO: 211656 - DNA, 421 bp, Gossypium hirsutum
cccatccaaacgacgccctaaaccaaaagtcatggccaccccttccgcacgtgacgaaaacgtttacctggcgaaactcgccgagcaagccgagcgctacgaggagatggtcaagttcatggagaacgtcgtctccgccgtccctgcccccgacgaactcaccgtcgaggaacggaacctcctctctgtcgcctacaagaacgtgatcggcgctcgccgtgcctcttggcggatcgtttcctccatcgagcagaaagaggaaggacgtggcaacgccgaccacgtctctgtcatccgtgagtacagggccaagatcgaggccgaattgtccgagatttgcgccggaattttgaagcttctcgacgagaagctcgttccggccgccgggaccggtgattccaaggtcttttacctgaagatg

SEQ ID NO: 211657 - DNA, 358 bp, Gossypium hirsutum
ccagagaagagagaaatatatgatcaatatggtgaagatgctcttaaagagggaatgggaggaggcggttcttctcacaacccatttgacatatttgagtcatttttcggtgggggagccttcggaggcggtggtagctcgagaggaagaaggcagaagcgaggtgaagatgtagtgcatgctcttaaagtttctctggaagaattgtacaatgggacgacaaaaaagctctctctttccaggaacgcaatatgcagtaaatgtaaagggaaaggttcaaagagtggagccttctctagatgctattgttgccaaggcacaggaatgaaaattacaacacggcagattggactgggca

SEQ ID NO: 211658 - DNA, 308 bp, Gossypium hirsutum
gggaaacggaggaattagtgcttcgtactgggagtgttggtgctgggtgctctcgactactctctgacatgcaagctttcaaggctgcaaatcctggctgtgttttagaagattttgttagatggcactctcctcctgattggattgaagatgagccaagcgataaggttccgggtgctagaagtcaactaagtagtagaatgcaaaaaggaagtaatttgtggcgtgaactatgggagacatccaaacccgtaccggctattaaacaaacacccctctatgatgaggattttgcaatggatggaata

SEQ ID NO: 211659 - DNA, 151 bp, Gossypium hirsutum
gttaaaagccgtccaaaacccaaaccaggataggcaaacgaaaagaaaaaatggctgtgaattttaatgccatcgcctcgaaatctcagaagctcccttgctttgctcttccaccaaaggccacccttagatctcccaagtttccatgatc

SEQ ID NO: 211660 - DNA, 374 bp, Gossypium hirsutum
cttcaccaacaagaacaaaaaaaacaggtgataccccgttttcttttggtctcaaagcgagggaaaagggcaagattcttggttttagggtttgggttttcattgatttttagtgaaaaaattataaaaaaattatgggaagaggtagggttgaacttaagaggattgaaaacaagatcaacaggcaagtcacttttgcaaagagaagaaatggtcttttgaagaaagcttatgagctttccgttctttgtgatgctgaaagtgcttttatcatcttctccaatagaggaaagttgtacgaattttgcagcatctaaagcatgatcaaaacatttggagagggtcccaaaaaatgcaacttttgggacttcctg

SEQ ID NO: 211661 - DNA, 287 bp, Gossypium hirsutum
cgggggcgaccgacgcgtacggttctttcactttatgccagtggtcttactacaggtattgtcttggactctggtggcggtgtgtgccatactgtgccaatttatgaaggctatgccctcccccatgctattcttcgtttggaccttgctggacgcgatcttacagattccttgatgaagatcttgactgagagagggttctctttcacaacaactgcggagcgagaaaatgttcgtgatatgaaagaaaaacttgcttacgttgcttctgattttgagcaagaatt

SEQ ID NO: 211662 - DNA, 292 bp, Gossypium hirsutum
cacaattttactgtaaatacacaattaaacatgccaatgtagtctcaatttcacaatcatcagcattgtcatcatgattaaatactacaattagatgctgatattcagatttcatattcatccaggatagctccaatgggcatgatatttattccatgttacaaaggatatagtcataagccagaagaatatgcgtcacctcaggatttagaaaatggggtgaaggtattagcgctaaccttggccaagttgtctttgcgttgatgtgttgttgtatattgtagattttatt

SEQ ID NO: 211663 - DNA, 330 bp, Gossypium hirsutum
cccacgcgtccgttttgggcatggtacttgttaccatgatctttgctgtttttggatttcggtccccttcaaaccgaggtggtctgatgacagctatgcttttactttgggtcttcatgggcaattttgcgggctatgcttctgcccgtctgtacaaaatgtttaaaggagcagaatggaagaaattagcttttaggactgcgtgcatgttcccaggcattgcctttgccatcttttttgtcttaaatgcaattatatggggccagaagtcttctggggccgtgccttttgggacaatgtttgctctggtcctcatgtggttcggaattt

SEQ ID NO: 211664 - DNA, 370 bp, Gossypium hirsutum
gccgaaaatggtagtaccgatcccgaagatccggctaagtctccacctagctcccccaattcctccactcgcaaggcatgttgttttgttctccagagttggttctcgaagaagttcatgactggatgcgtggtcctttttcctgttgcagttacatttttcattacttggtggtttattcagtttgttgatggtttcttcagtccattatacgagcgacttggcgttgacatatttggactgggatttatcacatccctgctctttgtcttctttgttggtgtttttgtttcatcatggatgggagctgctgttttctcagtgggagaatgggtcataaagcaaatgcccttttgtaggcatatatact

SEQ ID NO: 211665 - DNA, 355 bp, Gossypium hirsutum
ccgggccgacccacgcgttcgctggctctgaacccaaaactgaaacagagatcgctgatcttgaagccatttcggcgcgcagggaattaactgctctcgaactcaacgagaaaggcaacgagcttgtgaaaaagggtaaaaagcattacccagaagccatccactgttacagtagagccatcgatcaaaaagctctaaatgaccatgacacctccgttttattctcaaacagagctcatgtgaatttactccttgggaaatatcgccgtgcgctctccgattctcaagatgccattaagcttttccctgctaacgttaaagcgtattatcgagctgtcaaagcgtgtttatcatt

SEQ ID NO: 211666 - DNA, 340 bp, Gossypium hirsutum
  unsure (1)..(340): unsure at all n locations
tgcaactccaattttaattggttctcagttggagtttcacatacaccatgcaaaggaggctgcaagagttgcaaggatatcatctttacttgattcaaagactgggaaagttgcgaagaaagcaccccgctgcattcttgctaagcagagtgcagttgttgaggtgattttgcaggaagcgatttgcgtggaagagttttcgaaatgcaaagtccttggaagggtgtttcttaagacattangaagaacggttgctgtgggcatcgtgacccgaatagtggaggagcagtaatagttgccaaagtgtggtcaaagactcatacacacttaanacacatac

SEQ ID NO: 211667 - DNA, 383 bp, Gossypium hirsutum
  unsure (1)..(383): unsure at all n locations
cccacgcgtccgaaaagctcttactttctatattaatgtcattgacaaattgcaacagtgggagaagaaaaattgccagttccggatatctaaagaacatagaaaagctcgctgaagctgaagtttatgatgccaaaaaacttgtcaggaagttgtctaccaacagatttcgtagtattctaagtggattttggcattcttgaatgtaatatttttgtttttgtttttgcttactgtatatctctgcataagcgttatgcaagtctcattaacttgtttttacaaatcttttaatgtcactgtatcctaaatccttctccttcgtaaaaagaaaaagaaaaagaaancgaaaacagcttttgacagcttttgtttacttgaat

SEQ ID NO: 211668 - DNA, 347 bp, Gossypium hirsutum
ctaaaagtgagtggagtccgattgttttgatctatacatcaggcaccacatcatccggcaggggagtggttcatagtcacagaggaattttcaccatgaccgttgattctttaatcgattgggaggttccaaaacaaccagtttatttatggacactccccatgtttcacgctaatgggtggagtttcacttggggcatggctgccgtcggcggcaccaatgtttgtgttcgcaaattcgatgcctccaccgtatatagtttaattaaaaaacatggtgtcactcacatgtgtggagcgcctgttgtgcttaacattgtatccaattcccctgaaattaaaccactc

SEQ ID NO: 211669 - DNA, 378 bp, Gossypium hirsutum
caaatctcaataagtagcgtaggttataatctaagttcaagattcgaagatgtcgggaggaggaaagggaggcaagggactgggcaagggaggagcaaagcgccatcgtaaggttctccgtgataatatccagggtatcacaaagccggcaattcggcgtttggctcgtagaggaggcgtcaagcgtatcagcggtctaatctacgaggaaacccgtggggttttgaagatcttcttggagaacgtgattcgtgatgcagtaacctacaccgaacatgcgaggaggaagactgtgactgctatggatgtggtttatgcactgaaaaaggaagggcatgacattgtattgggtttggtggttagatgatttatgggatt

SEQ ID NO: 211670 - DNA, 331 bp, Gossypium hirsutum
  unsure (1)..(331): unsure at all n locations
aattcgtggagaaatcgagcttaggcatgttgattntgcatatccttcacgacctgatggcatagtgtttaaagaccttaaccttcaaatccgggctggtcaaagccaaccactggtgggacctaggggttttgccaaaagttcagtcttggcttggttcgaccgcttttttgatcttccagttggaaaggtattaaccatggaaaaaaaattccgagaatggaccttaagtctcttatgcttaaaattggattggtacaacaagagccagccctttttgctgctagcattttcgataatattgcttatgggaaaagaggagcaactgaag

SEQ ID NO: 211671 - DNA, 360 bp, Gossypium hirsutum
cccacgcgtccgaggcgaaccaaggagccaaaaaatccgcagttcagcaaccaaggagcactcattcgacaagtccgccatgggtaaggttcatggatctttagctcgtgccggtaaggtaagaggccaaacacctaaagtggctaagcaagacaagaagaagaagccccgtggccgcgcttacaagaggatgcaatacaaccgtcgtttcgtcactgcagtggtgggattcggcaaaaagaggggacctaactcatccgagaagtagagctatgcaattgaaaaaaggtcttgtttgaagctttatgggttagtctgtgtttccccccctttttttgaatgttatgatactattttatc

SEQ ID NO: 211672 - DNA, 291 bp, Gossypium hirsutum
gtggaaactgcggttgcggctccggttgcaagtgcggcagcggctgcggcggttgcgagaggtaccctgagatgaactttgctgagcaaaccacaaccgggacacttgttcttggcgtggcaccccggaaagtgcactttgatggagctgaaatggaaactggggctgaaaatggctgcaaatgtggagataactgcacttgcaacccttgcaattgtaaatgagaaaaaaaagctaagcatattatggaagctgatctaaataatatatgatgtatttgggtttttacta

SEQ ID NO: 211673 - DNA, 374 bp, Gossypium hirsutum
acgcgtaccgatcattgaactcgagtctccaattatcttatgctttaaagaatcgtttacaacggtatggaaacgcgacaggtttgttttagcacaatgcccaactcaaatattatgctttttgttgttacagcataagacttatataatcgatagtataatttcagttattcgactattgcttttaaatttgactaagcaagccaatgcttgctcaaattcactttctttcaaggcaatggtgaagcaacggccaactgataatgatcgatacgttaagaactgtcggaatgggagatctctcaaggagacgagatggtggtttcatgatgataaagtgtaatattttagaactggtatttatctcttataac

SEQ ID NO: 211674 - DNA, 331 bp, Gossypium hirsutum
aattatggaggttatggatctttatcatctattggctttgagacttttcttaacgggaacggcactattgatctccaatcaactactctgatgtgctacttgaaagtgctttataacgtattttctacatttatcagacactacacgattgtgaaaatgttctgagccagcatgacaaagggcttcaggagtccattccgcctgagactttgaatgtcatcaacaagtttcataatgacttttcgacttccatgtctgatgatctccatactccagttgttttggcaacattatctgacccattgaaaaccatcaatgatctactacatac

SEQ ID NO: 211675 - DNA, 343 bp, Gossypium hirsutum
  unsure (1)..(343): unsure at all n locations
cccacgcgtccgcaaaactgcaaatgagggtatcattgttattgaagcttacaggacgcttcgagacagaggtccataccctcctgaccaggttgtaagagatatccaagggaagtttgctttcattatctacgacagctcttcaaaagctacgtttatagctgcggatgctgatggaagtgtacctttcttttggggtactgatgctgaaggccatcttgtccttgcagatgacagggagactgtcaagaaaggctgcgggaagtcttttgctccattcccgaaagggtgcttcttcacatcctcgggagggttaaggagctatgagcatncccttaacgag

SEQ ID NO: 211676 - DNA, 318 bp, Gossypium hirsutum
gtagggttgaacttaagaggattgaaaacatgatcaacaggcaagtcacttttgcagagaggggaaatggtcttttgaagaaagcttatgagctttctgttctttgtgatgctgaagttgctctcatcatcttctccaatagaggaaagttgtacgaattttgcagcagctcaagcatgatcaaaacattggagaggtaccaaaaatgcaactatggagctcctgagccaaatgtgtcatctatggaggctgctttggaattaagcagtcgacaggaatatttgaagcttaaagcacgttacgatgccttacaaaggt

SEQ ID NO: 211677 - DNA, 320 bp, Gossypium hirsutum
gttgtgatggggaacataggcaaaataaagaggacagcaaaggaattggattttgcaataggaagctgggtaaacgagcatcgcgaacggaggctcgacaaaggcatcgaagggaaccaagatttcattgatgccatgttgtctatcatggatgaaaacaatgtaccaattcaagaggctgatgttaccattaaagctaattgcctgactcttgccttgggtggcatcgatacaaacgtgtccacactttcatgggcgatcttcttgctattgaataaccgccatgttctaaagacgctcaagagaacttgacattcatg

SEQ ID NO: 211678 - DNA, 300 bp, Gossypium hirsutum
cccacgcgtccgcccacgcgtccgcccacgcgttcggtgccattggccatgttatcacctggtgccccttgctttcccctcgaatatatatatttttgcttgaaccgtgctttgctagcgcttctgctctatagtgagcatagatgaaaaggattttcaagtatttaaagatgttctatgttttttatttacttaaagcttgcccaaagtagttttagtgacattgcagattgcataagccggaaatggaagtcatgactggtttgaatattatattaaatgatttgatgcaagttttag

SEQ ID NO: 211679 - DNA, 364 bp, Gossypium hirsutum
cccacgcgtccggatgaccggcggaggagtggatcgcagtgtggagtgtacagggagcgtgcaagccatgatttccgcttttgaatgcgtccatgatggttggggtgtttgtgtgctggtgggtgtgccaaagaaagacgatgcattcaaaactcatccaatgaatctactaagtgagaggacccttaagggtgctttttatggcaactataaaccacgcactgatattcccatggttgtcgacaaatatttgaacaaggagctggggctggatatggacaagttcatcacacactctgtgccttttgccgatattaacaaagcattcgactacatgctctcaggtataggtctgaaatgcatg

SEQ ID NO: 211680 - DNA, 331 bp, Gossypium hirsutum
cccacgcgtccgcagcaatttaagtaggtatagctgtagcaacaaacctcacatgtgaaaggatgtgaggtgggcagccatccgccacattaagatgcaggaaggggtcttggggttgcggcatttcaatcttttgaagaagcttggatgtggagatattgggacggtatatcttgctgagcttattggtacaaactgcttgtttgctataaaagtcatggacaacgaatttttggcaagaaggaagaaattgccaagggcccagacagagaaagatatattacggatgcttgatcacccttttcttcctactttatataccccaattcac

SEQ ID NO: 211681 - DNA, 315 bp, Gossypium hirsutum
tctatatgttgccaatgttggagactcaaggactataatatccaaggctggaaaagcaattgcactatctgaagaccataaaccaaatagaagcgatgaacggaagagaatcgaaagtgctggaggggttgttatgtgggcaggaacttggagggtaggaagtgtgttagctatgtctcgagctttcggtaatcgcatgttgaaacaatttgttgttgcagaaccagagattcaggacagagagataaatgaagagtttgagtttcttgtgcttgctagtgatggattatgggatgtagtgcctaatgaagatgc

SEQ ID NO: 211682 - DNA, 325 bp, Gossypium hirsutum
ctcatgtatacacaattagagaattatcgaatcagcatacaaaggctttagaacatggagagcaagccgaatcccgaattgtggaagcagaagcacgtttacatgaagctattgagaaatacaccaagaaagaatcagaagccaatgacctgattgaaaagttgaatgtgcttgaaaaccaaattaaaacttatgaagaacaaactcacgaagcttccgaaattgctgtatctcgagaagttgaggcggaagagactcttgtaaaactaaagcagctggaaagccttgttgaggagctgcaaaccaagtcatctcactttgaaag

SEQ ID NO: 211683 - DNA, 302 bp, Gossypium hirsutum
acggatatggctcacattagtggccttgttgctgctcatgaggcaaacaatccttttgagttcggcgacattgtcacaaccaccacccacaagagcttgaggggtcctagggctggtatgattttctaccgcaagggaccaaagccaccaaagaagggccaacctgaagatgcagtgtatgactttgaagacaagatcaactttgcagttttcccttcccttcagggtggtccttacaatcaccaaattggtgcccttgctgttgccttgaaacaatccatgacacctgggttcaaggcata

SEQ ID NO: 211684 - DNA, 389 bp, Gossypium hirsutum
  unsure (1)..(389): unsure at all n locations
ggcgaccacgcgtncgggaccatccatgctcatggtgaggagactgtcaaaataccagttactttgatatatgatgatatgaaaagtacatatgatgacattaagcctggcagcatcattccatataggctgaaagttgatctcattgttgatgttcctgtttttgggaggttaactttacctcttgagaaaactggagagatccctataccttacaagccggatatcgatatggagaagatacactntgagagattctcttggaggaaactatagcagttcttcatttgaaattggagaatatgaatgactttgacttgggactcaatgcccttgactatgaagtctggctatctgaggtcagcattggatctgcagaacttgaaaaa

SEQ ID NO: 211685 - DNA, 347 bp, Gossypium hirsutum
tccatatgaagccttatatggtcagttgccacctacacacatgctctatctagcaggaacgtcttcagtagcagtggtcgatagaagtttacaaactcgagaggcgacgagaaaacaattgcagttctatctaaagagagttcagacacgcatgaagcttttcgctgacaaatatcgttcggagagaactttccaaataggggatttagttcatttgaggttgcagtagacagttagaagaattcttatcagaaactatcttcaaaattctatgggccttttcctgtgatcaagaaggtgggagaggtggcatacactctttagttacagccgggatctcatattca

SEQ ID NO: 211686 - DNA, 310 bp, Gossypium hirsutum
agaaatgcctctacatcatttcatattttccttcctaacactcgcattctgcgccacttctgcagtggccgccgccgccgcttcaaaggagcaaactttaaacacccaagatgctgaattctttaacccaaagcttcccccacgaaccctttcatcctccaaaaggttcgaaggctcgtcgaatcttgtcgaccttcgttaccatatgggtccggtcctttcttcttcgccgataaacatttacctcatttggtacggtcgttggtccctttcccaaaaactcctcatcaaagactttattacctctata

SEQ ID NO: 211687 - DNA, 415 bp, Gossypium hirsutum
acccacgcggacgtcgctttggtttagtattaaagtactgattccatggcatcagggaagttagtagttctgatggggatggtcgcattaatggttgaggactcaatgcctatgacctcttgtgacatgaatgacgagggacttgaggcgtgcaagccatcagtcagacatctgaaccctttcgacccatcgcccgagtgtagcaaggctctgaaaggggctgacttgccctgcctgtgttcttataagaattcaacgtggctacgtagtttggggattgatccaaaacttgcgtttgatttgcctcctatgtgctagctccaaattcacatattatgtcatttataacaaaatgccatttgtgacatatactgaaaccttaatgatatcaactcatttgttgcatcaaattttt

SEQ ID NO: 211688 - DNA, 401 bp, Gossypium hirsutum
cccacgcgtccgggaaaggaagttggctgtatatatggctctgtgactgatgatatattgacaggattcaagatgcactgtcatggctggcgatctgtgtactgcatacctaaaagacctgcttttaagggttcagctcctattaacctctcagatcgtctgcaccaagttctacgttgggctcttggatctgttgaaattttcttgagcaggcattgtcccatttggtacggatacgggggtggattgaaatggttggaacggttttcctacataaactcagtcgtatatccatggacctccattcccttgcttgtttactgtacccttccagctttatgacttcttaccgggaagtttattgttcctgagatttacaactatgccagtctagtattcat

SEQ ID NO: 211689 - DNA, 366 bp, Gossypium hirsutum
gacccaggcgtccgactatttcagcaaatggagaacgtgaaattggagaattgatagcaagagcaatgtataaagttgggaaggaaggggtcattactgtcactgataggaatactttagacaatgagttataagtggtggaaggaatgaaactaggcagaagttatttctctccctattttgttaccgatcaaaagacccagtaatgtgaacttgagaattccttgattctcattcatgacaagaaaatttcaaatattaactcacttgtgaggatatttggagttggctataaataaaaacagaccacttcttttttgttgctgaagattttgaagaagtgattgcgccttaaattacttaatt

SEQ ID NO: 211690 - DNA, 323 bp, Gossypium hirsutum
gcgttcgtccacgcttacttccacgcgtccggtcgacgaccacatcggcgttgccatcgcccgtctgggcggtgacggccgcgtcctttctcggtatattagaaacgagtgtattaactacaacttcacgtatgaatcgccacttcctgttggcagacttgtcgtccaacttgccgataaagctcatgtctgcacccaacgctcttggaaacgaccttatggggttggcctgttggtggctggcttggatgaatctggggctcatctttactacaactgtccgagtggaaattactttgagtaccaggcttttgccattgggt

SEQ ID NO: 211691 - DNA, 408 bp, Gossypium hirsutum
gaaaaacttggaatagcaaatcctgattttgaagacgaaaagaataggctggctgagctgctgaaagaagcgggcaggccacgcatcataaaagcaaaatcactggaaaatctcatcgatccgaactcaaagaggacggcgaagaaagaggggacgaaaaaatggggtttcagaatttgaaaggaggcatttcccaggtcgtatctaatctgtttttccaacttatatccacattctgtatcatggaagatcatgtatagtgttacaagttgtaatttcttgagctttctgtttttggagctttaagatttcatattttttttcccttaaaccttttactattgttatttgtggtattgaatgtctggatgtgctcttgaaattttggaaaaaagaatgttcggttga

SEQ ID NO: 211692 - DNA, 362 bp, Gossypium hirsutum
gttcagtttgtagactggtgtcctactggtttcaagtgtggtatcaactatcatccaccggcagtggtaccaggaggtgatcttgctcgggtgcaacgagcagtgtgtatgatcagtaacaacacatctgtggccgaggttttctcccgaattgaccacaagtttgatctcatgtatgccaacagagcctttgttcactggtatgtaggtgagggaatggaggaaggtgaattctccgaagcccgggaagatcttgctgctcttgagaaagactacgaggaagttggggcagaaggtggtgaagatgaagaagaaccagaagattactagatccatattacatgaaatcagcagtcgcagtc

SEQ ID NO: 211693 - DNA, 336 bp, Gossypium hirsutum
taaactcgctcttttggatcgctcacccctgtgtttcagccatattgtaccatgttgaggcgaggctagcccttaaatccgaaaaactcctatccacgaggcacgtgctttcataatatcggaacatgtcaagtgcttgtgcgctggtcatattggatgaaatgaggcaaatatcaatcgtagattgacttggaaccactggtgaagggctcgaagcaggtgtcctgtttgggtttagaccaaagctcactttttagaccgaggtgctttataaatatctactgcttaaacacggatcttaatgtttaatggtggctttccccctggctatcactt

SEQ ID NO: 211694 - DNA, 331 bp, Gossypium hirsutum
  unsure (1)..(331): unsure at all n locations
cccactcgtccgccgaatacgattatctgttcaagctttngctaatcggcgattcctccggcgggaaatcctgtttgctcctcagattctcttatgattcttacctggatagctacatcagtacgatcggtgttgatttcaaaatcagaactgtggagctggatggcaagacaatcaaactgcaaatttgggatactgctggacaggaacgttttctgactattacaagcatttattaccgaggagctcatggaataataattgtctacgatgtttactgagattgaaagcttcaacagtttcaagcaattggttgaatgagattgacaga

SEQ ID NO: 211695 - DNA, 118 bp, Gossypium hirsutum
gaaaaggattggctctgagggctgggcacggtggtcccagtcccgaacccgtcggctgcgggcgcactgctcgagctgctcccgcggcgagagcaggtctccgcgtgccggccggggg

SEQ ID NO: 211696 - DNA, 302 bp, Gossypium hirsutum
ggcgaccgcacgcgtccgccatcatgcaattactgtggggaatcgtgttataaccgacactaatattcctgcgggagcggtttctgcgagctccgctgctgttgaactggctttcatgaagcttcctgaatcatcacacactactgctcgaatgttggtcgtcggagctggaaagattggaaagcttgttatcaaacacttcttggcaaaaagttgcaccaagatgggtgttgtttaccgaagttaaaataaaactccagcaagatcttgaagaagttttaaaggaagtcgacatttattta

SEQ ID NO: 211697 - DNA, 372 bp, Gossypium hirsutum
cccttatggaatctctgacaaagttgactggacatttagtattgggacctatagtaaagcgagtgaagtctcgtggttgtctgttgggaagaaagaacttgaatatgccgctatggctctaaaaagattcagattgcttgttgagcagctgttgagggtggatccttctcaaatgagttccaatgagaaactggcattttgggttaacttgtataatgcattgattatgcatgcatatttagcatatggagttccaagaaacgatatcaaactattttcctttatgcagaatgctgcgtacaccattggaagactctccgtgagtgcagctgacatagaatgcacccgtctaaagatgaatcctgctactta

SEQ ID NO: 211698 - DNA, 363 bp, Gossypium hirsutum
  unsure (1)..(363): unsure at all n locations
ggtcgcccgcgcgttcgggcaaaccggccgacattttactgtggatgaacaaaaagatctcagcaggagcgcttggggttgcgactgtgatatgggttttgtttgaattgcttgaatatcacctgctcactctagtgtgtcacttgttgatacttgctcttgcattgctcttcttgtggtcaaatgctactcagttcatcaacaagtctacaccgcacatcccggaagttcaaatccctaaggaaccggttttagagtttgccatggcacttatgtttgagattaaccgggcttttgctgtcctgcangatattgcattaggaagaaatcttaaaaatgttcctctttgttattgctggatta

SEQ ID NO: 211699 - DNA, 377 bp, Gossypium hirsutum
gtcagtcagcaccaattgacacaagaagggctttgtataagaatatagtgttatctggtggatgcgaaccatgttcaaagacttccacaaaaggttgcagcgggatctgaaaaagattgtagatgcccgagttcttgcttctgatgctcggtatggtggggaagtaaaagcacaacctgtggaagttaatgtagtcagtcatcctatccaaggatttgcagtgtggtttggaagttctgtacttgcatcaacacctgaattttatgcggcatttcatacaaaagcagaatatgaggaacacggaacaagcatttgccgcacaaatcctgtgtttaaagggatgtattgaggcaaattttcttttcaagtgattaatg

SEQ ID NO: 211700 - DNA, 391 bp, Gossypium hirsutum
tcgctccttcgccgtgagccacttaagcttgttgatggtggccaatctcagagaacttttgtgtgcggaaaggatgctattgaagctgttctgttgatgattgaaaacccgggcagggccaatggtcacattttcaatgtgggtaacccaaacaatgaagttacagttaggcaacttgctgaaatgatgactaaagtctataccaaggttagtggagaatctgcactggagactccaacaattgacgtcagcttcaaagaattttatggcgagggatacgatgatagtgacaagagaatttcagacattaccatttataataaacaacttggttggaaccccaagacatcgctttgggacttgcttgaatttacactgacctaccaacaca

SEQ ID NO: 211701 - DNA, 391 bp, Gossypium hirsutum
cccactcgtccgggagctgatagtttctcactcactgggcttttagcctttgctgaactgggaaacaatatagtagaggacatgactagtgttacctcgaggattgatgtagtaaggagttatgcttttgggtttctataggaggatatggggaaattgtcttagtcagctctcttatgatattgactatttgtagaactaatagcctcctgacatcttattgattacaagctgtcagtgtgctgtcatatatattgatattgtagttaagctgctggactggggcgaggatggtatcgccacaactgctgaaactgctgctctacgagcatcatttctgcaagaagttgctgtttggcacaagcttgatcatcctaatgttacaaagtct

SEQ ID NO: 211702 - DNA, 302 bp, Gossypium hirsutum
acaaaaggccgtgtcattgactgggatgtacctgagcaaccttcttcgcagcaggagatgagagatgaaccacaggttggtgggatctatgtcaggttattccttaaagatcccaaattccctcttagaaatcccaagagattcctggaagggcttctggaccagtacttgtcttctattgctgccacgcattatgagtcacaatctgtggactctgggcttcctttgcttctttctgctgctttggtttcattattgcgagtgcaccctgcacttgcagaccatgttggttatcttgggta

SEQ ID NO: 211703 - DNA, 253 bp, Gossypium hirsutum
ggaaagaattcttccgtcaagtcaggagccgcttgtcgtatgagcagtttggtgcattggtggcaaatgttaaagaactaaactcccacaaacaaacgagagaagagactttgaggaaagcagaggagatttttggcccggataacagagatctttatgcaatatttgagggtttgattaatcgcaatgtccattaaatcagctgagtagtcatcggcttttccaacttgtgatttatttggtaaattttttg

SEQ ID NO: 211704 - DNA, 333 bp, Gossypium hirsutum
ggcaaagctgcggtgaatttgatgaagttgacactgtttaggcaatattacattgtggtgatcggctatatttactttactcgagttgtggtctatgctttggtgacgattacatcatataaatatctttggaccagtatgggggccggggaagtggccactctcgcattttatgtgtttactgggtataaattcaaaccagagccacataacccgtattttgttattgatgatgaggaagaagaggctgctgcagaacagttgaagctagaagatgagtttgaactgtgaaagcattcatagagaaacaaaatatatatatatatatatgga

SEQ ID NO: 211705 - DNA, 374 bp, Gossypium hirsutum
tttggattcccggtcgaccgcgcgtccggtcgttttcccacacttcccacttccttcactctcatcttcaccttcttcttcttcttgggctgagccttcacccagaccccaattttttgcatcctctgcatctcccatggacaattcccccaaaaagttcatggatttcccattcgtcactgccccgcgtaggaacttgatgatcgatctcgtatccacgatggagcaccgtctacagtctcaactcataccatgcactttacccttcgatttacaacattactacaatccaagttaaacctcccatggctcactttttatccgatcaggccatacctcttcttaagttgatttcatgctatggaagttggtta

SEQ ID NO: 211706 - DNA, 391 bp, Gossypium hirsutum
gaagtttcctttctcgattttctatttagccaaacaagatgcagatcttcgttaagactgtaaccggcaagacgatcactctcgaggtcgagagctccgatacgatcgacaacgtgaaggccaaaatccaagataaggaaggcatccctccagaccagcagcgtctgatcttcgccggaaaacagctcgaagacggccggaccttggccgattacaacatccaaaaggagtcaactctccacctcgtcctccgtctgcgcggtgggatgcaaatcttcgtgaaaaccttgactggcaagacaatcactctcgaggtcgagagctccgacacgatcgacaacgttaaagcgaagatccaagacaaggaaggcattcccccagaccagcaacg

SEQ ID NO: 211707 - DNA, 399 bp, Gossypium hirsutum
cccacgcgtccgattgattttactcaattttgaaataaaattaaaatttgacttcggctggttgtgaaatttatgaaattgaaaagaatgaaagagaaaataggatggatacttcttttaatcatttttctttagactaatttgaaaaacaactaagtgaaaattggtgggttttgtttgttttagtcactacttggggtacaggggacaagttatcgtaacaaaaattattgagttagaatttgttgtgttctacagcaattgagacgacactgtggtcgatcgagtggggcattgcggagctggtgaaccacccttgaatccaaaaaaagctgcggcatgaacttgacactgttctatgacctggtaaccagatcactgaacctgacacccacaaac

SEQ ID NO: 211708 - DNA, 345 bp, Gossypium hirsutum
gatataccgaaaaaagctctttcattgaacccttaccctctctcaaaagcagaaaaaacgatagggaaataaataaaaatccaaaaaaccgattaggttcgacgatttgaatcgctccgtctatttccccgtttctagctctacgaatcaatcggaaaaaaccttcgatttggccggtgaatggaagcaatcagaaaacaagccactcggcttcgagaacaagtcgctcgccaacaacaggctgtctttaaacagttcggtgctgggggatatggaagttcaaataacgtaattactgatgaagtagaacttcaagcacatcagaaactcgagatgctttatgtc

SEQ ID NO: 211709 - DNA, 364 bp, Gossypium hirsutum
cagatctgttacactctgaattatttaagcagcacgtcacaagggatctagagcaaggtgggtgaccttgggttgagtgtagagatgaggaaaatcatgggtgccaaagttcttttcttctttgctttgctttccttttcagctgtctcggcatttgcacaggatgaggaagaccaaggtcttgttatgaacttctacaaggattcttgtcctcaggctgaagacattattaaagagcaagttaagctactgtacaagcgacacaaaaacactgctttttcttggctgagaaacattttccatgactgtgctgtccagtcatgtgatgcttcactgctgctggactccacaagaaagagctttg

SEQ ID NO: 211710 - DNA, 416 bp, Gossypium hirsutum
ggaaaacccgtcccggcggacgcgaaacgcccacgcctccgcccacgcgtccgcccacttcttccggaagaaaagagtgaaaaattgtgggttttttaaaatcaattgaaaaccactccattcactctttttttcctgccttgctgatctttttggggttcttccacaaaaagaaactaaaaaatttgggtgatctgtgttgaaaaagaaataaaaaatggcgacattccaaggaactcaacaaaaatgcaatgcatgcaacaagactgtttatttggtggataagttgacggctgataatatggtttttcataatgcttgcttccgttgccaccattgcaagggtaccctcaagcttagcaactacaactcattttaaggggtgctatactgcaggccacactatgatcaactct

SEQ ID NO: 211711 - DNA, 405 bp, Gossypium hirsutum
cggacgcgtgggtgagagtgaagcttccccatctaattagggcagtgcgtcgtgctgggcaaagggtcacttgggtcagtgaccctatgcatggaaacaccatcaaggctccttgtggtctcaaaactcgccccttcgattccataagggctgaagtgagagctttctttgacgtgcacgagcaagagggaagtcatcctggaggagttcatctagagatgactggacagaatgtgacggaatgcatcgggggatcccggactgttacattcgatgacttgggttcacgctaccatacccactgtgaccctcgtttgaatgcctcgcaatctcttgagctcgccttcattatcgccgagcgcctcagaaagaggaggatcaactcacagcaaccgcaaccactaa

SEQ ID NO: 211712 - DNA, 268 bp, Gossypium hirsutum
  unsure (1)..(268): unsure at all n locations
tctcaagtaatcttcacatgctcncacccctataacaatgaatcccaccatcacctcccgtgagatccatactgccttaagactggtcctccctggggagtccgccaatcacgctgcttccgaatggactaatgctgttactaagttcactaattcttactttccataattttaaaatatcaaaaaatttagtattactataatttattttatttgagaactgcatttagctagtttaagatatatttttcatgccttccttattaat

SEQ ID NO: 211713 - DNA, 406 bp, Gossypium hirsutum
aaaacccgggccgacccacgcgtacgcttcatttgtacgttcataaaaaaaattttatattccatgtgatactttgcaattgaaaagaaaaagttatatattttcaaaaaaaaaaaaaaaaaacaaaaaaacaaaaaaaaaaaaaaaaaaaaaaaaaaaaaaaaaaaaaaaaaaaaaaaaaaaaaaacggcctccgttctaaaggatccaagcttacatacccttgcatgcaacataataacttttttatagtgccacctaaatcaaattcactggccgtaattttacaacgtctaaactggaaaaaccctgtcgttacccaacataaactccttgcagaacatccccctttcaccagctgtcgaaataacaaaaaatcccgcaccaatctccacttcaacagttg

SEQ ID NO: 211714 - DNA, 424 bp, Gossypium hirsutum
ccgggccggccgcacgcgtccgcccacgcgtccgaaaagaacaatgttttttgtttatccagatccggatcaacccgggccggttgatcacttcgaccgtcttcctcattcggttcttcttttagtcttcaacaagatcggtgacgttaaagctctcggccggtgctgtgttgtttcccgtcgtttccattcccttgttcctcaagtcgaaaacgtcgtcgttcgagtcgattgtgttatctccgatgacgattgttcatcttcttcgtcttcatcggataaatcgcgtgctctcgtcggtcctttttcgaatctctttcgtcttgttttcggggccattgttaaaccgcttcaagctttgggtcaattccttggtcctaaacggtcggttttgaatgaaaccctaaactcccttttctcgtct

SEQ ID NO: 211715 - DNA, 381 bp, Gossypium hirsutum
  unsure (1)..(381): unsure at all n locations
aaactcaaatttttttttttttctacccacgcaaactanaccctgggttgcttttttaaatatccggttatcaaaattaaattcttcctgaaacccataccatttatttaatcaacgctttcttaccccaatgaaaatacctctatgccttaattgtcaattgaatgaacatttgctccaattatcttccttcttctcttaccaccttgcatcagctcgaagatattgtgcgcaaagacaagcttgtggtgtctacctcctgctcgcttctccacactgccgttgatctagtaaacgagactaagctatatgatgaaatcaaatcctggctcgcattcgctgcccagaaagttgtttaagtcaatgcactttccaaagcat

SEQ ID NO: 211716 - DNA, 400 bp, Gossypium hirsutum
gttttgatcgagacctactttgcttatcttaccactgaggcatacaagacccttgttgggttgaatggtgttaccgcttatggtttggatttggttcgtggaacccagaccattgatttggtcaaggctggcttccccgaaggaaaatacctctttgctggagttgtcgatggaaggaacatttgggccaatgatcttgcttcttctcttagcaccttgcagcagctcgaagatattgtgggcaaagacaagcttgtggtgtctacctcctgctcgcttctccacactgccgttgatctagtaaacgagactaagctagatgatgaaatcaaatcctggctcgcattcgctgcccagaaagttgttgaagtcaatgcacttgccaaggcattggctggtc

SEQ ID NO: 211717 - DNA, 404 bp, Gossypium hirsutum
  unsure (1)..(404): unsure at all n locations
cagcagcagcagcagcagcagcagaagcatggggtttagagacgaaatggcagcgaaaaggaagactcccgtcaagaccagaaacccatatctgatccgtggtgtgggaaagtattccaggtctaagatgtaccacaagcgtggcctttgggcaatcaaggccaaaaatggcggtgctttcccccgccatgatcccaaacctaaggcccccgctgccgctgagaaacctcccaagttttacccggctgaggatgtcaagaagccgtttcttaacaagcgcaaacctaaacccaccaaactcagagcaagcattacaccagggactgtgttgattttgttggctggaaggtttatggagaagagagttgttttcttgaagcaacttacttctnggctcctttttg

SEQ ID NO: 211718 - DNA, 328 bp, Gossypium hirsutum
taccacttacacttcaagctcatatttgctttcatctcacccaaatagactagtcctggcgttggacttcttaattatctactattagatcttaaattcttcctagagggcttgccatcttgctaaacaagcattctatgaggctattgctaagcttgctggccttaatgaacaatcttacaacgatagcaccctaatcatgcaccttcttagggacaacctcaccttgttgacctccgatctgccacaggaacgaagtgatcaatcaaaatcatatgaacctcatgctgagagttcattggatgaaagagtattcttttaaaactgg

SEQ ID NO: 211719 - DNA, 361 bp, Gossypium hirsutum
gtttatggcgaggtggtggggttgacatcatgttgtttatatggaggagctccgtaccacaccgaagagatgaaaatgaagaaaggagttgatatagttatcgggacacccggccgcataaaggatcacatagagagggggaatattcacttaagttcattgaaatttcgagttcttgatgaagccgatgaaaatgctaaaatgggatttgttgatgacgttgaacttatattaggcaaggtaaaaggatgcaagtaagggttcagacacttctttttagtgccaccttgccagactgggtgaagggtattgcagcaagatttcttaaaacaagtaagaagactgttgatcttgttggtaa

SEQ ID NO: 211720 - DNA, 395 bp, Gossypium hirsutum
aggaggcattgacacatgaatctgtgcatgagtcctactgttaccagaggcttgaatttgttggtgattctgtgttggatttgctgatcacccagtatctctacaaccatcacactgatatagatccgggtgagttgactgacctgcgctctgcttcggttaataatgaaaattttggtcaagttgccgtgcgccatgaccttcataagcatcttcaacattgttcaactttactatcaaaccaaataagtgaatatgtgcagtccttcactgaatctgataacaccaccagattagatcccagcataaaaggtcccaaggctcttggagacctggttgaaagtattgttggggcaattctgattgatacaaacctgaatcttggaaaagtctgg

SEQ ID NO: 211721 - DNA, 409 bp, Gossypium hirsutum
gcgtacgcccacgcgtccggccggattatgttaagcttgtcaaggcactttgtgctgatcatggtggtaaagtgctacgtgcccggagcgcaaaatcacttggcgagtgggctggtttgtgtaagatagactctgagggtaaagcacgaaaggtagttggttgttcctgcgtagttgtgaaggattatggtgaacaacatgaggccgtcgaagttgttcagcagcacaaggactaggtgaccggaggatggtttctttggtaaaatcatagctatttttctgggccatttatatttgtttgatagtgaactgtggattaatatgcctcagaatttcgttttctttttccgaagttgttgcaatgctgaactgttcggtgtttcttaaatatgctaggcattttttccct

SEQ ID NO: 211722 - DNA, 368 bp, Gossypium hirsutum
acgcccacgcgtccgcgcttttatgatgccagatttgaagacgttcatcaaccctattggttgtatgtttgctttctttgcaagaagcctcttgggtgtaaccgtgacatcttcatgtacagaggggacacacctttctgcagtgaagactgcagacaagaacaaatcgagatagatgaagctaaagaaaaggacatgaacctttcttcctcagtgaaagctatgagaaagaagagccaaagggagtctacatctccgaatgaagctcaaggttactctattcgaactagcacagttgcagctgcttaaatcacaccacaaatgaaataaacaaaaacatatctaccatatatatatatgaatagttc

SEQ ID NO: 211723 - DNA, 294 bp, Gossypium hirsutum
  unsure (1)..(294): unsure at all n locations
acaatanatcccaagcgcaacgctactttttttaatgaaatctccnatttcatgcggacgagtttgcaacaatgggtacacttcatgacatatttcatgtaacgaaagtactacaaggtgcacaacctgttccgtttcttgactccatacataggataagaattacaattaatacatcatggtacttggaatattttcacgaaaacattcaaccttctattatccacagatatatctaatctatcaatttccatatatttgaagacttcaaaactaagattgcatattttaacc

SEQ ID NO: 211724 - DNA, 349 bp, Gossypium hirsutum
cccacgcgtccgaagagatataattgaaagaaaagaaaaatggttctgctagagaaactttggggtgatgtattggccggacctcaaccggaacgtggccttggccggctgaggaagatcacaaccaccccacccttgttcaccaaagatgaggcttcatcaatggcgatgccgacaagtccgactacacctgggacaccgtcgacgccggtgtcggctcgtagggacaacgtgtggaggagcgggttcaatccaggtagcaaccttgcaaccaaatgtattggcgctgaagttttcgacaagccttaacctaactcttctactggttatgactggctttacagctggg

SEQ ID NO: 211725 - DNA, 325 bp, Gossypium hirsutum
ttaaaagatcctctcatttctttcatcggaattgacaattataagtccgtcttttcatcactgcgattccatcccaaaatatttttcaaagctctctggcttgacattgtcagtgtatggcatccaatggataatgtcataatggttcgctggaccatccatggcattccacgagtcccatgttaaagtcgtggtcgatttgatggcacttcttaatacaaactccacaagaaaggaaaaatatattatcaccgattctacaacaccccactgaattcaccccctaagtttcacgttctagctttggaagatctaaatccatcca

SEQ ID NO: 211726 - DNA, 404 bp, Gossypium hirsutum
cccacgcgtccggccggattatgttaagctggtcaaggcactttgtgctgatcatgatgggaaagtgctacgtgccccgagcgcaaaatcacttggcgagtgggctggtttgtgtaagatagactctgagggtaaagcacgaaaggtagttggttgttcctgcgtagttgtgaaggattatggtgaacaacatgaggccgtcgaagttgttcagcagcacaaggactaggtgaccggaggatggtttctttggtaaaatcatagctatttttctgggccatttatatttgtttgatagtgaactgtggattaatatgcctcagaatttcgttttctttttccgaagttgttgcaatgctgaactgttcggtgtttcttaaatatgctaagcattttttcccttt

SEQ ID NO: 211727 - DNA, 421 bp, Gossypium hirsutum
cgggcggaccgacgcgtccgcccacgcctccggaactcacagcatactttttggcgggttccgatattggaaagggccgggggatgtccattgatgatgatcgaacactaaacaaaaccgtccattttcaacctccaagtaacctattaaacatgaacgaaatggcttcactatgggagacaaagatcggccgcgtgctgcctagggtaaatatcacagaacaagatctgctccagcgggctcaagagatgcggatcccgcagagtgtggttgctgcgataactcatgacattttcataaatggctgtcaaataaacttcagcttggacaaaactactgatgttgaagtctgctctctctatccgaacacttcttttcggaccattgcggagtgcttcgactattttgccaaaaagatatc

SEQ ID NO: 211728 - DNA, 407 bp, Gossypium hirsutum
gaccgacgcgtccgctgctgcagaaaatgttctaacaaagcgattcttgtgacacatcgactcttcaaaggatggaagctttacttgcagcgaagcccacacccactacagaataccacaagaccataacaggtgatcagaatcctccagctctgccttacacagtggacaagatacttccatacacaaagtcctacgcgccaaattaccaaagtgaggcaccaaattattcaccggtctccaaatatgtattttaatttttcctggaatgttcaacgaccataaggctttgtaaaaatctttgtaatcctcattaatagaggacatgtatatagtgtcctgtaagtattctctatttaagactcgatacccactcttaactgtgtagtccccaaaaccttcatgtt

SEQ ID NO: 211729 - DNA, 402 bp, Gossypium hirsutum
aaacttgccaataaccccaaatcccacagctgataattgcgaacccaacagatccagatgtccgagattaaccctaaatccacccgtctctgttagctagttcctttcttcggccggtggcccaaatcctctgcgtttcgaatcagagttatactcaaaggacaagccaagcccccgaaacaatgccattcaaaacaatgatagaggttgaaccaccgagtccgttaagatatatcatcggagcagcggtcatgatgatcggagttgtattgcccgtcggatacatgatgttccgtaacaaacgcgtcccttcctcttcttcttattccaaacagacgaacaaagttttaatatagagattttggtggaagagagacttgtctttccgcgaaattggtgatt

SEQ ID NO: 211730 - DNA, 306 bp, Gossypium hirsutum
  unsure (1)..(306): unsure at all n locations
ggaaaacccgggcggaccgacgcgtacgcgggattacccgctgagtttaagcatatttataagcggaggaaaagaaacttaccgggagtcccctattaacggcgagcgaaccnttaaaagcccagcttgagaatcggtcgccatcggcgtccgaattgtagtctggagaagcgtcctcagcgacggaccggtcccaagtcccctggaaaggggcgccggagagggtgagagccccgtcgtgcccggaccctgtcgcaccaagaggcgctgtctactagtcgggttgtttgtgaatgcacccctaat

SEQ ID NO: 211731 - DNA, 400 bp, Gossypium hirsutum
gaactcttgaaggctgtggaaattgataccagtcagcctccatatgttttcaaatgccagttgtgcgatctgactggagtacctcctgaaaggcagaaaattatggttaaaggtggcttgttgaaggatgatgcagattggtcaacagttggtctgaagcagggtcaaaagttgatgatgatgggaactgctgatgaggttgttaaagccccagaaaagggccctgtttttatggaagatcttccggaagaagaacaagtggtatctttgggtcatagtgctggtctatttaatctgggaaatacctgctacatgaattctacagtacaatgcctccattctgttccagagttgaagtcttctttagtaaaatattcacattcaggaagaaacaatgatg

SEQ ID NO: 211732 - DNA, 403 bp, Gossypium hirsutum
  unsure (1)..(403): unsure at all n locations
gacccacgcgnccgcgatgttctgctctagatgccttgatccatcctttctttgacgagttgcgcgatcgaaaggcccttttgccaaatggccgtttcctgccgccattgtttaacttcaaacctcacgaactgaaaggcgttccggaggagataacggcaaaactgataccggagcatgcaagaaagcaatgtccatcacttggattgtgattttgatgtgtaactcaactagtagcaaaagtggattatcattatggaagcttttatggtgtttgttgttcatctatgccccagttttttgttcttgttgcatgcatgtgttgttgtttgttatgtaaaagcaaattttagacataaaaatcgtccatcccactgtcttctatatatttctttcaagattt

SEQ ID NO: 211733 - DNA, 402 bp, Gossypium hirsutum
  unsure (1)..(402): unsure at all n locations
cccacgcgtncggcttgctacaaggctctaaatgaccaccatgtcatgcttgagggtactcttgtgaagcctaaacatggtgacccctggttcggactccccgaaggttgccccagatgttattgctgagtatactgttcgtgccttgcagcgaaccgtccctgctgcagtcccagctattgtattcttgtctggtgggcaaagtgaggaagaagctactcttaaccttaatgccatgaacaagcttcaaaccaagaaaccatggtcactctcattctcatttggacgtgcccttcagcagagcactctcaagacctgggcaagaaaagaggagaatgtgaagaaggcgcaagatgctttgctcgttaggtgcaaggctaactcagaggccactttgggtac

SEQ ID NO: 211734 - DNA, 389 bp, Gossypium hirsutum
ttcgctccgcacagtccttaggaaagttagtgatgatggtggttccattgatgccaaccggcaggaatctgctgctgtttctgttggtgaagggacaagcagtagctcctccactttaggtgacaactacgtggctttatttgtacggatgcttgggctagaccatgacgctcttgaccgagaacaggcaatagttgcactatggaaatattcactaggtggaaagaattgcattgatgctattatgcagttccaaggctgcataaacttaactgtgaaccttcttaactctgagtctagtgctacatgtgaagcagctgctggtcttttacgatcagtatcttcaatcaatttgtacaaagatatagtagcagaaagtggagcaatag

SEQ ID NO: 211735 - DNA, 389 bp, Gossypium hirsutum
gtgaataaaaataaagtatggctattcaatttaattttgtttcatccatgttaatactcggacgtctgtccatatcatccgttgaaggtcaaggaggaggaggtggtggtgttattgatgttgttgcaaagtttggtgcaaaggcagacgagaaaacagatttgagtaagccattgttggatgcttggaaagaagcatgtgcctcgacatctccgtcaaaaattgtgattcctaaagggatatattttttaagtacagataccttagatggtccttgcaaggctcctattgagcttcaagttcaaggcactgtgaaggttccggcagactctggtgctttcaagaagcctaaatggatttctttcaatagaattgaaaatttcaaattg

SEQ ID NO: 211736 - DNA, 396 bp, Gossypium hirsutum
ctcaaaccaatttgatcaatcgaattttcatctctctctttcttctatcctgcaggcccggtagaaatttcctcaagtgattttacgagaatgtctcgggtctatgttgggaatttggatcctcgggtcactgagagggatctcgaagacgagtttaggattttcggcgttctccgcagtgtatgggtagctcgaaggcctcctggttatgcgtttattgagtttgatgatcgcagggatgctattgatgcaattcgtgaactggatggaaaaaatggttggcgagtggaactttctcataattcaaaaggtggtggaggccgtggtgggcgccgtggtgggggtgaggatttaaagtgttatgagtgtggtgaacctggtcactttgctcgcgaa

SEQ ID NO: 211737 - DNA, 400 bp, Gossypium hirsutum
cggacgcgtgggccgaggggtacacgtgtcgactcttccaattacaacccattaatcgggtgggtgcatggagctcaaatggtcgcatttaatatgcagggttatggaagatctttatggttgatgcatggaatgttcaaagccaacgggggatgcggatacttgaaaaaacccgatttcctattgaatcctaacaaagtctttgatccaaatgtcaagttaccggttaaaaaaattttgaaggtaactatgtatatgggcgaagggtggtattatgattttcatcacactcattttgatgcgtattctcctccggacttttatgcaagggtggggattgctggagttccgttcgattcagtgatgaagaaaacaaagacattagaagacaattgggtgc

SEQ ID NO: 211738 - DNA, 376 bp, Gossypium hirsutum
ggaaatgtcttcatcttcgctaacaatcgttcggttcttttgaaccctaacacccaaacgatcgtccacgagttcccagtgctccccaatggtgctcgtaattatcctgcgtcaggaagtgcttgcctccttccgatcatgctcaagcctaatgaagatcgtagagtgatccccgccgaggttttgatatgcggtggtgcatcacatgatgcgtacgccaaggccgatttgcagcgtcctaaagtgtttttgccagggaacaccgactgtgctcgccttgatatcaccaaaaggaacggcaaatggaagatcataaacatgccatcagctcgtctgttgggagacatggccgttttaccaacaggagatgtgctta

SEQ ID NO: 211739 - DNA, 373 bp, Gossypium hirsutum
gcaagaacaaaaatttcatttgaaaccccgttttcttttggtctcgaagcgattcaaaagggcgggattctattttttagggtttgggttttcattgatttttagtgaaaaaattataaaaaaattatgggaagaggtagggttgaacttaagaggattgccaacaagatcaacaggcaagtcacttttgcaaagagaagaaatggtcttttgaagaaagcttatgagctttccgttctttgtgattcttcaaactctcttattatcgttatatatgtattcaggatttttctgggctcacccccttttacattcgataacacattctagatgtacctaacatgcaactatggagctcctgagccaaatgtgt

SEQ ID NO: 211740 - DNA, 391 bp, Gossypium hirsutum
cccacgcgtccgcaagaacaaaaaaaacaggtgaaaccccgttttcttttggtctggaagcgattcaaaagggcaagattcttggttttagggtttgggttttcattgatttttagtgaaaaaattataaaaaaattatgggaagaggtagggttgaacttaagaggattgaaaacaagatcaacaggcaagtcacttttgcaaagagaagaaatggtcttttgaagaaagcttatgagctttccgttctttgtgatgctgaagttgctctcatcatcttctccaatagaggaaagttgtacgaattttgcagcagctcaagcatgatcaaaacattggagaggtaccaaaaatgcaactatggagctcctgagccaaatgtgtcatcgag

SEQ ID NO: 211741 - DNA, 408 bp, Gossypium hirsutum
ggaaaacccgggccgaccgcacgcgaccgcaacaattcacaggtctaagatgtccaccactctcctcatctcgtttttctgtggggccgaggcatacccagagagtgggcgcttttgcttctcctataatttcagccgtcgctgtctcaaatgcacagaccaaagataggcttgaactcaagaagatgttcgaggatgcttacgaacgctgtctaactgctcctatggaaggcgtggcttttactgttgaggattttcaaaatgctcttgagaaatatgactttgattctgagcttggaaccaatgttaaaggaacatttttctgcacagatggcaatggggcgtttgttgatattactgccaaatcttctgcatatctaccgggccaagaagccatcattcacaaaa

SEQ ID NO: 211742 - DNA, 323 bp, Gossypium hirsutum
aggcaatcaatgtcatctcatgctggtatgaagataagactgaatgggggcaaagtgtgggatggatctacggatcagtaactgaagatgttgtcacagggtataggatgcataatcgtgggtggagatctgtttattgcgtaaccaaaagagatgctttccgtggcactgctccaataaatatcactgatatacattaccacgttctacactctgccactgtgtctggcgagatatatttttcacacaacacaatgccctgttaggcagcccgaggcttaagtttctacagaggattgcttatcttaatgttgggatatacc

SEQ ID NO: 211743 - DNA, 401 bp, Gossypium hirsutum
gcattatcaagccggtgaaggaaaggggtacaaccttagaccctgaattggttcaagccgggacaggaacctagaatcataaaggtgatgcaaggtgggggtggagaattcgataccataaccaaagccatcgagagcgttccatcagggaacgccaaacgcgtgattatatccatcggacctggatcttacaaagagaaaattagaattgaaagaaataagcctttcattacattgttaggagatcctaaaaacatgccaaatttgacatttgacggcaccgccaagcaatatggaaccgtagatagtgccactcttattactgagagtaattactttgtgggtgctaatctcaatatagtgaactccgctccaaggccagacgggaaaatggtaggagc

SEQ ID NO: 211744 - DNA, 398 bp, Gossypium hirsutum
cgagttttctctgttggcttccgtcacaactccaaaaccgtacacaaaatgggcaagggtgtgggcgacgagcaagtctcatcaatgaaggaggctttcactctcttcgacaccgacggtgacggcaagatcgctccatcggagctagggatcctaatgaggtctctcggcggtaaccccacccaagcccaactcaaagctattatcgctgaagagaagctcacggcgccctttgacttccctcgctttttagatctcatgtccaagcatatgaaacctgagcccttcgataggcagctacgcgatgctttcaaggttctggataaggacaatactggctttgtctccgttgcagatctgagacatatactgactagcatcggagagaagctggagcc

SEQ ID NO: 211745 - DNA, 390 bp, Gossypium hirsutum
gaagaatgtcgaaaacgctggtgcaaccgatagggcaaaagcggctgacgaatgtggccggcgtgcgtttgaagaaacacggcatgcgatttgaaatcgcttgctacaaaaacaaagtcctctcatggcgttcccgggtcgagaaagatgtggacgaggttctacagtcccatacggtttactccaatgtttcgaaaggggttcttgctaagaccaaagatttggttgctgcttttgggactgatgatcagactaaaatttgtttggagattttggagaaaggggagctacaagttgctgggaaggaaagggaatcgcaattttcgagtcagtttcgggatatagcgacgattgtcatgcaaaaaaccatcaatcctgaaactgatcgcc

SEQ ID NO: 211746 - DNA, 397 bp, Gossypium hirsutum
ctgtcgtccatgttggccaggttgccaagataagtccaaccgcccctcttgataaagtctgtggcattagctgtgggatatgtacaggttttggggccactgtgaatgttgctaaacccaaaaagggtcaaactgttgcagtttttggactgggtgccgttggtcttgccgccgctgaaggtgcaagggtttgtggggcttctcggatcatcgctgttgatgtgaaccccagaagatttgaagaagctaagaggtttgggattacagaatttgtgaatccaaaagactacgataagccagttcaagaggtgattgtggagatgaaccgcggaggagtggatcgcagtgtggagtgtacagggagcgtccaagccatgatttccgcttttgaatgcgt

SEQ ID NO: 211747 - DNA, 414 bp, Gossypium hirsutum
cccggcccgagcgacgcgtccggcataagccagccaaccggtcctctagtgtccgttatatacagagtttatggagcggttgttactcggtggtttttacaacgagctgttcatcaactagttacactcgagatcaaatcagtattgctttcggtgatgcctatggtaaccagatatatgtgccgaggttggatgatccagcgtctagggcatttgaacaatgttcttcagataagtttgagattaaaggaccatgtgcgtatcagatctgctatgtttatctctaccgaactggaccagatggttggaagccggagcaggtgaagatttatggctataattcaagggctgttacattttactatgacaccttcattccaggttacacttggtatggatttaattattgcaata

SEQ ID NO: 211748 - DNA, 399 bp, Gossypium hirsutum
aacccacttcagttgcctcctccgttgccatccccaaccatgctgcaccctcatcataagtgttcaattcatacaagtccgtccagtgcaatagttgcatcgatgaataacatggcgttcggaagcggcggtggcggtgggaacgagtcttcaagcgaggatcttaacgtgttccaatctaacgccgacggagtgcccccgcctccgccttatgtgttgtcaaagaagaggttccgcacaaaatttacgcaggagcagaaggataagatgttggagttagccgagaaagtgggttggaggatcaataaacaagacgaagaggaagtacagaaattttgtgctgagtatggggtgaaaaggcaggtattcaaggttttgatgcataataacaagaacgtg

SEQ ID NO: 211749 - DNA, 369 bp, Gossypium hirsutum
gatccctcttgtagttaagtccttgaagaaccctaggagtgctgtttgtaaaactgcaattgtgacatctgctaatattttcagtgcgtataatgatgatttgattgattctttggatcccctgcttgtacagcttcttcttaaggcttcacaagacaaaagattcgtatgtgaggcagctgagagggccttagaggctatgactacttcagtttcccctatgttgttgttgcccaagttgcaaccctatctgaagaacagaaacccacgaattcgagcaagggcatcaatgtgctttagtcatagtgttccacgtctgggtgttgagggaattaaagaatatggaattgacaaattgatacaagtagc

SEQ ID NO: 211750 - DNA, 363 bp, Gossypium hirsutum
tttaactggaacatgtatagggaagtcccttctgtctgactgggatttaagtttgacttgggaagggagctttttcatttgaccaaagatacaaccgactatgcttggtacacaactagccttttgttgggtcggggagatttaccaatgaagaaaaatgtccgaccagctttacgggttgctagtcttggccatggaatccatgcctatgtaaatggtgaatacgctaggtctgcacatgggagcaaagttgataagagctatgatatgcagagagctgtaagcttgaatgaaggggaaaaccatattgctctcttgggctacttagtgggacttcctgatagcggagcctacattgagaaa

SEQ ID NO: 211751 - DNA, 405 bp, Gossypium hirsutum
gaaaactttgtttgcaaaagccagcgccctctatttccagctccgtttctccaacagttccgttcccaccgccgcaccgtcgatttccacctcagtttctccgtccatggctgcaacggactctcctctaacgaccaaggtttgtatcattgggagtggccccgccgctcacacggccgctatctacgctgctcgtgctgagctcaagcctattctttttgagggatggatggctaacgatattgcgcctggtggtcagcttaccaccacttccgacgtcgagaacttccctggattcccggatggtatcatgggttcggagcttatggagcggtgccggaaccagtcgcttcggtttggtactactatctttaccgaaactgttgacaaggttgatttttcttc

SEQ ID NO: 211752 - DNA, 367 bp, Gossypium hirsutum
cccacgcgtccgcccacgcgtccgagccaaatctatggcaagacccttgctcaggacctcggaggtgagggaattttaaaagataccgtagaatgcctatgtacccctcaaacatatttcaccagggtattggaagcagctgtgaaggaggacgcagatgaggaatcaaaaagagcactgactcgagtgattgttactcaaaaggagcagctggtgcaggaaggctttgttcctaataaaattcaagacattcttttagggctttacaaggatttcttgcttgcctccattgcaagtggagatatcaaataaacaagaaaccccactcttaaattgttcaataaaattatgaattaccttggattcc

SEQ ID NO: 211753 - DNA, 437 bp, Gossypium hirsutum
gggaagccacgcggcgaaacaatgtttgcagctacaaactttaacagatgagcttttacactccactttagcttctagatatgtgcgcgcttttgtaccaaggttcaagatgccaaataagtctattccaaaggacgcggcgtatcaagtaatacatgatgagcttatgctggatggataatccgaggttgaacttgactttttatgttacaacatggatggaacctgtgtgttgttagcttatgatggctgcatttaataagaactatgttgacttggatgaattccctgtcaccacttgatcttataaattgatgtgaaaacaatgaattgtaatcatttttttaatacaacaagatcattgttttaatgtagttcaagaaaaattgattttatataatctgatatatatatccttatataatgtataattaatt

SEQ ID NO: 211754 - DNA, 437 bp, Gossypium hirsutum
  unsure (1)..(437): unsure at all n locations
atttgaatgaaattgtctagcttgtaggaattgatgctctagctgaaacggataagagcacactagaaactgctaaacttttaagggaagattatcttgctcagaatgcttttactccatatgacaagttctgtccgttctacaagtctgtttggatgatgcgcaatattgttcatttcaatgctttggccaaccaggcagtggagaaagctgccgggatggacggtcagaagataacatacagtcttatcaagcatcgtctaggagatctcttttatcgtttagtgtcacaaaaatttgaagacccagcggaaggagaagaagccctggtggcaaaattcaaaaagcttaacgaggatcttacggctggtttccgtgcattggangatgaaactaggtgaacaaaaaagttaaagattagactttcttcctaccta

SEQ ID NO: 211755 - DNA, 445 bp, Gossypium hirsutum
  unsure (1)..(445): unsure at all n locations
cccacgcgtccggcaagtttgttgcaccaattacccgaaattcaagacgaatgttggggtggaggatgagttcctacctcggcaaagtggtgatcttacaattatgtatgatgtgacgagaacgtacgactcgaactattgggcacaggttactatctcaaaccataacccccttgggcggcttgataattggaaattgagttttgattggatgagggatgaatttatatatacgatgaaaggggcttatccgtatgtcgttgattcatcagactgcatatttggtccgcaaggacaacactatagggatctagactttggcaatgtgttgaactgtgagaggaggccgacgattattgacctgcctctgacaaaggcaaacgatacaaccatgnggatgatcccaaaatgttgccggaatggtactattttgccaccaacaatg

SEQ ID NO: 211756 - DNA, 181 bp, Gossypium hirsutum
cggacgcgtgggtttcgatcctattggggtggccctccggaaccgagtaatgattaacaggggccggccggggccttcctatttcatagacacaggtgaaattcttggatttatgaaagaccaacaactgcgaaagcgtttgccaagttctctatgaaatctgaatctatatcaatcaaaa

SEQ ID NO: 211757 - DNA, 427 bp, Gossypium hirsutum
gggttgtggtgggacttgtgctgagtgtggtcagcccaggtgcgcatcaggatgttgccaggctgaaactgtaaagagcaaaggtgataaagaaattggcagaggaagttttttctattgttggccgggatccacttattgaggtagctattagtttggagaaggccgcattatctgacgaatattttattaagaggaagctttatccaaatgttgatttctattctgggttaatataccgggccatgggatttccaccagagttcttcactgtgttatttgcaatccctcgaatggctgggtacttggcacactggcgcgagtctctagatgatcctgatacaaagataataagaccccaacaggtttatactggtgtatggctacggcattatatgccactcaaggagcgcatgggcgtgaatga

SEQ ID NO: 211758 - DNA, 453 bp, Gossypium hirsutum
  unsure (1)..(453): unsure at all n locations
cggacgcgtggggaaataacttgtggaccaggacatggtataagtatcggtagtcttggagagttccaaaatgaagagccagttgagggaatcaaaatctcaaactgcaccatcactaatacttcgaatggagctcgaatcaaaacttggccaggcgaacatggtggggcagtatcagaaatacattttgaggatattaccatgaataatgtctcttcccctatcctaattgatcaacaatattgcccatggaataaatgcaagaaaaatgaagaatccaaagttaaactaagcaacattagcttcaagaacatccgtggcacatctgcgcttccagaagctatcaagtttatttgcagcggttcttcgccatgtcaaaatgtggaacttgcngacattgatattaagcacaacngagctgaacccgcaacatcccaatgtttgaatgtcaag

SEQ ID NO: 211759 - DNA, 259 bp, Gossypium hirsutum
  unsure (1)..(259): unsure at all n locations
cgcggcgagcataatggttgntaaaagatttttgttttgggatatacagccagtggaaagtcaactgtaaatgaagttttttaaagactggttgagccaacaaaatgttaattttttattgataaaatatatatcttcatgctgtctctaaatgatcttaaatcacgctttagagacatccctcaagaaccagacctttaaaaaaagaactgtattaaagcaacaataaatcctattaatacattttccttaaataaaa

SEQ ID NO: 211760 - DNA, 427 bp, Gossypium hirsutum
cccacgcgtccgcccacgcgtccgatgaatttcaaaaaggtcatagccatatggccgttgttgtaagacagtgcaacaaggcagaccagccgccttctaacaactcatctaggagccctttgccggaagtgaaggttgacattgatggtgagaaatatcctcaagaaaacgctttaagacgtaaacgatcactgaagaagtggaagatctttcccacttcgaatgattcttttaaaagtggttcccggagccgaaaatggtcaaagggtactgattctgacatcttacatctaaatggcagtccactcccacagctccctgaagaagaggaggctgttggcattataacaatggaagatgtcattgaagagcttttacaggaggagatctttgacgagacggatcatcattacgatgactcatgaca

SEQ ID NO: 211761 - DNA, 431 bp, Gossypium hirsutum
  unsure (1)..(431): unsure at all n locations
cggacgcgtggggttctcaactaaacttataacgttcgatcgtttaacgcaaacccatttgtaagtgggggaaaggtttaagttcagagtcataagcaacatcaatggctccttcaactctgacggctcttgcggaagagaaaaccttgcaggcaagcttcgttcgtgatgaagatgagcgtcctaaggttgcttacaaccaattcagtaatgatatccctgtcatctctcttgctggtatcgatgatgttgatggcaagaggggtgagatatgcaagaagattgttgaggcttgtgaggattggggtgtcttccaggttgtggatcatggtgttgatactaaactcgtgtccgaaatgacccgttttgccagagagttttttgctttgcctgctgaagagaaagctcngttcgatatgtctggtggcaag

SEQ ID NO: 211762 - DNA, 411 bp, Gossypium hirsutum
  unsure (1)..(411): unsure at all n locations
gtggaaagtagttcatgggatggacgatatggcattgttgtttgtactgacagtgcggtctgtgctgaaggacctgcccggcctactggaggagcagctgcaattgctatgctaatagggcctgatgctcctattgcttttgaaagcaaatttagggggagtcacatgtcccatgcctacgacttttacaagcccaaccttgctagtgaatatccggttgttgatggaaaactctctcaaacgtgctatctcatggctcttgatacttgctataaatacttctgtcacaagtacgagaaacaagagggcaagcaattttccctttccgatgctgactactntgtatttcattctccatataataaagctngtgcaaaaaaagctttgctcgtttggtgttcaatgactttg

SEQ ID NO: 211763 - DNA, 335 bp, Gossypium hirsutum
gacgtgcatgcggattgcttattggtgcagttgttaacatggggcctgatctgtggaaggctgctgccgctggattgccttgagacgatgtcctgactacaatgctcgaccctactatccctcttacaacttcacagtgggaggaatggggtgaccctcgcaagggctagttacactcatatatgaagtcgtattcctctgtagataatgtgaaagctctaaagtatgcgaatatactggttacaagttggttacatgatccgagtggcatggactctacacctgtatagtttgtaactaaactaatggatatcaaaacagactataacatgcta

SEQ ID NO: 211764 - DNA, 342 bp, Gossypium hirsutum
cccacgcgtccgcccacgcgtccgcccacgcgtccgcagctcttcaaggaccatttcgtcggagagaggaagaaacttggaagcacaaaaagcatgaacaacgatggattgaaatgtgccatagatcatattttggatgctcaacagaagggggaaatcaatgaggacaacgttctctacattgtcgagaatatcaatgttgccgcaattgagacgacactgtggtcgatcgagtggggcattgcggagctggtgaaccaccctgaaatccaaaagaagctgcggcatgaacttgacactgttctaggacctggtaaccagatcactgaacctgacacccac

SEQ ID NO: 211765 - DNA, 429 bp, Gossypium hirsutum
gaaacttgctcagaggaagcatttcccttctgtcaactggcttatttcatactcaaagtacgcaggggcactggaatctttctatgacaaatttgatcccgactttattagcattaggactaaggcccgagaagtgcttcagagggaagatgatttgaatgaaattgtccagcttgtaggaaaggatgctctagctgaaaccgataagatcacactagaaactgctaaacttttaagggaagattatcttgctcagaatgcttttactccatatgacaagttctgtccattctacaagtctgtttggatgatgcgcaatattgttcatttcaatgctttggccaaccaggcagtggagaaagctgccgggatggacggtcagaagataacatacagtcttatcaagcatcgtctaggagatctctttta

SEQ ID NO: 211766 - DNA, 388 bp, Gossypium hirsutum
gcggaggatgttgctttgattgagtatgcgaaattgactggtagaccatttagagtgttcagccttgatactggaagactgaatccagaaacgtatcgattctttaatgaggttgagaaacattatggaatccgtatggaatacatgtttccagatgctgttgaagttcaggcattagtgaggagcaaagggttattttcattttacgaggatgggcaccaagagtgttgccgggttaggaaagtgaggccattgaggagagcactcaaagggttacatgcttggattaccggtcagaggaaagatcaatctccagggactagatcggaggttcctgttgttcaagtggatcctgtttttgaaggattggatggtgggattggtagct

SEQ ID NO: 211767 - DNA, 246 bp, Gossypium hirsutum
ttctaatctgtctttaggtttcaccttaaacatccattccagctttattgggacatgctctttttgacaaaggcatgtgaacctcatcactcttacctcatatttaaatcatttgctgtagataaaaacgttataaaatttgatggagatcacaactcctccaggccacagttttattatgattcaaacattattttcttcttcaatgtgctatgtcctactcaatattctacagcatgtacaagt

SEQ ID NO: 211768 - DNA, 393 bp, Gossypium hirsutum
ggaatgttgttaccttacagttgagttctttcgaaagcttcctcaagacgtggataagggtggcagtgctacgcaatcaatatttgaccgatacaatgactcctacctgaggagaattggaagtacagttttgtcttacgtaaatatggtctgcgctactttgcgccactcgattccaaagtccattgtttattgtcaagtccgtgaagctcaaagaagcctgcttgactttttctacacggaattgggtaaactggagcaaaaacgattatcagcgttactgaatgaggatccagcaatcatggaacgccgatccgctcttgcgaagagactggaattatataagagtgcacaagctgaaatcgatacggtcgcttggtccaagtaagagtg

SEQ ID NO: 211769 - DNA, 425 bp, Gossypium hirsutum
  unsure (1)..(425): unsure at all n locations
gctgcttcttcatttctatttttaatcagaaaatatatattaatactaaaattaaaatgggaagaggaaaattcaagggcaagcccaccggtcaccgccatttctccactcctgaagagctccgtgctggtacctctgctcgtccccgtacttttaagaaggaagaagctgaagtggaggaggaagaagaagagtctgaagaggaagtagaagaagaacccgagaaacgaaagggtactcaagggcttattgagattgagaatccaaatttggccaaacaaaagaatgtcaaagctaaagatgttgatatgggaagaacaactgaactatcaaagcgtgaaagagaggaaatagaaaagcaaaaagcacatgaacgatatatgaagctgcangaacaagggaaactgaacaagcaagaaaagatt

SEQ ID NO: 211770 - DNA, 371 bp, Gossypium hirsutum
cgggccgacccacgcgtgcgatctgtctaatcctcgttttcttcttcattttacacaccttcgattttcccaagggggtaggagatgtcttaaggtgaggatggtcagccacttgtttgtgacaatggaactggaatggttaaagctggatttgctggggatgatgctccccgagccgtattccctagcatcgtcggtcggccacgtaacaccggtgtgatggttggcatgggccagaaagatgcatatgttggtgatgaagctcattcaaagagaggtattttgactctgaaataccctattgagcatggtattgcgagcaactgggatgatatggaaaagatttggcatcataccttttataacgagct

SEQ ID NO: 211771 - DNA, 415 bp, Gossypium hirsutum
cccacgcgtccgatgcggtctcattcagctgcatgctatgcgatatggaacagttgcgatagttgcctctactggtggacttgttgacacagtcaaggaaggattcacagggttccaaatgggagctttcaatgttgaatgtgatgaagtggatccaagtgatgtgattaaggtggtaaaaactgtcaagagagctcttgcaacatatgggactcaagcactgaaagaaatgatccagaattgtatggcacaagatttttcatggaagggaccatcaaggttgtgggagaagatgttgttgagcctcggggtggctggcagtgaacctggcattgaaggagaggaggttgctcctcttgccaaggaaaatgttgccacaccctgagcataatcagaaggcaactatggataaagc

SEQ ID NO: 211772 - DNA, 405 bp, Gossypium hirsutum
ggagaaatcaatgaagacaatgttctttacattgttgagaatatcaatgttgctgctattgaaacaaccttatggtcaattgaatggggcattgctgagcttgtgaaccatccagagatccagcagaaactccgcaacgaaatcgacaccgtactaggacccggtgtgcaggttaccgaacccgacacccataagcttccatatctgcaggcagtgatcaaggagacactcaggctccgaatggccatccctctactagtcccacacatgaacctccatgatgcaaagcttggtgggtatgacatccctgcagagagtaagatccttgtgaatgcatggtggttagccaacaactccgctcactggaagaacccagaagagttccggcccgaaaggtttttcgag

SEQ ID NO: 211773 - DNA, 427 bp, Gossypium hirsutum
  unsure (1)..(427): unsure at all n locations
cccacgcgtccggactgttcactcccagattcaagatgaaactggcagaagtgtcaagcctgcttattttaactcgccacctttggacgtttcggtcgcattccctcaggcaactccagcatctacttttcctcctcttgcttccgactattatcaatttaatgatctattgagtcctgaggagcaggctctacgtaagaaagtaagagagtgtatggaaaaagaagtagctcctataatggcagagtactgggagaaggcagagtttccattccaaattgttcccaaacttggtgctcttcatatttctggtggtactatcaagggttatggatgcccaggtctctccctcactggaagtgctattgcaatggcagagggtgctagggttgatgcaagtngctcaacttttatcttggtgcactca

SEQ ID NO: 211774 - DNA, 431 bp, Gossypium hirsutum
ccgggcgacccacgcgtccgaacaaaatcaactgcttcacaatggcctctacaaccatggctctttcttccccatcattcggcggtggggcagtgaagttctccccttccacccctgaaatccagggaactggccgtgtttccatgaggaaaaccaccaagcctgttccttctggtagcccatggtacggtcctgaccgagttttgtacttgggtccactttccggtgagccaccatcttacttgaccggtgagttccctggtgactatggttgggacactgctggactctcagctgatcccgagacctttgctaggaaccgtgagctcgaagtcattcactgcagatcggccatgttgcgagctcttgtgtgtgttttccctgagctgttggcttggaacggtgtcaagttctgtgaaactttttggttc

SEQ ID NO: 211775 - DNA, 416 bp, Gossypium hirsutum
cttttcccatcagcatattcctatttgttttcctcactaattcggatgccttttatgaagtgattgctcagattttgtattaatattccttttggtgtttttgcaatgtgcagaactagaatggagacctttctattcacatcagagtctgtaaacgagggacaccccgacaagctttgcgaccaggtctctgatgctgtgctcgatgcctgccttgcccaggaccctgacagcaaggttgcctgtgaaacatgcaccaagactaacatggtcatggtctttggagagattaccaccaaagccaacgtagactatgagaagattgttcgtgatacatgccgctccattggatttgtttctgatgatgttggtcttgatgctgacaattgcaaggtcttggttaacattgagcagca

SEQ ID NO: 211776 - DNA, 363 bp, Gossypium hirsutum
  unsure (1)..(363): unsure at all n locations
gtcgccatcgatgcagcagggctcgaatttcaattctatttcggaggtgtgttcactggagagtgtggaaatgaactcaaccatggagttgcaatagttggctatggagaagttcttaataaaaagtactggatagtgaaaaattcatggggtactgaatggggtgaagctggctatgtaaggatggaacgtggagtctctgataaaaggggtctttgtggtattgcaatggatactagttaccctgttaacaagtgaacagctttttcagtgaaattggcctaggaattctgtttgcttattgaaatatttcacttccttttatatgttttataattataatttaagaatacantgttgnng

SEQ ID NO: 211777 - DNA, 408 bp, Gossypium hirsutum
gagaaagagcctgaaaacaaggagatgactctggaagaatatgagaagattgttgaggagaggagggagagctttgcttgcccttaagactgaagaaaggaaagttgataccaaagagtttgagtccatgcaacaactttcaagtaagaagagcaacgatgacatttttatcaaactgggttctgaaaaggacaagcgcaaggatgctgataaagaagaaagagtaaaaaagtctgttagcatcaatgagtttctgaagccagctgaaggggagaggtactacggacctgggcgtggtcgaggccgtggccgtggtcctagaagtggatatggaggcaatacagctagcagtgtgttagctccctcaatcgaagatcctgggcacttcccttcattgggtggcaagtg

SEQ ID NO: 211778 - DNA, 378 bp, Gossypium hirsutum
acgcccacgcgtccgagaaagcctctagccatgtctttcaaacgtaggaatggtggccggggcaggcatggccgaggccatgtcaaattcatccgctgttctaactgtggcaaatgctgccccaaggataagtcaattaagaggtttcttgtgaggaacatcgtggaacaagctgctgttagagatgtccaagaagcctgcgtttatgacacttatactttgcctaagctgtatgtgaagatgcaatactgtgtctcgtgtgcgatccactcccacgttgtgagagaccgatcctccaccgataggaagaaacgtgacccacccgcccgcttcatcagacgcagggatgatatgccaaagcctggtcagactggtcaa

SEQ ID NO: 211779 - DNA, 405 bp, Gossypium hirsutum
cccacgcgtccgggcaggattagcctttaattggaagtggcaacaaaagatgaaatgacagggaaaaccgtatgatggggcggacataatcaccggagcgaatgtgcaggtttgttgggagaagtttgcgaggtatttcgaggttgaattgaaggaagtgaagttgaaagagggatactatgtgatggaccctgtgaaagcggttgaaatggttgacgagaataccatatgtgttgcagcaattctcggatccaccctaacaggggagtttgagaatgtgaagctccttaatgaacttctcaccaagaagaataaggaaaccggttgggataccccaatacatgtggatgctgctagtggagggttcattgctccctttgtttacccgaaaatcgaatgggattt

SEQ ID NO: 211780 - DNA, 338 bp, Gossypium hirsutum
gtgctttaggaactgaccaatggccctcccaaatgggtgatcagtggtcagctgatgtgggtcagccaccaatttcgggtggccctgcaattaactggggtgatcaagttgctgttagcgctgatgtttgggatcctgcaagtgctccaccacaaatccctggccctggaatcgatgtatctgctcctgctcccactggctgggagtgaggttttcttatttttgcaaatgtttttcctattgaaaaaaatttgttattgtgatggtatctgtgattttgacacgggttagtttgtagtttccatagacttgaatgacttgctagagatttttgtttt

SEQ ID NO: 211781 - DNA, 415 bp, Gossypium hirsutum
cccacgcgtccgcccacgcgtccgggggggcggcgctggtgccgcagtaagaggcatggagtttgatctgtcggaagagatggtggcggtgataccgacggatccttacgagcaattggatctggcacgtaagataacgtcgatggctatcgcctcgagagtatcgaagatggaaacggagattgggaggatgagagcaaagattttcgaaaaggatcgtatgatttacgaattggaagagaaagtatcaagattgcagcaagcgaatcatgaggccgaatctcgattaaagcttgtttttgacgaaaatatgaagcttgcaaaggagcgtgattcattggcaatgaccgcaaagaaacttagccgtgatttatctaagttggagacttttaagcggcaattgatgcaatcgctg

SEQ ID NO: 211782 - DNA, 350 bp, Gossypium hirsutum
cccacgcgtacgcccacgcgtccgaccacgcgtacggccacgcgtccgatgagctctcccgagaggaaaaaatgcaatggagaattgaactcaggaatcccaccttcgatccgataacgccggaacctacgaatcaccctacccactctacgccatggccttatgttccacgcccgccgtcacccatctcaactaccaacgcatcgctctcggcagtttcatcgaggattacactaacagactgcacataatctctttcgaccctgaatcacttaccctcataacccacccatctttgtcgttcgaccaccctgacccacccaccaaacttatgttccaaccccaccgga

SEQ ID NO: 211783 - DNA, 398 bp, Gossypium hirsutum
  unsure (1)..(398): unsure at all n locations
aaagaacttgccccaaagttgatagcaactctagtgaatgtagtggaggaaatctgcggaggagatctaatggaatggaaggaacgatcccncattataaactcatttcacttcaaacgtctagtaaatctcttggaagaggataaggtctccagcaaaattgttttcggaggccaaagggatgagagccaattacaaatagctccaacaatattgttggatgttcccgaggactcgatgatcatgcaagaagaaatatttggaccattacttacaataattactgttgaaaggttggaagatagctttgctatgataaacagaaagccaaaacctcttgctgcatatctcttcagtgatgatgaacagattaaaaggaagtttgtacaaaatattta

SEQ ID NO: 211784 - DNA, 354 bp, Gossypium hirsutum
cccacgcgtccgtcccaaggtcttctttgacatgactatcggtggtcaacccgctggtcggattgtgatggagcttttcggagattgcactcctcgcactgctgagaacttccgtgccctctgtaccggcgagaaaggcgtcggccgcagcggtaagcccctccactacaaaggctcctctttccatcgtgtgatccctaactttatgtgccaaggaggtgacttcaccgtcggaaacggtaccggaggtgaatccatctacggatccaagttcgctgacgagaacttcatcaagaagcacactggtcccggtattctctcaatggctaacgctggtcccggaactaacggatc

SEQ ID NO: 211785 - DNA, 374 bp, Gossypium hirsutum
gcggcgataagcggcaggggtctgcttgtgtggtggtgcccacaagagagggtattgagcgacccttcagtgggagggtttgtgacgcattgcgggtggaattccaccatggaaagtgttagtgaaggggtgccattgatttgttggccattttttgctgagcaacagatgaattgtttctactcgtgcaccaagtggggcattgggatggagattgacagtgatatcaaaagggagaaagttgaaagtcttgtgagggagttgatggaagggatgaaggggcaaggtttaaggcaaaaagccatagattggaagaagagagctgaaatagctacaagccctgatggctcttcttacattaattttaataagat

SEQ ID NO: 211786 - DNA, 292 bp, Gossypium hirsutum
ttttcaaaagaattataaaaccacacggtgacgaatctttccaaagggagaaggcaatctttgtggtgatcttggtgtgtacctttgtcatgggctttgcctggtcatggggacctcttggttggttaattcctagtgagattttccctttggagaccaaatcggcaagttttgcctttgcaatcagcaccaacatgctcttcactttcatcattggtcaagctttcctctcaatgctatgccagatgcaagctggaatctttttcttctttgctgcctgggttatcataat

SEQ ID NO: 211787 - DNA, 394 bp, Gossypium hirsutum
  unsure (1)..(394): unsure at all n locations
ctcattgctacctctctttccctctctctaatgacgcttagctcangaggatctantgtcgtggtgcctcggaacttccgattgctggaggagcttgagcgtggagaaaaaggtatcggagatggtactgtcagctatggaatggatgacggagatgatatttacatgcgctcatggaccggcaccattattggtcctctcaataccatacatgaaggtcgaatctatcagctgaagctgttctgtgataaagattatccggagaagccaccgagcgtccgttttcattcaaggatcaacatgacttgtgttaaccatgaaacggggctggtagaatcaaagaagttcggaattctcgcanattggcggagggagtatactatggaagatatac

SEQ ID NO: 211788 - DNA, 406 bp, Gossypium hirsutum
  unsure (1)..(406): unsure at all n locations
ggtaagggcttttttaggacgttgtatagctttatataccatcttggtacatatttgaagcctgatgtgtctattttaaatggcattactatgggtggtggagctggaatttcgatacctgggacatttcggcttgcgactgatagaaccgtttttgctacccctgaaactcaaattggcttccatcctgatgccggagcatcctttcatctctctcgtctacctggtcacttangagagtacttgggtctgacaggagcaaaactcattggggctgaaatggtttcttgcgggcttgcgacacactactcanacactgataagcttccactgattgaagaagagcttggaaatttggttaccgatgatccttctgtcattgagtcttgtttggagaatatagtga

SEQ ID NO: 211789 - DNA, 357 bp, Gossypium hirsutum
cccacgcgtccgagtttgtacttcttggttcatgtccagttccccacattcagagggaatgtgagggtatagcaaaccaatgccaaaactacgaacacattcggctaatactaaaatatgacgagtctctttctcatgccatttacgcagcatctgacatgttcatcatcccatctatttttgaaccttgtggccttacacagtgcttgtacaagagatttacactatcatgatttgtacaatatacgaagttgatgactgatccaaattcacccattattgatttttatccgaccgattttgaagttgacatgaatggcaagcggtattcttggcagggtcttgcaaaattgcctt

SEQ ID NO: 211790 - DNA, 399 bp, Gossypium hirsutum
cggacgcgtgggcggacgcgtgggtgggcattcaattcttgaaagctactcgagggtgatggagagtttggctttcaacattatggcaaggatagatgatgttctttatgttgatgatgctataaagcaacgtgctgcggcagaaacagtttctcttttcagcaggagcggtttcagtggtcgtccaatccaaaggcgattgtctcctagtcccttctcaattcaacagactccttatgcctctcctttcgcaacacccaccttttgttctccaaccccactcaccggaagtccacgacgagcagcttcctctttgaagagaaatgatattaaggaagaacctgaccggaaatttgaaaaaccgttcgcgagtgaatttgagaaggtgtggtcgtatac

SEQ ID NO: 211791 - DNA, 403 bp, Gossypium hirsutum
ccggttctcttttgattgcacaaaaccaaatcttctttgctttgctattttggttcgttgggctaagaactggctaacgcggagcaaaaaaccgtggaggaaaccaacaagaaccaagcggtggttcttgccctctatgaagccttaaacacacgagacgtcaacaccgttcaccaaatccttgctcccgacctagagtggtggttccacggtccacccactcaccagtttttgatgcgcttactcaccggcgcttcatccgacgatcctttccgtttcgaggtcgaccctgtctcagtcaccacctttggatccaccgtcatcgttgaaggctgtgataacagccgttcgatctcctgggttcacgcttggactgttcgtgatgggataatcacccaagtga

SEQ ID NO: 211792 - DNA, 399 bp, Gossypium hirsutum
ctaccaaagacagcaagcagttccaggctaatgttctaggatgcaaaaacattacgggcggacatttcaccgtgtctggacctgacgaaagcccaaacacagatgggattcacattgggagatcggatggggtcaatgttcttaactcggagataaaaactggtgatgattgtgtttcaattggggacggttccaaaaatttggttatcaatggagtaacttgtggaccaggacatggtatcagtattggtagtctcggattgtttaaaaatgaagaaccagttgatggagttacagtaaaaaattgcaccatgactaatacttccaatggtgttagaatcaaaacttggccaggtgctgaacctggcacttgttcgaacattcactttgaagatatta

SEQ ID NO: 211793 - DNA, 363 bp, Gossypium hirsutum
  unsure (1)..(363): unsure at all n locations
tatcatcaccatggcctcaaatcccaaggtcttctttgacatgactatcggtgggcagcccgctggtcggattgtgagggagcttttcacanattgcactcctcgcactgctgagaacttccgtgccctctgtaccggcgagaaaggcgtcggccgcaacggtaagcccctccactacaaaggctcctctttccatcgtgtgatccctaactttatgtgccaaggaggtgacttcacggccggaaacggtaccggaggtgaatccatctacggatccaagttcgctgacgagaacttcatcaagaagcacactggtcccggtattctctcaatggctaacgctggtcccggaactaacggatc

SEQ ID NO: 211794 - DNA, 394 bp, Gossypium hirsutum
  unsure (1)..(394): unsure at all n locations
atcggcctgtgattgggatactgagtcattcatacggcgcgtcggggaggctgaacagtgggactaacgcttgctacgatgggtgcgtcntacgtgaagtttgtggaagcggccggggctcgagtcattcctcttatttacaatgagccggaagagattcttttccagaagcttgaattggttaatggcgtgctttttacaggagggtggtctaaatacggcttgtactatgatattgctaaaaagattttcaagaaagttatagagaagaacgataggggagatcatttcccgttatatgccgtttgtttgggttttgaacttttaacaatgattatcagcgaagacaaaaatattcttgaaccattttctgcatcaaatcaggcctctagtc

SEQ ID NO: 211795 - DNA, 406 bp, Gossypium hirsutum
  unsure (1)..(406): unsure at all n locations
cggacgcgtgggcggacgcgtgggcggacgcgtgggtttggcattaatcaangaagcttgcgacttcangccgggaatgatgtctatcaatcttgacttgaagagaggaggaaagtttaggtaccaaaagactgctgcttatggtcatttcggccgtgatgatcctgatttcacttgggagattgttaagcctcttaagcccaaggcctaagtactagttactaccatagccataatgtcatgtggtacgtatctgtcaatttgtttcattttacattctttacttttcagggcgtaatttatttccccagccatctattgtttgtcatggatatattcttttaagattttcctgtctacttattcaatccaaaatattttcttttattatagaagtactttcatc

SEQ ID NO: 211796 - DNA, 414 bp, Gossypium hirsutum
aaggttgtcataaccaacctcgaatctggttctgttttggatcttgatgcaaagaaatgggctgatgctcgaacagatgacggatgtgccttttacaaggtgcccttttcaaatgttgtatatattgagcgctcagatttccgcatgaaagattctaaagattactatgggttggctcctggcaagtcagcactgctaagatatgcattccctataaagtgtacagatgtaatattggcagatgataaagaaactgtgcttgagattcgagctgaatacgatgcttccaaaaaaagcaagccaaagggggttctccactgggttgctgaaccttccccgggttctgatccattgaagattgaagtccgattgtttgacaaactctttaattctgagaatcctgctgaacttgat

SEQ ID NO: 211797 - DNA, 395 bp, Gossypium hirsutum
cttcactcaccattgttccaagtttgttgttaaccaagctagaaccagcagccaacatggcctcattagcagcctccaccgctgccgcctcccttggcgtctctgaaatgctcggtaaccctctgaatttcagtggtggagctaggtcatcggctccaacaccatccaactcatccattttcaagaccgttgctcttttctccaagaagaaggccgctcctccaaagcccaaggctgctgctgtcgccccggccgatgaagagctggctaagtggtacggtccggacagaaggattttcttgcctgaaggtctgttagacagatcggagatcccagagtacttgaacggagaagttcccggagactatggatacgatccgtttggtctgagcaag

SEQ ID NO: 211798 - DNA, 381 bp, Gossypium hirsutum
cggacgcgtgggcgagacttggtcaaggttatatggtgtaattcatagggcaggtcgtgctgtgagtaattggatttaccttggaggtgttaaagcttttgccgatggctctctcggttcaaatagtgctctcttccatgagccatattttgatgaccctcacaactatggcttacaagttgtggaattcgaaagtcttttcaacatgacaattgcttcagacttgtccgggcttcaggttgccatccatgctataggtgataaagcgactgacttgatccttgatatgtatgaatccgttgccttaaaaaatggaaagagagatcggagatttaggattgagcatgctcagcatttggcccctggcacagcagatcgatt

SEQ ID NO: 211799 - DNA, 411 bp, Gossypium hirsutum
  unsure (1)..(411): unsure at all n locations
aacgaaataattaaactccaccaccccctcagactctatctggtttttagggcttttctaactttgctgattattttttgatgatgcggagttcaatcttctaaaagaagccctaaaatctttgaatcaggtctgagcttgtggtttgttaggcctctttgatcaaactaagtttcatgtctgatcttgacgttcaaattcctactgccttcgatccctttgctgatgcaaatgctgaggactcangtgcgggtgcaaaggagtatgtgcatattcgtattcagcagaggaatggtcgcaaaagcctgacaactgtccaagggttgaagaaagaattcagctataacaagatacttaaagacctgaagaaggagttttgctgcaatgggaccgtggtccaggaccctgaat

SEQ ID NO: 211800 - DNA, 410 bp, Gossypium hirsutum
gttaaaaggagaggttgattatcgtcacacttacatagacttttcccagcttgagggaacacttactaaagtgggaggggggtctgaggtaattaaaacttgtcccgctgcaatgggatttgcatttgctgcgggaacaactgatggacctggagcttttgattttcagcaaggagatgaccagggaaatcctttttggaggcttgtccgcgacgtacttaaaactccagataagaaacaagttgattgtcagcatccaaagcccatcttgctagatactggtgaaatgaagcaaccatatgattgggcgccttcagtacttccaatccagatccttcggatagggcagtttgtcattctcagtgtaccaggagaatttacaacaatgtctgggaggcgtctccggaatg

SEQ ID NO: 211801 - DNA, 356 bp, Gossypium hirsutum
cttgatattatttggtgatccacttggacctacacttgcaaagttcggtatgactgcacgtcttgcagccggttatggcggggccatgcaaaacattttcagcaaaagcgcaaagtacagtttgtttgatccgtgcaaagaaatggcctatattccgctggacgaggataccaaggttaaagggaaggctgccattgatgttgtctgcaatccgttggggaagtctgggggtgctcttattcagcagtttatgatcttgaccttcggatcgcttgcgagttcaaccccataccttggagggattctactggtgattgttcttgcatggctagcagcggcaaagtccctggatacac

SEQ ID NO: 211802 - DNA, 388 bp, Gossypium hirsutum
ctcctactagggagttttcaaagcctttatttatgcctatatgtgatgttataaaggcacgttcacaggggcaggtggctgcgtgtggcaagttggaggctggagctgtaagaagcggatcaaaggttttagttatgccatctgcaactatagcaaccgtgcgttccttggagcgtgattcccaagcttgcccaattggaagggctggagataatatagctgtcagcctgaatggaatagacggaaaccatgtgatggctggcggtgtgttatgtcatcctgattttccaattgcatttgcaaaacatttggagttgaaagtgcttgttttggatggtgcaactccaattttaattggttctcagttggagtttcacatacaccatgc

SEQ ID NO: 211803 - DNA, 400 bp, Gossypium hirsutum
  unsure (1)..(400): unsure at all n locations
gtgaagaccattcctcgcccaattccacagtataaatggtatttgaccccctctgtggtgtctttgatgggaggacttctgccatttggcagcatattcattgaaatgtattttatcttcacatccttctggaattacaaggtttattatgtgtatggctttatgctgctggtcttcctgattctcatcattgtaactgtttgtgtgacaattgtggggacatatttcttgctaaatgctgagaattatcactggcagtggacatcgttcttctctgctgcctccacagctgtctatgtgtatttgtactccgtatactattaccacgttaaaaccaagatgtcaggcttctttcaaaccagcttctactttggatacactntgatgttttgtcttggct

SEQ ID NO: 211804 - DNA, 390 bp, Gossypium hirsutum
  unsure (1)..(390): unsure at all n locations
agttcgtgcattttagcctgcaatatttgaaagcagtaatcgatcttcttttctttgtctgactggcaactctaccaaggggtactgctaggctatcttgagaagctttgagttctgatgtctccgccgttgcttggtgtggaggaggaagggcagagtanggtttcttctccatctgttgaatgtatctcccacaatggcttggggataagggagaggaattatcttggattatcagatttttgttcagttgacagctccggtgtcccggatgataatgggaataacctgaatttgaaagccacagagctgaggcttggtcttcctggatcccactcccctgagagagaaactgagcattgctttctaaactcgggaaaacttgatgag

SEQ ID NO: 211805 - DNA, 406 bp, Gossypium hirsutum
cccacgcgtccgctgccatataatcatataaccaggctccgtcgtggtactcttcggccacgcacaatggcgaaaatcggctggggaacaagccaagaggctgctcagcctgactgcatcaaagcccttgtggtcgagtttatcaccactttcctcttcgtattcgttggagtaggagctgccatggccgccgatgagtcgggggcaaatgcgctggtgggattgtttgctgtggcggtggctcatgcccttgtcgtcggcgttatgatatcggccggacacatatcaggcggccatcttaacccagccgtcacgcttgggttgctattcggtggtcacatcacggtggtccgtgcgatcctctactggatcgatcagttgttggcatcttcagctgcttgtatac

SEQ ID NO: 211806 - DNA, 409 bp, Gossypium hirsutum
ctcttatagaaggatacgagaacagcttttggacttgcagcaatacaagacttggggagtggggaacagcgatggtgtgggggataaagccacttgcagtcagatatggcctaggcatatcagatcatgatagtgaaggacgggttgtgacagcagagttcgattctttttatttattaagtgtctatgttcctaattctggtgatggcttgagaaggctggcatataggattacagaatgggatccatctcttggtaattacataaaagaactggaaaagtcaaagccagttattttgacaggggatttgaattgtgcgcatgaagagatagacatttataatccggctggaaacagaaggagtgctgggtttacaattgaaaaaaggcagtctgttagcacaaattt

SEQ ID NO: 211807 - DNA, 360 bp, Gossypium hirsutum
  unsure (1)..(360): unsure at all n locations
ggcggcccacccgtccggatatagtccccttggtcatggtttctttgccgttaaagcaaaggaggatacctttaatggtggtctggaagtgttcccaaggtgtcaaggaaaaaacttggagcaaaataggatcctatattcgaaagtagagaagttggctggaaagcatggatgtacaccggcacaacttgcacttgcctgggttcttcatcaaggggatgatgtttctcctatacccggaacaaccaagattaaaaatctagaccgcaacattgaatcagtgaaagtaaagctgacaaaagaagatttgaaagaaattacagatgcgatcccaatccatgaggttgcanggggtactta

SEQ ID NO: 211808 - DNA, 320 bp, Gossypium hirsutum
ccttcaaaaaaagctcgacattgatgtcctggttcacggaaagcctgaaaaaaacgatatggttgagtatttcggtgagcaggtgtctggttttgctttcactgttaacgggtgggtccaatcttacggatctcgctgtgttaagccaccaatcatctatggtgatgttagccgtcccaagccaatgactgttttctggtcatcaactgctcaaagcatgactcaacgcccaatgaagggaatgcttactggccctgttaccattcttaactggtcctttgttagaaatgatcagcccagattcgagacttgctaccaaa

SEQ ID NO: 211809 - DNA, 413 bp, Gossypium hirsutum
cccacgcgtccgctcttgcttactttatcagccctgactgtccaagaaatttcagctgcacgttgctgcactgaagttgccatagaattactcccatgcctcagcttcctgtctggcaacggtgctgcagatgttccatcgcgggcatgttgtttgggtgctcaaactattgcttacgaagcacagaccaaagatgaccgacgggctatctgcgagtgccttgttaatgcattagcaaatattggcacatctgactccttcactgcgcggatacctttaattgctacccaatgcggtgttgatgtttctcttccgccaattaccagcgacaaagattattgttccaagctcttcccttgacttcgtttgatataccatcgtgttgtgccacactagggaaagatattaattat

SEQ ID NO: 211810 - DNA, 403 bp, Gossypium hirsutum
ctcatctcctaccaccatccccgtggtttcaacttttgcatctccctttgacacttctggcgctggcaatggctcagactcgggctcaaccaggaagcccatcagcctatggccaggaatgtaccattcaccagtaaccaatgctttatgggaagccaagtcccagatctttgagagactccttgacccaccaaaagatgccccccctcagagcgagttgctcaccaaaaccccttctcaaagcaggaccagcatcctttataatttatcatcagactacattttgagagaacagtacagggatccctggaatgaagttagaattgggaagttgcttgaagaccttgatgctttagctgggactatctctgtcaagcattgttcagatgatgatagcacaaca

SEQ ID NO: 211811 - DNA, 409 bp, Gossypium hirsutum
cccacgcgtgcgcccacgcgtccgcagcgatctgagtcgagagtcactcggctgcgaactggacgagcctttggctgtcaaggtcgcgttcaagctttatcgaatgccggacgagagcgtatcagtggaaaatccgagagacgagcttctccgtcgcgtgaaaagattggcgccgtgcgtggtaacgttagtggaacaagagattaacaccaatacggcgccgtttgcctcaagggtgggagaagcagttggatattacggagctttgtttgagtcgattgagtcgacctttgggagggagaactcagaacgagtgaaagtggaggaaggtctgttgcgcaaaattgccaactccgttgcgtgtgaagggagggaccgcgttgaaagatgcgaggtttttgggaagtgg

SEQ ID NO: 211812 - DNA, 398 bp, Gossypium hirsutum
caggacttgcatcttgattggccaacacgctttaatatttgcctatcaaccgcaagagggctagcttatcttcacgaggagtctatgccaaggattgttcatagggatgtcaaggcaagcaatattttgcttgatgcagagctttgcccaaagatatctgattttggattggcaaagctttatgatgacaagaaaacgcacatcaccactcgcgctgctggaacaattggctacctggcaccagagtatgcgatgcgtgggcatcttacagagaaagtagatgtttttggctttggtgttcttgctttggagattataagtggtagaccaaactcatataattccgtagaaaatgacagaatttatcttctttgaatgggcgtggaccctgcatgaaa

SEQ ID NO: 211813 - DNA, 204 bp, Gossypium hirsutum
ctggactcgacaagcaaagggtgcatcaatttgccgctacagttcgaagttgcaagcctcgagaagtttacaaaggcgaaggtataatgtacactgatgaaattatcaagaaaaaacaaggtggaaaaatcaaaatgatttgttgaagagctggatttttacttgccttctttttaggaggattgcagagactcattttttatt

SEQ ID NO: 211814 - DNA, 392 bp, Gossypium hirsutum
  unsure (1)..(392): unsure at all n locations
gcagcagcagcagcctctctttctcatcttgtgatttgagcttcgtgtttgtgttgggttgggcaattcgccaagatgcagggcgaanagggtcaaaacatggatctttatatccccagaaaatgttcggccactaataggctgatcacctcgaaggatcatgcttctgtccagattaatgttgggcatttggatgagcttggcagatacactggaactttctccacttttgctctttgtggctttgtccgtgcccagggtgatgctgacagtgcacttgacaggctttggcagaagaagaaagctgaagtccgacagcagtagtgggaggtggattgctttttactaattgcttggtctctgaattttggaaggaaaattgtgtttttttt

SEQ ID NO: 211815 - DNA, 366 bp, Gossypium hirsutum
cccacgcgtccacccacgcgtccgccttcttttccgcccacgcgtccactgaactctgcctggaggaaaaaatccaatggggggttcaactcacgaatcccacctccgatccgataacgccgtaacctacgaatcaccctacccactctacgccatggccttatctttcacgcccgccgtcacccatctcaactaccaacgcatcgctctcggcagtttcatcgaggattacactaacagagtccacataatctctttcgaccctgaatcacttaccctcataacccacccatctttgtcgttcgaccacccttacccacccaccaaacttatgttccaaccccaccggaaaatcccttttctctt

SEQ ID NO: 211816 - DNA, 406 bp, Gossypium hirsutum
ggaactgttactcaaacacaaaaaatatggtttagcttccaggcacttggaaacatggctggtgcctattcttatggggtgtgctcattgaaattcacgtatgtaacttcattttgtccaatttatctacctccaataacagtatgatacttgtataggacacacttaaggctccaccatccgaatcaaagacaatgagcaaggcaactttgttaagtgttggagtgacaacacttttctacatgttgtgtggttgcatgggctatgctgctttcggggacttgtcccccgggaaccttctaaccggttttggattctataacccattctggctccttgacattgctaatgctcgccattgaattcaccttgttggtgcataccaagtttactgtcaacccctttt

SEQ ID NO: 211817 - DNA, 373 bp, Gossypium hirsutum
gtccgaacgaccaccggtaaccatgttttatgtgttctcaagggagctttggatggtggaggtgatattccgcacagtgaggggagatttgctggatttaacaaggacagtaagcaacttgaccccgaagttcaccggaaatacacttatggtggtcatgttgccgcatacatgaagaatttgatggaagatgagccagagaagtaccagtctcacttcagcgagtacataaagagaggcattgagcctggcagcattgagggaatgtacaaaaaggttcatgctgctattcgtgcagatcctgaagcaaagaaatccaagaaggaacctccaaaggagcataagaggtacaatctgaagaagctgtctcatg

SEQ ID NO: 211818 - DNA, 398 bp, Gossypium hirsutum
cccacgcgtccggaaaagacatcaatgcattggagcagcacatacagaacctgctgagtcgatccactccatttttcttcagcgctctttatgacccataccgatccggtgctgacttcgttcgtggctaccctttcagcctccgtgaaggtgttcccactgctgtctcacacggtctctggctcaacatcccggattatgatgctcccacacagcttgtcaagccactcgagaggaacaccaggtatgttgacgctataatgacgattccgaagggaaccttgttccccatgtgcggaatgaatctggcatttaaccgagaattgatcggccctgcaatgtactttggactcatgggagatggtcaaccaattggacgatacgatgatatgtgggct

SEQ ID NO: 211819 - DNA, 411 bp, Gossypium hirsutum
cccacgcgtccgctcttgcagtcgcctttatcagaagcaaaaacactaagctttagcttcgacatcggagaaaatggtgaagggacgccaaggagagcgagtgagactctatgtaagaggaaccatcttgggttacaagaggtcaaagtcgaaccagtatccaaacacttcattgatccagattgagggagttaacaccaaggaggaagtagcttggtatgctggcaagcgtatggcttatatctacaaggccaaagtgaagaagaatggctcacactatcgctgcatttggggaaaagttactagacctcatggtaacagtggggttgttcgtgctaagttcaagtctaaccttcccccaaagtctatgggagatagagtcagagtcttcatgtaccccaccaatatatg

SEQ ID NO: 211820 - DNA, 407 bp, Gossypium hirsutum
gcggcataagagttttaaggaaaatgcagatcttcgtgaaaaccctaactgggaagaccataaccctagaggttgagggcagcgacactatcgacaatgttaaggctaagatccaggacaaggaaggtatcccgccggaccagcagaggttgatcttcgccggaaagcagcttgaggatggtcgtacacttgccgactacaatatccagaaagaatcaacattgcatctggttctgaggcttcgtggtggcattatcgagccatctttgatggcattggctaggaaatacaaccaggacaagatgatctgccgcaagtgctatgctcgtctacacccacgtgccgtgaactgcaggaaaaagaagtgtgggcatagcaatcagctgaggccaaagaagaagatcaag

SEQ ID NO: 211821 - DNA, 361 bp, Gossypium hirsutum
ctttgccctttcattgcttccttgcctgccttaaacctccttccagcatagccatgactactgaaatgataatgggtgatgaagtcccttttcctccacaaatcacaactaccaagccactatctcttttgggtcatggaattaccgacattgagattcactttttggcaaatcaagttcacagcaattggggtttaccttgaacctgaagttgtagggcatttacaacaatggaagggtaagcctgggaacgtgctagctgaagatgataacttcttcgaggctcttattaatgctccagtggagaagtttctgagagttgtggtgattaaggagatcaaaggttcccaatatggagtgc

SEQ ID NO: 211822 - DNA, 406 bp, Gossypium hirsutum
gcggactatctccactatgctagggattcttccatctgatcacttctccggggcgggttccgtctccactccggctgttcatcgccttctattctcttctatcatcactgggtatacgttgtggaacgcggagtatagggtttcactgatgaggaatctggaaagagcagcaccgggcgaggaggtggcgggggagacagaggaagctattaggaagcggcagggagaggtgtttgaggagaaaagggaggagagagcgagtcaaagtgatggctttcaagaattcgagaagattaggccgagggtttccggggaattgtcgccagaggctttgaagtatattgaaaaactgcaagcggagttatctgatgcggtggaggaactgaatgtggagaaggagaatgtg

SEQ ID NO: 211823 - DNA, 404 bp, Gossypium hirsutum
atgaaatcgggtggtggtggagattcagatcattccgatctcgaagtttcgggtagtaaagaagcagatgggggaggagttactatttccgcggaacccgaaaagagaccacgaaaacgggggagaaaaccggctaacggaagagaagagcctctgaatcacgtagaagcagagcgtcaaagaagagaaaagcttaaccaaaggttttacgccttacgtgcagtggtaccaaacgtatcgaagatggataaagcatcgcttctgggggatgctatttcgtatattaacgagctaaagataaagctacagaaggtggattcaatgaaagaagagttgcataaacaattagaagaaaccaagaaagaaagtcagcgaggaggcctcaccacgtcccacaaattact

SEQ ID NO: 211824 - DNA, 402 bp, Gossypium hirsutum
ctggcttacgacaaaaggaccagaccttatgtgaagaaaatggccaagagccaagactatttcttcaaggagttctcaagggccattactctcctctctgagaacaatcctctcactggtagcaagggtgagatcaggaagcaatgcaatcttgcaaacaagcttcactaaaatgcctcgccaaagagaaagccgagagtggcccaattaaaatggttgtttacttgtttcttttccaagagacaagtttgttaatgtgcagtgagtaatggtgcaatggtactagtttgatacgatcgacccattgcatttttttttagcataagccaagttgccttctcttgatgttggtcatgggcgtagtggatgtaaggatggatgtaatgtatgtatgtaaggatg

SEQ ID NO: 211825 - DNA, 409 bp, Gossypium hirsutum
gaaggtcaaaaaaatttctgaaatgaatttggaccctccaaaagctgtaggaaatggccgtgtggctagttcaagtaattctaatagtcccacactttgtcttgcaaatggaggttcctctggcaatgatttttctttcccaccaggaggcctgccatcattgcgtttgcctgtggtaacaagtcaggaaaccaacctagtagctagatgtcgaagagtatatgcccatgctcatgattatcacatcaattccatttcaaataacagtgacggcgaaacttttatatcagctgatgatctgcgtataaatctttggaacttggaaatcagcaatcaaagtttcaatattgttgatgtaaagcctgcaaacatggaggatctaactgaggttataacatcagcagaattc

SEQ ID NO: 211826 - DNA, 403 bp, Gossypium hirsutum
ctcagggatcgtggagagtgtgggtgagggtgtgaatgatttgaaacctggagagcatgtgctccctatcttcaccggagaatgcaaagaatgtcgccactgtctgtcagaagaaagcaataacatgtgcgaactgcttaagatcaactgcgaccgaggtgttatgcttgctgatgggaaaaccagattttccatcaacggcaagcctatctaccactttgttggaacctcgacctttagccaatatactgtcgtccatgttggccaggttgccaagatcagtccaaccgcccctcttgataaagtctgtcccattagctgtgggatatgtacaggttttggggccactgtgaatgttgctaaacccaaaaagggtcaaactgttgcagtttttggactgggt

SEQ ID NO: 211827 - DNA, 445 bp, Gossypium hirsutum
gcccggaccggaccggacatggccgggccgagcgacgcgtgcgcccacgcgtccgggcaaaggcagtggccattcacatcaccacacctattttaattagtttaacaccgtccgttggctgcttcctccgttcttcattagaatattttagatttaaacggactcgatccctaagctagttttgtactaatgggaaccagttagtgttgcaaacaaggatatcaatgttagcttagctgaaaaaaagcctagagttgtttttgttttgggtggccctggcagtgggaaaggtacccaatgcgcaaatatagtcgaacactttcattacaccatctcagtgctggagatcttctccgagcagaaattaagtctggttcggaaaatggaaccatgattcagaacatgatcaaagaaggaaagattgttccttccgaggtcacaatta

SEQ ID NO: 211828 - DNA, 402 bp, Gossypium hirsutum
ccgcccacgcgtccttgcaaaggctttggtttttcacatcaccacacctattttgggtggtttaacaccggcggggctggttccttcattcttcattataatattttacatttaaacggactcgatccctaagctagttttgtactaatgggaacagttattgttgcaaacaaggatatcaatgttatctttacctgaaaaaaacacctaaaattgtttttgttttgggtggccctggcattgggaaaggtacccaatgcccaaatatagtcgaacactttcattacaccatctcactgctggagatcttctccgaacagaaattaattctggttcggaaaatggaaccatgattcataacatgatcaaagaatgaaatattgtttcttcctatgtcacaat

SEQ ID NO: 211829 - DNA, 402 bp, Gossypium hirsutum
aagtttttggtgccgtagcttgtctctcatgtcctattagggtcctgtttgcatccgaccagttgtttccaagagctaggctttgatacttaaaataagaaccactatgggtatttctagttataggttctttctgtttttatttggtggcataatcccaaccctagaagctcatatcgctgagtatgacgagtactggacggcacgagaattggaagccattgagaacctggacaagggcctatcactccaacccggaggaggtggtccgccattacaatgaccacttctctaggaccatgctcgagttttatatcaccaaaagggtgttggcagaatcaaaaaagggtccctgtgaggttaccaaccacgttgacagttgctggcgatgtgatcctgact

SEQ ID NO: 211830 - DNA, 389 bp, Gossypium hirsutum
  unsure (1)..(389): unsure at all n locations
caataagcaaaaaaaaaaaaaatggagcaaccattaccaaagagctggagcatgcatacccgacccgagatcaggnggaagtaccagatcctggagcgcgtgggatcaggcgcttactccgacgtctacagggcgcgtcgtctctccgacgacctcatcgtcgccctcaaggaagtccacgactaccaatcggcgttccgcgaaatcgaggccttgcaaatgcttcggaactgcccaaacgtcgtcctcctgcacgagtatttttggcgggaagacgaggacgccgtgcttgtcttggagttcttgaggaccgatttgtcggcggtcatccgagacgcgaaaaaaagggaaggtggggtccgagtcggtgaagttaaaaggtggatgct

SEQ ID NO: 211831 - DNA, 409 bp, Gossypium hirsutum
cccacgcgtccggcacatgcgcttgatagttcatcggaggacacgggttattggtgggtgcatggcggagttggaggaacagcgaaggacgtatttttgggcagggcctggaagagcagtccgagggttgtttattcttatactgaaatggacgaaatcgtccatcctggtggatggtctagtaatcgccaacctgaacgagccgacactgtgtactacggagaatacaaatgcacggggaaaggcgcgactcctgctacacgagagaaattcgtcaaacaactatcggatgcggaagctaaaccattcttggttcttgactacgttgaaggtaccaaatggttgcttccccctccgacagtacctaaataattcattcattcccaactttttcatgccggcaacatat

SEQ ID NO: 211832 - DNA, 407 bp, Gossypium hirsutum
cccacgcgtccggattgcgattggtgcggcgagggcgcttttgtatctacatgaggaatgtgatcgagagatggtggatagagatgttaaggcagctaacattcttttagatgattactgcgaagctgttgttggtgacttcggccttgcaaagctccttgatcatactgattcccacgtgaccactgctgtccgtggtactgttgggcatattgcaccggaatacctctcgactggtcagtcttcggagaaaaccgatgtgtttggattcggaattctcttgatagaactcattactggaatgagagctctggagtttggaaaaactgttggtcaaaaaggagcaatgcttgagtgggtgaagaaaattcaacaagaaaagaaagtggaagtactagtggacagag

SEQ ID NO: 211833 - DNA, 391 bp, Gossypium hirsutum
gccaatcccgtcgcacaaagaacctctgtttctgcccttctctaacaacaaacatggcaaagcgattgattccttcagttaatcgcattttggttgagaaaataatccctccttctaaaaccaactctgggatcttgcttcctgagaagacccccaagttgaactctggaaaagtggtagcagttggaccaggagctcgagacagagatgggaagcatatcccagttaatctgaaggaaggagatacagttcttttgcctgaatatggtggcactgaagtcaagcttggtgaaaaagagtatcacctatacagagatgatgacatcttgggaacccttcatgactgaatttttgccggtgggggactggagaatgattctcattcaaatat

SEQ ID NO: 211834 - DNA, 403 bp, Gossypium hirsutum
aactcgaggacgggcggactttagccgattacaatatccagaaggaatcgactctgcatctggttctacgtcttcgaggtgggatgcagatcttcgtcaagactttgaccggtaagaccattactttagaagtggagagctcggatacgattgataacgtgaaagcgaagattcaggacaaagaaggaattccaccagatcagcaaaggttgatttttgctgggaaacagctggaagatggaaggactttggctgattacaatattcaaaaggagtccactcttcaccttgttcttcgtcttcgtggtgggttctaagccttaaggtcttccttaatgtgggttttctggttttacgtgaaggattgtgccctttgatggccttttaaataatttctagtctt

SEQ ID NO: 211835 - DNA, 399 bp, Gossypium hirsutum
gcaggaaagaactagctacggatattgtaggcactgaaaaagaacattgctggaactgaatagatgtacaggattgggaatggcatgctaatctggccttcttgtatcctctaaaacagacatctttattctgtaattgtagggattccttgcatgaattcttgtcacctttatatttaccctgtccctggaataaaacttgacaattttatgcgcaaaagacaaaaaaacatgcccaaacgaaaaactactgcacaaatatttttggcaagaaaacaaagacgccgtgcttgtcttggagttcttgaggaccgatttgtcggcggtcatccgagacgcgaaaaaaagggaaggtggggtccgagtcggggaagttaaaaggtggatgcttcagatttt

SEQ ID NO: 211836 - DNA, 400 bp, Gossypium hirsutum
ttgataaagagctacctggatttatctcgaaggaggcccttcttcacggagttgagactagaactagctggtggatgcagattccacgtgacagtgacacctacgagagcatgtctttaagagggctctacccagttggtgaaggagcaggttatgctggtgggattgtaagtgcggcagttgatggcatgtatagcggtttctccgtggcacaaaaacttggtttggttcaatggtgacataaagtcagttttaggaaaggctcagagtgctggaatggtgaagtactagaacggatttattgcgtttgattttataacgaatggtttcagatgagtacatgctccattatcattgtaaagctctacaaaattgaggaagatgacgaggggacttcaaa

SEQ ID NO: 211837 - DNA, 372 bp, Gossypium hirsutum
cccacgcgtccgaaaagtgagaacgaaagaaatggcaaatattcccataatcgctgttttctgcttcaccatgggtggttcgtcctcactcaatttcgtctatggggctgaaaatatgagctacgtcgtcgtaggccatgtttactgtgacacttgccgtgttgagtttgagaccaaactcagcgaacccatcgctggagcagtagtgaaactggaatgcaggaatcgtacagacaatcaccttaccttccagagccaagaaatagtgactgacgaacgtggagactatcacattgtagtggaaggcgattatgaggaatcagactgcgacgtcgccttggggagggagtcccaacccggattgcaatgatc

SEQ ID NO: 211838 - DNA, 401 bp, Gossypium hirsutum
gtctataccagaaggagcatgagtgaatacgatcctcgtcttgttgctcctacttgcttatatttggcatcaaagggagaagaaagcacggtgcaggctcgacttcttgtattttacattaaaaaattatcttctgatgaaaagtatagatatgaaatcaaagacatacttgaaatggaaatgaagatcttagaagcacttaactattatttagttgtatttcatccttaccgcacattatctccgttgttgcaggatgctggcatgaatgatatgagtatgactcaattatcttggggacttgtaaatgacacatacaagatggaccttattcttacacatccgccatatttgattgccttaacttgcatatacattgctagcgtctacagggagaaaga

SEQ ID NO: 211839 - DNA, 397 bp, Gossypium hirsutum
gctgaaatcaaggggcatcgtcgaacctatattggtgctatgcctggaaagatggggcagtgcctgaaaaatgtggggacagcaaaccctcttgttctaattgatgagatcgacaagctggggaggggacatgctggcgatcccgcaagtgcgttgcttgaactccttgatcctgagcaaaatgctaactttttggaccactatcttgatgtgccaattgacctatcaaaggttttgtttgtttgtactgctaatgttgtggacaacataccaaaccctctcttggacagaatggaggtcattgctattgctggttacatcgctgatgagaaaatgcacattgctagagattaccttgagaaaactgcacaagaaacatgcggtgtcaaacctgaac

SEQ ID NO: 211840 - DNA, 407 bp, Gossypium hirsutum
cacctgttaacccgacatttttgccaaggaacgaggatgagcgtcaaatttgtgcgagaactatctattgtacaaacattgacaggaaggttactcaagctgatgttaaactctttttcgaaacagtctgtggggaggtttatcgcctaaggctgcttggggactatcagcattcaactcgcattgcttttgtcgagtttgcattggctgaaagtgcgattgctgctctcaactgtagtggtgtggttctgggatcattgcctataaggatcagcccatcaaagaccccagttcggccacgagctcctctccttccctcgtactaaatcattcaccctgaaccaattttagttccaagtttatatatatatttatttaaatacatacacacccatgtaaggatgttt

SEQ ID NO: 211841 - DNA, 400 bp, Gossypium hirsutum
  unsure (1)..(400): unsure at all n locations
aaaccctccacgttttatccaaacattttatttttttatttccattgctttgattggaggcgctattatgggaatgcgggtaagcggcngcacgatcattccaggaggttggggggccgccgccatggctgtcgcggctaagacatgcgacgcatgtaaatcatcggcggcagctatcttttgtcgtactgattgggtctttttatgcttgaattgtgattccaatttccattccggtcacgaaagggtgtctatgtgtgaagtttgcgaacaagctccggcggctgtcacttgtaaagccgacgcggcggctctttgtgtcacttgcgacgccgatatccattcagcaaacccactggctcgccgtcacgaacgtgtacccatctaacctttttaccac

SEQ ID NO: 211842 - DNA, 397 bp, Gossypium hirsutum
cccacgcgtccgcagagtttcctttaatattttgggctatcctcttcgcccaggggagactgagtgtgcgtatggtgtaagaactggacaatgcaagttcgggagcacttgtaaatttcaccatcctcaaccaactaatatgatggtttcattgcgtggctctcctatttatcaaactgtcccttctccggccactcctggtcagcagtcacatccaggaggaattacaaattggtcaagagcatctttcattcccagccctcgttggcaaggtccttcaagttatgcatccttgattttaccacaagggatggtatcagttccaggctggaatgcttatagtggtcaactggcatcagtctcttcttcagagaacctgcagcagacaaatgtaaat

SEQ ID NO: 211843 - DNA, 396 bp, Gossypium hirsutum
tgaatttcctgcacggcctggcctacttgagtgtagttacttccttaaaacggggggctgtaaatgtaaatcggggggcaaatatcatcatccaaaaaatagagttgcaaagatggctccatgtgttctcagtgacaagggattgccactcagacctgatcaaaccatctgctcacactatagccgctatggtatttgcaagtttggaccagcctgcaaatttgaccattcaaaacaggaagctccatcaacaatggcaatggccggactggatcagcctccaccattcagccattctgctgctacagaacaaaccggaatcgccagtggtactgatactgcaattcaacaacctttgtaaaaagaatttttaaccaaagcttcctagctttttaa

SEQ ID NO: 211844 - DNA, 395 bp, Gossypium hirsutum
gtaggcaccaagctaccatagtttggctacatggtcttggtgataatggttcgagctggtcccagctcctggagacgctccctcttccaaatattaaatggatatgtccaactgcgcctactcaaccaataagcatatttggtggctttccatcaactgcttggttcaatgtcggcgagctttcagaagatgctcctgatgatatagagggtttggatgctgttgcagcacatgttgcaaacttgctggcagcggagcctgctgacattaaacttggtgttggaggcttcagtatgggtgcagctacctcactatactctgcaacctgttttgctcatggaaaatacggaaatggaaacacatatcctgccaatttgagcgcagttgtaggactt

SEQ ID NO: 211845 - DNA, 413 bp, Gossypium hirsutum
gttaaaaaaaaggggaaatctgggttcagaaatggggcattctgcagcagtgggggattatagggcggcgaactgagattacaaaggattggaatggggttgataagattgttcttcggagccctcgaggggcttcagcaagggttagcttacatggaggacaggtcacttcatggaggaatgagcaaggggaagaacttctttttaccagtagtaagccccccaaagctgtgcgaggtggaatccctatttgttttcctcagtttggtaactgcgggtcactcgagcaacatggatttgctaggaacaagatttggacaattgatgagaatcctccgcctctcggtcctaatgattcccatgccaaatccttcattgacctattgcttaaaccatccgaagaagatctcaaa

SEQ ID NO: 211846 - DNA, 414 bp, Gossypium hirsutum
gggaagcttatacttccattcggagatcaatggtggtttaggtttcttttgggcggggtgatgccacccaaggttggcttgctcaaggctactcaaggtgaatctataagaaactattaccatgagatgcatgtcattcaagacatgcttgttcctctttacaaggttggggatgcccttgagtgggtccaccatgagatggagatctatcccatttggctctgcccgcaccgactgttcaagcttcctgtcaagacaatggtgtatcctgaaccaggctttgagcagcagcacagacaaggcgacacaccatacgctcagatgttcaccgatgttggggtgtattatgctccaggccctgtattgaggggtgaagtatttgatggtgctgaggcagttcgtaaaatggagcaa

SEQ ID NO: 211847 - DNA, 431 bp, Gossypium hirsutum
  unsure (1)..(431): unsure at all n locations
gaccggccggaancccggggcgacnacgcgtccgtgctgccatctgggatgaaggatttgtttatcttgtttcgttggagagtgatgttgttattcctacgtgtgagggagacatggctaaggttgttgaaggccatcgcagatttctggggtacaagcagacaatattattggaccgaaggcttttggttgatctgatagaccagtacaatagtggatccctaagttggaatgagttctcaaatgccgtgaaagaatctcacaaatatcgcaaggggcaaccaacacaaagatcggtgatccccgaccggcctaaagaagaggattacttctatgccaacccagaagaatgcttgaaaccatcatcatatggtcaagtgagtagcatgtgatctttctatctggggattgtgacgattattggtgttttt

SEQ ID NO: 211848 - DNA, 400 bp, Gossypium hirsutum
ggcgattgcagcgcgcatcagatccactctccctctctttcacaggcttttgagagccgattccctgccttctgacactcccagagctgctcttcaccgaactctactttgtcccgaactgtcgaggaaatattccacttctccgaagaaggacgagaatgttaaggtgcctttggctttgtttggtggatctggaaactatgcatctgcactgtaccttgcagccgtaaaaggaaatgctctggacaaggttgagtctgaacttcttgaccttgttcaggcatcaaaaaacagtcaattcttttctcaattcactaaggacttgtcagtacctgcagagacacgggtcaaagccattaatgagatatgtggccaagctaaattttcagatcttacaaag

SEQ ID NO: 211849 - DNA, 400 bp, Gossypium hirsutum
cccacgcgtccgcaaaaatttggttatcaatggagtaacttgtggaccaggacatggtatcagtattggtagtctcggattgtttaaaaatgaagaaccagttgatggagttacagtaaaaaattgcaccatgactaatacttccaatggtgttagaatcaaaacttggccaggtgctgaacctggcacttgttcgaacattcactttgaggatattaccgtgaccaatgtcagttctcctattataattgatcagaaatattgcccatggaacaaatgcaaaataaatgaagaatcgaaagttaaactaagcaacattagtttcaaaaacattcacggcacttctgcgcgtccagaagctgtcaagattatttgtagtgctactttgccttgtgaaaat

SEQ ID NO: 211850 - DNA, 406 bp, Gossypium hirsutum
caacaagattagccaacaatttagagaaccttattctgaaagagggtccagagacgattgctgcatttattggcgagcctgttatgggagcaggaggtgttatacctcctcctgctacttattttgagaagatacaagctgttgtgaaaaagtatgacatactttttatcgccgatgaggttatttgtgcatttggaaggcttgggacgatgtttggatgtgacaagtacaatattaaaccagatcttatttcactagcaaaggctctttcttctgcatatatgcccattggagcagtcatggtgagccctgaagtttcagaagtcatttattctcaaagcaacaaacttggtagtttctctcatggattcacctactctgggcaccctgtatcctgtgctgttgc

SEQ ID NO: 211851 - DNA, 396 bp, Gossypium hirsutum
  unsure (1)..(396): unsure at all n locations
gaactttgaatttgccaccgatactcttgaggaacttctatatgacaaagagaagctgctctagaatggggaccggggggaaactgatatcgcanataatctcanatccgaaagcctttatcgctgatgttgttcctctactttttttcttgctcagttgctgaaaataaaatgatacatgcatgttcttgcaatggcatataccatgtttttagggcattgacactgtgaatctatgatatgaattattttgtttttgctacattttaatgcaatgatggataaatgaatcatgtggaaatcccaagttcaaggaacaaattttcaatttttaaaactttgcccaatgagaaatgacaagatttttcttgttctaaattataaccattttttcct

SEQ ID NO: 211852 - DNA, 411 bp, Gossypium hirsutum
ttccactttttggtgtcgtagcttgtttttcctaccctatcagggtcttgtgttgatcatacaagggggtggaagagctaggcattgatagttaaaataacaaccactatgggtatttctagttacagttatagtttctttctcttgttatttgttgtcgtaatcccaaacctagaagctcacattgctgaatatgatgagtactggaaggcacgagaattggaagccattgagaacctcgacaaggcctatcaccccaacccggaggaggtggttcgccattacaatgaccatttctctaggaccatgctcgagttttatattaccaaaagggtgttagcggaatcaaaaaatggtccctgtgaggttaccaaccccgttgatagttgctggcgatgtgatcctaattgg

SEQ ID NO: 211853 - DNA, 401 bp, Gossypium hirsutum
tcagatctcttcaaacccatcaattcaaacaaccctccactcattccatccatgacgcttggctcaagaggatccagtgttgtggtgcctcggaacttcagattgctggaggagcttgagcgtggagaaaaaggtattggagatggtactgtcagctatggaatggatgacggagatgacatttacatgcgctcttggactggcaccattattggtcctcataatactgtacatgaaggtcgaatctatcagctgaagctgttctgtgataaagattatccagagaagccaccaagcgtccgttttcattcaagaatcaacatgacttgtgttaaccacgaaactggagtggtggaaccaaagaagtttggacttcttgcaaattggcagagggagtatac

SEQ ID NO: 211854 - DNA, 472 bp, Gossypium hirsutum
  unsure (1)..(472): unsure at all n locations
gaattncccgggtgcgagcgccagcgccgtccgnatcctctactcgtcagaaccatttctttctatccttgtgagttggacccttgtagaccccctgatggaatgggaatacctggtggattgtggggtgggtgtcaacaaagtnacagctacttgatatntggatacctttgccatcntgagtaccgactccagagtaaagggctatggaggattgattgagaagccaatctgaggactacaatgatattggtggcttggagaagcagatccaagaactagttgaggccattgtgttgcccatgactcataaagaaaggtttcaaaagttaggcattcgtccacctaagggggtgctcttatatggacctcctggcactggaaaaaccttgatggcccgtgcttgtgcagcacaaacaaatgccacgtttctgaagctagcaggcccacagctggttcagatgtttattgg

SEQ ID NO: 211855 - DNA, 355 bp, Gossypium hirsutum
attcaacgagtctatagccttggccgtcaggcccgggtaatctttgaaatttcatcgtgatggggagtgctctttgggtttggacctggcctcactgttgagactgttgtgctccatagtgttgctgcttaaagttaaacaaacatgccttttaagtaattggtcgtgctccacttggcttgcagttttatcttcttcttttttccttttttagaatcctatgaatttgtgtgtttattgttaaagactagaagcctttgatggtgtgggcgggaagcttaacgcctattcagttcatgtatcaacttatattaaatttatggcaataataagttactttgcaaactattctacc

SEQ ID NO: 211856 - DNA, 413 bp, Gossypium hirsutum
cccacgcgtccgcggagagcagtccttatgaacaattaaaaagaaccgaagggagggacacatattaagacggaggcgtggccagccagctcgtaggaacaaagagagcttgtgtcgtgggtggcagcggattcgttgcctcattgctggtcaagttgttgctcgagaagggttacgccgttaacactacagtcagggaccctgacaaccagaagaagatctctcaccttgtaacactacaagagttgggagacttgaagatctttcaggcggatttaactgatgaagggagctttgatgcccctattgctggttgtgaccttgtcttccatgttgcgacacccgttaactttgcttctgaagatccagagaatgacatgatcaaaccagcgactcaaggagtggtgaacgtt

SEQ ID NO: 211857 - DNA, 388 bp, Gossypium hirsutum
ccgagagagacggatagatgttttatttttcttattgcaatgcgacggaccgtagggcaagccttgggtgaggggagattcgcggggtcatttggtccactctcttctcgccggcgtagcccacgcgccgtcgtctcctgctctcgctccaacctgacgcctattcaagctgttctgtcgtgtcagcaacaggtcgggtcagatccggtggaatctgaattggagagtttacgctgaccaactcctgttttgacgcttgactcttaatggggggtgggatttactttacgcttttagttggcacgggggctcgggattaacaaaactgccactattgaaaccattgctaatctcttgcaggaggttggaggtaaccatgctcaaaatg

SEQ ID NO: 211858 - DNA, 416 bp, Gossypium hirsutum
ggtttaatcagtattatagattgttcatccagagatctaagcttattagcttaagctataaaaatggtgaaaagatcgttgggctttttctttcttctcctcattgtcttagcctcgcaatggggggtgcagccaactgaggcaagggtttgccagtcacagagccataagttccacggtgcatgtttgagtagccacaactgtgcgatggtgtgcaggaacgaaggtttctccggcggcagatgtcgaggattccgtcgccgctgcttctgcactaagctttgctaatgcaagcttgcccttagctcatattttaaggatcatttcatgagtaaaagacctttatgtttttcgtgcatgcatgtcaatgtttcaataaggtatctcctaattacttctgttttgggagatcattt

SEQ ID NO: 211859 - DNA, 414 bp, Gossypium hirsutum
gagcaacccagattttgttgttgaagttgtgtctcttttctttgatgattcagaggaacgttcttaatgatctcacggatggctttagatcagccaaatgtagatttcaaaaaagttgatgctcatgttcatcaattgaagggtagcagttccagcattggtgcacagagagttaaaaatgcttgcattgcttttcgtagcttctgcgaggagcagaacatcgatgcgacactgagatgtcttcaacaagtgaaacaagagtattaccttgtgaagaacaagcttgaaactatgctcaggttagagcagcaaatcgtggcggctggtgggtcgattcccatgattgaactgggtttttgaagaccataaacatgaaggggggaaaagcatgattttgggggtggtttatacaat

SEQ ID NO: 211860 - DNA, 325 bp, Gossypium hirsutum
  unsure (1)..(325): unsure at all n locations
cacaaattgcgaagacagagagtggtggatggaatgttgtttaaagggaagagaagggatttaaagggtctcgggtgcgacnagaacnangatcacccccctcctaataaagtctccaagactttttctgcagtcgactctgacgattccgacgatgtcttcgtctgcgagatatccaagaataggagagtttcagtgaggaactggaattgcaaaatttgggttgatattcgtgaattttatgtcaaggatagcaaacaattgccttgcaagaaaggcctttctctaattctggaccagtataaacttctacttaatcattcac

SEQ ID NO: 211861 - DNA, 383 bp, Gossypium hirsutum
cccacgcgtccgctcggagagactattgaccctgacaggagtgtatggattcgggaagcatgtttccaacctggagcgccgtgagagtcgtcgttaccttgagatgttttatgctcttaagtaccgtaagctggctgaatcagttccattggcagaggagtaaattgaagctgttaaataacattgggccggtttttcttggagaataatattctgttttgtaatttcaattggagaagctcctttgtatttcatcttgtcttttccttttccttttttcgccggcattgtttgaacatggggttgtgcgcccgtcaattccagttaaatatggtgacttttgttttttctaaataataatatttattatattaatttttatt

SEQ ID NO: 211862 - DNA, 395 bp, Gossypium hirsutum
cggacgcgtgggtcctagtcaaattgtggcatttattttgaccaaaatgaaagaggctgctgaggcttggctgggggagggtgtttctaaagcagttatcactgttccagcttatttcaatgatgcccagaggcaagcaactaaggatgctggtagaattgcaggccttgatgttgagagaataatcaatgagcctactgctgctgccctttcatatggaatgaacaacaaggagggtctcattgcagtctttgatcttggtggcggtacatttgatatctcaattttggagatttcaaatggtgtctttgaggtcaaagcaacaaatggtgatactttcttgggaggagaggattttgacaatgcattgctggatttcttggtgagtgaattca

SEQ ID NO: 211863 - DNA, 414 bp, Gossypium hirsutum
gaagaacttggacatccaaagatacatgggaaagtggtacgagatagcttggttgcgcatctttctgtcagcgggaggaagggggagaacaccagcgctttttacactctgaaggaagatgggacggtgcatgtgcttaatgagacttttgttaatggcaagaaagattccatagaaggcaccgcctacaaggctgatcccaagagtgacgaagccaagctcaaagtcaaattctacgttcctcctttcttgcctatcattcctgttactggggattactgggttttatacattgatgaggattatcaatatgttcttgttggtggtcctaccaagaagtacctttggatattatgcaggcagaaacatatggatgaagaaatctacaacatgttggagcagaaagctaaagac

SEQ ID NO: 211864 - DNA, 404 bp, Gossypium hirsutum
cccacgcgtccgcccacgcgtccgccctctcgtccgggaagatcataaacatgccgtgagctcgtctgttgggagacatggccgttttaccaacaggagatgtgcttattgttaacggtgccaagactggttcagctggttgggatgacgctagggagccgaatttgaaccctgttttgtacaaatatcaaaccgatggaactggttccaaattcactgtgcttaacccatccaacatcccccgcatgtaccactcctcatttgcactccttcctgacgcaaaaatcctcattgctggaagcaacacgaaccccggttacctcgatgatgcattgttccccactgaagtccgggtcgagaaattctcaccacattacttggacccgaacttggccatgttccga

SEQ ID NO: 211865 - DNA, 403 bp, Gossypium hirsutum
cccacgcgtccgctggtcaaggtattttcttatttgcagcaagcaagccgcaggtgatggctttttgtgactctgagtgggcttcatgtcctatgtcaaggaggttagtcactgggttttgtgttaaacttggggattctcttatttcatggaagtcaaaaaaacaaaccacagtctctcgatcgtcagcagaagctgaatataggagtatggcagtggctgtagcagaagttgtatggttgaatggtctgttgagagaagtgagtcctagtcagtttgataaagctttgattttttcggatagtaaggtagcactgcaaattgcagctaaccttgttttccatgaacggacaaagcatatagagattaattgtcattttgtgcgtgataaaatcaaggatgg

SEQ ID NO: 211866 - DNA, 406 bp, Gossypium hirsutum
cctcacaaggattgcctgtacctagaaatgttttaattcctcgtactaagggttttgggtcggccgtaagtcatatgcgttcatttgttccagctatttatgatatgacagtggctattcctaaaagctcaccttcacctacaatgcttagactgttcaagggacaatcttctgtggtgcatgtgcatgtcaagcggcgtcttatgaaggaacttcctgaaacagatgaggatgttgcacaatggtgtaaagatctttttgtggagaaagacaagttgttggacaagcatatagctgaggacactttcagtgaccaaccattgcaggatatcggtcggcctattaaatctcttctggttgttgcttcttgggcatgtcttgtggcttatggagcttataattttct

SEQ ID NO: 211867 - DNA, 355 bp, Gossypium hirsutum
  unsure (1)..(355): unsure at all n locations
accctcccgtccgaattccccaaaatttgtttcattaatttctgcctcacttatagcttcttcgggtacccttaaacgttcaggcggtgttgaaaaaccntttntaaaaagggttccttcccttgctacgtccccttcttctttcaaggttgaaaccagtggtggcaaaaaaatcaagaccgacaatccttaccgaatcaatagtgatattagcttgacggatggtgttgatgccttttataaatattctcacctttaaaatgtttaccaatatctaaacaaatatattgctaacgtccatgggcacatcactggtttggacaccaacgactggtctcccactagtgatttttat

SEQ ID NO: 211868 - DNA, 447 bp, Gossypium hirsutum
  unsure (1)..(447): unsure at all n locations
gcgacgccaccgccgtccnngctttgctnngctgttgcttccaagggttgcattgcctatgatatttatttcgnnatatcatcctcacgcgaaggttggcatccatcaaggaggtcatgtaancttgtgcatttggtttattgagaaaacgccaacaggtgcgtattcacaaaggtgtttgttcaacttggatgaagaatgctgtgtcctcggggaaaagcgatgactgcagctgggcacccatttttgtcaggcaatcaaactttaaacttccttcagatgctaaagtgcccatcataatgattggccctggtactggattggctcctttcaggggattccttcaggaaaggcttgcactgaaagaagctggtgctgagttgggtccatctgtattgttctttggctgcagaaaccggaaaatggatttcatatatgaagatgagc

SEQ ID NO: 211869 - DNA, 353 bp, Gossypium hirsutum
cccacgcgtccgcagaattatggcacttgatcttccccatggtggtcatctctctggtggttatcagacggacacgcggaaagatatctgctgtgtccatattttttgagacaatgccatatcggctgaatgaaaacactggctatatcgactatgatcagttggagaagagtgcaactcttttcaggccgaaattaatagttgctggtgccagtgcttatgcacgtctgtatgattatgcacgcattcgaaaggtttgtgacaagcaaaaagcaataatgttggcagacatggcacacatcagtggtttggttgcagccggtgttatcccttcacctttcgagtatgccgat

SEQ ID NO: 211870 - DNA, 354 bp, Gossypium hirsutum
cagccatgatcattccagagaagaaccgccgcgagatctccaagtacctctttcaagagggtgtttgctatgcaaagaaagattacaacttggcgaagcacccagaaattgatgttcccaatcttcaagtaataaagctgatgcaaagcttcaagtcaaaagaatacgtgcgtgaaacttttgcatggatgcattattactggtaccttaccaatgatggcattgagttccttaggacatatctgaatcttccttctgagattgttcccgctactttgaagaaacaagctaagcccgctggtcgtcccatgggccctcctggtgaccgcccacgtggtcctcctcgctttggtg

SEQ ID NO: 211871 - DNA, 405 bp, Gossypium hirsutum
cccacgcgtccgcccacgcgtccgggatcgtcaaaaaagcggtgggcaactatgcggcgtgcttgataggtagggcgttgacgtgtaattattatagaggagataattacttggagattgacgttgacgttgctagctcggcggttgccaacgcgattttacacctcgcattgggatgcgcgacgagcgtagtaatcgatatgggatttgtagtggaaggacagaccgaggatgagttgccggaaaaattaatcggtgcggttagagttagtaagatggagatgtcgtctgcgaccgtagttgatgcacttacgccatcggttcaaacagcggctgagcgtggaataggagtttgtaaggtaaatgaccataaatctgatgatggcgaatgcgatgatattgaca

SEQ ID NO: 211872 - DNA, 376 bp, Gossypium hirsutum
  unsure (1)..(376): unsure at all n locations
gcgggattacccgctgagtttaagcatatcaataagcggaggaagagaanaaggctgcatacgagaagagaacgagggagcaagtatcttaaaaagatggaaagaaaggagatgaagaggaagtaaagcaggctgagaagccagttgaggaaaggaaagctgaaaaacccaaggaagaaacgccgccgcccccgccgcctacaccgcaagagattatcttgaaggtttacatgcattgtgaagggtgtgctcggaaagttcgccggtgcctcaagggctttcaaggggttgaagatgtaatgactgattgcaagagtaataaggtggtggtgaaaggagagaaagctgatcctttggaagttcttgagagagttca

SEQ ID NO: 211873 - DNA, 406 bp, Gossypium hirsutum
gcagaatcagagtgtaaaaaaggaaggaaaaaaaggctaaaagaatgtttttgcgaatgatatcgcggccgtgggtggctaaggtgaaggagacaacggggatcgtcggattagacgttgtacctaacgcaagggaagtccttatcggtctctacaacaagactctgaaggagatccaggccgtacctgaagacgagggttaccgtaaggccgttgagagcttcacgcgccaccgtctgaaggtttgccaagaggaagaagattgggaaatgattgagaagcgccttggatgtggccaggtcgaggagctcatcgaggaagcgcgtgacgagctcactcttatcggaaaaatgatcgagtgggatccatggggtgttcctgatgactatgaatgtgaggttatcga

SEQ ID NO: 211874 - DNA, 373 bp, Gossypium hirsutum
  unsure (1)..(373): unsure at all n locations
cccacgcgtccgttccatgtgaacggcacttgcacatgggttagtcgatcctaagagacgggggaggcccgtccgacagcgcgtccagcgcgagcttctaaagggaatcgggttaaaattcctgaaccgggacgcggcggctgacggcaacgttagggagtccggagacgtcggcgggggcctcgggaagagttatcttttctgtttaacggcctgcccaccctggaaacggctcagccggaggtagggtccagcggccggaagagcaccgcacgtcgcgtggtgtccggtgcgcccccggcggcccttgaaatccggaggaccgagtgccgtccgcgctcggtcgtactcataaccgcatcangtctccaag

SEQ ID NO: 211875 - DNA, 414 bp, Gossypium hirsutum
gcaacataagcaaagcaaaaaaagaaaagggcaaaaaatggctgtgcaattcaaggccagggcttctcaaactaagaaactcccttcatatgctcttccacccatggcaagtcttagatctcccaaggtttctatggtctccactcttccacctcgctccaaaggggttgaagatctgaaacggcctttcatggctccaaagctggtacaccagtcttcccacaccatgccacctgagaagattgagatctttaaatctttggatgattgggctagggataacattctgattcatcttaaacaagttgataaatgttggcaacccaaggattttcttcccgatccttcgtccgatggatttgaagatcaagttagaaaacttagagaacgggcaaaggagattccggatgagta

SEQ ID NO: 211876 - DNA, 425 bp, Gossypium hirsutum
  unsure (1)..(425): unsure at all n locations
gataactgcaaggtccttgttaatattgatcagcttagtcctgatattgcccanggtggggatgggcactttacaaagcgtcccgaanagattggagccggtgaccagggccacatgtttggttatgctactaatgagacccctgaacttatgcccctaagccatgtcctcgcaactaagcttggggctcgtcttactgaggttaggaagaatgggacttgcccttggctaaggcctgatggtaaaacccaggttactgttgagtacaacaacgataatggagctatggttccggttcgtgttcacactgtcctcatctccacccagcacgacgagactgttactaacgatgaaattgctgctgacctcaaagagcatgttatcaagcctgtcatccctgaaaagcacctcgatgagaagacaat

SEQ ID NO: 211877 - DNA, 401 bp, Gossypium hirsutum
aaccatacaagggaattactgactgctttgccaggactattaaggatgaaggtgtcatttgtctttggagaggcaacactgcaaatgttctcagatacttccccacacaggctttgaactttgccttcaaggattatttcaagaggatgttcaacttcaagaaggacagagatggctactggaaatggtttgcagggaacttggcatctggtggtgctgctggtgcttcatcacttcttttcgtttactctctggattatgctcgtacacgtttggctaatgataacaaggctgctaaaaagggtggtcagaggcagtttaatggtttaattgatgtctacaggaagaccatccaatctgatggcattgctggtctttaccgaggattcaatatctcatgt

SEQ ID NO: 211878 - DNA, 398 bp, Gossypium hirsutum
gaaaattcatttattacttaccctttttctagttctatttgcttctttcctttcttcatctaattgctatactttctatgtggactgggttttgcaccctaaagagaagtacaatgagtgggctggtaaaatgaggtttcaagtgaatgacactatcatttttaaatatgaaaaaggatcagactcggttctcttggttcaaaaagatgattatgataagtgtgaaaggaaggaacccttgatggaaatgaacaatggaagctccgagtttaagtatcctcattccggtccattttatttcattagtgggaaagaggggcattgccaaaagggtcagaaaatgatcactgttgttatggctgtgagacatgggactccatccattcatccacccacag

SEQ ID NO: 211879 - DNA, 383 bp, Gossypium hirsutum
  unsure (1)..(383): unsure at all n locations
cccacgcgtccgcccacgcgtccgttcctctgaaagcccttcttgctttaatctgcttcggtggggggttgggttggtttacacagaaaaagatctacagaagaagagttgaagagtgtggtttttatttccaggacttggatctgatggggatttgcttaagtgccagaattaatgagagtccaagcaacacagggctgagttcgaagtatgttagcagtgatgggaaagatacgagtagtacaagcagcaaagcttcatcattttcagcacctttgactccccgaagtgagggtgagatcttacagtcccccaatttgaagtgtttcagtttcgcctatctcanaatggccactaggaattttcgtcctgacagtgtgctc

SEQ ID NO: 211880 - DNA, 332 bp, Gossypium hirsutum
cttgagaaggaacccaagttcttgaagaattgttatgctggtatgattaagatgattccggccgggcccatggttgtggagaccttttctgagtacccacccttgggccgttttgctgtgagggacatgcgtcagaccgtggcagttggtgttataaagaatgttgagaagaaggacccatccagtgccaaggtcaccaagtctgctgctaagaagaagtgaaccgtgctggttaaatctaatgaagtttccgcagatggagtattttattatcataataatagtttgatagactttatcatttatgatatagttggtcttttgcttggttt

SEQ ID NO: 211881 - DNA, 374 bp, Gossypium hirsutum
acggttctttacttaacatacgatccaattttatgtttcaaaaactcccatgcctttattggatggggtatcatagccggtgagcctgaacgtgccttctttcattgatacaggtagacgcatgacggtcagatcacatggcaatgcttgaaagagagggggtgctcctcgtgatatttttgtcgtcattgaagtgatcccagaccctgtactgaaactgtatgacacgaacattctctatacatgcaagatttcatacattgatgcaatcttggggacaacagtgaaggtaccaacagttgatggatcggccgatcttaaaatccctgccggtgtccatcctggaacaatcttggtgatgtcaaagaaaggag

SEQ ID NO: 211882 - DNA, 406 bp, Gossypium hirsutum
cttatacaggcagaaagaacaattcagtgatggcgttggctatagttggatcgatggtctcaaagctcatgctgttgcacatgtgaccgataagatgatgcttaatgcttcaaacatcttccctcacaacactccgaccacgaaagaagcatactattataggatgatcttcgaaaggttcttccctcagaactcagcacgattgaccgtcccgggaggagcaagtgtagcatgcagcacggccaaagctgtcgaatgggatgccacttggaagaacaaccttgacccgtcgggcagagcagcacttggagtgcatctctcagcttacgacgcggagacacctttcgataacaagccgtccaagattgttgagtcaataccgttgatgatggagattcctggagtt

SEQ ID NO: 211883 - DNA, 401 bp, Gossypium hirsutum
  unsure (1)..(401): unsure at all n locations
ctttttcagtgttgtgattgtagcaacttatcttttgcttggttaatgtgtatgaggttcgcaattattctccacctccgtcaatcaacaatagcatcaaaatggaagttggaattgaagattgcctgcacattgagtttgagtataataaaagcaagtaagtttaacatctatggattgtgcttaaacctggcatcataagttggcttaggtttgtgtggatttaagatttaagctggtcagcttaaactattataagtagcaattttcctagtcactttttatcacgtaggttttgattagacattggtggaatccaaattgctcangtatcatctgaaggatgttattattggtaagatatattttcttcttgtgaggatcaagattaagaatatgga

SEQ ID NO: 211884 - DNA, 327 bp, Gossypium hirsutum
cccacgcgtccgcccacgcgtccgcccacgcgtccggttgaagccttcaccaagagcctgaattgtgattcatagttagtgtttagtaagccagtgaatgtatgaacgaataaaatgcccataaatttatttgtttagtatattttccaaaaaaaaaaaaaaaaaaaaaaaaaaaaaataaaaaaaaaaaaaaaaaaaaaaaaaaaaaaaaaaaaaaaaaaaaaaaaaaaaaaaaaaaaaaagggggggccgttttagaggatccaagtttacgtacgcgtgcttgcaacgtaatagtttttttttaggggcacctaaattaaatta

SEQ ID NO: 211885 - DNA, 391 bp, Gossypium hirsutum
gctgtttagggttttacgaaggcaatagtatttaaccatgtctccagatgcttcagctgcccttgcagtgaggcagaaagttcaaacctttttgaatgctgcttgtacagggaaccttgatcttctcaagaagattgcctctcaacttgatgaggggaagggactggctaaaacggtggcagatattaaggatgcgaacaaacgaggggcaattcattttgcagcaagagagggcaagactgaggtgtgtaaatacttgttggaagaattgaagcttgatgtgaacacaaaagatgaagatggtgacactcctctccttcatgctgcccggaaaggtcatactctcactgcaaaataccttctagagcatggtgctgatcctgctataccc

SEQ ID NO: 211886 - DNA, 308 bp, Gossypium hirsutum
  unsure (1)..(308): unsure at all n locations
tactgttacacctgtcccccaaaaaaaaaancttaattcttataaacatctttcctcacaacacttcttccactaaaaaacccttctattataagatcatcttcgaaacgttcttccctcaaaactcaacactatttacccttcccagaagaacaaatctaacatacaacaccgacaaagcttcctaattttatgccacttttaaaaacaacctttacccctcctccaaatcaacactttgaatgcatctattaatttactatttcgaaaacactctttccataacattcctaacaatattgtttatt

SEQ ID NO: 211887 - DNA, 425 bp, Gossypium hirsutum
cgtccgcaaggatggcaacgccatcccaaactacattcattttatggacttagctgatggccatagtgcgtcacttatgaaactttgtaccacagagagtataggttgtgttgcctacaacttgggaactggatgtggtacatctgtcctcgaaatggttgcagctttcgaaaaagcttccggaaagaaaatccccattaaactatgcccaagaagacctggagatgctactgccgtttatgcttctaccgagaaagctcaaagcgaactttgttggaaggcaaaatatggtgtatctgagatgtgtagggatcaatggaagtgggcgaacagcaatccatggggataccagtcaaaaaagccttaaaagctttgcttaaaattttctcatgttacattaacatcaacaacatgtttaaagcaaa

SEQ ID NO: 211888 - DNA, 121 bp, Gossypium hirsutum
acgaaagtctcgaaacgaaccccagaccgtcctctatggtacccacgaacaatggcgcctgattggctcgatggaagtttggtgggtgattacaggttcgacccgttcgggttagggaaac

SEQ ID NO: 211889 - DNA, 395 bp, Gossypium hirsutum
ggctactacccatttgctaatattgctacttggagtggtggctctcgccactccgtgtttgggtacctacgagtctgccaactatgggaagccccctgctcctgttcataatcctcctaagctgaaaccgccaccatatgaacataaacctccggtctatgaaccaccaaagaaggagaagcctgaacctaagccaccagtttatacacttccaaagaaagataagcctgaaccgaaaccaccagtatatgaacctccaaagaaggaaaaacctgagcctaaaccaccagtttatacaccaccaaagaaagaaaagcatgaacccaagccaccgatgtgtgaaccaccaaagaaggaaaagcctgagcctaaaccgccagtttatgtacctccaa

SEQ ID NO: 211890 - DNA, 431 bp, Gossypium hirsutum
attcgccggtaaggcagtgaagttctccccttccacccctgaaatccggggaactggcggggggtccatgaggaaaaccacgcaagcctgttccttctggtagcccatggtacggtcctgaccgagttttgtacttgggtccactttccggtgagccaccatcttacttgaccggtgagttccctggtgactatggttgggacactgctggactctcagctgatcccgagacctttgctaggaaccgtgagctcgaagtcattcactgcagatgggccatgttgggagctcttgggtgtgttttccctgagctgttggctaggaacggtgtcaagttcggtgaagctgtatggttcaaggccgggtctcaaatcttcagtgagggtggacttgactacttgggtaacccaagcttgatccatgctcaaagc

SEQ ID NO: 211891 - DNA, 419 bp, Gossypium hirsutum
  unsure (1)..(419): unsure at all n locations
ggccgacgcgcacgcgtccgactcactcaacattcccatttccaatctttttctctcaacgtgaatatgccnatcanaaacatggcttttatccgacccggagaggcaactcaccccgatgctctcaaggcagctttggctgagttcatctcaacctcgatcttcgttttcgctggatcgggctcaagaatggcttttaacaagttgaccgacaactgagcaacaaccccggccgatctcttagccggcgctctaactcatggcttcagtcttttcgtcgctgtctccgttggcgccaacatctcatgtggccacgtcaaccgcgccgtcaccttccgtgctttcgttggcgggaacatcactctcttgcgcggcattctttactggatcgcccaactcctaggctcaaccgtagcttg

SEQ ID NO: 211892 - DNA, 402 bp, Gossypium hirsutum
gctcagtatatgagtgggcagagggagaaatttgtcaggttggatgacttggactctagatgtatcatcatcctctgatacaggattgaaaaaatgtgggtttaacattgatggattaggtcgctctggccatgcaaacaatacaacatcaagatctttcaagagagggatcagaaagggatctgaagggcttaagtcaattggtcgctcacttggatttggggtttcacgagttgtatttccagaggatcttaaagtttcagagaagaagatttttgatcctcaggataaattcctcttgctatgcaacaaattatttttcatatcttgtattctggcagtatcagtggaccctctatttttttatcttccagttattaacgatttgcaaaagtgtctaaa

SEQ ID NO: 211893 - DNA, 389 bp, Gossypium hirsutum
cccacgcgtccgcccacgcgtccgtattgatccaggaactccaagcattccctcacctccattctttcctgctccaactccaccaattggtggtacatgcgatttctggaggagtcaccccacactgatatggggtctgcttggttggtggggcactgtaagcaacgcatttggcgtgaccaacgttcctggacttggaacaagcatgagcttgccccaagcactttcaaacacacgtactgatggacttggggcgctttaccgagaaggaacagcctcatttctcaactccatggtgaataataggttcccattctcgactaagcaagttagggagacttttgttgcagcacttggttcaaacagcgctgcagcagctcaagctcgtc

SEQ ID NO: 211894 - DNA, 415 bp, Gossypium hirsutum
  unsure (1)..(415): unsure at all n locations
cggacgcgtggntcgtgaaagacccaaaattccttaccaagtggacgagatgaaacaagggttgcgctatttcgatggcgatgatgatgggaaaatctcngctctcgaacttagggcatacttcggctccatcggggagtacatgtcacatgaagatgctcaaatggtgatcaacgaactagattccgacggggatagcatgttggactatgaagatttcttgaagctaatgaaaatagaaaagcgggatgatgatgatgatgatgatgacctgaagaaagcgttcgagatgttctagttggagaaaggttcgggttgcataactcccaaagggttgcaaaagatgttgaatcgccttggggatgcaaagtcttatgatgaatgtgtcgctatgattcacgtttatgatattgat

SEQ ID NO: 211895 - DNA, 341 bp, Gossypium hirsutum
cccacgcgtacggtcctttctatagcagttttatttttcaatggctggaaagagcaaggggtcggttattagaggcactgggtacattataaagttcattgttcaagccagtgtgaatgagggtcatcccacttttgctttagtaagagagggttcactatcaccacccagttaagggaaatgttattaacactttcaagaacttaagtgttcatctgttgtatggggatctttacgatcatgaaattctggttaatgcaataaagcaagctgatgtggtgatatccacggtacgatctatgcaattagcatatcaagttaagatcattgctgccattaaa

SEQ ID NO: 211896 - DNA, 396 bp, Gossypium hirsutum
cgaggatctgcggtgggattcaaattggatagcctccttaaattatctgatacgcgtgcaggaaacaacaaaatgactttaatgcattatctatgcaagcttctatcggagaaaatgccagagttgctggattttgataaagatcttgttcatttagaagctgcttctaagattcaattgaaaaatcttgctgaagaaatgcaagctgtgagtaagggccttgaaaaggttgagcaagaactctccgcttcagataatgatggtgatatctctttgggctttcagaagctgaagctgaagtgaggtcacttatctccttgtattctgaagtgggtagaagtgcggattcattatcccaatacttcggagaagatcctggacgatgtccttttgaac

SEQ ID NO: 211897 - DNA, 398 bp, Gossypium hirsutum
cccacgcgtccgcccacgcgtccgcccacgcgtccggtgggttcggttggggatgacttgtgtagatttcttcattactaacacataggaatacgtggggtttcatggttaagattattattaataattttctctctagtgtaggacttgaaaataactagcctttcatttttgtttttcttatttaaccacttggaaaacctaaatgacatggatactgtgttacaagagatcaagttgaactgttcgggaaagatcatgaaaactctaactgaggtggaagcaatcctgaagccagtgaagaatcaaacatggccgagcggaattcaacaaagctgagcaacaatttcgacccgcatttttattattggatgcatatgttctcccacatggggggg

SEQ ID NO: 211898 - DNA, 394 bp, Gossypium hirsutum
cccacgcgtccgtcagaagctgctcctgttgtaccctctcaagtgccacaccctgcaatcagcgtgcaagcacctagtcaaggggagagtgaaaatattgttgagcagtctctacttaaggaacttgaagatatggggttcaagcaggttgatttgaacaaggacattttgaggaggaatgaatatgatctggagaagtctgttgatgatctttgtggggtggctgaatgggatccgatacttgaggagctgcaggaaatgggtttctgtgatgctgaaacgaacaagaagctgctgaagaagaacaacggaagcatcaagggagttgtcatggatctgttaacaggagaaggtgcttaaattattaattatggatgatggctcgtggtttcta

SEQ ID NO: 211899 - DNA, 398 bp, Gossypium hirsutum
cccacgcgtccggataattgtgacacgaaccgagatcgatatgcagtatataaaagccgggtgcctgaggaaatataaaaagaccttgaacgatgcagttcactcagacacatcgggccactacaggacttttcttctctctcttttgggaccaaacaattagacatcgtaagtgtagttgtgtgtgtaaatatgttataatgatgtttcagtgaatccagttcctttcgtatcggattggtgtattcgtggcagattggtagaatcgaaagtgattgcatagctgattaggtgaaccatgttaaagctctttaaactgcagttgtgtgaatgtgagagagaatgcgagagagaatgcatgtagttgggaggcttttcccctctggtcacaagtaatg

SEQ ID NO: 211900 - DNA, 401 bp, Gossypium hirsutum
acggatttcagatcggcatcacgaagaagtgtccctcggaaacttaaggaggttccaattcagggaacttcaggttgcaacacataacttcagcagcaagaatatactaggcaaaggcggtttcgggaatgtgtacaagggagttctgcaagacggaacaatagtagccgttaagaggcttaaagacggtagtgccgctggtggagagattcaattccagactgaagttgagatgatcagccttgcagtgcaccgcaatctgcttcggctttacggattttgcataactcctacagagaaacttcttgtttatccgtacatgtccaacggtagtgttgcatctcgtctcaaaggaaaaccagtgttggattggagcacaaggaagagaattgctctaagag

SEQ ID NO: 211901 - DNA, 396 bp, Gossypium hirsutum
tatggaatcaaatttttcgaaacaagtgcataaactaacctaaatgtggaggaagttttcgtttcaatagcaagggacataaagcaaagactcgtcgatactgacttaaaggctgagccttcaacaattaagatcaataaacctgaccaggcagctggggctggtcaagctgcacaaagaccggcttgctgtggttcaacctaagggagctcaaacctggtgggacacgtattggatgttaaaaactacttttcttcaaaaaatggaggggaaagagaaaactaattgtggtgactggatgatgagtgcctgtattttcttattgacattctttataacttgttttaaggtgtgaggatgtaatgtttttctttataattggttgtgtcatgtgaa

SEQ ID NO: 211902 - DNA, 387 bp, Gossypium hirsutum
atccttaagcagaggttgaaggtcccaccattattgaaccaggttaccaagactcttgacaggaaccttgctacgagtctattcaagctgcttctcaagtacagaccggagggcaaggcagccaacaaggaacgtctactgaaaaaggctcaagctgaggctaaaggcaaagcccctgagtctaaaaaaccaattgttgtgaaatacggacttaaccatgttacctaccttattgaacagaacaaggcacaattggttgtcatcgcccacgatgtggatcccatagagcttgtagtctggcttgctgctttgtgcagaaagatggaggtcccctactgcattgtcaaggggaaagcacgattgggatcgattgttcacaagaaaact

SEQ ID NO: 211903 - DNA, 401 bp, Gossypium hirsutum
cttggaactggcaccactggagctactgttagaatttgggatgtgaagagtcggggaaatgttgccaactttgatggacacactggggctgtaacagccatatctttctcagaaaacggttacttccttgcgactgctgctcatgatggtgttaagttgtgggatctacgcaaattgaagaactttcgatcttttgaattatatgatcaagacacaccaaccaactcagtggatttcgaccatagtgggagttaccttgcaattgctggctcagatataagagttttccaagttggcagcgtaaaagctgaatggaattgcatcaaaactttacctgatctgtccggcacaggtaaatcaacttgtgtcaaatttggtccagatgcaaagtacttggcagt

SEQ ID NO: 211904 - DNA, 426 bp, Gossypium hirsutum
cccacgcgtcctcaatcttcgactccgcttcacccgtattcccaacaagaaaaaaaaagcggaggagagaaggacatttatgacttttttttttattttcttctttatatttctcgtttgaattattgtataatatgacacttgtaatatgccgaattccaaaaataatcctaaggagcaagacaagaaccggaagggtaagttatctgaaaaggcgtcgtcgtttcacgggaaattcccgacggtggctccgtctgatctgaggcggccgaagacgctgcccgacctattctcagagaggactacttccgtcttaccggatgcgaggccgaagttgacgaagctgctgttgaacgtgaccattcaagggagtctcggagctgtacaagtagtgctgtcgccggaaaacactgtccgtgacttaat

SEQ ID NO: 211905 - DNA, 395 bp, Gossypium hirsutum
atttccttgtattcaattgcagcagatatgcgtgggaaagcagcaattcttggtccactaataacagagcatgcgaaaggagggaagtgtattgttttcactcaaacaaagcgtgattcagatcggttggcatatgccatggcaagaaactttaaatgtgaggctttgcatggtgatatatctcaaagccagagggaaagaactctctcaggattccgagatgggcattttaatattttagttgctactgatgttgctgctcgtggccttgatatacctagtgttgacctggtaatacattatgagcttccaaatacatctgaaacttttgtccatcgaactggccggactggtcgtgcttgaaagaaaagaagtgcaattcttatctatactca

SEQ ID NO: 211906 - DNA, 353 bp, Gossypium hirsutum
  unsure (1)..(353): unsure at all n locations
cggaaaaagatgttgcagatattcagcccatcatacccccatgccatcatcaggaagtacggggtcatgtgttgcaggcagtgcttccgtagcaatgccaaggaaatcggattcatcaagtaccgttgaagaattttgtatggtgtaaagtaggaaggactttgtccctctatgagccttctgtagtatgttattatttttatttttttgaatttgaaagaacaagatgctgttttgttttggtgaattaccaaagtgattgttgaactaagaatactttgtggttcctcaatgaagtaatcatactggtttaatttggtattttcttttttnaaaaaataaatttgatgaat

SEQ ID NO: 211907 - DNA, 402 bp, Gossypium hirsutum
gttgaaatgaggaaaagaggaaatttcccattcagcagtaaaaaggtcatcacagcaacagcaaggcaaattgagagtctgatacgccttaatgaagccttggctcgtattcgattctcggaaacagttgaaatgcgagatgtaactgaggcattccggcttttggaggttgctatgcagcaatcagcaactgatcactccacaggaactattgatatggatcttatcaccactggagtttctgcaagtgaaaggatgaggagggagagtgtgttatcagcaacacgcaacataataatggataagctacaacttgggggaccatcaatgcgattgctagagttactagatgaaatgaagaagcaaaactctggcagtgaaattcaccttcatgatctaaga

SEQ ID NO: 211908 - DNA, 197 bp, Gossypium hirsutum
aaagaaagggttgattgattccgttgcaagcaaaagtttgcttgttgtaaaaggtaatgcgattgaggacaagattgagggtcaaaaggaagtaaaggctaaagagcaggaagagaaggacgtgatcgcacaacagaacatgtatgcacagttgctacctcttgccttgcccgcaccgccaatgccaggcatgggag

SEQ ID NO: 211909 - DNA, 403 bp, Gossypium hirsutum
tgacaaatgagattgagatttgttgtgttttttatggtattattattataatgaaaggagaatttctttttctcttctttgaaagctatggctctgcaagcagaagggactcagcagattcaaagccctccattgatgaatcttgatggcctgttatgtgaagaagaagatttaggagtttatagttttgaagaaaatggaagtgaaattcctgctgaaaaggagaattttgtacctttatttcttaacgaacatgatttgttctgggaagacgatgagttaatctctttaatgtctaaagagaaacaaacccatcagggttacgttgatttttgtccagatgagtctttagttttagctcgtaaagaagctttggattgggttttcaaggttaaggcacact

SEQ ID NO: 211910 - DNA, 363 bp, Gossypium hirsutum
attttcttatttcatataaacattcaataatatctttcacagtaacaaatgcgtcaggtttcttaagaatggcggctcacaacaaaaacacttacctgtatctacaaacaaagaaagtttttcgattcgtcctctttaaaatcaatgaaaagaaaattgatttattatttgaaaaaactgaaaatccatctcagaactatcatgatctcacttcttcatttcccgagaatgattacctctttgcagattacgacttttattttcagactattaataattgtcacaatatcaagatcttttttattacataactaaaaactcattcaattgtccaataattcaattatttcagcacatttatta

SEQ ID NO: 211911 - DNA, 410 bp, Gossypium hirsutum
cccacgcgtccggaaaacagaggcaggcattcatggcaaggatcaaggtgcacgagttaaggaacaaatcaaagacagagctgttgagtcagctcaaggatttaaaagccgaactttctctccttcgtgttgccaaggtcactggtggtgcccccaataagctctccaagattaaggtggtgaggctatccattgcacaagtattgacggtgatatcccaaaaacagaaggctgctttgagggaagcttataagaacaagaagtttttgcctcttgatctccgtcccaagaagaccagagctattcgccgccgccttaccaagcaccagcaatctttgaaaaccgagcgggagaaaaagaaggagatgtactttccgatgaggaagtatgccattaacgtataagcttga

SEQ ID NO: 211912 - DNA, 390 bp, Gossypium hirsutum
atagccgagatctcgtcttcctgtctcaagttagctgatctccaaagctctgtattttgctgagtgctctacttcatttgcaatggcggacgaggaacctgttgatcagaaaaaatatcttgaagatggttgcaagcctaaatgtgtgaaacagcttcgttcatatgaggcatgtgttaagagaatccaaggtgatgaaagtgggcacaagcattgcactggtcaatattttgactattggtcttgtgttgataaatgtgttgcaccatcgctattcacaaaactgaaataaccagggccagagttgtacaacggtagcatcatgtcatgctgttgaatgattgtttcagacaatttggctccataaacttgacaagtgtaaaatttttt

SEQ ID NO: 211913 - DNA, 404 bp, Gossypium hirsutum
tgcattctggccacacgtgcacagccgcataatagcaagcttattgatctctcaacttctattgatgggcctgctcagtacaaaagaggctgctaattcaactcctctgcttgttatcttaccaatattgacattatccttccataagtattgcaagagccgctttgaacctgcattcagaaagcatccactggaggaagcaatggcaaaggacttattgggtcggacaactgaacctgatataaacttaaaagcattcttagctgacgcttacttgcacccaattttccgatctttcaaggaagacgagttggtagagatcagagttgataaagttagagttgatagacaccaatcttatgccgacaaggcccaaagcagagatgatatcagttccccctccc

SEQ ID NO: 211914 - DNA, 401 bp, Gossypium hirsutum
ggatgctgtgggaagttgagggaaagtgggttgtgcaaggagctgtcgatgttgacattggtgccaatccttcagccgaaggtgctgatgaggatgaaggtgttgatgaccaagctgtgaaggttgttgacattgttgacactttcaggcttcaggagcaaccccctttcgacaagaagcagtttgtcgtgttcatcaagaagttcatcaagaacttgacaccaaaactggatgcggaaaagcaagagtccttcaagaaaaacattgagggagcaaccaagtttttgctttcaaaattgaaggaccttcaatttttcgtaggagagagcatgcatgatgatggatgcttggtgtttgcttactacaaggatggtgctgttgacccaacatttttgtacttt

SEQ ID NO: 211915 - DNA, 399 bp, Gossypium hirsutum
acaattctgaagaagtactcttttactgtggctactatctttaccggcatggcaggtgctactctgtggggccatactttgaccatgaacttcatcctaggaatttcaattgtgttcatctcaatgcaccagttcttttcgccgctttccaaagtcaaagaataacaagagaatggaatgctagaaccggttgattataaggaaaaccacaggtccaaggaatctttcattaatatagcagcaggagcacatgaagaggctagtcatcgtgttggatccgacgagagacaaccacttcttccaacttaaagttttagggaggagggaatttgttttggtagggacccaggtattgttggatagtgacagagataaaccagttttcgctcgagacgttta

SEQ ID NO: 211916 - DNA, 424 bp, Gossypium hirsutum
cggaggttcgacccaggcgtacgcccacgcgtacgtccacgcgtccgtgatcataaagttccttttggttatgcagaagcacggttacatcggagaatttgagtatgttgatgaccacaggtctggcaaaattgtggttgaacttaacgggaggctaaacaagtgtggggtgattagtcctcgttttgatgtcggagtcaaagagattgagggttggactgctaggctacttccttctagacaatttggatatattgtgctaaccacatctgctggcatcatggaccatgaagaagctagaaggaagaatgttggtgggaaagtacttggctttttctactgagtcaaatttttgatattttcctttgttcttttttaatttcactccatgtagaacttgatactttactgcaattttaatttt

SEQ ID NO: 211917 - DNA, 406 bp, Gossypium hirsutum
cccacgcgtccgctcaaatctcatctgttccatccgacgacatggggaggagacctgcgaggtgttatcgccaaatcaagaataagccataccccaaatctcgatactgccgaggtgtcccagatcctaagatcagaatttatgacgttgggatgaagaaaaaaggtgttgatgagtttcctttctgtgtccatcttgtgagttgggagaaggagaacgtctcaagtgaggcattggaagctgcccgtattgcctgcaacaagtacatggccaagtttgcagggaaggatgctttccatttgagagtgcgggttcatcccttccatgttctgcgtatcaacaagatgctttcatgtgccggtgctgataggcttcagaccggaatgaggggtgcttttggaaaaac

SEQ ID NO: 211918 - DNA, 404 bp, Gossypium hirsutum
ccacgatggcttttcatgaagaatgagatagataaagccatagctgtgctttctagaatggatgacattgctcggttagaagatgaagtggatcacctttctgctgcactagaagaagaacagcagagaaagaatactgtcagatatttggatgtttttagaacaaaaaaattagacttgcttttctggctggggcaggactgcaggcttttcagcagttcactggcatcaatacagttatgtactatagtccaacaatcgtccagatggctggcttcaattcgaatcagctagcacttctgctgtctctcattgtcgctgccatgaatgcaagaggaactgttgtcggcatttaccttatcgatcatttcggaaggaaaaagctggctctttcaagcttatct

SEQ ID NO: 211919 - DNA, 357 bp, Gossypium hirsutum
ctcagctcttttaactcctctttgttatttctttgtctaacgaagaaaagaaaatgacaatatctgcttcatttttgcttgcttttaccttgctgctcactgggtgtgttttgggtcctatatctcttgtttcagccaaacatggtgttccatcttatgctcataagaaaatcgcttctaaaccttttgaagggtatcttgaaaatggcaactttgaagaacagcccaacccgactgccataaagaaaacagtactcataggagcacacgcacttcccaaatggactatcacagggttagtcgagtacatctccggtgggcctcaacctggtgggatgttttaccccgtcgctcatg

SEQ ID NO: 211920 - DNA, 349 bp, Gossypium hirsutum
  unsure (1)..(349): unsure at all n locations
cccacgcgtccgtttagttatgctttatttgtaaaggaagcagggattagatgggggagaatattgatttcagacgctgggatgaattgataccggatgccttanggatgattttcaagaatcttccgctccaggaaatacttactgttgttccgagggtctgcaagtcgtggcggaaagcggttgctggaccgtactgctggcaggacattgacattgaacaatggagccaacaatgccggcctgaaacccttgatcgaatgcttcaaatgctgataactagaagctcaggttcactccgaaagctttgtgttactggtctcgctaatgaccagagctttttactcat

SEQ ID NO: 211921 - DNA, 396 bp, Gossypium hirsutum
cggacgcgtggggtttaatgtattgttttccatactatttgaaatgaaatattttgttggtggaagtgtgtgtgggaggggtgttttggctatatgcttggttatatgtttgtaaattgttaactattcttgaagttatttgtatttgattattgtgaaatcagcctgttttcggttctagatagctgtttaagatatgttttaaagatggatggttgagttattggtgatatctgattatgcgttgattttggaatgtaaaatgcaggccacctttgagtgtctattgaaaacgtacggcttcttgactcctgatttctggaaggagactcgtttcacaaggtctcctttccaggagtatactgatctgttgggaaagccaacgaagactcttgt

SEQ ID NO: 211922 - DNA, 389 bp, Gossypium hirsutum
aggagagaagaggggtttggctgggttgcagaacctaggaaatacttgttttatgaatagtgctcttcaatgtttagtgcacacgccgccacttgttgagtattttttgaaagattacagtgatgagatcaacacagaaaatcctttgggaatgcatggggagcttgcacttgcctttggtgagttattacgaaaattatggtcctctgggcaaactgcagttgctccacgtgtatttaagggaaaacttgctcggtttgcaccccagtttagtggttataaccagcatgattctcaagaacttttggccttcttactggatgggttgcatgaagacttgaatcgggtaaaaaaaaaaccttatattgaattgaaagatgcagacggtc

SEQ ID NO: 211923 - DNA, 234 bp, Gossypium hirsutum
tgggatccttgatgctggtgggaggaatgtaaccataagattgctttccaagacaaagcatgacaaagtcactgcagttgttggtcttgcagtttttagccaattttggtattggtatcctctcatttattttgtgagcttgtcattttcacctacggcttttattggactgaactatgaccttgaagttccaaaatttgagttcttatcacatgcaaaaccttcgctttttga

SEQ ID NO: 211924 - DNA, 404 bp, Gossypium hirsutum
gatggtcttccggatatcaggttgactggacagtgcctggaagctctaaaagaggctggttttgagataatttgggagaaagatcttgctgttggctctccactcccttggtacttgcctttggatacaagccacttctcattgagtagcttccgtctaacatctgttggacgcttcatcaccagaaatatggtaaaggctctagaatttgtgggattagctcccaagggaagtttggtgaaatggactatggaatttgaaaagcaaaatgatgatgtccctgatcctgtcaagtacggcgagtttttaactacctgggctaagaatgtcgatacttaccttcttaatgtctaattaaataattaaggaaactacatatatgaataatttgatcatatgtctcg

SEQ ID NO: 211925 - DNA, 407 bp, Gossypium hirsutum
aagaaaaggacacaaaagctctacaggtggctttcaggaagaccaggtggcatgaaagtggaaacattcaaccagctgcagcagagaattcctgaaagaattattgagcatgctgttcgtggtatgcttcctaaaggaaggcttggtagagcattgtttaaccacctaaaggtttacaagggtccagaccatccacacgatgcccagaagcctattgagctgccaatacgggacaagagggttcagaagcagagataatcaaaatataaagcagggtctggcttgagagtgcgcaggcaatgcttcacatcctgcttgccatttactcatgtttttggtcctccgagtatgagcttctttctttggctctccatgacagcatgctgcacttgtttatattttgattg

SEQ ID NO: 211926 - DNA, 390 bp, Gossypium hirsutum
attatattcattaccatattgtttacttcacaaccaactatagtccgatgggcatgtacaccaccagtatcagatgatgtcttgcatcaatggaaaggcttttgcgctctcatagcgaatgcatacttcataagaggaatggcatggcttcctgtgaaaactctccagctcgagcaaatggcagtggccggacgtgcagaagagccttcagttgttgctagccgaatgcggttagtttttagcacacttgaggtagttagtccacagtggccaagagtgtaaccaagtaattcaacgttgttgtgatccgattttctcaggatcatatgttggagcagtggttccttgtatattaataatgtaagaacatacgacactctgtgtctgctt

SEQ ID NO: 211927 - DNA, 351 bp, Gossypium hirsutum
cccacgcgtccgcccacgcgttttccttctcgtccggcataaccgcatgggtgagcggacactaacccgtcaattttggatccaattcgggattttccttggggggtatcagtaaggaattggaatgtaataatattgattcatataggaggaaaaggttctctattgattcaaatgctgtacctatgggatagggatagagaaagaggaaaaaccgaagatttcacatagtgcttttgatcgaaaaatcaatctgatttatttcgtacccctcgctcaatgagaaaatgggtcagattctataggatcaaacctatgggacttagggaatgatggaagggaattaaatta

SEQ ID NO: 211928 - DNA, 400 bp, Gossypium hirsutum
cccacgcgtccgcccacgcgtccgcccacgcgtccgcccacgcgtccgcacaaagataaagctgaattcaaagaagcaaagatgttgagcgtctcaattgcttccccagctaccttaactctccctccaaaacccaaatcctcaattcccaaaacttccttcaccggcgttagaatccagcacttatgtccccaacggttgccttctcaggccaccttctttcggcaaccgtcaccttcgtcctccgtggtcatgatggctaagagagaagaagaaatgaaggaaataagagccaaaaccactgaggaaatcaacgatgaagtggttgagttaaaaggtgagcttttgatgcttcgtctccagaaatcggttcgtaatgagttcaagtctagcgagtttg

SEQ ID NO: 211929 - DNA, 407 bp, Gossypium hirsutum
catgagtgtgatccagaggaagcaggttcatgcgactcaggatgcaatggtggtctcatgaatagtgcttttgagtatacactcaaagctggtggactcatgcgtgaggaagactacccctacactggcactgatcgtgggacctgcaaatttgacaagtctaagattgttgctaaggtggccaatttcagtgttgtttcccttgatgaggatcaaattgctgcaaatcttgtgaagaatggtcctcttgcagttgccataaatgcagtgttcatgcaaacatacattgggggagtttcttgcccgtacatttgctctaaacgcctcgaccacggagtattgttggtggggtatggttcagcaagctatgcccccatcaggttgaaggataaaccatattggatcat

SEQ ID NO: 211930 - DNA, 383 bp, Gossypium hirsutum
attgcttaggagaaaagtagaagaaaacaatgtcaggtcctcagtgctgttcgaatccaccaacattggattctgcaagtggggctggtcacgttgagaatcttgctggtctcaacacttatgtttctgggtctcttcaatctaagcttgctgtttttcttatctctgatattttcggatatgaggctccaaactttagaaagctcgcggacaaggttgcagccgctgggttctatgtggtggctcctgacttcttttatggagaaccctatgaccctaataaccctgatagacctctatctgtttggataaaggatcatggaccggataaaggttacgaggatgcaaagctcgtaattgacgctttgaaaagtaaaggggtt

SEQ ID NO: 211931 - DNA, 392 bp, Gossypium hirsutum
  unsure (1)..(392): unsure at all n locations
gacataatgaactcaaaaactattttgttgtttgcagagctgccgaatgttgggccagttacgtctaatgatatagaaactgctttgaggaacaccagaccgtcggcacatttacatgctcatcgctacgagaagttcaatacagactatggcagtcaaatactccgatgatggcatgcttctgcaaatatacttttaagttgttagttataacttccccagattttatattcatcagaattctattcagtttttactttgcattgtgtctgtttatggaaacttgtatatctatgttttttttttcaaaaaaaangaaaaattaaaaattattaataattataatttaaaatttttataaattttattttttatatttttttttgggtttt

SEQ ID NO: 211932 - DNA, 403 bp, Gossypium hirsutum
gtccattgtttttttccttttcgattctttgatttgagaaaagaaacagaaaaaagatgggttctttcttttcatccgattcaacgccagaaaagccatcatcttcatctgagccttcaagcgtcctaacctttcattcatcacccagatggcaacttcacttcaactctgtcaaagaaacctcacagcttatggttatagatttctcagcttcttggtgtgggccatgtaaattcatggaacctgttttgaatggcatggctgctaagtttactgaagttcagtttgtaaaacttgatgttgatgaactgcctgatgtggcgcaagaatttggggttcaaggaatgccaactttcgtgttgctaaagaaagggaaggaagtggatagggtggttggagccca

SEQ ID NO: 211933 - DNA, 271 bp, Gossypium hirsutum
ccacgcgttcggcaagacttgttagcactatgtatctttacatgggagggaaagtgactggggctgtagaaatttgctcggtgaaaatggatcaactgctgagttatttgggtgatcacagcttccaaaaacattcgtgttcttggatgtcaggattgaatgtaattgatctcgtcaggtggagagacctacacatctctgaaacttactggaagttggtgaaagaggccatctttaaagagggatcactttcgcttgctactttgctttc

SEQ ID NO: 211934 - DNA, 400 bp, Gossypium hirsutum
ctccctcccaaaaccaaatcgctgtcttatttcacgatccaaagtttccaaattcctctttgggttttgctcttcaccacttaagtctcaaatggttcgtaggccaaacgacccggaacactcccgtttcgcctctctcgtcctcctcttggtgtctctgttctcctgtcttctggtctatgcggttgtttccacactattgaaccccaccgtaaatcctcaggattccagctttgagtctttggaatcggtggcgggtattgattttggggaaaagaagggcgagtgttgcagaggaattgagaatttggagctgtggggtgcagctgtgaagtgggggtctgacttcaagtttaattcctctgtggaatgttgccaggcttgtaaggctatgtgtagt

SEQ ID NO: 211935 - DNA, 386 bp, Gossypium hirsutum
gcaaaaacagttgaacgagtcgttttgtcatcatctgccggcgctgtgtctagcagcacactggatgggacagatctcgtcatgacagataaagactggaccgatgtccagttcttatcatcagcaaagccaccaacttggggggaccctgcatccaagacgttggctggagcggcagcttggaaatgtgctgaagacaacaacattgatctcactacaggtatacattctatcatgactggtgcttccgttaccccaaatggccgcagcaccatatgccgtgctacatgtatgatttcaggcactgaatacctcataaatgctacgaaaggaatgcagatgctgtcatgttcgatctttatcacacatgtggaagacgaatgccg

SEQ ID NO: 211936 - DNA, 309 bp, Gossypium hirsutum
cccacgcgtccgctttttacgttttttctctacttcgcaggccttctttctacaggggggagcctcttatgttactagaaacaaagggcgtcgagccagcatccttgttggtgcagtcagcttcttcctaggaggagctatcaatacaggtatccaacatttattgatgcacttagagatttggatgaccctcttacaatggtgcacctgtttgcaatgttaactttgaatctttgaatatttggatttaggatttgtttgaattattcttctaatcagttttcttttcttaatgtgtaaaatatttta

SEQ ID NO: 211937 - DNA, 331 bp, Gossypium hirsutum
  unsure (1)..(331): unsure at all n locations
gcttctcacacttcaccttgaaaaagttaaatttcccagaaaataaaaaactttccagcaaaatgtcaggaagaggaaaaggaggtaaaggtctcggaaaaggaggagccaagaggcatcgtaaggtcctaagggataacatccaaggtatcactaagccggccatccgtcgtttggctcgtcgtggaggagttaagagaatcagtggcttgatctatgaagaaaccagaggagtgttgaagattttcttggagaacgtcattcgcgatgcagtgacttacactgagcacgctagaaggaagaccgtgacngccatggatgttgtttatgc

SEQ ID NO: 211938 - DNA, 411 bp, Gossypium hirsutum
gatcagaagaaagaccttttaacaaataagatgaagagctacaaatagaaggcacaatttcgaattacataggaaatacaatgatatgccagtttcagcatgcagcctaaaagtaaaaccaaatactcacacaaaacttgaccttatgccattaaaacaattagaaacagaacaacaaatagaacataattaccttccaccatatagtaaaaacccaagggctgcaaacaatgatacacctgctcatacacgtgtcacgttaaataatttcattcattactgaaaatttttaactaccatgagattaatgtctacaaatcatctaaaattactaaggttccatttgctaaatgcttctctttttttctttttctttttcttctttttttttttcaaaaagtaaatgaatag

SEQ ID NO: 211939 - DNA, 376 bp, Gossypium hirsutum
cgtctctctcttcatctctctgaacctaaaagtctttagcttttcgcttcgagagagaccatgttggtttaccaggatctcatctccggtgacgagcttctttctgactcattcccctacaaggaaatcgagaatgggatgctgtgggaagttgagggaaagtgggttgtgcaaggagctattgatgttgacattggtgccaatccttcagccgaagatgctgatgaggatgaaggtgttgatgaccaatctgtgaaggttgttgacattgttgacactttcaggcttcaggagcaaccccctttcgacaagaagcagtttgtcgtgttcatgaagaagttcatcaagaacttgacaccgaaactggatgcggaaa

SEQ ID NO: 211940 - DNA, 392 bp, Gossypium hirsutum
ggaaaggagcccaacaagggtgtttacttggatgaagcagttgcttatggtgcgtgggtacaaggaggcatcttgagtggagagggtggtgatgaaaccaaagatattcttcttcttgatgtggctcctcttaccctcggtatcgagactgttggtggggtaatgaccaagttgattcctagaaacaccgttatcccaaccaagaagtcgcaagttttcaccacttatcaggatcagcaaaccactgtctccattcaggtctttgaaggtgaaaggagtatgacaaaggattgtaggttgcttgggaagtttgatcttactggaattcctccagctccaaggggaacacctcaaatcgaagttacatttgaggttgatgcaaacggtatctt

SEQ ID NO: 211941 - DNA, 382 bp, Gossypium hirsutum
  unsure (1)..(382): unsure at all n locations
ttttgattgaggctgctaatatcaagatggtttatgaaataactgaccaacaaaaggttggcttgggtcttattggcttcggtatctccttcacatttctaggtgtatctctcttctttgacaggggtctgcttgctttaggaaatattttgtggttagcaggggtcgtaacattgatcggttggtattctactttgcagcttttcagaaaaaactacaagggtactgcttgttttattctggggctctttttcttgttcgtgcgttggccaatagttggtataatcttggaaatatatggttgctttgtggttntcagtggcttttggccttcggtcagtgggttcctctgtcacattccgttgttggatggttatacagt

SEQ ID NO: 211942 - DNA, 414 bp, Gossypium hirsutum
cttccttttgcacccgctctgtttctatctcggctctgacgagaagccggcgccgacatggttcacgtcagcttctaccgcaattatgggaagacctttaagaagcctaggcgtccatatgaaaaggaacgattggatgcagagttgagacttgtaggagagtatggactccgatgtaagagggagttgtggagagttcagtatgctttgagccgtatccgtaatgctgctagggatcttctcactcttgatgagaagaaccctcggcgtatttttgaaggtgaagcacttcttcgtaggatgaataggtatggacttttggatgagagccaaaacaagcttgattacgtcttggctttgactgtcgagaactttcttgagcgtcgtttgcaaacactagtattcaagactggg

SEQ ID NO: 211943 - DNA, 414 bp, Gossypium hirsutum
cccacgcgtccgcccacgcgtccggtgtaaataaaaatcagaaacattttctggtaagtgaaggaaaagcagagtgagtgaagaagatggagaccaaacccacagagattgggagttcaaagatgtttggagggtacaacaaaagatacaagcatttcagtcccaccctcggctgttccatgactttccatatctacttccctccttcttcttctccttcccacaagttccctatactttactggctctctgggcttacttgcactgatgagaatttcataatcaagtcaggagcacaacgtgctgcttctgctgagggtgttgctctaattgctcctgatacatctccaagaggcctgaatgtggaaggagaggctgacagctgggattttggtgtaggtgctggattttatc

SEQ ID NO: 211944 - DNA, 395 bp, Gossypium hirsutum
gaagaacatcgatagatagaagaaggatatggcggtgagaggtagagcagtagaaacgctgccaaagctgatgaggagcctgaggaaggactcggcttcttcaacagtgactcgaactccagccttgccctcccttagacgcgctttctctctctacgatcagatcaatctcatcgacaatgttcccgatgaccagcttcgtttccaacgatatacggaaacaggattcactgtgaacggtatcaactatgaaggcagcttgctttgtgtgggaaatttggtcacttcttggggcccccgtaaattttctgaaattactccccaaagcttatccatctttcaaattatacgacctattccagaaattttgattcttggctgtggaaagtacattg

SEQ ID NO: 211945 - DNA, 315 bp, Gossypium hirsutum
cccacgcgtccgcgtcgccttctttaagcgaagatactgccaaggctgttcttcgccaggtagagttttacttcagtgatagcaatattccgagagataactttctcaagaaaaaaattaacgaagacgatgatggcagtatcctttgtcttttttaaaactatttcccgctgtttgtgtaatattttatttacttattttatgctgctgcttcttgttgtttgctcttgaccgtgaattaccaaaaaagtggtcagtttggcattgatttgttcgttttcaaagatgagaagccatttgaatttaagggatgtg

SEQ ID NO: 211946 - DNA, 392 bp, Gossypium hirsutum
cctaggaggaaaaacaggagtcgtttttggaattggaggaataaacaacatgaggatgctcctcccctttatggtgagttattcccatcaggccttgggaatgcactgttgcaagcgagtgagaacataaacaggctattcgacagcctcaatatgacaccatcccagttgattgggcgcgtaaaagagcaagatgactgctacaaactgcattacgacatgccggggttaaccaaagaggatgtaaagatcacaattgatgatggggttctaaacataaaagggcagcataaggaagaagaagaagaaggttccggcgatgagcattggtctgccaggagctatggctactataatacaagccttgtgttgcctgatgatgccaaagtcga

SEQ ID NO: 211947 - DNA, 338 bp, Gossypium hirsutum
cctactcacactttgctttataaaagtttatttgaccagaatggaaaaaactttccggcggaccgtggggaacaggaaagggaggtgaatgtctatcataaggtcgtgcctgaaggcatcgtacggtcctaacggttctcttccaaggtatcactaagccggccatccgtcgtttggctcgtcgtggaggagttaagagaatcagtggcttgatctatgaagaaaccagaggagtgttgaagattgtcttggagaacgtaattcgcgatgcagtgacttacactgagcacgctaaaatgaagaccgtgacggccatggatgttgtttatgctttgaaa

SEQ ID NO: 211948 - DNA, 398 bp, Gossypium hirsutum
agaaaatggaggacggtgaatgcattgtaacagaagcacccaaggcaccggtgactaaggaaagaaagatcggaacggacttggaaaaatatatagcaaagccatatgtggcaagagcactgcaagctgcagatgtgggaaatccagatgggacaaaaggatatccggacaatggaatgactgttcttcaacaacatgttgcctttttcgatcaaaacaacgatggagttgtttatccttgggagactttcaaaggtattcgagatcttgggttcgatccattttcctcttttgtcataacttttgtaattaatgcagcatttagttatcgcactctcccggggtgggtgccaaatccgttacttccgatatacatagagagaatacacagagataag

SEQ ID NO: 211949 - DNA, 414 bp, Gossypium hirsutum
gagaaatacccaaagggccaatcgaatgtgatatggaaacagctcaagcaaatccttcaagctgaaaattgccagaattactctcctgatgaacccaattatgttaatatcgaatcaccgccttcgatgcaaccgtgcaaaagaatttgtgatataacgggatttgaggcaccgtaccacgatccgaggacgaatctccgctatgcaaatgccgatgttttcaagcttgtgagatctcttcccaatgagtatgtgcaaaggtatctagctctaaggaaagcggcagtggttttgaggtgaagtttgcaaacctggggacagactctggtcttggatcgaacatttagtttacaattagatcagtctttacttatatgaatcatcatagagattctcatgatgtttaatctacaa

SEQ ID NO: 211950 - DNA, 416 bp, Gossypium hirsutum
gagatagggaacaaagggttaacctttggtttgatccttctgcagatttccatacttacagtattatgtggaatcatcatcatattgtcttctatgttgatgatgtgccaatccgagtttacaagaacaatgaagctagaaatataccattccctaagtttcagccaatgggagtctattcaacactgtgggaagctgatgattgggcgacaaggggaggcctggagaaaattgattggagcaaagctcctttcttagcttcctacaaggacttcgacatcgaaggatgcccagtgccaggcccagcaagctgtgcctcaaacacagggaactggtgggagggaactacttatcaagcccttaatgtcatggaagctagaaggtataggtgggttcgtataaaccacatcatctac

SEQ ID NO: 211951 - DNA, 400 bp, Gossypium hirsutum
atcactgtcacctcagctgatccttgttcttgacctgccattactcaaagatttcttagtgattcaatccgtcgatcaaattagggggaaaaatgggagggggagagcatgggcatggagttcaggatttcagggcgaaggtgtggagcatgtcggggggtccgtactgccggcccaagcactggcgtcgcaacactgccattgccatgttcggcgttttcctcatttgcatccccattgccatgaaatcagccgagctcgagcaacgacctcatcagcctgtccgtccgattccttcacagctttggtgcaagaacttcggaaacaaagattattgaagtctgcctggggctgttgatggagtaccgatggcatatcaaagcagcctatgatctgtatt

SEQ ID NO: 211952 - DNA, 369 bp, Gossypium hirsutum
  unsure (1)..(369): unsure at all n locations
cgcgtncgcttaggttatttgtttggtatcggataagctcctaaaccagggacaaacaactcccaagctgctccagctgaagcaccagctgtctccaaacctggccctgctcctgaaccagtagatatttccaagcaaattcctgctggtattaacagtatttccgcaaacaattacatgcgtgccgatggtcagaatactggcaatttccttacggatcgaccttccaccaaggttcattctgcccctggaggcggatcttctctggactacctatttggtggacctggaggtagtaaatgagattgtgccttaataacatctaataacatctttgataagggagagtattgtttgttgatttggggg

SEQ ID NO: 211953 - DNA, 359 bp, Gossypium hirsutum
acgccagaatcctgaaaagcaagtggtcgctttcctttaaaaaaacatgtttggcagcaatcccgatcttccgtacccctttcctaggggtgtctctcgttttcatgcttctttatgtctggagtagagagtttccaaatgctcaaatcaacatatacggccttgtaactcttaagtcattctatctaccttgggcaatgcttgctttggatgttatttttggctcaaaactcatcccggatctgctcgggatcattgccggacatctatattacttcctgactgtgttgcatcctcttgcaaccggaaaggtctttcttaaagacgcctatgtgggttaacaaaactgttgcaagata

SEQ ID NO: 211954 - DNA, 400 bp, Gossypium hirsutum; identical to SEQ ID NO: 195811

SEQ ID NO: 211955 - DNA, 351 bp, Gossypium hirsutum
gccacacagacggacactgtcattgtttctggctcgcgagcgctcctgcggcgctttcaaaccctcacatatgtatttatgatctgctctgatctgacaaaaaaatgttcgggagagcaccaaacaaaagcgataatactaaatactatgagatattgggagtgcccaaaaccgattaccaagatgatttgaagaaggcttacagaaaagctgcgattaagaatcatccatatataaggcggagatcctgaaaagtgtaaagagtaggctctaagcttatgaggtgctgacagacccacagaagcgtgagatatatgagcagtatagtgaggacgcccttgacacatgaat

SEQ ID NO: 211956 - DNA, 294 bp, Gossypium hirsutum
gcgatccccgagattctgatgatgcaaggtatagcttggatggtcgggactttgatggaagccgcattgttgttgagtttgcaaggggggtgccacgaggttctcaggaatatctaggaagaggcccccctcctggatctggtcgctgctttaattgtggtgttgatggccattgggccagagattgtacagctgaggactggaagaacaaatgttatcgttgtggagaaagaggtcacatagaacgaaactgcaggaacagtccccgaaaactgagttctcgttcacctatta

SEQ ID NO: 211957 - DNA, 291 bp, Gossypium hirsutum
ggactgtattttacatgtgattgaaacaacttaattgataaagaaatggtagccaagtgcggaacgctcttgcattacagcacatctcaagtaaatacaacttgtaatatttaactttcatttctttttgtaattgttatcttgattttgttccacagacaaataaagatagacctctgaattttgttttgattgatggtacatggagcaattctgcagcaatgttcaagcgtgtaaaggagcaagcaaagttggcctggggagaggaagacatcccttgcatatctcttg

SEQ ID NO: 211958 - DNA, 286 bp, Gossypium hirsutum
cgagatagtgaggttttgttcttacaatttggcatcaagttaaacaatgtcatggacacacagattgcttattctcttttagaggaacatgaaggacagacgtgattgcctgttgacaacatatcatttgtcggactccttgctgatccacgctattgcggaatatcttaccaggagaaggaagaagttcgtctcctccttaggcaggatccctagttttggaaatacagaccattatctgagctcatggtccgtgcagctgcagatgatgtacgctttcttctat

SEQ ID NO: 211959 - DNA, 200 bp, Gossypium hirsutum
  unsure (1)..(200): unsure at all n locations
gcttatggaggtttgaatgaanttgatggacatagatgaaattcgagaggagtctggttgccctttttgttaatagtatttctacatcgttaacttgtgttgccacattgctgatgagcatccagcggaggctaaaaatgaagatcgcacactctatgcaatgaggatgggcgttgatatggttgtgcatataaccctac

SEQ ID NO: 211960 - DNA, 293 bp, Gossypium hirsutum
aggaaaaatcgtatcttcagcaatgggaaatccgaaggggtgcttcgacatgacgattggcggccaaccggctggccggatcgtaatggagctcttcgccgattgcactccacgcacggcggagaacttccgtgccctttgcaccggggagaaaggtgtcggacgcagcgggaaaccactccactacaaatgctcaaccttccaccgcgtgatccctaacttcatgtgccagggaggcgatttcaccgccggatatggcaccggaggtgaatcgatatactgagccaagttcg

SEQ ID NO: 211961 - DNA, 288 bp, Gossypium hirsutum
agttgctgctatggttgtccttgtgcccaaggttggagaactaatcgggggaagccaaagggaagaacgttatgaggtcattcgggaaagaattttggaggtggggttgcctcttgagccatatgagtggtatcttgacctgcggcgatacggaactgttaaacattgtggattcgggctaggctttgaacgaatgattctctttgccactggcatcgagaacattagagatgttattcccttcccaagatatccgggaagagctgatctctgattggatttttctaa

SEQ ID NO: 211962 - DNA, 271 bp, Gossypium hirsutum
cactaattttctttttcttctcagaaatcttaggatcatcactatggcctcaaatcccaaagtcttctttgacatgacgatcggtggtcagcccgctggtcggattgtgatggaccttttcgcagattgcactcctcgcactgcggagaacttccgtgccctctgtactggcgagaaaggcgtcggccacaacggtaagcccctccactacaaaagctcttctttccatcgtgtgatccctaactttatgtgccaaggaggtgacttcacc

SEQ ID NO: 211963 - DNA, 290 bp, Gossypium hirsutum
cgaggatctgttgtgggattcaaattggatagcctggttaaattatctgatacgcgtgcaagaaacaacaaaatgactttaatgcattatctatgcaagcttctatcggagaaaatgccagagttgctggattttgataaagatcttgttcatttaaaagctgcttctaagattcaattgaaaaatctagctgaagaaatgcaagctgtgagtaagggccttgaaaaggttgagcaagaactctccgcttcaaataatgatggtgatatctctttgggctttcagaagct

SEQ ID NO: 211964 - DNA, 289 bp, Gossypium hirsutum
cccacgcgtcctgtttgcgcaacaaggcactgtgagggagtatgttcaggagtttagcgagcttatgctccaaatctcagatatgggggagaaagaggcatttttttcctttatggacggattaaaaccgtgggcgaagcaagagttgcagcgccgaggagttcaagagctcaccaaggctatgtcagtagcagaatcacttgctgaatttggtgggaggaaagacaattccaattcttctaaacccagattaaagggtaatagtgggggagataaagaaaggcccact

SEQ ID NO: 211965 - DNA, 287 bp, Gossypium hirsutum
gatagaggatgccctagaaattggccttacctgcatccgagcgaagctgatggttgctctggatatggctaataaaaatacgaaatgcttgggggaggacaataagcaacttactttcatagagaatcaacagcaagtgacttatgaaaatgtgagagagcatatggatcaccacggataccatcaagctgatcgagctgacttcaactcgcagatgcctttcgcattccgagtgcagccaatgcagccatacttacaagagaggatgtgatgaacattgtgagggt

SEQ ID NO: 211966 - DNA, 285 bp, Gossypium hirsutum
cccacgcgtccggttgaactgtagcaatatttcaggccggaatttttgaacagattggacgagatgattgttttcaggcaactcaccaagttagaagtgaaggaaattgccgatataatgctcaaagaagtgtttgacaggcttaaaagcaaagaaattgagctccaagtgaccgaaaggtttagagaaagggtggtggaagaagggtacaacccaagttacggagcaaggcctttaagaagagccataatgagacttctggaagacagcatggctgagaagatg

SEQ ID NO: 211967 - DNA, 280 bp, Gossypium hirsutum
gttatacgttatacttgcaatattctaacaggcaagaaattgttaacaacaaaacgactgcagatgttgccgggaatgtactgttggttacaatcgatagtcaagatgcacggcttgtttccatagatgtatagcacttgggttgtgtagtttttgtcacgctcttttggagaaaagcttatgagttttgacatgagtgtgaatggatcagcaagatcatgtcaagggaataatctccaatggcagcttagtgcatcgtgagaaagagaacatgtatttt

SEQ ID NO: 211968 - DNA, 283 bp, Gossypium hirsutum
cccacgcgtccgattaagagcttataagaaagctgcaattagagaatcatccagataaaggtggagaccccgagaagtttaaggaactggctcatgcttatgaagttcttagtgacccagagaagagagacatatatgatcaatatggtgaagatgctcttaaagagggaatgggaggaggcggttcttctcacaacccatttgacatatttgagtcattttttggtgggggagcctttggtggcggtggtagctcgagaggaagaaggcagaagcgaggtga

SEQ ID NO: 211969 - DNA, 281 bp, Gossypium hirsutum
atcatggtttccctttactcccttcaaatcctcgtctcagcaatttttgtttaaagcctagtaaaatggcgtccacatttagcggtgatgaaactgctcctttcttcggcttcctcggagccgctgctgccctcgttttctcctgtatgggtgctgcgtacgggacggcgaagagcggtgtcggggtggcgtcgatgggagtgatgaggccggagttggtgatgaaatcgatcgtgcccgttgttatggccggagttttaggtatttatgggttgattatt

SEQ ID NO: 211970 - DNA, 279 bp, Gossypium hirsutum
gccacgtcaccgttttcatcttcacagccatctcagtcgtctgacgggcggcgtatgcggctaggacaagggtactgtcatggagagggagaggggcaaaggttcaggggcacggatgggcaacatgcagggcggttgattgatttcatgccgtttaaaaaatgggtgccttggatgattccaggcttaggtttgggtaatattttccttttcatgataacaatgtacattaataattgtcccaataactcgaagaaatgtgtgggaagcttcctgggc

SEQ ID NO: 211971 - DNA, 289 bp, Gossypium hirsutum
ctctctttcctatattttcacccgtcttttaatccagcgctcacaaaattatgggtttgaaggaggaattcgaggagcatgccgagaaagttaagaccctcccggccgccccttcgaacgatgacatgctcattctctatggactgtacaagcaagccactgttggaccagtgaataccggccgtcctggaatgttcaacatgagggaaaggtacaagtgggatgcatggaaggctgttgaagggaaatcaaaggaggaagcaatgggggattatatcaccaaagtaaa

SEQ ID NO: 211972 - DNA, 295 bp, Gossypium hirsutum
ggggcgacccacgcgttcggttaaacgtacagtttctcttgataatatctatctataaagtcggttaagacgaccgagcaataaaaataagccaagtggaagtgaagcttagctgtatatacaccgtacgtcgtcgtcgtcgttccggatcgatctcggccggctagctagcaaaacgtgtacgtagtagtatgtaatgcatggagtgtggagctactatctagctggccgttcattcgattataattcttcgctctgctgtggtagcagatgtacctaatcgatcttgtacgac

SEQ ID NO: 211973 - DNA, 300 bp, Gossypium hirsutum
  unsure (1)..(300): unsure at all n locations
agccaatcccggtgtcttttatccaagtttatgagggtagaggaggagctcgaacccagggacaatatatttgttgggtaaaattcgagctctcntggcattccaccagcacccnagaggcgttccccaaattacagtttgcttcgacattgatgctaatggcatcttgaatgtctctgccgaggacaagactactggccagaagaacaagattaccataacaaatgataagggtcggttgtcgaaggaagaaatcgagaagatggttcaagaagccgagaagtacaagtccgaggatga

SEQ ID NO: 211974 - DNA, 286 bp, Gossypium hirsutum
atgccatcttttctgataacgtactggcaacatctgtggtcgtcaattctacagtgcttcatgcaaatgagcctgagaaacacgttttccatatagtgaccgataaactgaattttgctgcaatgagaatgtggtttatcttgaatgctcctgaaaaggctacagttcaagttgagaacattgatgattttaagtggttgaattcctcttactgttccgttctacgtcagctcgaatctgccagagttaaagaatattatttcaagaatcatccatcctctctctt

SEQ ID NO: 211975 - DNA, 281 bp, Gossypium hirsutum
cccacgcgtccggttaatgcaaccgagcttataatagcattatttgcactttacagaaacaaaatacatgttctcaagtactctctaatgggttccattctctcaaatctcctccttgttcttggcacttctctcctttgtggaggcctagccaacctcaaaagagagcaaagatatgataggaagcaagctgatgtgaactctgggctgttgttgttgggattgctttgccatatgttgccattgatgtttaaatatgcagtaaaacctgaaactggggt

SEQ ID NO: 211976 - DNA, 184 bp, Gossypium hirsutum
ggaaaaggtaacgttttacatgcgacttcaaagacacaagatgggtgttgacgacttcgaacttttgaccattatagggaggggtgcatttggggaggtaaggctttgtaaagaaaaagctactagcaatgtgtatgccatgaaaaaaagcatcacaatttaaataaataaattcgattttatc

SEQ ID NO: 211977 - DNA, 292 bp, Gossypium hirsutum
gaaagatcaaatcttccatctcccccctccccttgtgtttcgtggtgatcaacagtttagggtttttgttctctttctgaacaacaaaaatggtggggactactgagggagtggattcctctgcctccaacagcaagaagaatcgtatccaagtctccaatacccagaaaccccttttcttctacgttaacctcgccaagaggtatatgcagcaatacaatgaggtggaactctctgctcttggaatggctattgctactgttgttaccattgctgagatattgaagaacaa

SEQ ID NO: 211978 - DNA, 279 bp, Gossypium hirsutum
  unsure (1)..(279): unsure at all n locations
cnngacgctgggctttttcttcattcgctttgctgtagggccaacaggtactggctttgtgctgccactgagcagagcatcaagatctgggatctggaaagtaagagtattgaggaagacttgaaggttgatctcaaagctgaggctgagaaatctgatgtcaccgacaatgcaaacaagaagaaggtgatatactgcacaagcttgaactggagtgcagatggaagcaccctatttagtggttatacagatggtgtaatcagagtttggggaattggt

SEQ ID NO: 211979 - DNA, 290 bp, Gossypium hirsutum
caacaatcaatggagtgctaagcatcatgaaagcttgcgccaaagccaaaactgttagaaggttagtgttcacatcatcagctggaactattgatgttgcagaacaacaaaagccctgttatgatgaaacctgttggagcgaccttgaattcatccaggccaaaaaaatgactggttggatgtattttgtctccaagacaatggcagagcaagcagcctggaaattcgctaaagaaaataacattgattttgtcagcataataccacctttggtggtcggtccatttatt

SEQ ID NO: 211980 - DNA, 259 bp, Gossypium hirsutum
gataatgtcgaattttttttatcccatgatgatacagatgccagagatgctgttggccgatgtgtggatgtcactaaaggtgtcacatttatggaattaaattctgttcgagcgagcaataacaaagttacctgttgtcatttctcatccgatggaaagttgcttgctagtggtggccatgataaaaaggctgcattatggtatacagacactttgtagccaaagtctacacttgaagaacattcatgtttaattactg

SEQ ID NO: 211981 - DNA, 283 bp, Gossypium hirsutum
aaaaaattgatggatactaatatgtttcattttcattttcccagtgatctaaggtcattcaaggacatggcggatggtatggcaagggggccaacgagtccagcaggagggagtcatgagagtggagagcagtgcagttctcactcaactgtgagggaacaagaccgttaccttccaattgccaatataagcagaatcatgaagagagcattgcctactaatggcaaaattgctaaggatgctaaagaaactgttcaagaatgtgtttctgagttcatcagct

SEQ ID NO: 211982 - DNA, 275 bp, Gossypium hirsutum
  unsure (1)..(275): unsure at all n locations
nctgaacatggctgtttgctcgctaaagctcaagcgctgggaataagccatcggacactgttccatagtattatcagaagatgaaaataatgtgaaagcaatggtcatacgtggaaaggcccgagccgaactcgggcaaacggatgctgcacgggaagactttctaaaggctcgcaaatatgcacctgaagacaaagcgattgcaagggagttgcgtatgcttgcagaacaagacaaagctttataccagaagcaaaaagagatttataaaggaa

SEQ ID NO: 211983 - DNA, 278 bp, Gossypium hirsutum
tgggtgattaatgttatccctgaggatggaccaaacacagttaagttgatatatgacagaggcctcattggcactactcataactggtgtgaagccttttccacataccctcgaacgtatgatttactccatgcttggactgtcttttctgatattgagaagaagggctgcagtgctgaagatttgttactcgagatggatcgcattctccgtcccaagggtttcataatcattcgggacaaacaaccagttatagatttcgtaaggaagtatttatc

SEQ ID NO: 211984 - DNA, 281 bp, Gossypium hirsutum
cccacgcgtccggccacgcgtgcgcccacgcgttcgctttattttgtcgcctgtgacgagaagccgacgctaccatggcccacgtcagtttctaccgcaactatgggaagacctttaagaagccacgacgtccgtctgagaaggaacgatcggatgctgagttgaggcttgtaggagagtatgggctccgatgtcagagggagctgtggagggttcagtatgctttgagccgcatccgctatgctgctagggaccttctcactcttgatgagaagaaccct

SEQ ID NO: 211985 - DNA, 284 bp, Gossypium hirsutum
ggacaaggctgctgctcacttgaagggtggcgcgaagaaggttatcatttctgctcccagtaaggatgctcccatgtttgttgtgggtgtcaatgagaaggaatataagcctgaccttaacattgtctccaatgctagctgcaccaccaactgtcttgctccattggctaaggtgatcaacgataaatttggcattgttgagggtcttatgaccactgttcattctattactgctacacaaaagactgttgatggtccttccatgaaggactggagaggtggta

SEQ ID NO: 211986 - DNA, 286 bp, Gossypium hirsutum
cccacgcgtccgcgaccagttgaaatagttgctccattgcaagaaaaaccttctactgctcgagtttcggacatttacttttcaccaaaggaagggttcactttccaggacttgcttgaagccactgacaattttgatgagagctttgttgttggcaggggagcatgtggaactgtatataaagctgtcttacctagtggccatgtcattgctgttaagaagcttgcatccaacagggagggaaataacaatgtcgacaacagcttccgtgccgaaattctaacct

SEQ ID NO: 211987 - DNA, 276 bp, Gossypium hirsutum
cccacgctttcggtttttaccacgagagaatgtgcaattggccacagaatttgatattgtcaagtcggatcctgcgactgggattgcaataaatggtacctctgaacacgtccgcgcctcggtcgaggctagcctgaagcgccttgatgttgattacattgatctctactaccagcacagggtcgacactaaaacaccaatagaggatactatgggggaactgaagaagctggtagaagaggggaagattaagttcattggtttatctggagctag

SEQ ID NO: 211988 - DNA, 279 bp, Gossypium hirsutum
caaagattttattttctcaagggagattgttgtgtataatgttgatggccgagaaatcccaattgtccatcgtgtaattaaggtccatgaaaggcaagatactggagaagttgatgtcctcaccaaaggagacaacaattatggggatgacaggcttttatatgctcaaggtcagcaatggcttcatcggcaccatatcatgggcagagctgtgggggtcttgccttatgttggttgggtaaccataatcatgactgaaaaaccaattatcaagtatat

SEQ ID NO: 211989 - DNA, 286 bp, Gossypium hirsutum
ggaaactgcgggtggtgtcatgactgtcttgattccaagaaataccacattcccaaccaaaaaggaacaagttttctccacctactctgataaccaacctggagttttgattcaggtttatgagggtgagagaacaagaaccaaggacaacaatttgcttgggaagtttgagctttctggtattcctccagctcctcgtggtgttcctcaaatcaatgtctgctttgacattgatgccaatggtattttgaatgtctctgccgaggataagaccactggacagaag

SEQ ID NO: 211990 - DNA, 286 bp, Gossypium hirsutum
ggtgctcgtgctcttgatcttattgaacaagcagaggtagaagtggaacggctggatcagctaaaatcaagcataatgaaagaactggctttcaaaaggcaagtggagcttgaagagatatttgcccatgctcatatagacatagatccagaggctgctagggagaaaattatggctctgattgattccgggaatgttgagcctgctgagttactagctgacatggataatcagatagcaaaagctaaagaagaagcccttagcaggaaagaaatattggataggg

SEQ ID NO: 211991 - DNA, 285 bp, Gossypium hirsutum
tgggaaaccatggttgcggattgtgagcgtgtcgatgaatatggccttggccctagggaaagcctggctgaagctgttaatgcagtcatcaatcttctaggcatgcaaccttgtgagggcacagaggttgtccctaacaattcaagatcacacacttgtcttctatctggagtatacatcggcaatgtcaaggtgcttgtgcggctgcagtttggacttgacggtccaaaagatgtggcaatgaaactcgctgttagatcagaggatgaagctgttagtgatgcg

SEQ ID NO: 211992 - DNA, 282 bp, Gossypium hirsutum
cgtaaacctgggctttttcctgggatcaacactaaaattgcctctttcctagatcctgatggctggaaaactgttctggttgacaatgaggactttctgaaggaactcaagtaggcactaagaaagagtaatgctactatatgaataaatcagtatcttgttgtgtaagcgagcagatatgtctgttaaatatggtgtttgttatgcgacctgaaccgttttccgcttgtatctgctgtggattctagtatgttgcatagctatcagcaggttatgcttatt

SEQ ID NO: 211993 - DNA, 424 bp, Gossypium hirsutum
aaatgactgtattggtgaagaagttgagaaaatggtggctgcattaccagatggcggtgtattgctgcttgagaatgtgaggttctacaaggaggaagagaagaatgatcctgaattcgcaaagaagctagcttctctcgctgatctctatgttaatgatgcatttggcactgcgcacagagcccatgcttccacagagggagtggctaagtacttaaagccttctgttgctggttttcttatgcagaaggaactcgattatcttgttggagctgtggcaaatcccaagaagccatttgctgcaattgtcggtggttctaaggtatcaaccaagattggagtgattgaatcactcttggccaaggttgatattctcatactgggtggaggaatgatgtttaccttctacaaagcccaagatatg

SEQ ID NO: 211994 - DNA, 398 bp, Gossypium hirsutum
cccacgcgtccgcccgttgacatctatagatggcaagacctcatgctccaccgttgacggtggtttggtcatgaacaaccctaccgccgcggcggtcacgcatgttctccataacaagagagatttcccgtcggttaacggcgtggaggatctgctggttttgtctataggcaacggtccgtcgtgcggaaggtcaaaggtccataacaacggtgaatgttcaacttcttccgtcgtcgacattgcgcttgacagtgtctcggagacggtggaccagatgttggcgaactctttctgttggaaccgtacagactacgttagaattcaggtatgctgcatatacattacatattttcccttttcactcctatcgatgctctgtttggttccttagaaaa

SEQ ID NO: 211995 - DNA, 425 bp, Gossypium hirsutum
gtagcaccccagaaagcacactttgagggagctgagatggaattcggggctgagaacggctgcaagtgtggagacaactgcacctgcaacccttgcaattgtaaatgattagagaccaaagccaaagctccctggaagcagaggcgcctttgtctttaagaaataatatgttttgttgtttatgtgtttttagaataaagtagccatggcttgtcgtaagttttgcctgttgccgccacggttacttggtgcttgccaatagatagagtgaagtactaatatttacttgtttttctgtccagtgtgagcatctctgctatctcaagatatattgtgactattacataattaatgtaaggaagtgagtcagattcataatgaatgaaaagaagctcctatttcgttttgcaaaaaaaaaaaattta

SEQ ID NO: 211996 - DNA, 424 bp, Gossypium hirsutum
cccacgcgtccgcccacgcgtccggatatttggtctgtttggaggattttaatcttactgagtgcatctgttgcagttaggtgcagggaaaagagcgatggcggcagttcccggacagttgatttgggaggtagtgaagaagaacaattgctttttggtgaggcagtttggaagaggaactgctagccttcagttcagcaaagaacccaacaatctctacaacctccactcctacaaacactctgggttggcaaacaagaaaacagtcaccattcaaagtgggggcaaagaccagtctgtgctgctagcaaccaccaaagctaaaaagcaaaacaagccttcggcctttgcttacaagttccttatgaaaaaagagtttcccaagatggccaaggcggtcaaaaaccaggtgacagacaactac

SEQ ID NO: 211997 - DNA, 423 bp, Gossypium hirsutum
  unsure (1)..(423): unsure at all n locations
gcttctccctcgttcttttttgctacctttctgttgcttctctctacggttcacccaaagcccccaaagttgcaatttggacttagttgattgctgtggagcaactttcagacgtcaagcttaactctcggatccttcaggattcaattgtaaaacaagtaaatcaaaaccccaaggctggatgggaagctgcactgaatcctagattttctaattacaccattggtgagtttaagcaccttcttggagtaaaaccaacacctaagaaagaacttctgggcgttcctattttaagtcatgacaaatccttgaaattgccaacttcttttgatgctagaacagcttggccacaatgtacctcaattggaagaattctcgatcaggtaactcattttcatttctctcaattnttatatctgggtc

SEQ ID NO: 211998 - DNA, 303 bp, Gossypium hirsutum
cccacgcgtccggtcacgaaccagaaggtggtaaaggactcgcctcatgctgccaatgagacgaggcccaaccataatgcatctgtaaacaataacagtggagcacctgcttccaaggcacaggttgtaggttggcctcctattagatcgtttagaaagaactcattggccacctcttccaagaacactgatgaagtagatggaaaggcagggcctgatgctctttttgttaaggtcagcatggatggtgctccttatctcaggaaagtggacctgaaaaactactctaaatatcaggatcta

SEQ ID NO: 211999 - DNA, 384 bp, Gossypium hirsutum
atctaactcaaaaaaaccttggaaaaagcttcaggaggttccgaaaatggccccaaagagaggaggaaaggtagttgtgccggccaagaagaaacaagagaaggttgtaaatccactgtttgagaagcgtccaaagcaatttggtattggaggagctttacctccaaagaaggatctgcaccgttttgtgaagtggcctaaggttgttcacattcaaaggaaaaagaggatccttaagcagaggttgaaagtcccaccagcactgaaccagtttacaaagactcttgataaaaaccttgcaacaagtctgttcaagttgctcctcaagtataggccggaggacaaggcggccaagaaggaacgtcttctgaagaaagcccaagc

SEQ ID NO: 212000 - DNA, 372 bp, Gossypium hirsutum
  unsure (1)..(372): unsure at all n locations
gcaaatcctggaggaaggctgtcacagggccctattgttggcaagaggtagacattgaagagtggagcagtcgatgtcagccccaccatcttgatcggatgcttcgaatgctcatcacccgaagctccggatctctccgcaagttatgtgtttcgggcctccacaatgattccattttctccttcatcactgagaagtaagtgtatgataagattataggtgctttgatgttcttgtatgataagattccaaatgagacaattataatattacaagcaacatagtattatactttccctcacctttaagtgatcattgttcaatggacatttttcagtgatacagnatttctttttgtgtttcttgcttttt

SEQ ID NO: 212001 - DNA, 367 bp, Gossypium hirsutum
gcggaagcacccacaacagggaccgagaagcaaccacataagcttgaaagaaagtggaccttttggtttgatagccaatcaaaggctaaacaaggcgctgcttggggttcctctttacgcaaagtttacacttttgacactgtagaagaattttggtgtttgtatgatcaaatattcaagcctagtaagttgcctggaaatgctgatttccacttgtttaaggctggaattgagcccaaatgggaagatcctgagtgtgctaatggaggaaaatggtctgtcactagcaacagaaaggctaatcttgagaacatgtggcttgaaagtttgatggcattgatcggggagcaatttgatgaagcagatg

SEQ ID NO: 212002 - DNA, 331 bp, Gossypium hirsutum
actaaaacctgggcatatcaggctttatttttagtcaactatcgtacggagcatgggggggtttctttgaccagctcggtgcttaataaacaaattcacttctccagtgttgtcaagacaactgactctacttcttcttcaacgccaatgtttatgccaatggtcgaacccatgagatcatgtgtcaatctattatggaactttagtggaaacgatccgatattgtggattttactcaacatcttttgaggcggaccttcgccaaatgataaaggtttgtccataaatcatattgttgaaggaaccaatgtgtccttgattacgctttttt

SEQ ID NO: 212003 - DNA, 403 bp, Gossypium hirsutum
cacaacacagccaaagaaagaagaaaatggcgtcgaatgcggcggttccattctggcgtgcagccggcatgacttatataacctactcgaacatatgcgccaacctcgttaggaactgcttaaaggaaccttacaagactgaagcccttagtcgtgagaaagttcatttctccatctccaagtggacggatggaaagcctgaaaagcctactctccgctcagactcacctgaagaatgagatgcaagtttggtcatggaagcttcgaaactggaaggattttattttatttttagtaatttctgttatgtctgaaacataagaacagatttcaggctgagatgatgttgcacatcctaataataatgtactttgtgacttgactgccgttgacccttcacggg

SEQ ID NO: 212004 - DNA, 401 bp, Gossypium hirsutum
gagaaactgaaaaaggcgaagtttggattgagatatagacaagtttctcttggtgcagcaacaacacaagtccgacttgctgcatcacttggggcatcattggtttggctatccggtggattaagcttggtccagttgttaatccaagaaacattaccgtcttggtttctatcagcccataatccagatcaagatggtggggaacctggaggtctagttgccatgctgagcggctatgcacttgcatactttgtagtgctttgtggtaccttggtgtggggtgtggattcctcctcaccgacatcaaaacggcgaccaaaggtccttggggcgcatttggaatttcttgcgagcgcaatagatggcaaaatatcacttggatgtgagcatgccacttggca

SEQ ID NO: 212005 - DNA, 404 bp, Gossypium hirsutum
gaaaatatcacaaatcttcttctccttctcagaaatcttagtatcatcactatggcctcaaatcccaaggtcttctttgacatgacgatcggtggtcagcccgctggtcggattgtgatggagcttttcgcagattgcactcctcgcactgcggagaacttccgtgccctctgtactggcgagaaaggcgtcggccgcagcggtaagcccctccactacaaaagctcttctttccatcgtgtgatccctaactttatgtgccaaggaggtgacttcaccgccggaaacggtaccggaggtgaatccatctacggatcaaagttcgctgacgagaacttcatcaagaagcacactggtcccggtattctctcaatggctaacgctggacccggaactaacggatc

SEQ ID NO: 212006 - DNA, 366 bp, Gossypium hirsutum
  unsure (1)..(366): unsure at all n locations
cggacgcgtgggaattctcgcaaattggcggagggagtatactatggaagatatactgacccagctgaaaaaggagatggcagcctctcataatcgaaagctggtccaacctcctgagggtacctacttctagctctcgaattcgtatcgatattctggatctaatttcatttgtggttatgcaatatatagtttgtaatgcttgttgatcctttataagaacaaactgtggaattggtcaaaaaacttctcgattacttctccttggcttcatgttcttgttctcaaaccggatgctgtttttctaacagaattttatccatgtttcaaaacccanaananaaaaaaaaaaanaaaaaataaaaa

SEQ ID NO: 212007 - DNA, 368 bp, Gossypium hirsutum
gcacatcgtggcagtggagttcgcgagctctggtgctccatttggcgcttgcggagcctactttatcgcaaattgcacagcgccagaatccaagcaagtcgatgagaagtattgcgtggggaagcccagctgccaaatccgactagatagcatacctttcaggaaccaaaatgacgcatgtacccacctcaggaagactttggccggccaactcaaatgtgcctaaacaaatgcgtgcttcgacacagcttggattaagcttcacatttgattacttttaatagagctaagacggtgcatggaggagtgctcgttctatctaatttgtatttcttaaatattaaatgaatatgtgcgaattccagaat

SEQ ID NO: 212008 - DNA, 395 bp, Gossypium hirsutum
  unsure (1)..(395): unsure at all n locations
cccacgcgtncggtaagggttacaacatagttggtctctcccagggtaacttgataggacgggctgttgtcgagttttgtgatggtgcaccccaggtgaagaatttcatctctttaggagggcctcatgctggtactgcttctgttcctctttgtggttctggttttccgtgcctgattgcggacaagctaatcaagtcagagatatacagcgactatatccaagctcatctggctccaagtggttatctaaaattaccaaatgatatacctcattatttggaaaaatgtagatttcttccgaagcttaacaacgaactaccccatgaaaggaattccacttataaggagaggttcactcgcttgcaaaacttggtacttatcttggtaagctgg

SEQ ID NO: 212009 - DNA, 402 bp, Gossypium hirsutum
gaagccttaaacacacgagacgtcaacaccgttcaccaaatccttgctcccgacctagagtggtggttccacggtccacccactcaccagtttttgatgcgcttactcaccggcgcttcatccgacgatcctttccgtttcgaggtcgaccctgtctcagtcaccacctttggatccaccgtcatcgttgaaggctgtgataacagccgttcgatctcctgggttcacgcttggactgttcgtgatgggataatcacccaagtgagggagtatttcaacacttctctcaccgttactcgccttagagactctccaccgtcagcttgcagttcttcgacggcggagattgcgccagtgtattgcccttacgtttgggagagtagtctttccaacccggtgggg

SEQ ID NO: 212010 - DNA, 393 bp, Gossypium hirsutum
aagaggatcagcggctcgaactataattaaaccagaggagggtagcagattctgttggcgaatgttattgatgatgctgggacttatacctgacacgccttgaataatactgctactgttatggatgaagcatatgccttgaaaaggcagggcttgactgtatatggcaaaggagggtaatgttaggatcattgttacatacgttactgccatggcttcacatcttgagtgtatagctatgtcagtatgtacatggtgggaatctcatgaaagagataattaggattctgaccataatactgacagccttagtatatttgcagagctgtggttggggctctgttctcattcaagccttaaaaaaatttcccattttatctggttgatcaacac

SEQ ID NO: 212011 - DNA, 357 bp, Gossypium hirsutum
attcagatgatgatgaacttagagatactgaaactactgataacatggatccggctgatgcaaaacgtgcaaggagaatgcggtcaaatcgagaatcagctagacgctcaaggagaagaaagcaagcacatatgaatgaacttgaaacgcaggttggccaactaagagttgaacattctacattactcaagagtctcactgacacgaatcacaagtatgatgaagctgctgtggacaatcgaattctgaaggctgatattgaaacattaagagcaaaggtaaaaatggctgaagaaacagttaagcgggtgacggggattaactttaactctggtcttctatctaagcacaatgtag

SEQ ID NO: 212012 - DNA, 435 bp, Gossypium hirsutum
actgtgtcttctttcaacaacaaacaacatatataaccatattatatacatacatacacaaggtctttccttctaaggaagccatgactggcaaagaaatcctccacaagatgaaggagaaagttcaagaaaaagtaggcttaaacccttctaataatgctgaatctggaaaagggaagagtaagatgtcgaagaatataacacatggttatcatttagtgaaggggaaagcgaatcatccaatggaagactacgttttcgcggagtttaagcaagtcaatggcagtgagctcggtttatttgccatattcgatggccatttgagccatgttattcccgattatttgaaggcgaacttgtttaacaatatcttgaatgagcccgacttttggacggaaccagagaatgcgattaggaaagcgtatcgtttaacgg

SEQ ID NO: 212013 - DNA, 348 bp, Gossypium hirsutum
cccacgcgtccgtctgcatcagctggacagactggtccatatgctgctggcggtagaaagttgtatgttggtaacctacatttcaacattacagaagatcaactgcgtcaggtttttgaaccttttggttctgtggagctcgttcagttgcctcttgatgaaactggtcattctaaaggttttggttttgtccagtttgcccgtctggaagatgcaaagaatgcattgaatttgaacggacagctggagattgggggtcgagtaatcaaggtatcgactgttactgatcaaggtgtatcgcaagattttggaacaaatgcttctgctgctgatcttgatgatgatgat

SEQ ID NO: 212014 - DNA, 426 bp, Gossypium hirsutum
cccacgcgtccgcacttctgttttccttgttctcttctacattcagcgaaggggtgctctgagatcacataccaaaatggtgaaggccgttgccgtccttggcagcaatgaaggtgttagcggaactgttttcttctcccaagaaggagatggtccaactaccgtgactgggaacctttctggtcttaagccgggactccatggcttccatgttcatgcccttggggacacaactaacgggtgcatgtcaactggaccccattttaatcctgctggcaaagagcatggtgcttcagaagatgagaaccgccatgccggtgatctagggaatgtcactgttggtgatgatggctgtgcaagctttttcatcaccgacatacagatttctttcacaggcccaaacttcattatcggaagagctgtatt

SEQ ID NO: 212015 - DNA, 385 bp, Gossypium hirsutum
ctccgtatcaatggctttgccaaaccagcaaactgtagattatccgagcttcaagctcgttatcgtcggcgatggaggaactggaaaaactaccttcgtgaagaggcatctaactggagagtttgaaaagaaatacgagccaaccattggtgtggaggttcatcccttggacttcttcactaactgtggcaaaatccgtttctactgctgggatactgctggacaggagaagttcggtggtctcagagatggttactacatccatgggcaatgcgccgtaattatgtttgatgtaactgcccggttgacatacaagaatgttccaacatggcatcgggatctttgcagagtgtgtgagaatattcctattgttctatgtggaaac

SEQ ID NO: 212016 - DNA, 430 bp, Gossypium hirsutum
cccacgcgtccgagaagagatctcttttctaacacaaggagaagatccatacgatgatggtgttgtccgtaagttgttccactcgaatttgaaattgcttctagttacagagggcccggatggttgccgttattatactcaggaattcagtgggaaagtgaagggcttgaaagtagaagccgtagacaccactggtgccggggatgcttttgttgctggaacattatcgcaactagcttctgatctttccttgattcaggacgaagaccaattgagaaatgctctcaagttttctaacgtttgcggtgcattgaccgtgacagaaagaggtgcaattcccgctttgccgactagagaagctgttgttaatgctctcgtcaaaaccgtggcctaagttttcttccccaaacaccgtgattagccaactttt

SEQ ID NO: 212017 - DNA, 402 bp, Gossypium hirsutum
  unsure (1)..(402): unsure at all n locations
tgacatctcctcctccaaggcttgctgattttggttattcaaatgaaatgtttgaaaaagacatggaaacttggcgccagcgggtagagaattattggaatctcttgagtccaaagattgaggccaacactttgagaaatttgatggacatgaaagcgaacatgggatcttttgcggcttctctaaaagagaggaatgtttgggtgatgaatgtcatccctgaggatggaccaaacacacttaagttgatatatgacagaggcctcattggcactactcataactggtgtgaagccttttccacataccctcgaacctatgatttactccatgcttggactgtcttttctgatattgagaagaagggctgcagtgctgaagatttgntactcgagatggatc

SEQ ID NO: 212018 - DNA, 420 bp, Gossypium hirsutum
ttttcttcttcttcttcgattatttttcgccggaactctcttaaaaagcaatgggaaacaatccctcgcagcttcttccgtcagagttgatagataggtgcatagggtccaaaatatgggtgataatgaaaggggacaaggagctcgtgggtactcttagaggcttcgatgtttacgtcaacatggtcctcgaagatgtcactgaatatgagatcaccactgaaggaagacggatcacaaagcttgatcaaattttgcttaatggaaacaacatcgccattttggtcccaggaggctcacctgatcccgaatgaaagtgttagctcctccatgtttcttttaatgttattaattcctggccatattctcagttttagtgagaaatctggcgcagaacttaaatagttaacttggatcact

SEQ ID NO: 212019 - DNA, 415 bp, Gossypium hirsutum
caagcaccgccacattccgtcttggcaatcccctttcctcttcctcttcctcatccgtttactcctccaagaaattgcctgtcaatttcagaaaatttgcgcttcagacgtcgcctgtgaaaagcttttctgtttcttgtactctaactagaaaaccagtcccagctgctccggtttccatggattcggacccgaacggatggcaacgacccgactcgtttggtcggtttggcaaatttggcggcaaatacgttcccgagaccctaatgtctgccctctctgagctggatgcggcttttcattccctctccaaagatgaaaaattccaggaagaattagctgggattttgaaagactatgttggtagggaaagtccactttattttgcagagcggctgtctgaacattacaagcg

SEQ ID NO: 212020 - DNA, 419 bp, Gossypium hirsutum
tccggtttttggtgccgtagcttgtctctcatgtcctattagggtcctgtttgcatccaaccagttgtgtccaagagctaggctttgatacttaaaataagaaccactatgggtatttctagttatagtttctttctgtttttatttgttgccataatcccaaccctagaagctcatatcgctgagtatgacgagtactggacggcacgagaattggaagccattgagaacctggacaaggcctatcactccaaccctgaggaggtggtccggcattacaatgaccacttctctaggaccatgctcgagttttatatcaccaaaagggtgttggcagaatcaaaaaagggtccctgggaggttaccaaccacgttgacagttgctggcgatgtgaacctgactgggaaaagaataagaa

SEQ ID NO: 212021 - DNA, 409 bp, Gossypium hirsutum
attcaatcaaacccctgcctccatggtactttaacagcttagtgtttacaattgtcagggactaaaaaataatatttctatttgcagctgaagaatttggtgttaagggattggtacctgcttatcttgatccaaaaacacagctacaagatctccttactggtgttagttttgcctctggtgctgcaggatatgatcctctcactgcaaaaaccgcgaatgtaataccgatgtcgggtcagttagagctgttcaaggaatgtataaagaagataaaaggaggagtgggtgaagagagagctgcaactataatttcagaagctatatatataagttcaacgcccgctatgctaatcagttcttgcaagacttatatggattaggagcaagaagaatagggttgttgggg

SEQ ID NO: 212022 - DNA, 360 bp, Gossypium hirsutum
agccaattaggaccttgtggaacttgtgaatttctgaacctttttaaaatgattttagagaaatcggtgtgataattggcattggcatcaatggtgtgttctgtttttagctcttttaaaaaagacaaaaaggataccgaaaaacttaacgaaaccaaccaaaaaaactttcacaccaaagtctgaatggccttgcacaagcgatgccagaagtactatgaagctggtgctcgctttgctaaatggcgtgctgtccttaagatcagtgctaatgagccgaccccgcttgcaatgcaagaaaattccaaccggctagctatgtatgctgtcatctgtcaggaatgccgccttgttccaatc

SEQ ID NO: 212023 - DNA, 400 bp, Gossypium hirsutum
cccacgcgtccgatcttgaagttttttattttagctaaaattttattagctttttatataatttttacaatttcttttttgtataaagtttggtcttctaaaaatctttcctgtctcaaactcaacaggtagtcaataagcactaaaactgatttttcacagttttcttcttctatttcagcattttcaacagctacgtacaatggttttcaacagagcgttggggacttgaaagaagctgatttgaaaggaaagaaagtgtttgttagagtcgatctgaacgttccattggatgataacttcaacataactgatgacacaaggatccgtgctgctgttcccaccaccaaatgatcaatcctgttgcatcaatccttggaattctacaagaaaacatttt

SEQ ID NO: 212024 - DNA, 270 bp, Gossypium hirsutum
cccacgcgtgcgataaagagggctatagtgagctacaaggtggtacacagtctctctgtgaggcccatcgttggaaccctagctagaatcgccaccgccttaggagtctccgaactaatcctagacggccgccgcgacttcaacgccttctgcagctaccggttcaccttccatcattgatatcgccacttccattctctcaccgacgctcgactattacttagagagattgattgtgatatttgcggagttgacatcacagacgacgct

SEQ ID NO: 212025 - DNA, 427 bp, Gossypium hirsutum
ccaggagctcttcagtacctcagtggtgttattctcttcgaggaaaccctttatcaaaaaaccgcttcgggcaagcccttcgttgatgttttgaaggaaggtggtgtcctccctggcatcaaggtcgacaagggtaccgttgagcttaacggaaccaaccgcgagactttcacccagggtctggatggccttgcacagcgatgccagaagtactatgaagctggtgctcgctttgctaaatggcgtgctgtccttaagatcagtgctaatgagccaaccgagcttgcaatccaagaaaatgccaacgggctagctatgtatgctgccatctgccagcaatgtggccttgttccaatcgtcgaacctgaaattcttgttgacggatcacatgacattcaaaagtgtgctgcagtgacagagcgtgttc

SEQ ID NO: 212026 - DNA, 329 bp, Gossypium hirsutum
aaagacaacacgttcgatggtgcgtactctatagaggcgacgtgccacgcgccgaaactggaagaagtgtacgcggaggtgttccgggtgctgaaaccgggatctctatacgtgtcttacgagtgggtgacgactgacaggtacagaggtgataaccctgaacacgtggaggttattcaaggtatcgaaagaggcgatgctttgcccggtctcaggaactacaaggacatatcggaggttgcaaaaaaggtttgcttcgaggttgttaaagagaaggatctagtcaagccaccggccataccctgggggaccaggcttaagaaggggag

SEQ ID NO: 212027 - DNA, 435 bp, Gossypium hirsutum
gttctcttcctatctggcatggtggccatgatcatgatgagaacattgtacaaagatatcgcaaactataatcagttggaaactcaagacgaggcacaagaagaaacgggatggaaacttgttcacggggatgtctttaggcccccaatcaattatggtttactctgtgtttatgttggcacaggtgtccagattttcgcaatgtcgcttgtgacgatgatatttgcgttgctgggctttttgtctccttccaatcgtggagggcttatgacagctatggttcttttgtgggttttcatgggaatatttgccggttactcttcatcacgtctatataagatgttcaagggcacagagtggaagagaattactttgaaaactgcatttatgtttccgggtatcttattcgccaatctttttgtactgaatgcacta

SEQ ID NO: 212028 - DNA, 323 bp, Gossypium hirsutum
atttttattttatttcccaatttaagccatatgacggaaacgccgttctcgaagcgccctgaggacgtcgttttaaatatattttcgaagctcgaagaggatctcgctagctgggcaagtcttgcttgtgtctgcaccagattctcttctctgattcgtaatacctgcttgaagcttaaatgttccaaaaccatacccgccgttttcgccgacctttttttctcttcctccgccccacccggcggatgggcttctctttataagctgtctgtcttgctgtcaagcctccttcacgccggtgtccttcttgacaactctgattt

SEQ ID NO: 212029 - DNA, 408 bp, Gossypium hirsutum
gtcgtggacaagattaaaagaatcgtgtagctacacctttataaaagccgtcaaatcatgtaagagtcgtttctcttagctaccatcaaatatcaattctaaaaaaaaaaaaaatccaaaaaaagattgttttactgaagaagaaaaaaaatgcccgacgaggagactgcaaccccaacggcatcggcaccggcaactccgggaacgccaggtggaccgctgttcaattccatgagggtggattcactgtcatatgatcggaagtcaatgcctcgatgcaaatgctttccggtgactgccccaacgtggggtcaacctcacacatgcttcaccgacttccctgcacctgacgtatcccttacccgaaagctgggggcagaatttgtgggaaccttcatcctaattttt

SEQ ID NO: 212030 - DNA, 430 bp, Gossypium hirsutum
atttattctccatccggatgctagttacaaaattcttattgataatgttgagaaacgaactggtagcttgtacactgattgggatcttctcccaccgaagagaatcaaggatcccagtgcaaagaagcctgaagattgggatgacaaggaattcatccctgatcctgaagacaagaagccagagggttatgatgacattccaaaagaaattcctgatcctgatgctaagaagccagaagattgggatgatgaagaagatggtgaatggaccccctcaacaattcccaacccagagtacaatggcccatggaagcctaagaaaatcaagaaccccaactacaagggcaagtggaaggctccaaaaattgacaacccagatttcaaggatgatcctgatctttatgttttcccaacttggagcatgttggta

SEQ ID NO: 212031 - DNA, 406 bp, Gossypium hirsutum
  unsure (1)..(406): unsure at all n locations
cccacgcgtccggttttgtatttcatactcatttagcccctttcattagcatcgaaatcactccagttttctttatcactgaaaaatgtcttgctgtggtggaaactgtggctgcggttctggctgcaagtgtggcagtggctgtggaggatgcaagatgtacccagacctgaacgttgccgagatgaccacaactgagactctggttcttggtgtagcaccccagaaagcacactttgagggagctgagatggaattcggngctgagaacggctgcaagtgtggagacaactgcacctgcaacccttgcaattgtaaatgattagagaccaaagccaaagctccctggaagcagagacgcctttgtctttaaaaaataatatgttttgttggttatgtgttttta

SEQ ID NO: 212032 - DNA, 429 bp, Gossypium hirsutum
cccacgcgtccgggctataaaaacggcaacctaaatacgagaagtgtacaaaagttgtacagaaatgagattggaaacaacggtggaagtgtcagcggtgacgggaatagcggtgggttcagaattaggatcccaaccggagttagtatagctcagccagggccaagattttatggaaaaatagatcacaagtacggtgcaaacccaaatcctaaccccaatattaacgcgaattctcaccccagtaagggtaattttggtgggtcgggttccggatcggcttatgggactaggattttaagagggtttgaggatctgcccgagaaaacggcagcatcagggaagagggaaagggaaagagatgctgttacagagatggtgtcagctataaaagtgttaagagatgggttcgtaaggatggagcagatg

SEQ ID NO: 212033 - DNA, 384 bp, Gossypium hirsutum
gaaagaagggggaaaaatgccggcagtttacggatccagattgacgactttcgaggattcagaaaaagagagcgaatacggttatgttcgtaaggtgtctggaccagtcgtcgttgctgatggaatggctggtgctgccatgtatgaattagtccgtgttggacatgataatctaattggtgaaattattcggttggaaggagactctgctacaatccaagtttatgaagaaacagctggcctgatggttaatgatccagttctgcggacacacaagcccctgtctgttgagttgggaccaggaatattgggaaacatttttgatggcattcagaagcctttgaaaactattgccaaaagatcgggtgatgtgtatatccctag

SEQ ID NO: 212034 - DNA, 432 bp, Gossypium hirsutum
ctgtggaagacggtactacatttgcagcagatgctgttatcgttgctgttcctctaggtgtactaaaagccaagacaatcaagttcgaaccaaggcttcctgaatggaaggaagcagcaattgatgaacttggagtgggaattgagaataaaattatattgcactttgacaaggtgttttggcctaatgtggagtttttgggagttgttgctgacacatcttatcattgcagctactttctaaaccttcataaggcgacaggtcattctgtcctcgtttatatgcctgctgggcagctggccagagacattgagaaaatgtctgatgaagctgctgtggagtttgcttttatgcagctcaagaagatccttccagaggcatgggccccgattcagtatcttgtttctcgatggggcacagatgtgaacacac

SEQ ID NO: 212035 - DNA, 383 bp, Gossypium hirsutum
  unsure (1)..(383): unsure at all n locations
atttttaaaatatcaaatccttcgaaaaatcctccccatccaatcaccacccgaaaccatggccactccttccccacgcgaagaaaatgtctacatggccaaactcgccgagcaagccgagcgctacgaggagatggtcaagttcatggagaacgtcgtctccgccgtccccgctcccgacgaactctccgtcgaggaacgtaacctcctctctgtcgcctacaagaacgtcatcggcgcccgccgtgcttcctggaggatcgtctcctccatcgagcanaaagaggaaggccgtggcaacgccgaccacgtcgccgtcatccgtgactacagggccaagatcgaggccgagttgtccgagatttgcgctggaattttgaagc

SEQ ID NO: 212036 - DNA, 412 bp, Gossypium hirsutum
gcaccacctaaagagtagccgtttaaagttgccacaattagagcaggagcttcagcgggcacggcagcagggtatattcatatcaagctctggagatcaaagccattcgatgggcggaaacggtgccatggcatttgatgtagaatatgcacgatggttggaagagcaaaaccgacaaattaatgagctgagaacggcagtaaattctcatgcaagcgatgcagaacttcgtattattgttgatggtgtaatggctcactatgatgaaattttcaggttgaagagcaatgcagctaaggctgatgttttccatttgttgtcaggcatgtggaaaacacctgctgagaggtgtttcttatggcttggtggtttccgttcatctgagcttctaaagcttctttgtaatcaattg

SEQ ID NO: 212037 - DNA, 420 bp, Gossypium hirsutum
agatttcaccccttaggtttctctttcctcacagagacagagagagaatcagaggagcttaatcgagatttgatattcctcaccacagatggatcagatattgaacaaggtgggctcctattggctcggccagaaggccaacaaggagatcgattccgtcggcgacgacctcaactcattatccaccagtattgaagggggagccaaatggttggttaataaaatcaaaggaaaaatgcaaaagccgttgccagagctgttaagagagtataacctgccaataggaatcttccctcgtgatgccacaaattatgaattcaatgaagagactgggaagctcactgtttttattccagcaatatgtgaagtgggatacaaggactcatctgttctgcgcttcttcaccactgtgactgggta

SEQ ID NO: 212038 - DNA, 364 bp, Gossypium hirsutum
caacaacgtctcatattcgccggaaaacagctcgaagatggccgtaccttggctgactacaacatccagaaagaatcaacacttcatcttgttctgaggttgagaggtggaattattgagccttctttgatggctttggctcgcaaatacaaccaagacaagatgatttgccgcaagtgttatgctcgtctgcatccaagagccgtgaactgccgcaagaagaagtgtggtcacagcaatcagttgaggccgaaaaagaagatcaagtagacactgactagtgttatactgtctgctttaaaagaaattgaatgtcagactaagaaaatatttccatttgggtcttttgctattattctatttt

SEQ ID NO: 212039 - DNA, 390 bp, Gossypium hirsutum
caacaacgtctcatattctccggaaaacatctcgaacaaggccgtgccttggcgggcggaacatacagaaagaatcaacacttcatcttgttctgaagatgagaggacgaattattgaaccttctttgatggctttggctcgcaaatacaacctacacaagatgattagccgcaagagttatgctcatctgtattcaagaaccgtgaactgccgtaagaaaaattgagggcacagcaattaactgaagcccaaaaagaagatcaagtatacactgactagtgttatactttccgctttaaaagaaattgaatgtcagactaagaaaatatttccatttgactcttttgctattatactatatttgttaagatattcatatgcggttcccg

SEQ ID NO: 212040 - DNA, 363 bp, Gossypium hirsutum
tgcaaatgccgcaaggcaacaaagttatattgttttgtgcacaaggttccagtgggtggagaatgcatctgttttcctgagcatcaaatatgtgtgattcgtacttactcggaatgggtaatagatggagagtataactggcctcccaagtgttgcaaatgccaagctgtgcttgaggagggtgctggctctgaaactactcggttgggttgcttacatgttatacacacaaattgcttgatttctcatatcaaaggcttttctctgcacactgcacctgctggctatacatgtccttcatgttctacatctatatggccctccaaaaatgtaaaagaattaagcatttcgtcttcattcact

SEQ ID NO: 212041 - DNA, 368 bp, Gossypium hirsutum
gtttcggctttgaaaagaaaaaaaaaaaaaacctctgcaaaaatgaatttaacaatggacgaagcaaaattaaaggagctaaaggagttcattgatcagtgcaaagctaatccttccattctaagcgatccttcactctccttcttccgtgactatctccaaagtctcggagcaaatcttccatcttcagctagcggccatgaagccggagactccaaatcgaagagttatgtgatggaggagagtgacgaggaagtggcggacgatggagagaaagttaatttagaggaggaggaagaagagattattgaatctgatatcgatctcgaaagcgatgtcgttgaacctgataatgatcctcacagaag

SEQ ID NO: 212042 - DNA, 417 bp, Gossypium hirsutum
cccacgcgtccgcccacgcgtccgcggtattctctcaatggctaacgctggtcccggaactaacggatctcagttcttcatttgcacggctaagactgagtggctcgacggaaagcacgttgtgtttggacaagttgttgaaggcatggatgtggtgaaagccattgagaaagttgggtctagcagtggaagaacttccaagcccgttgttgttgctgactgcggacagctctcttagagaagaaaaagagaactatgtgttaagttgggatgttgtctaatgtctagaatatttaatgtctgtcatttagactcttttatggtgctgtttttatcgtcactgggtttggtggttttcaggaacttgccttatgtagtttttacgattaactaccattaataagatactctttttcg

SEQ ID NO: 212043 - DNA, 378 bp, Gossypium hirsutum
cccacgcgtccggttgaatctaaaggaggtcaagtgaaggttgaatctgctgcccctcccatgaggcaaagtctttctgatggttcacttgatacgatggcaagaaaacctgctgatcctgaagaagagcttcgatggatgtcccaagaagtgcgtggttatgttgaagctgttcttaacagccttgctgccaatgttcctaaggctgtcattctttgccaagtggaaaaagcaaaagaagacatgcttattcagttatatagctccgttagtgccataagcaatcccaggattgaagaattgctcatggaggaccaaaatgtaaagcgcaggagggagcgttaccagaaacagtcctctttttttttgaaacttaca

SEQ ID NO: 212044 - DNA, 388 bp, Gossypium hirsutum
gtcagagaacgttgcttatcgttttggtgtgacgaggcaggagcaggatcaggctgcagttgaatctcacaggaaagcagctgctgctacagcttctggtaaattcaaagatgaaatagtccctgtggccaccaagattgttgatccaaagactggtgatgagaaacctgtcacaatctctgttgatgatgggatccgagctaacacatcagtgtcagatctgggaaaattgaagcctgtattcaagaaaaatgggaccactactgctggaaattctagtcaagtgagtgatggtgctggagctgttctgcttatgaaaagaagtgttgcgatgtgcaaaggactaccaattcttggtgttttcaggacttttttgtgctgttggtgt

SEQ ID NO: 212045 - DNA, 364 bp, Gossypium hirsutum
agaagagagagtaaattgcaaagtaaatatgaataaggatttcatagctgaagaacttgacaatgacatgcaagaagaagaagaagaaggtgttgggggtgatcatggtttcccagatgatgaaaagaagaagaaaggttatggaaggagaggagccgctggtggcggtggtggggtgtcgccgcctgcttgtcaagtggaaaaatgtgggcttgatttatctgatgccaagcgataccacaggcgccataaggtgtgtgagattcatgccaaggcgccatttgtggttgttgctggtctcaagcaacgcttctgtcaacaatgcagcagattccatgagctaccgtagttcgatgaaacaaaa

SEQ ID NO: 212046 - DNA, 401 bp, Gossypium hirsutum
  unsure (1)..(401): unsure at all n locations
aaaaagggttgcccccttctaactctgaaaggcaatggcttcaatgcttagctcaggaaccgtccttaggccaaccccatttcttggccaaaacagaaatgctaaccctctcagagatgtctccgtgggcactgccaaatacacaatgggaaatgaactgtggtatggaccagacagagtgaagtacttgggacccttttcagctcagattccatcctacttgaacggcgagttccctggtgactacggatgggacactgccggtttgtcagctgaccctgaggcctttgctaggaacagggctcttgaggtaatccatggaagatgggcaattgctggagcactangctgcatcaccccagaagtccttgagaaatggcttagagttgacttcaaggaac

SEQ ID NO: 212047 - DNA, 428 bp, Gossypium hirsutum
cgaggccgatgacgagaaacgtgagcttatcttcaaagaagatggccaagaatacgcccaagtctcacgcatgttgggtaacggccgctgcgaagctatgtgcatcgacggcaccaagcgcctctgccacatccgggggaagatgcacaagaaggtctggatcgccgccggcgacatcatcctcgtcggccttagggattatcaagatgacaaggctgacgtcatcttgaaatacatgcccgatgaagctaggcttctcaaagcttatggtgagctacccgagaataccaggttgaatgaagggattgctggcggcattgatgaggaagatgatggtgcatgcgatgactacatcgagttcgaggatgaggacatcgataagattaaatttcttttctctttttttcatttttgaattattttaagaa

SEQ ID NO: 212048 - DNA, 362 bp, Gossypium hirsutum
cccacgcgtccgcccacgcgtccgcccacgcgtccggacaaactgaagcattcccatgttctattggttggttttaagtattttctactatggacattttgtgcttgatcctcgactattttgtgtatctctacctaaatcttactatttagaagaactagtcttggagagaactattagagtcttgatttatggagtttgggcttttactggtgattattcctttgacttgggtataaagaatgtgggttagtggaaagctatcattctgtaatatgcaatgcttttggttccatttgaaatgaatcatcgctcaaaattggtacaaaagcagaaacttttttttctcggttttccatatg

SEQ ID NO: 212049 - DNA, 208 bp, Gossypium hirsutum
gcgatgcgcagtcatgtgatgctttactgctgttggacataacatgaaggagcttgtgggataaggagacagacaggatctttgtcctaatgaatttcaggtgcattgacaccatcaaataagctgcttaaagggaatgtcttgcagttgtcacttgcgctgatatcctagaactgtctgctagagaaggcattgtttctgagggagg

SEQ ID NO: 212050 - DNA, 352 bp, Gossypium hirsutum
atcttcttcttcccaaaatctctcattatcgagtttaaccaaggaagggtcttaaaaactcctgcctttgaaatgctttctccacttgcgtcacagcgtcttatcgaggtccgtcaagctttccgtctatctgctcaggtgtatcgatccttctccactgccttgaactatcacattgatggcccagataacaatcccgaccttccatgggaattttcggaggcaaacaaagcaaaggtcaaggggatattgtctcattatccatctaactacaagcaatctgcagtaataccttctgtagatcttgcacatcaacagcatggagggttggtttctgtatcaaccatgaatg

SEQ ID NO: 212051 - DNA, 336 bp, Gossypium hirsutum
cccacgcgtccgggcactcaaaggcagccaatgtgcattttgatgggctttgctctattaagtccaaggtttatttatcaccgaaactttggtatttgagggtatcagtgattgaagcacaagatgttttgggtgaaaaagggtctactttattgaggtaccctgagctctcagctaaagtacaagtggggaatcaagtttcaaggaccagaatttcaggagttagtcctaacagaagcttatcaaatccattttggaatgaggatttcatgtttgtagttgcagagccatttgaggattacttgttggtgtctgttgaggatcgagttggccctg

SEQ ID NO: 212052 - DNA, 399 bp, Gossypium hirsutum
ggatgaagttgttagcgaaagcgtatcatccatgacagaataaatagagagaaaagcaagaagaagaacaaaagtgttaaagagagagtgtttgggggtattgcaaagataatatttttattggggaaaaaaagaatggggagaggtagggttgagttgaagagaattgagaacaagattaacaggcaagtaacttttgctaagagaaggaatgggcttttgaagaaagcctatgagctttccgttctttgtgatgcagaggttgctctcatcatcttctccaataggggaaaactgtacgagttttgcagtagttcaaggtatcaccaaaactatttcaccttttttcttttttgggaccctctttaaaaacccaaaaccaacaaggttttttttttt

SEQ ID NO: 212053 - DNA, 384 bp, Gossypium hirsutum
gttgctgttaaggatctcaagcgtgggtatgttgcatccaactccaaggatgatcctgctaaggaggctgcaaacttcacttctcaggtcatcatcatgaaccatcctggacaaattggaaacggatatgccccagtcctcgactgccacacctcacacattgctgttaagtttgctgaacttttgaccaagattgacaggcgatctggtaaggagcttgagaaggaacccaagttcttgaagaatggtgatgctggtatgattaagatgattcccaccaagcccatggttgtggagaccttttctgagtacccacccttgggccgttttgctgtgagggacatgcgtcagaccgtggcagttggtgttataaagaatgttgag

SEQ ID NO: 212054 - DNA, 325 bp, Gossypium hirsutum
atatccggcacatggatggttgccctattagctccaaagccgagcaacaaagggtaatccattgtttagaggcagctatcaaaagacgagcttccgagggcataagattagaactttgcagtgacgaccgagtcggccttctatcggatgtgactcgcatattcagagaaaatggtctttctgtcactcgagcggaggttaaaacaaggggttcccaagccgtaaacatattttacgtgactgatgcatctgggaatccagtaaaaagtgaaacaattgatgcagttcgaaaagaagatggtcttactatactccacgtgaagga

SEQ ID NO: 212055 - DNA, 409 bp, Gossypium hirsutum
  unsure (1)..(409): unsure at all n locations
cagtaaagtaggaatctacaatgttggcactggaaaaggtagatcggtaaaagagtttgtagaggcctgtaagaaagcaacaggggtagatataaaagttgattatcttccccgccgacctggtgattacgccgaagtatttagtgacccaactaagatcaggcgtgaactgaactggacagctcaacataccgatctcgaggagagtttaaagactgcatggagatggcaaaaggcgcaccgtgatggatatggagcctcttagatgagggagcttcatgatgttcacaacattttatagcanacgactagtgcagatctcagatggcgccgactttagcagtggtttttctgttctatccgttgcataaaagaagggaggaaaattttttgggataaaaatggattt

SEQ ID NO: 212056 - DNA, 304 bp, Gossypium hirsutum
cattgttaatggcagcactagcgggaatggtaaggaaccatctgttgctgctgctttggctgtgcaatgtggaaattttgggtcaaaaattgaatcatccatcgatccatcccatatgaccttcggtgggatgaaaacaaaagagggtcccaacaggtgtaatgcatgccacaagcgtgttggtttgacaggatttagctgcaggtgtggaaacatcttctgtgcagcgcataggtactctgacatacacaactgttctttcgattataggacagccgcccgcgatgctattgctaaagccaat

SEQ ID NO: 212057 - DNA, 282 bp, Gossypium hirsutum
cttttggctaatgaagccaccaaaaggtggactttaagcaatcaagtccttatggaaatagcctgcacaaggtctgccaaccaactgcttcacgcaaggcaggcttatcatgctcgttataagaagacgcttgaagaggacgttgctcatcacacgactggggacttccataagctcctcctacctctagtgagttcatacagatatgagggagaggaggtgaacatgactctggctaaaacagaggcgaagttgctttatgtgaaaatttttaacaaagct

SEQ ID NO: 212058 - DNA, 304 bp, Gossypium hirsutum
ctaatcactaaatatctcacatctacttctacttctcgcaaataataccatcatcaccgtggcctcacatggtaaggcgggctattacatgactctcggcaggcttatcatgctccttataagaagacacttgaagaggacattgctcatcacaccactggagacttccataagctcctcctacctctaatgagttcatacagatatgagggagaggaggtgaacatgactctggcaaaaacagaggcgaagttgcttcatgagaaaatttcaaacaaagcttacagtgattactatgtcataa

SEQ ID NO: 212059 - DNA, 390 bp, Gossypium hirsutum
agcatagccatgactactgaaatgataatggttgatgaagtcccttttcctccacaaatcacaactaccaagccactatctcttttgggtcatggaattaccgacattgagattcactttttgcaaatcaagttcacagcaattggggtttaccttgaacctgaagttgtagggcatttacaacaatggaagggtaagcctgggaacgtgctagctgaagatgataacttcttcgaggctcttattaatgctccagtggagaagtttctgagagttgtggtgattaaggagatcaaaggtttccaatatggagtgcaactagagagtgctgtgagggaccgattggcaactgacgacaaatacgaagaggaagaggaagaagccttggaa

SEQ ID NO: 212060 - DNA, 406 bp, Gossypium hirsutum
gcaaatcaatgagaccgaacctgggacagagattgcagctgaaacttcagctgcaatggctgcttcttctattgtctttagatatgtcgatcctccttatgcacgtagacttcttaacaaagccaaatcgcttttctactttggtaagaggaacaaaggaactttcgatggagaatgccccttctattgctctttttctggctataatgatgaattgttgtgggctgcatcatggttatacacagccacacatgatcagaagtttaggaagtttataacagaagaagcagtgagtgcagttgtggatgagtttaattgggatctcaaatatgctggaatccaagtcctcctttccgatattttccttcaaagcaatgatgaggctttgaaaatcttcaggaacatg

SEQ ID NO: 212061 - DNA, 347 bp, Gossypium hirsutum
tgatcggtgcggatggggcatttcacctaggggtgccggatatacctttggccaagacatatctgagcaatttaaccatacaaacagtttgaagctgattgctagggctcatcagctggtcatggaaggatacaattggggtcatgaacaaaaggtcgttactatatttagtgcgccaaattattgctatcgatgtggaaacatggcctccatcttggaagtagatgattgccagggtcatacattcattcagtttgagccggctccaaggagaggagagccagatgtgacccggaggacacccgactacttcctataaaaacaaactggcattgaatcaacgagtc

SEQ ID NO: 212062 - DNA, 386 bp, Gossypium hirsutum
cccacgcgtccgttttgatcttaaatttttctcttccattatcgtcaaagcaaaaattaatccagcttcatacatttccttggcaaaatcccactgctttgcttcgattatcaatggggacaatggcggtgccgccatggctagagtcattgctaagtacagcctttttcacagtttgcacaacacatggagatgcagctaggggtgaatgtaacatgtattgtttagactgtaaaggggatgcgttttgcttttattgccgctcttctaaacacaaagatcatcaagttattcagataaggagatcttcatatcatgatgtagtgagggtcacagagattcaaaaagtattggatataagtgggggtcaaacatatgtgataaac

SEQ ID NO: 212063 - DNA, 355 bp, Gossypium hirsutum
aggaccgcaaccctagccacccttccctgatttcattacttctgtactcacaggagatcacctctccaaaaccctagctctttcactcactgccgccaatttcaaccaattatttgcttataagcgtcgaaaacgatgtcggacgacgagcgagaggagaaggagttggatctcacctcccctgaagttgttactaaatacaagagtgctgctgagatcgttaacaaggctttgcagttagttgtaaaagaatgcaaaccaaaaactaagattgttgacatttgcgagaagggtgatgcatttatcagagagcaaacaggcaatatgtataagaatgctaagaggaagattgaga

SEQ ID NO: 212064 - DNA, 148 bp, Gossypium hirsutum
ccttctcatacggtcttgtcgtcctatctgtttacgacaatggctcagtctttagccctgaggtcctggatctcactgaggaagatctgattgagaaatttgctaccggtgtctccatggtcaccgcattgtctcttgccatctcata

SEQ ID NO: 212065 - DNA, 379 bp, Gossypium hirsutum
gcgggtcaccgcatatattctgtaacttatttatctttgaatttgtgcaggatcaggaagcattatctgcttttaaagatggccaggttattggcgttcattccaccagcgagctggaaattaagttaaatgctgctacaagaacatcacggctgatgatattgtacttcaccgcaacgtggtgtggtccctgccgcttcatttctcctctctatacgagtttagctgcaaaatatgcaaaagtagtgttcttaaaagtggatatagacaagggtagggatgtggcagcgcgatggaacattagcagtgttcctaccttcttcttataagaaatggaaaggaagttgataaggtagttggggctgataaactacacttg

SEQ ID NO: 212066 - DNA, 356 bp, Gossypium hirsutum
caagagaataactggtgggtaagcaaagttatcaggaaaaaacatgattcctctgtcacaagtgttgcttggcatcctaataatattctacttgctacaacatccacagatggaaaatgccgagtattttctacatttatcaaaggtgttgatacaagggaatcaaaaacaggctcttcttcagatccaaagtttggagagcaaatagttcagcttgatctgtcatcttcatgggcatttggggtgaagtggtcaccaagtggcaatactttggcttatgtaggtcataattctatgatttactttgttgatgatattggtccttcccctttggcccagaatgttgcattccgtaa

SEQ ID NO: 212067 - DNA, 344 bp, Gossypium hirsutum
cccacgcgtccgcgcttctcacggtagcttttcaaatattggcaaacagtttaccaacggctaaactgaccgtcgaatcggatgaaacggttaataatctgatttcgtgtactgtccaaaagatcaaagctgcccttcaatgcgaaagttgatgactcagtgagatgggtaattatagttattaatataggttgaggatgtggataaagagtgcgactcagtaagttgggacgagtgggggtattgagtcaagaacgaaccgcacgtggagaattattgtatggtgacgatcgaagggacaagggtggtggctcgggtatagactcaggtcgaccctttgagtt

SEQ ID NO: 212068 - DNA, 359 bp, Gossypium hirsutum
cccacgcgtccgaaagaaaagaaaaattacagtgaaaatggcaacccttaaagttccagctcatgtacctgccccttctgaggatgctgagcaacttcgtaaagcttttgaaggatggggtacaaatgagcaattgattatcgacattttggctcacaggaatgcagctcagcgcaatttgattcgtaaaacttatcgtgaagcttatggggaagatctccttaagtctttggatgaggaactttcaagtgactttgagcgagctgtggtgctgtttactttggaccctgcagaacgtgatgcatttctggctcatgaagctacaaagaggttcacaataagccattgggttctcatgg

SEQ ID NO: 212069 - DNA, 345 bp, Gossypium hirsutum
cccacgcgtccgatttgagcagcctgctaaagcagtatgggctgtcaaagggcaccaatgaagccatgtttatcatcgaagcatatcggaccctccgcgaccgtggtccgtacccggctgaccaggtccttaaggatcttgaaggcagctatggatttgtggtgtatgatagcaaagctggaagtgtatttgctgcactgggtgcagatgaaagggttaaactctattggggtgtagcagctgatggatcagtagttgtttcagataacttgaagcttataaaagaaagctgtgctaaatcatttgcaccatttccacctgggtgtatgttccacagtgagcaag

SEQ ID NO: 212070 - DNA, 279 bp, Gossypium hirsutum
aagatgactgatgaatgggcatgtggagtgactctataagttatgttgggttgggctaacacatttgaagaccaacaggatgcaaagaagcataagaaaactattaggagaatgatgtgagttcaatccaaaaaccgagactagggctatatatagcaagagtgctgacacctactgtctagcatatttgttgctagcctctgcacgaagatcatcatacatgatatgaggagccattcatggctactgaagaactagtgcagggtactgacataggca

SEQ ID NO: 212071 - DNA, 369 bp, Gossypium hirsutum
tcgcccacgcgttcgaaacgccctcactctttcacttcgtcttctccaatttcctccgaaagtaagatggctgtggatccctcagagcttcggtattatgaggatgatgacactccaacaatgaaaacaatcaagggtgcaactactggttttgttgctggaactatctggggaaccgttgttgctacatggtatgatgtgcctcgtgttgagagaagtgttgccatacctgggcttgtaagaacgctaaagatgatggaaaattatggaatgacatttgctgcaattgggggagtctatattggtgttgagcaactggtgagaattataggatgaagagagactttgtcaatggcgctgttggtggtt

SEQ ID NO: 212072 - DNA, 351 bp, Gossypium hirsutum
gtgattcttgattatcttgccagcaagacaatatgttctgatgatttggtggtagtctcgccagatgttggtggtgttgctagagcacgtgcttttgcaaaaaaattatctgatgcacctcttgctatcgttgataaaaggcgtcatgggcataatgttgcagaggtcatgaatttgataggtgatgtgaaaggaaaggttgcagttatggtggatgacatgattgacactgctggaacaatcgcaaaaggtgcagctcttttgcatcaagagggggctcgggaagtgtatgcgtgtagtacacatgcttgttttagtccttctgcataaaaagattgtcaagtggtcctt

SEQ ID NO: 212073 - DNA, 326 bp, Gossypium hirsutum
cccacgcgtccgaaacgccctcactctttcacttcgtcttctccaatttcctccgaaagtaagatggctgtggatccctcagagcttcggtattatgaggatgatgacactccaacaatgaaaacaatcaagggtgcaactactggttttgttgctggaactatctggggaaccgttgttgctacatggtatgatgtgcctcgtgttgagagaagtgttgccatacctgggcttgtaagaacgctaaagatgatggaaaattatggaatgacatttgctgcaattgggggagtctatattggtgttgagcaactggtgcagaatta

SEQ ID NO: 212074 - DNA, 314 bp, Gossypium hirsutum
cccacgcgtccgggcggccactttttttacggttctagctctgttatgggctggttacgatgtagcaaagggtctatttgggtcatccgatgatcatatccatcaacggtctacggctttcgaggagcagatggagccgctaccgccaccggttcagctcggcgagattaccgaggaggaacttaagcagtatgatgggtcggattcaaagaaatcactccttatggccatcaagggccagatctatgatgtttctcaaagcagaatgttttatggacctggtggaccttacgcgattgttgctggaaaagatg

SEQ ID NO: 212075 - DNA, 380 bp, Gossypium hirsutum
  unsure (1)..(380): unsure at all n locations
caagatttcaagaccgatttaaggttccaaagcagcgctgtcgccgctcttcaagaagctgccgaggcttatctcgtcggactgtttgaagatactaatctatgtgctattcatgctaagagggttaccatcatgcctaaagatatccagcttgccaggaggatcagaggcgagagagcttaggttagtttgttttagttgactaatgcctagaattagagatatatgcttgtgttcgtttggttgtattatctttctctgcaagtgttggatttaaatcgatcgaattttaatggatgctgtatagtttcatgatgttttcatgaaatttggttaatggaatggcaacagtttcttttnntaatagataattttccggg

SEQ ID NO: 212076 - DNA, 244 bp, Gossypium hirsutum
  unsure (1)..(244): unsure at all n locations
cccacgcgtccgcccacgcgtccgcgagtctatagccttggccgacaggcccgggtaatctttgaaatttcatcgtgatgggggattttatgatgtatgtttttgtgaggagattatatttatagtatataattccatttgcagtctaaaaaaaaaaaaaaaaaaaaaaaaaaaaaaaaaaaaaaaacaaaaaaaaaaaaaaaaaaataacaaaaaanaaaataatttttaataaatttcttat

SEQ ID NO: 212077 - DNA, 355 bp, Gossypium hirsutum
acttaatcaaaaaggaagttccttgcgagactgaccaactcactcatgtttatgcattcattctccgtccagatgctacctacagcatccttattgataatgttgagaaacaaactggtagcttatacactgattgggatctcctcccaccaaagaagatcaaggatcctgaggccaagaagcctgaagattgggatgacaaggaatacatccctgatcctgaagacaaatagccagagggttatgatgacattccaaaagagattcctgatcctgatgcttagaagcctgaagattgtgatgatgaagaagacggtgaatggacaccctcaacaattcccaaccccgagtacaa

SEQ ID NO: 212078 - DNA, 317 bp, Gossypium hirsutum
gatctaataagatcaagtcgatccaaacatgtttctcaccaggactgagtatgaccgtggagtgaacacatattctccggaagggagattgttccaggtggaatatgctattgaggcgatcaagctgggttcaactgcaattgggttgaagacaaaaaaaggtgtcgttctggctgttgagaagcgtattacttcaccacttttggaacctagcagcgttgagaagattatggaaattgatgagcatataggatgtgctatgagtgggttgattgctgatgcccgtacacttgttgaacatgcacgagttgagactt

SEQ ID NO: 212079 - DNA, 254 bp, Gossypium hirsutum
ggtttttcttcttcattttcccctttcctcgatcaaaatcctcagctctcttaccgccaaaggaggatcatcttttcaggttttacgatggcatcgaagcggatcttgaaggaattgaaggatttacagaaggatcctcctacatcttgcagcgctggtcctgttgctgaagacatgttccattggcaggcaacaatcatgggtccaccagacagtccttatgctgggggtgttttcctggtgaccatccattt

SEQ ID NO: 212080 - DNA, 329 bp, Gossypium hirsutum
gtgatggcgttagcttgttgaagatatggaacatgaataagtacaccggagttctaggtgtttacaactgccaaggtgcagcatggaacagcgcggccaggaagaatactttccaccaaaccaagacagactccttatcaggccacgtaaaaggccatgatgtccatctcatttcagaggcctcattggaccctgaatgggccggtgactctgcagtttactgtcaccagactggtgaacttatcacccttccatacaatgctgccatgccagtgtccctcaaggtccttgagcatgaaattttcacaatagcacctatcaagaatttg

SEQ ID NO: 212081 - DNA, 331 bp, Gossypium hirsutum
gtctccagccaccttcagggagaagcagtgcaagattggcgggagattgtgacatacttttcatacccattgaagagcagggactattcaaggtggcctgataagccagagggttggattgaagttacaaaggagtacagcgagaagttgatgggcctagcttgcaagcttcttgaggtgttgtcagaggccatggggttagagaaggaggctttgactaaggcatgtgtggacatggatcagaaagtggtggttaacttctatcctaaatgccctcaacctgacctcactttaggactcaagcgccacactgacccaggcaccatcacac

SEQ ID NO: 212082 - DNA, 421 bp, Gossypium hirsutum
  unsure (1)..(421): unsure at all n locations
agcatgtgaagggaccttataccccgacctttgcgtctccaccatctctgttctcccagatctcgcttccaaaacactgcctgagctcatccaagcaactctaaaccaaacaatgtacgaggtccgtctctcctctgccaactgcaccggcattgaaaagcggatcaaaagttacagcaaacgggaagaggcagcgataaacgattgccttgagctttttgatgacaccctggaggagctgaaagttgcccttgctgatctcgtcccaaagaaattagcagtctccaggaactaccacgacttgcagacatttctaagcgccgcgatgaccaaccagtatacgtgtcttgatgggttcgcacgtagcanagggaatgtangaacattatcaaaaagggtcttacaacatcactcatcacgt

SEQ ID NO: 212083 - DNA, 366 bp, Gossypium hirsutum
cccacgcgtccgaccgctggaagaataaaaggcaggtagctgtggactcgaaaattggacgtatcaccaatttcatcaataaagtaaaggttccaatgcaggttttcatagcttgtgggataagcagttctggtggtaaagctgttgatcctttccgcaaaccaaagcctggcatgtggcacattatggagaaacatttcaactctggcattccaattgatatggatcaatctttttatgttggcgatgctgctgggagaccgaatgatcatagtgatgctgatataaaatttgcacaagcggtaggattgaaattttacgttcctgaagactatttcaaatcttaattcggcatattcatggaaa

SEQ ID NO: 212084 - DNA, 355 bp, Gossypium hirsutum
cccacgcgtccgcccacgcgtccgggaagaagagtggtttcgatcaatattttgcaattccaagaaagaagaggccattcagaatcagtatgaattctttgtgcaacgaatgggagggccccctctttattctcagaggaaaggtcatcctgcattaattgcacgtcatagaccatttccagtcacacatcaagctgcagagagatggttatatcatatggagaaggcattagagagcaccccaaacattgatgctgattcaagagtcaaaatgatgaactttttgaggcacactgcattttttcttgtggctggagatgagttgaagactcaaaacaacaaattccatgcaaca

SEQ ID NO: 212085 - DNA, 398 bp, Gossypium hirsutum
  unsure (1)..(398): unsure at all n locations
atcggaagagaaaggtgagaatgggggaagcagtagtggcagcgcacaacgtattcgtatatggaagcctattagcagatgatgtggtccgtgtcctgttgaatcgagtccccacttcctccgctgctcttctcaacggcttccatagatttagcattaaaggacgggtttatccggcaattctgccagtccgaaaccgtcatgttagtggcagggtgttaatgggaataacggatcccgaattgcatattttggatgaatttgaggacgttgagtaccaaaggactcgcgtngaggtctcgttgctggaaagttctgacaaattacaagcccacgcttatgtgtggagcaacgctagtgatcctaacttgtacggcgattgggattttgaggaatgg

SEQ ID NO: 212086 - DNA, 356 bp, Gossypium hirsutum
agacaaccaaagtggggtcacctaagagatgtccataaggctataaagctttgtgaagaagcattgatagccactgatcctaaaatttcctctttgggtccaaacttggaggctgctgtatataaaacaggatcgggaggatgttctgcttttcttgccaatatagacaccaaatctgatgcgactgttaatttcaatggcaattcataccatttgcctgcatggtctgtcagcatcttaccagactgcaagaatgtagttatgaataccgccaaggttaactctatgagtgtgattccaagcttcatgcatgaatcattgaatacaaatgctgattcaactgactcaatcgggtc

SEQ ID NO: 212087 - DNA, 306 bp, Gossypium hirsutum
gtacagcagcatacccagcagcaatacgactctggagaactctcaagggaacttcagaaggatggaggtccgtttcctggtcggttgcatgcttctttcctggaattgtgtttgttatcctcacagtattgaattttattctgtggggcagcaaaagcactggtgcaattcccatttctctgtattttgtactcttgtctctctggttctgcatttctgtgcctctcactctcgtgggaggattcttagggaccagagctgaagctatacaatatcctgtacgaaccaaccagattccaagggaga

SEQ ID NO: 212088 - DNA, 353 bp, Gossypium hirsutum
gaactctgaaaaggttttgaagcaccagaagcagtatgagtagaagataaaatatttaacacttgaagataaagtgtcatactaaatctaaattaggttgtgaaactctcggagtgcgaaatttatagttataatcctcactctgatgcagatccctttctggagaaatgatcaatgttagaagggagaaaatcagtgaaagaatgaagtatctgcaagatttagtaccaggatgtaacaaaatcacagacaaagctggtatgctgaatgaaatcatcaattatgttcaatctcttcaacggcaagtagaggtaaaaaataatggagaaagaacatatggatttgtgtttaag

SEQ ID NO: 212089 - DNA, 377 bp, Gossypium hirsutum
aaagaacaaaaaaatatcttgaaacccggagatgtcggacgaggagcaccatttcgaatccaaggccgacgccggcgcctctaaaacctatcctcagcaggccggtactatccgcaagaacggctatatcgtcataaaaaaccgcccatgcaaggttgttgaagtttccacctccaagactgggaagcatggtcatgctaagtgtcactttgtcggaatcgacatcttcactggcaagaaactggaagatattgttccatcttcccacaactgtgatgttccacatgtcaatcgtactgattaccagttgattgacatttctgaagacggatttgtgagtttgctgactgacagtggagacaccaaagatgatttga

SEQ ID NO: 212090 - DNA, 375 bp, Gossypium hirsutum
ctttcttcttggacacttgcaatcaatgggacttgatttcccaaagaacgttagtgtaattgctgtgtgtcctaaaggaatgggtccatctgtaaggagactttatgttcaaggcaaagagatcaacggtgctggaatcaattctagttttggagtccatcaggactttgatggtagagctactgatgttgccttggggtggtcggttgcccttggatcacctttcacctttgttactactttagaacaggagtacaagagtgacatattcggggagcggggcattcttctcggtgctgttcatggaattgtggagtgtttgtttagaagatacaccgaaaacggaatgagcgaggatcttgcttacaaaaacac

SEQ ID NO: 212091 - DNA, 357 bp, Gossypium hirsutum
gtttgctctgtatattgaaattttctttctcgattttctctttagccaaaaaagatgcagatcttcgtcaagactctaaccggcaagacgatcactctcgaggtcgagagctccgacacgatcgacaacgtgaagaccaaaatccaagataaggaaggcatccctccagaccagcagcgtctgatcttcgccggaaaacagcttgaggacggccggaccttggccgattacaacatccaaaaggagtcaactctccacctcgtcctccgtttgcgcggtgggatgcaaatcttcgtgaaaaccttgaccggcaagacaatcactctcgaggtcgagagctccgacacgatcgacaac

SEQ ID NO: 212092 - DNA, 346 bp, Gossypium hirsutum
ggcaagtattatatctttcacattcagggaagcagtagttgatgttgactacaaaggatacttaatacccaagggttggaaagtgatgccattattcaggaacattcatcataacccagaattttttcccaatcctcaagaattcgatccatctagatttgaggtagctccaaaagccaacaccttcatgccatttggaaacggcgttcatgcttgccccggcaatgaactggcgaagctggaggctctcattttgatccaccacctagtaacaaattttaggtgcgaggttgtgagttcaaaaagtggtattcaatatgggccattcccagtgcctcaacaagga

SEQ ID NO: 212093 - DNA, 360 bp, Gossypium hirsutum
tgcgaatgtcttcctcttctctcccgaaggaaggaaatcggggaaaaatgaaaatggaaggaatcgaaggcgacgcctcggtgggaggagcagggcgttacattttgaatccgacgcgaataaacagcgaggacataatattttgcgttgatgtggacgcagagtcgcttgttgaaatgaaaacagcaggagtcaccagattggattccataaagcaagctatccttctctttgtcaattccaagctctctatcaaccccgaccaccgcttcgctttcgccactctctccaaaaccgcctcttggcttagaaaagagtttagtagtgatgttgagtctaccattggtgctgttcgagcac

SEQ ID NO: 212094 - DNA, 358 bp, Gossypium hirsutum
  unsure (1)..(358): unsure at all n locations
cccacgcgtccgagaaaagatcagtagaaggtggaaagcaaggtgcttcaacaaaaaagttgaaaaaggacaaagctgttaatgcgacagcaaaaagtgctcgccctgaggctaaacccacccctgctgcaccacgagtcaagccagagctcactttgcccgtaatgtctacagaggtagaacagtctatactcgaggacttaagaaaccgtgtacagttgagtagcgttgcattgccatctgtcagcttttatacgttcctcaacacgcataatggtttgaactgttcatcaatatcccaggatggatcttttgttgctggagggttctcagactcatcactgaangtttgggatat

SEQ ID NO: 212095 - DNA, 328 bp, Gossypium hirsutum
gttcttttttaaacaaatatccccgatctcctgcttagagttagtttctcgtatttatggggctacttgaccagttgtgggacgacaccgttgcgggtcctcgacccgataatggtctcggcaagctccgaaagcactccactttcactttccgctctaactcctccaaggaatctgatggcgggagtgtgagatcgtacaatgatgagacgccggaggaaacaacgaaagtgacacgtacgattatgatcgtaaaatcgccgcgttaccagagcggatcgcctccggtttcgccggccgaatcgactcctccggtatctcctttttc

SEQ ID NO: 212096 - DNA, 353 bp, Gossypium hirsutum
aaatcattcaagtttcttaattttcattcgatatcgaagatgtcaggaagaggaaagggaggcaagggacttggcaagggaggagcgaagcgccaccgtaaggtcctccgtgacaacatccagggcatcacaaagccggcaattcgacgcttggcccgtaggggaggagtaaagcgtatcagtggcttaatctacgaggaaacccgtggagttctcaagatcttcttggagaacgtcattcgcgatgctgtcacctacactgaacatgccaggaggaagacggtgaccgccatggatgtggtttatgctctgaagaggcagggtaggactttgtatggatttggcggttagtc

SEQ ID NO: 212097 - DNA, 253 bp, Gossypium hirsutum
atggaaccaagagtgggaagaagaacagcaacaagaaaaacaataacaacaacgacaataacaacgaaaacaaggatgggaaaagtgctgctgataaaaggtttaagacactgccaccatctgaatcattgccgagaaatgaaactgtcggcggctatatttttgtctgcaacaacgataccatggaggagaatctcagaagacagctctttggtttgcctccacgttaccgtgattcagtccgggcaataac

SEQ ID NO: 212098 - DNA, 344 bp, Gossypium hirsutum
cccacgcgtccgctttgaagtgcagaatcaagggattgtgggtggagaagaagcggtgacggatctaacttggaactccgttttctcttcttaccgctattcccgacctatctctaaccccctcaatttctctcaggctccaatccaggtagatattccttgtgttcaagcgtcttcatggcttcaaagcggattttgaaagaacttaaggatttgcagaaggatccaccaacttcctgtagtgcaggtcctgtagcggaagacatgtttcattggcaagcaacaattatgggcccctccgatagcccttttgcaagaggtgtgtttttggttaatattcattt

SEQ ID NO: 212099 - DNA, 327 bp, Gossypium hirsutum
cccacgcgtccgaccacgcattcggccacacgaacggagtggcgcaaaaactgggttatctgcaataatatcattgaaccataatgtgttgcgctcttttggtcttgactgcattatacgaatacataccacagtgtgctatggctgctatagtaatctctggtgctataaccatggcggattatgaagaggcgctattcttatggcgtgtatataaaaaagaatctattctttggaccattacaactactacaacactgtgactcagaatcaacattggagttcttgctggcgcatgcgtcacacttgccatcgtgattcacaaat

SEQ ID NO: 212100 - DNA, 400 bp, Gossypium hirsutum
gtcttcttcacttgcaatttcctcaagctcccttaggctcacccatgtcttcccaactaacggaaatgcaattctatttaacgccatatccagttgcagggtctcctctttgaagccaccgtctttgaacagtatcttcattagaatcccattcgggtcctttaagaaggcctcttttttcacttcctccaggcccttttctcctgtcatggaatggcaggattgcacggcaaagatggaaattgatgtacctgcatcggtcgcttacaaatgttactctgatcgtgaagcaattcccaattggatgccattcatttcatctgttcaggtattggaagacaagcctgatttgtcacggtggtctttgaaatataaacgcattggtcgtgatcttgaatac

SEQ ID NO: 212101 - DNA, 403 bp, Gossypium hirsutum
ctctggaaaggtgtataatgtaacccaattcttggaggaccatcctggtggagatgaagttttgcttgctgctagtggaaaagatgcgaccaatgatttcgaagacgtaggtcacagtgatgatgcaagagagcagatgcagaagtactatattggtgaggtcgatgccaccaccattcccgcacgaaggatgtacaaagcacagacgtcaaccgcggcaactcaacaagaggagcctggctttctgtttaagattatacagttcctggtacccctcttgatcttaggcttcgcattcggtttacagttcttggggaagaaggaaaaaaccgaaacttagataactttccattacggacctgctagtcgatgtatgctgtaaagctgtgtgtgtgtgtatgtc

SEQ ID NO: 212102 - DNA, 345 bp, Gossypium hirsutum
ctttcaagtttgactaaatttgggtgcttattatcttcttctttttttttcacatatttttaactgttgtcaaatgatgtttgttgcatttgtatttgatgctgcataaccaataaataaattcgatatttatactttgttgttttatggctgcccttattgttctgccctcgatgtatgctttgccaggttgaaagagtttctcacagagacaatttggagagttttgtgcaaaaatcagagaaccttgagaggcaatgccttgcaaaagctatgagatcatactgtgaactgcgagtgttgccatatgaggaaaacaagactgttgtattttaagagcaaaaa

SEQ ID NO: 212103 - DNA, 361 bp, Gossypium hirsutum
gccaaaaagcatagattggagaaagaaaggtgctgtcgctccaatcaagaatcaaggccaatgtgggagttgttgggcattctcagcagtggcagccatagcagggatcaatcaaattaaaacagggaacttgacatctctttcggaacaagagctcatcgattgcgacaccgactctatcgaccaaggctgcaacggtggacacatggtccaagcgtatgaatttattataaagaacggtggaatcaccactgagaaagactatccatacacgggaagagatgacacctgcaagcggacacaagctaaaaaccatgcagtaacaattagtgggtataagagattacctaccaacaatgag

SEQ ID NO: 212104 - DNA, 334 bp, Gossypium hirsutum
cttttggaaattagtgaggaacttactaaagccgccgggtcaggaacagatcgattgtcagaaacctaagcctattttgcttgataccggtgaaatgaaactaccatatgactgggcgccttcgatacttccggtccaaattgtgcggatggggcaacttgtcattctcagcgtacctgcagaattcacaaccatggccggcaggcggctccgagacgctgttaagacggtgcttacttccggacacaataagcaattcgacagcaatgtccatattgtcattgcagggttgacaaatacttattcacaatatgttaccacttttgaggagtac

SEQ ID NO: 212105 - DNA, 385 bp, Gossypium hirsutum
  unsure (1)..(385): unsure at all n locations
tctctctctctattctctttggcttatctatcgctttgatttcgcatccttgctgtgcactcgatggcaaatcgatggttgaggcctgaggtgtatccgctgtttgcggccgtaggtgttgctgtcggaatctgcgggtttcagttggtgcgcaatatctgcatcaaccctgaagtcagggtaaccaaggagaacagggctgctggggttttggacaactttgctgagggagaaaaatattctgaacatttcttgagaaaatatgtccgcaacaagacgccagaaatcatgcccagtatcaacagcttcttcactgacccaaagtgaggcttcactcttgctttatgctgaaactaaaaaataaaaaanaatagaagaactaagt

SEQ ID NO: 212106 - DNA, 386 bp, Gossypium hirsutum
cccacgcgtccgcccacgcgtccgagcgaacctatttctggtgcaacagtaaaattggaatgtaggaatcgaaccagtgaaaaaattacttttcaaagcccagaaataacaactgatgctgcgggaagctacaaaattgaagtgacaggagattatgaagactcagactgtgatgtcaacttggtgaagagtccccgagcggattgtaatgatcccacagaagcgtggaggaaagccagggtggaactcaccgcattggatggtgttaccggcccaattcgctttgccaacaatcttgggtttaaaaagaaagaagctcttccaagttgtaaaaaagttcttacagacatgggttattatgagcttaaggatgaacttggaaagcg

SEQ ID NO: 212107 - DNA, 432 bp, Gossypium hirsutum
  unsure (1)..(432): unsure at all n locations
agttcttcctgaacttaatggaaagcttactggaatggcattccgtgttcctacacccaacgtctctgttgtggatttaacttgtcgacttcagaagagtgcctcctatgaggatgtcaaagcagtcatgaagtatgctgcagaggggccacttaaaggcattcttggatacacagatgaagatgttgtctctaatgattttgttggtgattcgaggtcaagcatttttgatgcgaaagccggaatagggttaagtaaatctttcatgaagcttgtttcatggtatgacaatgaatggggttacagtaaccgagtacttgacctaatcgagcacattgcactagtaggagcaactcgcgactgaatattttagagctatgctgntccaattgagtgacacccacattttatcgtagatggttggttcaatga

SEQ ID NO: 212108 - DNA, 390 bp, Gossypium hirsutum
cccacgcgtccgatttttcaaaggatattgttgccactggaggggttgattcaagtgctgtactctttgatcgaacatctggagagatcttatctacactcagtgggcattctaagaaggttactagtgtaaaatttgtagcccagaatgatgtatttttaagtggttcagcagataagactgttcggatttggcaagggtctgaagatggaaagtatgattgcaggcatattttgaaagatcatacagctgaagtgcaagctgtcacggtccatgccactaacaactactttgtaactgcttcacttgacatgacgtggtgtttgtatgatctttcgtctggtttatgcttgacccaggttgaagacccatcaaattctatgggctata

SEQ ID NO: 212109 - DNA, 411 bp, Gossypium hirsutum
cccacgcgtccgcccacgcgtccgcccacgcgtccgctttaatgaatggaactttgagagatcaagaaaaagagattgaacagttgaggaatgatcttcttcagcttaagcgcgagcatgagaagcaaaatgttcttgtgctaacactttcagggtttttagcattgttatgctgaagggattttatgttgtccaatacgaaaaaattgctaaccagttttccaaaacttgctaataatttgatgcgccacgtcgttgtctacgtgtacccaagagcaatcccaagtatagtcaatgaaagccatgaagtctacttagtgagcatgtggtcaacagcttgctgcataaaaacaggattacttattttatattctggttttattttaaaaagatcatgcagttatttggttt

SEQ ID NO: 212110 - DNA, 313 bp, Gossypium hirsutum
atcttgaaacagaagctggatgcagttcgcctgtctgaggatactgtggaagctgatgatcagtttggtgaactaggtgcccatatgcaaggaggatgatctgcttgtaattaagaactagccattgacatttgtaggtttcagaaaaggcgtgtttacatctaactaactaccttttgtttaaaactcttgagatattttgggtagaacagactacttgttttcctcgatgaaaattgtcagctatatgccatctgttttaaacttaaaagccagcaaagcatggactggcaaatcttacttgttttgaacc

SEQ ID NO: 212111 - DNA, 357 bp, Gossypium hirsutum
ggcccccagctgagggagaaactcttcaggttttctgaagctgccatcgacaagatcaagtcaaaagtcaactctaccccaccatccgactcctctaaaccattctcaactttccaatctctagcttatcacgtttggcaccacgtaaccctagcacgtgaactcaaacctcaagattacacagttttcactctcttcgctgattttcgtaaaagggttgatccacccatgccggaaagttacttcggaaacctgattcatgccatcttcaccgtcacggcagccgggttattgtcggctaatccaccgcaattcggtgcatcgttggtacaaaaagctatagaagcgcacaacgcg

SEQ ID NO: 212112 - DNA, 425 bp, Gossypium hirsutum
  unsure (1)..(425): unsure at all n locations
ggggacaagagaggtagagaaatagtgtgatggcatccgggtggggaatcaacggtaacaaaggcaggtgctacgatttctgggtcgacttcagcgagtgcatgtcccgttgcagagaacccaaggactgtggtcttctccgtgaagattatctcgagtgcctccaccattctaaagagtttcaacgaaggaatcgaatttataaggaggagcaacgtaaattaagagctgccgcacgaaaagacaaggaaggcgaaaatggtgttcatcatcatgcatagtcataatttgtgatcctttaatttgccaataataataatgcgtggagattgttgtatttatgttggggattggtatttttaactctttgctaaattacccctttggntttccttnttcgtnggaatgaacatttgtngtttttc

SEQ ID NO: 212113 - DNA, 358 bp, Gossypium hirsutum
cttttacatcattcatttctggttatgtaagtggtggaatgtactcacgcaatgggggtaaaaattggataaaggctatgatccttacagcatctctgttcccatttatgtgctttgggattggtttcatcttgaacacaatcgccatattttatggatctctagcagcaattccttttggtacaatggtggttgtttttgtgatttgggctttcatttcattccccttggcccttcttggtacagttgttggaagaaattggagtggtgctccaaataatccatgccgtgtgaagaccattcctcgcccaattccggaaaagaagtggtatcttacaccctctgtggtctctatgat

SEQ ID NO: 212114 - DNA, 277 bp, Gossypium hirsutum
caaaagttgatatgtgggcgatgggtgcaatcatggctgagttgttcaccttacatcctctttttcctggcacaagtgaagcagatgaaatttacaaaatttgcagtgtagtaggcactccaactgaagaatcatggccagatgggcttaatcttgcaagaactataaactaccagttcccgcagttcgatgggacacatctgtctgtgttgattccatcagcaagtcatgatgcaataaaccttattacatctctctgttcgttggatccttgcag

SEQ ID NO: 212115 - DNA, 365 bp, Gossypium hirsutum
  unsure (1)..(365): unsure at all n locations
cagcgcttgttcttcttcgattcatcgtacacgaccatgacaatctcttcgtcgccgccgaggctgtccactccatcggaatctctgtccttatctataagcttattaaggagaagacttgtgctgggctatcgctcaaatcccaagagctaacagctatctttttagctgttaggctgtattgtagctttgtcatggaatatgatatacataccctacttgatttggccacattggcaacaactttatgggttatttatatgatccgtttcaaactaaagtccagctacatggaagacaaggacaactttgctttatattatgttcttgtnccatgtgctgcacttgccctatttattcacccc

SEQ ID NO: 212116 - DNA, 356 bp, Gossypium hirsutum
gaatggtgatggggatgcagacacaaagaataggatgggggtaattcaagatgaactgagggagaaggaagaagaactggaagacttggaagatcttaatcaagctcttattatcaaggaacgcaaaagcaatgatgaattacaagatgcccgaaaagagttaatcactgcatttaaagatgtttccaccagagctcatattggtgtcaagaaaatgggagaagtggacattagacccttcttagttgcagccaaaagaaaatactcagctaaagaagctgatgtgaaattagcagagctatgttcactgtggcaagactatcttaaagatcctagctggcattcttttaaaaatc

SEQ ID NO: 212117 - DNA, 362 bp, Gossypium hirsutum
gctttctatcgcggtgctgattgttgtgttcttgtatatgatgtcaactcaatgaaatcgtttgacaaccttaacaactggagagaagaattccttattcaggcaagcccttcggatcctgagaatttcccgtttgttgttttggggaacaaaatcgatgttgatggtggaaacagtagagtggtgtctttgaaaaaggcccgagcatggtgtgcctcgaaaggaaatatcccctatttcgagacatctgccaaggaaggagttaacgtggaagaagctttccaatgcatagcaaaggatgctctaaagagtggggaagaggaagacatatacttgcccgacacccatagatgtgggagcag

SEQ ID NO: 212118 - DNA, 365 bp, Gossypium hirsutum
atcagcaaacatgttgaagacttttgatgttcttgaagtttcaagaaggtatgggtctttttataagattcaaccctcaccaaaatatatattggggttaaaatataaggcattgtttctacatttggagccttctatgttactagaaacaaaggacgtcgagctaacatccttgttggtgcagacagcttcttcctaggaggagctagcaatgcaggtgcggtgaatatcacaatgttgatcataggacgcattcttcttggtgcaagcatctaaatgtgtttgatattttagttatccaacatttattgatgcacttcagagatttggatgatcctttttacaatgggtgcacctaatttgca

SEQ ID NO: 212119 - DNA, 355 bp, Gossypium hirsutum
  unsure (1)..(355): unsure at all n locations
ccttcggctacattcccccagaatacgcatatacaatgcaagtcaccgctcctggaaatgtgtatagctatggtgtggtgttgcttgagatcctcaccacacgatttccagtggatgaggattttggggaaggagtagacttagtaaaatgggttcatggtgctcgagcaagaggggagacccctgagcagatacttgatgcaaggcttagcacggtttcctttgggtggaggagagaaatgcttgcagctttgaaggtagctttactctgcactgacaccacacctgcaaaacgacccaagatgaagaaggtagtggaaatgctccaagaaatagggcanaattgatccacaat

SEQ ID NO: 212120 - DNA, 398 bp, Gossypium hirsutum
tggaaatctatggaaagaaattgatgttttgatattcaacacttggcattggtggcaccgtagaggactgaagcaacaatgggattatgtgcaatttgatggaaagattcgtaaggacattgatcgcacggttgcttttcgtacagctttgagaacatgggctaaatgggttgattcagatgtggataccaataggactaaagttatatttcaaggaatttccccttctcactacaatggcagagattggaatgagccaggagtaaggaattgttcaaagcagacaacaccatctaagggatcgagttatccaaaccggttgcctctggcagagtacgtagttaaagaggtcataaggaacatcaagaaaccctgtcatttgcttgatattacaatgc

SEQ ID NO: 212121 - DNA, 328 bp, Gossypium hirsutum
agccctgaaagacttgaaagtctgggttatgaatgtagttccaatcgacggtgccgatacacttccagtaatctatgaacgtggattgtttggaatacatcacgattggtgtgaatcatttaatacatacccgagaacgtatgatgttcttcatgcagatcatctcttctccagtattcagaacaggtgcaagttggttgcggtaattgcagaagttgatcgaatcctgaggccagaagggaagctgattgtacgagacaaagccgaaacgataagcgcagtggagagcatggctaaatctctacaatgggagatccgaatgatttat

SEQ ID NO: 212122 - DNA, 363 bp, Gossypium hirsutum
cttttgctgcaaatgctccactctgccccggcttgcagagaaggggcacttcatgttctctatgctttggcaagcacgcctgaacttgcttgggcagctgccaagcatggtggtattgtttacattcttgcacttctcttgcctttacaagaagaaatacccttgcagcaaagagcggcggcagcctctttattgggtaagcttgttgcgcagccaatgcatggacctagagttgccataacattagcaaggttttttccggatggcctagtatcaatcataagggatgggcctggtgaagctgttgtgtctgcccttgagcggaatacagaaacaccagaactcgtatggacacctgcaatg

SEQ ID NO: 212123 - DNA, 342 bp, Gossypium hirsutum
cccacgcgtccggcttgccgtattaattttaatctccggtgtccttcctcccatacgccgcgtttcgtgcccctcaaaaaccctacgctccttattcctccttttaaaccccactcccatacccaccccagccatccctttaagctttctatatccacttctcggtggctgcggaggcgacggatgggctttgtgacagtcaattctcatatggccaccgaggaaaagcctatttccgatgatagaatgctggtgtttgtgcctccacatccgttaattaagcactggatttcggttttgagaaatgagcaaactccttgccccattttcaaaaatgccatg

SEQ ID NO: 212124 - DNA, 400 bp, Gossypium hirsutum
  unsure (1)..(400): unsure at all n locations
gttcggttaggcctgtataaaagaaaaaggatttctctttcctagtcttgtgttgcgctgtggttgaagaaaggtctcataacatttgaagccaagcaaagttcagattaggatttagggttttctgttttcttttctttttgtgaaaggcaaaatggatctggatatgaacgtgaacgcccctcactcaatgggcacaacaatcatcggagtcacctacaatggcggtgtcgtcctcggcgccgactctcgtaccagcaccgggatgtatgttgctaatcgggcatctgacaaaattacacagctcacggataacgtctacgtttgccgttctggatccgctgctgattctcagaatgtttctgactacgtncgntattttcttcatcaacatacgata

SEQ ID NO: 212125 - DNA, 345 bp, Gossypium hirsutum
aattcttaaaactcgtccccaatttctccgcttattagcgttgcctggaagcggtttttttttctttgtagaataaagtagatttttttttaatttgacggggaaaaaaaacaaacaaactatgaccatgggtgctgcagacaagagggaggaagtgattcaagcatggtacatggatgatagtgatgaagatcagaggcttccccatcaccgtgaacctaaggaatatgtatccttggataaactttctgagcttggagtactcagctggcgattggatgctgataactatgaaaatgatgaagagttgaagaaaattcgtgaagaacgaggttactcctacat

SEQ ID NO: 212126 - DNA, 334 bp, Gossypium hirsutum
  unsure (1)..(334): unsure at all n locations
cccacgcgtccgcccacgcgtncgtgagaaggaacccaagttcttgaagaatggtgatgctggtatgattaagatgattcccaccaagcccatggttgtggagaccttctccgagtacccacccttgggtcgttttgctgtgagggacatgcgtcagaccgtggctgttggtgttatcaagaatgttgagaagaaggacccaaccggtgccaaggtcaccaagtctgctgctaagaagaagtgaaccgtgctggctaaacctaatgaagtttccgcagatggagtattttattatgataataatagtttgatagactttatcatttatgatata

SEQ ID NO: 212127 - DNA, 411 bp, Gossypium hirsutum
  unsure (1)..(411): unsure at all n locations
gttcttatcaacttcgagcagcggtggagggaatcgaccaagtggaaggatttctgtctactttgtgcaggaaaaatgccatcgaatgacgatgctttgattaggatagaacgaatctcttggatactaagtccttccttagctgtaacagaccacggcactacaataattccagaagatgaccccaaattgcatgttcttagtatcgatgatcgtgacaactgggatgttcagattttccgctccattgactcgggatcagtgaaaggatttccaagaccaatgagaaaacccgagaaccagaatcttttagtttcaaanaatgtggtcatagaataaagcattcaaacagcttatatacaagcaaataagatccgctcagcattacatatatatccgaaaatagtattt

SEQ ID NO: 212128 - DNA, 438 bp, Gossypium hirsutum
cccacgcgtccggacaactgctgggactcgctggggtgtggtaatgtcaaggaacgctggattctctgatcaggttgtggagctcgacttcttatatccaagtgaaggaatacaccggcgatgggagagcggttacagaataacatcagtggctgcaactgtggatcaagctgccttcatacttagcattccaaaacgaaaaacaacagatgatactcaggaaacgctccgtacaactgcctttcccagcacccatgtaaaggaaaaatgggcaaaaaacctatacattgcatcgatttgttatggtcggacagttcgctaatcccggtctgtacattctgacttaaaccaaaaaaagaaaaaagaaaatgagttcatggtttgaaagccaccgagtatctttcgtcttcgagttcggttaactcttctatataatct

SEQ ID NO: 212129 - DNA, 430 bp, Gossypium hirsutum
ctgatagatacagagtacgaaccattggttccaaaagaagagaaatcaaaactgcaaatactgtgtttcaatctaaggtggaaaaggcttttggtactggctacagtttgggtacttttcacggttattcaagtcatcaagaatgatgtggttccctgtaccactttgtattgggtattgtttagcttacagttccccatagcaacactggtttttggatatgaagcaactaaattatacaaagaacataagaagagaatgagcactgggaatgctgaaacagtttgtggagcttcaattcaatggagtccattgaacattgcattttgtgcactttgtggcatcttgggaggcactgttggtggattgcttggttctggtggtggattcattttgggtcctctcctcctttgaaatggtgtgattccac

SEQ ID NO: 212130 - DNA, 333 bp, Gossypium hirsutum
cccacgcgtccggggaccatgtgaggaggttggagatgaaaataccagactttgtgcatgatcatgatgaagagctggagtaccatcccatgatggactatgggttagagagcgaccaccctagagtttacactgagccgccctccatggatcctatctcgatgtactctatgaggtgcatagcttgagctttaagcccgtgttgaaaggttgaaactgtagatttgcagttgatacgttatgggttttgctttttgatagaggagagttttggtgttcatattgtataaaatgggagtttgtaaatggaaccttaagacttcattggcagag

SEQ ID NO: 212131 - DNA, 423 bp, Gossypium hirsutum
cccacgcgtccgcttgggagatgtttgtcgaatcatgcaaaaggttacgcataatgaaaggaacagaagcaatcggactcgcaccaaaagctgtggagaaatgcaagaagagaagctgaaggaggtaggagttgctaatagagcaacctgctcttttgatcttgtgggtcgcctgctgcatgcatgcacatcatcatcatcatcatcatcatgtgatgaaaaattattgcaaagccagcagatggatgcatggatggatggagcagtttggctttgttattactattagggtgtttttgtgttcttaaatattataaaagttataatgtgagataaaataatagtaattaagtatttgatgactactttgttatggaatatggacaaaacataaaaaaaaaaaaaagggacatgaaatattac

SEQ ID NO: 212132 - DNA, 315 bp, Gossypium hirsutum
gcttactacaaggatggtgctgttgacccgacatttttgtactttgcgtatgcattgaaggaggtcaagtgctgaggtttgaagcaaagaaaaaaaaaagtggttgctgaagaatttagtcctttttattattgcttttgtctcttattttcagtactctgctaaagacataaattatttatggtttttgatgtttttgatttaattgtttgttgttttatcatggaatggtttctatttttatgggttgactaaacaagaatttaactctttgttctattactacttaattttattggaaggaggtttttggga

SEQ ID NO: 212133 - DNA, 401 bp, Gossypium hirsutum
atcctgctgaaactaagaagctattggacaaacttgttgttttaaagcttaatggaggcctggggacaactatgggatgtactggtcctaaatctgtcattgaagttcgcaatggcttcacatttcttgatctaattgttcagcagattgagaatcttaataagaaatatggatgtaacgttccattggttctgatgaactcatttaacacccatgatgacacattgaagattgttgagaagtatgccaattcaaacattcaaattcatacttttaatcagagccaatatcctcgtctggtggctgaagattttactccatttccttgcaaaggccagcctggcaaggatggatggtatcctcctggtcatggtgatgtgttcccagctctaatgaacagt

SEQ ID NO: 212134 - DNA, 420 bp, Gossypium hirsutum
  unsure (1)..(420): unsure at all n locations
aaaaaaacaacaaaagcggtattgttgctgtagaatttgataccttcagagatgccaagcatggtgatttgaatgaaaaccatgtgggcattgatgtgggtagccttgcatcagttaaagctagaaatttatcctctctcaatttggtactaagcaatggagaaaaattacattcgtggattgattatgaagcaagttctaagagactagagattaggttgagtcaatctagtagtaccaggccagatgatcccttgctttcatactcaatcgacttgtcaaaactatggaatgatgaacaagtgtttgtgggcttaagttcttcaaatggcaactcttcgcagacatgctttattcacttatggagttntaagctaaggcaggttcctaattggatgcattcccaaccacttgatcctg

SEQ ID NO: 212135 - DNA, 433 bp, Gossypium hirsutum
  unsure (1)..(433): unsure at all n locations
cacctctccttccaatggtattaagactgtggttttagttggacgtaccggcaatgggaaaagtgcaactggcaatagcattcttggaaaaaaatccttcaaatcaagggctagctcatctggggttactagtacttgtgaattgcagaaaacagtgctcaaagatgggcaaattttaaatgtcattgatactcctgggttgtttgatttctcagctggatctgaattcattggaaaagaaattgtcaaatgtattgatcttgccaaggatggaatccattcagttcttgttgttttctcagttaggacccgcttttcgcaagaagaggaagctgcattgcgtagtttgcagactntatttggtagcaaaattgttaactacatgattttagtgtttactggtggggatgaactggaagaaaatgaggaaaca

SEQ ID NO: 212136 - DNA, 329 bp, Gossypium hirsutum
atagattttgagttcttgggcaacagaacaaggcaaccatacattcttcagaccaatgtgtacactggtggcaaaggagacagaaaactaaggatttacctttggcttgacccaaccaaaaaataccactcatactctgtcctctggaacatgtatcagataatgttctttgtggacgacataccaatcaaaatgtgtaaaaactgtatagatttgggagtgaggttcccattcaatctaccaatgaagatatactccaccttatggaacgccgatgactgaaccacaacgggtggtctctataataccgactggtgcaaaccccattc

SEQ ID NO: 212137 - DNA, 435 bp, Gossypium hirsutum
  unsure (1)..(435): unsure at all n locations
tccatcaaaaatgactgactgccatcccctatcaactcttatttacactgctctccaacaagctattgcttcagcagcaaatgcagagcgtagcagaataaacggctttgacaagggttgagttgttctaatacccaggacactttcgaaaaagatggtccattgtttcagctcgtgcttcacatcggggacagcttgtgctattttatagctttttgtgctgcatattcacttttgtaggcaaaaagttccatgatagtctccatattgtaattgttatttttgttggtagattcaggctccaaagttttttgtaaaattttctatagataatttgtaacgcataagcgctagggtttccattcgagctctgtaatagtttataggcacttcggacggtgaattcacccgacaactcacctncccagatgatga

SEQ ID NO: 212138 - DNA, 403 bp, Gossypium hirsutum
cccacgcgtccgttcattttaagctttaaattccaagaagacaagccatggatggcacaattaaccatcgtggcttgtttatctttggctaccaaggttgaggaaactcaagtgccacttcttttagacctccaagtatgtgtctaatgcaaacaacattgtagtccaagttgtgtttctgaacttgttatcgacttattaaagttgggttttagtgatttatttatttttctttacgtggaggaagcaaggtatgtgtttgattcaaagaccatacaaagaatggagcttttggtgttgtcaaccctgcaatggaggatgaatcctgtgacaccaatatctttctttgatcatattacaaggaggcttgggctgaggacccatttgcattgggatttccttc

SEQ ID NO: 212139 - DNA, 401 bp, Gossypium hirsutum
  unsure (1)..(401): unsure at all n locations
ctttctgagcttggagtactcagctggcgattggatgctgataactatgaaaatgatgaagagttgaagaaaattcgtgaagaacgaggttactcctacatggacttctgtgaggtttgccctgagaagcttccaaattatgaggagaagataaaaaatttctttgaagaacatcttcatactgatgaggagatccgttactgtgtggcaggaagtggttattttgatgtacgggatcacaatgataaatggattcgcgtgtgggtgaagaaaggaggcatgatagttttacctgctggaatttatcatcgctttactctggatacagacaactatattaaggcaatgcggctctttgttggtgatccaatttggactccgtacaatcgtncgcacgatca

SEQ ID NO: 212140 - DNA, 424 bp, Gossypium hirsutum
caaggaattcgataccccgtcattgaaggagaggaagacgaagaaagtcggaagcagcgcggaaaagggaatgtagataggtggctccaaatgctgttagagaacagtcaagaagaattggagcctcaaaatgacaatgtagatgcagaggaagtgagtggaactgatgacatcataaaaaagctagacttgaagtatcccctgaaagagaagaaagaagataataatgttaatgtagaaggaaacaaaacaccaaggagaaatagcgatgctgtcgatcgagctaataatctctttttcaaaggaaacagcatatgggaatttatcattgctgatctactagcaaaaggaatgagaaatgctaaaaatgctattctttctggctgttccgctggtggattggcttcgatattgcactgtgaca

SEQ ID NO: 212141 - DNA, 413 bp, Gossypium hirsutum
ttcttcttcttcttcttcttcttcttactccagccgactttttccggcaaaacggtgtcagatctttgtgatctatagccggaagtttcatttcgagttcgacgatctcatccttcgatctttccactttcttcagcctaccatgaatcccgaatatgactatcttttcaagctacttcttattggagattccggtgttggaaaatcttgccttcttttgagatttgctgatgattcatatgtagaaagttacataagcaccattggggttgattttaaaatacgcactgtggagcaggatgggaagaccattaaacttcaaatttgggacactgctggtcaagaaagatttaggacaattactagcagctactaccgtggggctcatggcataataattggttatgatgtga

SEQ ID NO: 212142 - DNA, 444 bp, Gossypium hirsutum; identical to SEQ ID NO: 190035

SEQ ID NO: 212143 - DNA, 405 bp, Gossypium hirsutum
atcgggtgcaacaagaaattttgaaccttggcgtgctgaagatgaggaagcggagaaagagaaacagaaaagggaatctgaagaaatgggggatgcgatgaaatctttggagaacagaacgttggattcaaaaagagagatggatatccttgctgcgcttgatgaaatgaagtctatgaagtccagacatgccacggtgagcgtagattcaatgctggaggccttgcaacgcactgccgcagaaaaggaaaagaaaatagaagaagaagacgaagccctcattaaatcgattttccagaagccaaaggaatttgttcgaaggatttcagatgatgttttcgacgatgatgaggatctgacccgtttattgagtggcaatagtgaaacctcaaatgatggcttaaa

SEQ ID NO: 212144 - DNA, 370 bp, Gossypium hirsutum
cccacgcgtccgtcttcaattcctcatttcaagggagagagtgtatcagtgtttcttcccctcttttacttaatttctctccgccatggctctctccgtcgagaaaaccgccgccggccgtgagtacaaggtcaaagacatgtctcaggctgacttcggtcgtctcgagatcgagttagctgaggttgaaatgcctggtttaatggcttgtagaaccgagttcggccctgcccaacctttcaaaggagccaaaattactggttctcttcacatgaccatccaaaccgccgttcttattgaaacccttaccgccctcggagctgaagtccgttggtgctcttgcaacattttctctacccaagaccacgct

SEQ ID NO: 212145 - DNA, 441 bp, Gossypium hirsutum
cccacgcgtccgattagaaaaaaaattatgggttctgaacagaatgaaggaacaagctttccaccatcggagccaaagctttgtgccaacggttgtgggtttttcgggacggcagcgaatatgaatttatgttcaaagtgttaccgggacctccgtgttggggaggagcaagcggcgaaggcgaaagctgttatggagaaatctctcagtatcaaaacgaagcatgaacctgtcgttgtggagacttttaagcctcatgtgggttcttcgtctacatcgattgagcaacaacaaccggctgttgttgccgttaatcaacaaccggaaccaaaggcggcgaacaggtgttttatttgtaggaaaaaggttgggttaactgggtttaagtgcaggtgcgagaatacattctgtggggagcatcggtacccagaaaaacacgag

SEQ ID NO: 212146 - DNA, 185 bp, Gossypium hirsutum
acgaaaaactgaaaaaggggaaaaaaagcgtcgtcgtttttgcttcatcttcttctttttcttcgtccctctctctctttgtcagaaactcctctttcgttcttttgttcactaagaattgtaaaaaatggccgacggtgaggatattcaacccctcgtctgtgataatggaactggaatggtga

SEQ ID NO: 212147 - DNA, 441 bp, Gossypium hirsutum
gaaaagacgataatgaagttagttgttgacgcggaaactgataaagtacttggggcatctatgtgtgggccagatgcacctgaaattatgcagggaattgctgttgctctaaagtgtggagcgactaaggcacaatttgacagcaccgtcggcatacatccttccgctgctgaggagtttgtaacaatgcgctctgtttcacggcgtgttactgcccggggaaaagcgaagacaaatctgtagtggatgtacagcaaggtaactgtagtgctggtaaaatgcagttgaatgcaacattcacatggtcgtgtatatatatttcacaggaaatggtattagatgatcgttgaatgcaacatcaaccataaaggaccttctaccgtattttgtcatataatgtcataatgtgacatgccttttacgggaatttatatatttatt

SEQ ID NO: 212148 - DNA, 442 bp, Gossypium hirsutum
  unsure (1)..(442): unsure at all n locations
cccacgcgtccgcccacgcgtncgcccacgcgtncgaggacttgattcatcattagttgcttccatcacagctcggtatttggctggtaccaaggctgccaaacaatggggaagccagctccattctttctgtgttggcctagagggttcaccagatttgaaggctgcaagagaggtggcagactatttgggcactgttcatcacgagtttcacttcaccgttcaagatggaattgatgccattgaagatgttatttaccacattgaaacctacgatgtcaccacaatcagagcaagtactcctatgtttctaatgtcacgaaagatcaagtcacttggtgtcaaaatggttatctccggtgaaggctccgacgagatttttggtggatatttgtatttccacaaagcaccanataanggatgaattccatcaagaaacatg

SEQ ID NO: 212149 - DNA, 338 bp, Gossypium hirsutum
aacgaagagggcttaaagcgaggcgctaggcgagagcgagagtgagaggcggaaaagggaggaatgggagcctgggctatcgctgttcatggtggcgctggtgtcgaccctaatctccctaaggaaagacaagacgaggctaagagactcctcactcgttgccttgatattggcatctctgctctccgctctaatgtccccgccattgacgtcgttgaacttgttgtgagagaactggaaacagacccgctgttcaactccgggcgtgggtctgctcttacggagaaaggaacagtagaaatggaagccagcattatggacgggcctaaaaggagatg

SEQ ID NO: 212150 - DNA, 339 bp, Gossypium hirsutum
cccacgcgtccgaaaaaaaaaaacagtttccgaatcttttacagctcgtaaactcgttgaattgactcatggcttccgccgttgcttccgttgctaagaagaaaaccgctggctccaagaagcctaaatcagctccttcacaccctccatttcttgagatgatttcagatgcaatcgtttcgttgaaagagaggacaggatcgagccaatatgcgattgcgaaattcattgaagagaagcataagcaattaccggcgaatttccgcaaagtcttacttgttcagacgaggaagtttgttgcttccggaaagctcgtaaaagtgaaagcctcttttaagc

SEQ ID NO: 212151 - DNA, 411 bp, Gossypium hirsutum
aaaaactgaaaaaggggaaaaaaagcgtcgtcgtttttgcttcttcttcttctttttcttcttccctctctctctttctcagaagctcctctttcgttcttttgttcactaagtattgtaaaagatggccgacggtgaggatattcaacccctcgtctgtgataatggaactggaatggtgaaggccggttttgctggtgatgatgctccaagggcagtttttcccagtatcgttggtcgtccccgacacactggtgttatggttgggatgggtcagaaggatgcctatgtaggagatgaagcacaatctaaaagaggtatccttactttgaaatatcctattgagcatggtattgtgagcaactgggatgatatggaaaagatctggcatcatacattctacaatgaact

SEQ ID NO: 212152 - DNA, 439 bp, Gossypium hirsutum
cccacgcgtccggaattcgcagacatgacaaatgatgagttcagagctatgtatttgggttaccaaagcataagatctccatgtgagagcaacagcaaaggcttcgcatatgacaaatatcacaatttgccaaaaagcatagattggagaaagaaaggtgctgtcgctccaatcaagaatcaaggccaatgtgggagttgttgggcattctcagcagtggcagccatagaagggatcaatcaaattaaaacagggaacttgacatctctttcggaacaagagctcatcgattgcgacaccgactctatcgaccaaggctgcaacggtggacacatggtccaagcgtatgaatttattataaagaacggtggaatcaccactgaaaaagactatccatacacgggaagagatgacacctgcaagcggacacaaagctaaa

SEQ ID NO: 212153 - DNA, 435 bp, Gossypium hirsutum
aaacaatagcgggacgggaggatctctcagggtttaggtgatggcttcaaagcggatattgaaggagctcaaggatctccagaaagatcctcctacctcttgcagcgctggccctgttgctgaagacatgtttcattggcaagcaactattatgggtcctccagatagcccgtatgccggtggggtgtttctagtcaccattcatttccctccggattatccatttaaaccacccaaggttgcattcaggacaaaggtatttcaccctaatattaacagcaacggtagcatttgccttgatattttaaaggaacagtggagccctgccctcaccatatccaaggtgttgctgtcaatctgctcactcctgacggatccaaatcctgatgaccctttggtgccggagattgcccacatgtacaaaacggataggaa

SEQ ID NO: 212154 - DNA, 439 bp, Gossypium hirsutum
gccaactgcttcaatctcttctattaagtctatttgcgctctctccgatcactgctatggaggtgatcatccgcgatacggatctacactggcttcccacaagggcatgggccacctcgttcgcaagggcaccggtggccgatcttccgtcagtggcattattgctactgttttcggcgctactggattccttggtcgttatcttgtgcaacaactggctaaaatgggatctcaggtgttagttcccttcagaggttccgaggataaccctcgtcatctcaagttgatgggagatttaggacagatagtgccaatgaaatacgatccaagggatgaaaattcaatcaaggctgtgatggcaaacgctaatgttgttatcaatctcattggaagagagtatgagaaaggaaactttagctttgacgaagtgaaccattta

SEQ ID NO: 212155 - DNA, 439 bp, Gossypium hirsutum
cccacgcgtccgcccacgcgtccgtttcatcgcaaccaaaaaaatggcaatcccttcactttctcttctcttccttttcacctctcttcctcttttttcctcttcgccggttaaagatcctgaacttgtagttcaagatcttcacagggccattaatgtgtctaggaggaaccttaagtatctctcttgtgcaactggtaaccccatagatgattgctggagatgtgaccctaactgggagaagaacagacggaggctagccgactgtgcaatcgggtttggcaagaatgccattggtggaagagacggtaaactctacattgtcactgattctagtgatgatgatcccgtgaatccaaaacctggaactttaagacacgctgtgattcaagacgaacccgtgtggatcgtgttcgctcatgatatgaccattcaattg

SEQ ID NO: 212156 - DNA, 403 bp, Gossypium hirsutum
gctggacgggctttctgttcaggcgtggatttgacggctgcacaagatgttttcaagggtgacgttaaggacccggagacggatccggttgttcagatggagcaatgccccaaaccaatcatcggagctatcaacggccttgctattactgccggcttcgagatcgccctcgcttgtgatatgctggtcgctgctaagggagccgctttcgttgatactcacgccagatttggtatatttccttcatggggtttatcccagaagcttgcacgctttataggaccaaacaaggctcgcgaagtgtcgttggcagccatgcctttgtcagcagaggaagctgagaaattggggtttgtcaattatgttgttgaccaaaatgaagtgctgaataaagctcgacaac

SEQ ID NO: 212157 - DNA, 374 bp, Gossypium hirsutum
atgataaccaggtccctcaaaacgaccaccaccgtcgccgctggcgccgtctccgcctccaacaacccttctttgacctctcaagatttcccctcttctaagaaagcatctcccaagaagccgccaccgccaaccgtctccaaactgacccaaaaccgtggcgcttccacccacaaaccacctgttttcgactgcgattgtttcgactgctacacgagctactggtttcgttgggattcttcccctaaccttgagcttatccatcaaattattgaagctttcgaagatcatttaaccaaaggggaatcccagaagctttccaagaaaaacgcccgccccaaacgaagggactgtaacagcagaaccgctacacc

SEQ ID NO: 212158 - DNA, 439 bp, Gossypium hirsutum
cccacgcgtccgcccacgcgtccggagggctttgttcttatggaacaatgatcatattgagagcctaataagacagaaccggaaagttatacttccaattattttcccatccttggagaagaacgcaagaaaccactggaaccaggcagtgcagagtttgactttaaacgtccgaaagattttctccgccactgaccctgagctctttgaggagtgcttgcacaagtttaaggaagaagaagcacaagagaacgaggttaaatcaaaacgagaagcaacatggaaacgattagaagagattgctgcaatgaaagctgcaagtaatgaaccggtgcttatctcccctaaagcaactacccgtaagccatctggttaggaacaagtgattggcattttagttgcagatgttcgatgtcaagattggtattgcacgccatcg

SEQ ID NO: 212159 - DNA, 285 bp, Gossypium hirsutum
gctgagaggagcttgcatgatgcttttattattgttagaagagctctgaaaaactctacagtaattgctggaggaggtgcaataaatatggagataagtcgatacttgaggcatcatgcacgcacaataactgggaagtcgcaactttttataaattcttatgctaaagctcttgaagatatcctacggcaactgtgcgacaatgctggattagatgctactgatgtgctgagacaaattaacgcagaagcatgtgctttcatttggcgagggagcttcttacag

SEQ ID NO: 212160 - DNA, 429 bp, Gossypium hirsutum
gatggatgttgcaacagaggcacccaaagctccattgacaagtgaaaggaaggttcgaacagaccttgaagaacacatacctaaaccctatttggcaagggcatttgctaatccagatgtggaacatccacatggaacaccaggacgtgacaactatggaatgagtgctcttcagcaacacgcttccttttttgatcaagataaagatggaattgtttatccttgggagacctacagaggtatgagaaatattggtttcaatccaatttcgagccttgttattgcaattaccatcaatgtggcattgagttattggactctccctggatggctaccaaatctatattttcccatatgcatagatagaatacataaatgcaagcatggaagtgactcttcaacatatgacactgaaggaaggtatatgcc

SEQ ID NO: 212161 - DNA, 399 bp, Gossypium hirsutum
cttctatctccaatgttattaacattggacaactcttgcaatcggtaatctcttgtaattttctgcaattacatgccatgaatctttgtatgatcatatgtttgtttaaattaccgtattttttaggcactcgaggtggctggtcaagttgcagcaacatccatctctacatcacctctcccgtatgataccatggctagccaatgtgaagcattcggcacaggtacaaggaagaagctctccaactggttggcccatgaaaatcatcaaaatgaagctgccaataaaactatactgacaaccgatgctgctgacagacacgtgatgatgctgaagaagatttcaaacgggaatgcttttaacggtgctgtcttgcagctcgacccatgcttatcaatg

SEQ ID NO: 212162 - DNA, 374 bp, Gossypium hirsutum
attttattgttccttccttcgacgtctactgctcttgtgacctcgatttcaagtgaaacagaatgggtaaggaaaagactcacattaacattgtggtcattggccatgtcgattccggaaaatcgaccaccactggccacctgatctacaagcttggcggtattgacaagcgtgtgattgaaaggttagagaaagaagctgctgagatgaacaagaggtcattcaagtatgcttgggtgcttgacaagctcaaggctgaacgtgagcgtggtatcaccattgatattgacttgtggaaatttgagaccaccaaatactactgcactgagattgatgcgcctggacaccgtgactttatcaagaacatgattact

SEQ ID NO: 212163 - DNA, 437 bp, Gossypium hirsutum
cccacatttcatttcatcttttttctcttatcttttaagcttaaatcttttgtgcagatttccttatctttagttcaactttgtcccttttatatcagtgtctacacatatcatggcaaaagtagatgaaccacagccacatccaccaaaggagcagctgcccaacatttcttactgcattacaagtccacctccatggcccgaggccatccttcttggtttccaacattatcttgtgatgcttggaacgacagtgatcattccaacttcacttgttccccagatgggaggtggaaatgaggagaaagcaaaggttatccagactctactctttgttgctggtttgaacacattattgcagtcactgtttgggtctagattgcctgctgtgatcggagggtcttatacctttgtcccaacaacaatctcaattattc

SEQ ID NO: 212164 - DNA, 434 bp, Gossypium hirsutum
aaaccactagccctgcagcaccacctcaacagcctgcacaaatggcagctattcctactagtggacctaatgcaaatccattagacctctttccccagggccttccgaacatgggtgcaagtggtgctggggctggctctcttgattttttacggaacagtccacagtttcaagctttgcgagcgatggtgcaagccaacccacaaatattgcagcctatgcttcaagagttggggaaacaaaatcctaatctaatgagacttatccaagagcatcagggtgactttcttcgcctgatcaatgaacctgctgaaggtggagagggaaacattttggggcaattagctgaggcgatgccacaagctgtgcaagtcacacctgaagaacgtgaagccatagaacggcttgaagcaatggggttggatcgtgcaact

SEQ ID NO: 212165 - DNA, 404 bp, Gossypium hirsutum
  unsure (1)..(404): unsure at all n locations
aaaaaacacactccttttgaatctttnttttggtggtgcacagaaggattcgaaggcatttctccattgttgttttattcaattacaagctactttttgttttggtagttttgagagtggaattagggaaaaaaatggagaagagcactccaatgaggaaaccacacacttccactgcagatctactcacttggtccgagactcctcaaccggatttcaccgncttcgncgnacgctccacccgccctcaccagccgtcggatgggatcagaaaagtggtgtttggaggtcaagtgaccgatgaagaatttgaaagcttaaacaaaaggaaaccttgttctggatataaaatgaaggagatgactggtagtggtatttttgcagccgatggagaaaatgacgaa

SEQ ID NO: 212166 - DNA, 440 bp, Gossypium hirsutum
  unsure (1)..(440): unsure at all n locations
gcccctaaaaccgccgaaaattttcggcagctatgcactggcgaatacaggaaagctgggttgcctgttggttacaagggttgccaatttcatagggttattaaagattttatgattcaagctggagatttcctcaagggtgatggtagtggatgtacttccatttatgggctcaaatttgacgatgaaaatttcattgccaaacacactggtcctggtttgctgtcaatggcaaacagtggaccaaacaccaatggttgtcagttttttatcacatgtgcaaaatgcgagtggcttgataataagcatgttgtatttgggaaggtgctcggagatagtcttcttgttgttcggaagattgagaatgtggctacaggaccgaacaatangccaaaactaccatgcattatagccgagtgcggggaaatgtaaacgtgttc

SEQ ID NO: 212167 - DNA, 412 bp, Gossypium hirsutum
cggatctcttttgattgcacaaaaccaaatcatctttgctttgctattttggttcgttttgctaagaactggctaacgcacagcaaaaaatcgtggaggaaaccaacaagaaccaagcggtggttcttgccctctatgaagccttaaacacacgagacgtcaacaccgttcaccaaatccttgctcccgatctagagtggcggttccacggtccacccactcaccagtttttgatgcgcttactcaccggcgcttcatacgacgatcctttccttttcgaggtcgaccctgttttagtcaccgcctttggatccaccgtcatcgtcgaaggctgtgacaacagccgttcgatctcctgcgttcacgcttggactgttcgtgatgggacaatcacccaagtgagggagtattt

SEQ ID NO: 212168 - DNA, 415 bp, Gossypium hirsutum
cccacgcgtccgcccacgcgtccgggaaccatgaagcaacctgctgagctcgctcatgctgctaacaacggtctcgatattgcagtcaggcttctcgagccgatcaaggagcagttccctatcctttcatacgctgacttctatcagcttgctggtgttgttgctgttgagatcaccggtgggcctgaagttccattccatcctggaagagaggacaagcctcacccaccacctgagggtcgtcttcccaatgctactgagggagctgatcacttgaagcaggtgtttagtcatcaaatgggtcttagcgaccaggacattgttgctctttctggtggccacaccctgggaaggtgccacaaggagaggtctggatttgagggaccatggactaccaaccctcttatctttgaca

SEQ ID NO: 212169 - DNA, 403 bp, Gossypium hirsutum
ggaaatgcttctgaaggccaggtgtttgttgcatttaagattttgacttctgatgataaagtgaaagccattttggtgaatatatttggaggaataatgaaatgtgatgtgatagcaagtgggatcgtcaatgctgccaaacaggtggccctaaaagttcctgtggtggtccgtcttgaaggtaccaatgttgaccaaggaaagcggattttgaaggaaagtggaatgacactaattacagcagaagatttggatgatgctgcagagaaagccgttaaggcagccagcaaatgagaaatttaagatacgagtccttttttcttattgtttctcatctttcacagcattgatgagtttttcctttatttttcttttcatcaagcccatagaattttgttatgat

SEQ ID NO: 212170 - DNA, 432 bp, Gossypium hirsutum
cgctgctctcaatcccttccacttcgccatggcatcagagaagaagctttcgaacccaatgagggagatcaaagtccagaaacttgtcctcaacatctccgttggtgagagcggcgatcgtcttacacgtgcggccaaggtcttggaacagctcagtggtcaaaccccagtcttctccaaggctagatacactgtgagatcttttggaattcggcgtaatgagaagattgcttgttatgtgactgtgaggggggagaaagctatgcagcttcttgagagtggtttgaaggttaaggaatatgagcttttgaggaggaacttcagtgatactggctgctttggatttggtatccaagagcacattgatcttggtatcaagtatgacccttcaactggtatctatggtatggacttctatgttgttctcgaacg

SEQ ID NO: 212171 - DNA, 366 bp, Gossypium hirsutum
cccacgcgtccgcttctcttaatggattcacatctagagggacacttctcatctgaagaggcaactgtggtctttgatcttgcctcacaatgtttgcaatatgaaccaagggagaggccaaataccaaagatcttgtgactacacttgccccattgcaaaataaacctgatgttccatcttatgtgatgttgggaattcccaagcatgaggaggggcctcctactccacagcagccgttgtctccaatgggtgatgcctgttcacggatggatctcacagctatccatcaaattttggtaatgacacattacaaagatgatgaaggaacaaatgagctctcctttcaagagtggactcaacaaatg

SEQ ID NO: 212172 - DNA, 411 bp, Gossypium hirsutum
cgatgaaagaaaaagccaaggagccgcttctgtcagcaactcaattaagaactttattggacaagctaagtgtgatcgagattcctcttgtagagtctgaagacctcgagccccatagctcaactgaagttaagaaactgttttctattattaatagtttcgctgaattgcagaaccaaataaatttactttcttatgagaaggacgaactacagtctatgctttcacaacagagttttgaaattgagcatcttaaagaagaaattgagagacatgttagaaataagccagaattggaagtgatgaaaatggagctgcctgaggctacatttggcctggaaaagattattgttggattgggaggtaaagagttgattggaagcccaaattctgttggtatgaaagcacttt

SEQ ID NO: 212173 - DNA, 428 bp, Gossypium hirsutum
gaataccgccagcatccgtcaattgttagggtcaaccatcctactcgccctgacaaggcacgccgcttgggttataaggccaaacaaggttatgtggtttaccgtgtccgtgttaggaggggtggtcgcaagaggcctgttcctaagggtatcgtgtatggtaagcccacaaaccagggtgtcacccaattgaagttccagcgcagcaagcggtctgttgctgaggagcgtgctggccgaaagttgggaggtctcagagttgttaactcgtactggatcaatgaggactctacttacaagtactttgaggttatcctggtggatgttgcacacaatgctatccgcaatgacccaagaattaactggatctgcaatccggttacaagcacaggggacttcgaggacttacatttgctggtagaaaaaca

SEQ ID NO: 212174 - DNA, 345 bp, Gossypium hirsutum
cgtgaaataagttcacgtccaccgtacaccgagtatgtctcaacacgctggtatcgtgcccctgaagtacttcttcaatcatacctatacacttcaaaagttgatatgtgggcgatgggtgcaatcatggctgaattgttcaccttacatcctctttttcctggcacaagtgaagcagatgaaatttacaaaatttgcagtgtggtaggcactccaactgaaaattcatggccagatgggcttaatcttgcaagaactataaactaccagttcccgcagttcgatgggacacatctgtctgtgttgattccatcagcaagtgatgttgcaataaaccttattaca

SEQ ID NO: 212175 - DNA, 440 bp, Gossypium hirsutum
gtcaaatccaaggttcttttgccaatctatcaagcttacttggatgcaacttctcttataatgacttaacagggcccataccttctttaccgcgcctcgacaacatggccgtcagcagctttattgagaacaatggtctctgtggtggacctctcggtggttgtaatccaactccatcttccctctcgcttcagcccaatgcaaaagataaaggtactgggctaggcaaggttgtggccatagttgcagcagccattggtggagtttcccttgttttaatagtagttattttatatttcatgagacgaccagttgaaatagttgctccattgcaagaaaaaccttctactgctcgagtttcggacatttacttttcaccaaaggaagggttcactttccaggacttgcttgagccactgacaatttgatgagagctttgt

SEQ ID NO: 212176 - DNA, 365 bp, Gossypium hirsutum
cccacgcgtccggttgtgtccttccgtgagactgtccttgagaggtcttgcaggactgtgatgagcaagtctcctaacaagcacaaccgtctgtacatggaagctcgacccttggaggaaggtcttgctgaggccattgatgaaggtcgtattggtccaagagatgatcccaaggttcgttccaagattttggccgaggagtatggttgggacaaagatcttgctaagaagatttggtgtttcggccctgagacaactggtcctaacatggtggttgatatgtgtaaaggagttcaataccttaatgaaatcaaagactctgtagttgcggggttccagtgggcatcaaaagaaggtgcgatagc

SEQ ID NO: 212177 - DNA, 390 bp, Gossypium hirsutum
cccacgcgtccgaccaaatatatcaccggcagaggtggtttggctgagatcattctacaatgaaacggagaaagagcagaataagcacgcaattgcggtggcagctgccacggctgctgctgcagatgccgctgtcgccgccgctcaggcagctgtggcggtggtgaggcttacgagtcatggaagaggtaccatgttcggcggtggtggacatggaaagtgggctgccattaagattcaatccgttttcagaggctatctggctaaaaaagcattacgagctttgaaaggattagtgaaaattcaagcacttgttagaggatatttagtgagaaaacaagcttcagctacacttcatggcatgcaagcattgataagagcacaagctac

SEQ ID NO: 212178 - DNA, 382 bp, Gossypium hirsutum
ggaaaacccggcccgacccacgcgtgcgcccacgcgttcgaccaaatatattatcgttgaggtggtttggctgagatcatggtacagtgaaacggagaaagagcagaataagcacgcaattgcggtggcagctgccacggctgctgctgcagatgccgctgtcgccgtcgctcaggcagctgtggcggtggtgaggcttacgagtcatggaagaggtaccatgttcggcggtggtggacatggaaagtgggctgccattaagattcaatccgtttttaaaggctatcttgctaaaaaagcattacgagctttgaaaggattagttgaaattcaagcacttgttagaggatttttagtgagaaaacatgtttcatctacactt

SEQ ID NO: 212179 - DNA, 382 bp, Gossypium hirsutum
  unsure (1)..(382): unsure at all n locations
gaagaaaccattatttgatccaccgaaagaaaattactgatgaatattcggccttgcaatgtaggtctgagtgttctagttgttcggctgtttctatcctctaagtttcatgtctgatcttgacatccagattcctactgcctttggtactcatttctccctcgtatttatctcttatctccttgtattaacttgcctttagcatggaaattcaaacttgtcatcaactgtatgctgctagatccgtttgctgatgcaaatgctgaagacgctggtgctggtgccaaagaatacgttcacattcgtattcagcagcggaacggtaggaaaagcctgaccactgttcanggattgaagaaagaatttagctataacaaaattc

SEQ ID NO: 212180 - DNA, 249 bp, Gossypium hirsutum
cccacgcgtccgaaaaaattgcaccatgactaatacttccaatggtgttagaatcaaaacttggccaggtgctgaacctggcacttgttcgaacattcactttgaggatattactgtgaccaatgtcagttctcctattataattgatcagaaatattgcccatggaacaaatgcaaaataaatgaagaatcgaaagttaaactaagcaacattagtttcaaaaacattcacggcactttttcgcgtcc

SEQ ID NO: 212181 - DNA, 434 bp, Gossypium hirsutum
  unsure (1)..(434): unsure at all n locations
cccacgcgtccggctattcccacatccagaagagatgcaaaggaaattggctgccaaaggtaggcatatggtgacaattgtggatccgcatattaagagggatgagtcatttcacttgcacaaggatgcttcccagagggggtattatgtaaaggatgcaactggcaaggactatgatggttggtgctggccaggctcctcctcctacccagatatgttaaatcccgagattaggtcatggtgggctgagaagttctcctatgataattatgtcggttcaactccttcattgtacatttggaatgacatgaatgagccttctgtgtttaatggacctgaggtgacaatgcccagagatgctttacatgttggtggagtggaacatcgggagttacataatgcctatggatattacttncacatggcaacagctg

SEQ ID NO: 212182 - DNA, 383 bp, Gossypium hirsutum
  unsure (1)..(383): unsure at all n locations
gaatttgtcaagaaattagatgcaggcaagatgaaagggattgcattcattaaggatcccgatggttactggatcgaaatctttgatttgaaaaccatcggagatgttattagccgttgttcctgagttaagcacatcttgaagcttgctcaggaaacaaggatggcatgtgaaggttttatctcattgtcttggtttcagagtatggtctatattggtcgtagtcaagacggaaattaggcatatggagttttagaccaaagaaaaaaaaaggcctgtggagtttttgttaaagcatattgtattgttgtgtgtttcttatgatatttcaaacagagtcatgcggattgttatcattgtaatggacattatcnattatctct

SEQ ID NO: 212183 - DNA, 439 bp, Gossypium hirsutum
cttgctatggcttctttgcaaaggtcagcgagttcatccgattcggatccgcagtacgcaaacatcgatgagaggaaaaggaagagaatgctatcaaaccgtgaatcggcaaggcgatcaagaatgaggaagcagaagcggctccaagatttggttcaggaagtgaacgcattacagaaagataacagtcagatctctgaaaagatcggcgtcgccacccaatactacatcgagatgcaatcggccaataatgttttaagagctcaggcgatggaattgaccgagagattacggtctctgaattcggtgctgcaagttgtggaagaagccgacgggtatgccattgatatccccgagattccggagccgtggcagctcccctgttcgatacagccaattatggctttggttgatatgttcgagtatgatggatagactc

SEQ ID NO: 212184 - DNA, 406 bp, Gossypium hirsutum
cgttttaccaacgggagatgtgcttattgttaacggtgccaagaccggttcagcaggttgggatgatgctagggagccgaatttgaaccctgttttgtacaaattccaaactgatggaactggttccaagttcaccgtgcttaacccatccaacatccctcgcatgtaccactcctcatttgcactcctccctgatgcaaaaatcctcattgctggaagcaacacgaaccctggttacctcgatgatgcattgtttcccaccgaagttcgggtcgagaaattctcaccacattacttggacccgaacttggccatgttccgacaagagatcattgtcgagaagtccaataaccaagtgaagtacggccagaaatttacagtacagatccgtggaaatggcgaaatc

SEQ ID NO: 212185 - DNA, 372 bp, Gossypium hirsutum
gcgggattacccgctgagtttaagcatatcaataagcggaggaaaagaaacttaccaggattcccctagtaacggcgagcgaaccgggaaaagcccagcttgagaatcggtcgccatcggcgtccgaattgtagtctggagaagcgtcctcagcgacggaccgggcccaagtcccctggaaaggggcgccggagagggtgagagccccgtcgtgcccggaccctgtcgcaccaagaggcgctgtctacgagtcgggttgtttgggaatgcagccctaatcgggcggtaaattccgtccaaggctaaatacgggcgagagaccgatagcgaacaagtaccgcgagggaaagatgaaaaggacttgaaaagaga

SEQ ID NO: 212186 - DNA, 433 bp, Gossypium hirsutum; identical to SEQ ID NO: 195891

SEQ ID NO: 212187 - DNA, 420 bp, Gossypium hirsutum
ggctgtttcattttaccatgtcctcgctttcttcatttcatgcttgattttgtttttttcatgcaaatcaaaagccaaacgacgcttcaatctccctccagggcctcctggttggcctgttgttggtaatcttttccaggttgctcgctctgggaaaccattctttgaatacgttgatgatcttcgtcatcaatatggacccattttcactctcaagatggggactcgaaccatgattatacttggcgacgccaaactctgccatgaagcgtttatcgaaaaaggtgttgttttcgctagccggccgagggaaaaccccactcggaatatctttagctgcaacaagttcaccgtaaacgccgccgtttacggtcctgtgtggaggtctctgaggcgaaacatggttcaaaacatgttgag

SEQ ID NO: 212188 - DNA, 401 bp, Gossypium hirsutum
gcgagtctgatagagatgctgagaatgaaagtgactcaccggttacgccagaacctccagctcctcctttaagaagtgtgaacatgcttcagggatgtagaagtgtagatgaatttgagagattaaataagatagatgaaggtacttatggtgttgtttatagagctagggacaagaagacaggggaaattgtggcattgaagaaggtaaagatggagaaagaaagagaaggttttcctctgacctctttgagggaaataaacattcttctctcatttcatcacccatcggttgtagatgttaaagaagtagttgtagggagtaaccttgatagtatctttatggttatggaatacatggaacatgatctaaaagcgctgatggagacaatgagacaacca

SEQ ID NO: 212189 - DNA, 440 bp, Gossypium hirsutum
cggacgcgtgggcggacgcgtgggcggacgcgtgggcggacgcgtggggaaaaaaaaaaaaaaagggaaagcaagtttttatggctccccaagacaaaaatgcgagcaaaaccttgaagaaagctaacggtactggaagtacgagcagccaagaggtgcatttcaggggagtaaggaagaggccatggggtaggtacgctgccgaaatcagagatcccggcaagaaaagccgtgtttggcttggtactttcgatacggctgaggaagctgccagagcctacgacgcggcggcgcgtgagtttcgtggacctaaggctaagaccaacttccctttaccggatgaaaccaactgttacaagggccagaaccagcagagccctagccaaagcagcacggtggaggaatctggaagcccaacggtggagcgtggagtcaacacc

SEQ ID NO: 212190 - DNA, 362 bp, Gossypium hirsutum
ggctttgagcaacaatggttgtcattaacattttcgaaggcaatatttcttggcaatggtcttattgccattttgtctgggttgtttgggaacctacttgttggttcattgtcccttggaccagtggctccttttgatgctgctgcatgctttcttgccattgggatggctattattttatcatcatggacagaaaattatggagatgcctcagaaaataaggacctgcttacccagtttaggggttctgctgtagcaatagcttctgatgaaaaaattgctttgctgggtgccatctcttctcctgttgaaggctcaatgtacaccttttgtgttccttttgactccttgctttagcccca

SEQ ID NO: 212191 - DNA, 413 bp, Gossypium hirsutum
  unsure (1)..(413): unsure at all n locations
gacaaatccaagttccggatccttcttagttttgggcagcatggacgggagcttattacatctgaactggcattgcggatcttgtcaatcttaagcgaagagcagtttctacccaaaatggaccgagcttccttaaatggtacccttgaaaatgttgtcataaagatagtgccaatggagaatctgaacggtcgcaagcttgttgaagaaggaaatctttgtgaaagaagaaatgggagaggagttgatctcaataggaactggagtgtagattggggaaagaaggagaaggactatgatccatatgaagagaatcctggaattgctccttttagtgagcctganacccaaatcatgcggaaactngccatatcatttgatcctcacatatgggttaatgtacactctggaat

SEQ ID NO: 212192 - DNA, 426 bp, Gossypium hirsutum
cccacgcgtccgcccacgcgtccgtgcatttgcttgggagcccaagggtcacaggtttgctgttatacatggggataatccaaggcctgatgttagcttttactcaatgcgaagcactcacaatttgggtcgagttgcaaagctcacaactctgaaaggcaagcaagcaaatgctcttttctggtcacctggtggtcgtttcatagtacttgctggattgaagggtttcaatggtcagttggaattcttcaatgttgatgagcttgaaactatggcgactgctgaacattttatggcaacagatgttgaatgggatcccactggaaggtatgttgcaacttcagtgacttcggttcatgaaatggaaaatggtttcaacatatggtcctttaatggcaagctactttaccggatacttgaagatca

SEQ ID NO: 212193 - DNA, 379 bp, Gossypium hirsutum
atggaatgtaaaattgatccaaagcttccatatactgatttatcaactatgattcgacgccagaggcaggcaattgatgaaaagattagagagctctcgaactgtcaaatagtttatccgggacttgattttcagaagaaagaagctggtattcctaaaaaagtcgtcaaagttgaggatatccatggcttgaaggaagctggttggactcctgatcaatggggtcatactcgatttagagccttaattgtttttgcagacaacgcgacatatcataaacatttaactggtttcatgcgctcacttttgaagtcaatgcatgaccatgttgatgctgggccattcaaggaaccagttgatgcccgtgatgtccctgatt

SEQ ID NO: 212194 - DNA, 426 bp, Gossypium hirsutum
gaaaacttcatcaaacaaggaaaaaacttaacaagtaaaacaattgagagaagatgtcctggcaagcgtatgtagatgatcacttgatgtgtgatattgagggcaaccatctctctgccgccgctatcattggccaagacggcagcgtttgggcccagagctccaatttccctcagttcaagccagaagaaatcactggcatcatgaatgacttttctgaacctggatcgcttgctccgactggattgtaccttggtggcacaaaatacatggtgatccaaggtgaacccggagctgttattcgagggaaaaagggccccggaggtgttactgttaaaaagaccaacctgtccttgatcattgggatctatgacgagccaatgactccaggtcagtgcaacatgattgtggaaggctttgtgatta

SEQ ID NO: 212195 - DNA, 435 bp, Gossypium hirsutum
ggactttctaatacaacagattgtctaactcaatatcaatttgcaaaaccatcgttatggcatttcgccagagaagcttcaaaatactccaaatctgtccagattcttcaagatcttaacaacaagcacagataaaaataacaaggtatatgtctccactgcgcaagcacatggctatcctgtcactgccttccagtggcatccagagaaaaatgcttttgaatggggcttgcctatgattccacactcagatgacgccattgaagtgacacaacatgttgcaaactttttaatcagggaggctaggagatcgctgaataggccagctgctcaaaaagtgcttgacaaccttatttataattacagccccacgttttgtgggaaagctgggaggggtttcgatgaggtctacatctttacacaacgtcaagctcg

SEQ ID NO: 212196 - DNA, 426 bp, Gossypium hirsutum
taaacccttgcttttctttgtttcctcaatttattttcaatctacggcggtcacaatttgtacaggtttttaacaacagtcctgatgaaactgcatattttcgcgtgttgttaaacaaggaaaatattactaatgcagcagttatggctcaaccatcattaatatcatattcgttcaactcaccaccccagccagcattattagatgtggcttcgatttctgctgatcatattctcttgctggattcatatttcagtattgttgttttccatggtatgacaatagcacagtggcgcaacatgggttaccagaatcaacccgaacatcaggcatttgcacttcttttggaagcaccccaggttgatgcccaaattattattcgggaccgctttcctgtccccagattggttgtatgtgatcagcatg

SEQ ID NO: 212197 - DNA, 384 bp, Gossypium hirsutum
cccacgcgtccggtggactggcagatatcttaatggaagtgcttagtgcattggagcccaagactcccgagtctttgaagcaagatgtgattgttgacctcgttgagcaatgccgttcttacaaaaaacgtgttgttcttctcgtgaatcatacaacaaatgagcaacttttatgtcagggattagcgctaaatgatcaattgcagcatgttctttgccagcatgatgacattctgaaaggaaacaccagtagtgctaccacagcagtagcagaaactcgtgttgtgccgattgttaatgttaaccatgacgatgatgattctgaagatgactttgctcagctggctcacagatcgtcaagggataatgctcaaagacaggtcc

SEQ ID NO: 212198 - DNA, 390 bp, Gossypium hirsutum
  unsure (1)..(390): unsure at all n locations
cccacgcgtccgctcagatcttgaaaaatgagggagccaagtctttattcaagggtgctggagctaatatccttcgtgctattgctggtgctggtgtgcttgccggatatgacaagttgcagctcattgtgttcggaaagaagtacggatctggtggtgcttaatatctctttttcattttttacttgtttatgtttagatggtgatgaaaagctcgactacccagaaatttatttcggccaaaaacttcattaaataattctagtttagtcagagagatgagagagggtgttttaaaccctaactatttatattctcatatggaaattttgattaagaaatactggtggctaatgcccccagcccctgtcggatttttattnnnnaaaa

SEQ ID NO: 212199 - DNA, 382 bp, Gossypium hirsutum
cgcgtccgcccacgcgtccgggattgcaggtcttcaaggatggccattggatcgacgccaaatatatccccggcgcccttattattcacattggcgaccaaattgagatactaagcagcgggaagtacaaggcagtgctgcatcgaacaacagtagacaaggagaaaacgaggatgtcatggcccgtattcttggagcctccaggggaatttgtcgttggcccacttcctcaactcgttgatccccaacttcctcctaaatataagcctaagaaattcaaggactatagttattgtaaatttcacaaactaccccagtactgaacccaaattgcatgctctattatttttcttttttctttttttttttggtactatgtagt

SEQ ID NO: 212200 - DNA, 389 bp, Gossypium hirsutum
  unsure (1)..(389): unsure at all n locations
gaaaaattattttcccctttcaccataaattgaacgttgaactcgtcaaaaatcttcaaagcttcaacttttccaaacatcagcgagccctttcactccaaatttcatcgggcgaataatggcaacgtttgagctttaccggaggtcagcgatcgggatgtgtttgacggagactttagacgagatggtttcaagcagtactttaagccctgagctcgctattcaggttctcgtccagttcgataagtctatgactgaagccctggaaagtcaagtgaagagcaaggtttccattaagggacatctgcacacctatagattctgcgacaatgtttggaccttcatcttacaagatgncttgtttaagaacgaggatacttaggaaaacg

SEQ ID NO: 212201 - DNA, 388 bp, Gossypium hirsutum
  unsure (1)..(388): unsure at all n locations
gtgattgtgaacctgaaagaggaccaaatgttttgagagaaaaaaaatcacatggcaagtgagatgtctcttaggatggagagattgttcatgggagaccagcagatgcttcaagaagacttctctagtgatgagggtgaatctgttaactctcggagttgtttaatttttgagtattttgaacaagacactccttatagccgggaacccttagccaacaagattgcagatctggccttccaattccctgaactgaggacactaacaagctgtgatttgttgtcttccagctggatttctgtggcatggtatccaatttacagaatacctactgggcctacattaaaagatctagatgctngctttctgacttatcattatcttcata

SEQ ID NO: 212202 - DNA, 391 bp, Gossypium hirsutum
  unsure (1)..(391): unsure at all n locations
gtgaagcccactcctgttacccctgaagggaaaccagtggaagcagctccatctcccgtggaactcgaaattcagaaactctctgaggagaggaaggagttgctaaaagggtcttacagggatagacacttcaatgctggatcaatactgctagggtttggggttcttgaggctgttggtggaggtgtcaacacatggtttaggacaggaaagcttttcccaggtccccaattatttgctggagcagccattacagtgttgtgggctgcagccgcgggcctagtacctgctatgcagaaagggagtgagactgccaggagccttcacattgccttgaatgcagntaatgttatactttttatttggcaaatccccacaggtatagatatag

SEQ ID NO: 212203 - DNA, 363 bp, Gossypium hirsutum
cgaggacaagactgaatggggcaaggagattgggtggatttatggttctgttacagaagatattttgactggttttaagatgcatgctcgtgggtggatatcaatctattgcatgcctcctcgtacagcatttaagggatctgctcctatcaatctttctgatcgtttgaatcaagtgcttcgatgggctttgggttctattgagattttgctgagtaggcattgccccatatggtatggctacaaaggaagattgaggcttctggagagactggcatacattaacaccattgtttacccacttacctctattcctttgcttgcttattgtatgctttctgccttttgccttctgacaggaaa

SEQ ID NO: 212204 - DNA, 414 bp, Gossypium hirsutum
agggtatgtaataccaacaccagtcatccagcattttatccaagactatgagaagaatgaagcctatactggattccctattttggggattgagtggcaaaaaatggaaaacccagatttgcgtaaagcaatgggcatgaaacctgaacagaaaggtgttcgaatcagaagagttgatcccacagctccagaatctggggttttgaagtcatcagatattgtgctcagctttgatggggttgatattgccaatgatggaacggtatgggaaggattatgaatatgaagctccagtgaagctattggacaaactcttgcattcaatgctgcagtcacccgatgaacagcttgttgtggtgtctcaagttcttgtgtctgatatcaatattggatatgaggacattgttaacactc

SEQ ID NO: 212205 - DNA, 357 bp, Gossypium hirsutum
ggagatcactaatgttatgttccttggtgatcgcccaactgagaccatcatcaccaactgcgttaattgctgtaaggataatgttaaaacattcaacactgcaactgatggtgtggatggggctggttacatggccaagggcactgagttcgataactcagcaggacccgaatgtcatcaagcagtggcttttatggcatcctgtgataaggtcgtcatgtttaattgtcatttcactgggtaccaagacaccctttacgctcatagagacaaacaattttatagggattgtctcattagcgggacggtggacttcattttcaggaatgcggcgagtgtgtttcaaaactgtcagat

SEQ ID NO: 212206 - DNA, 305 bp, Gossypium hirsutum
gtggcacctactgagaaacatcctggaagtttattggaaggtttttcacaaagccaaatacatacactggcggtcaaagacacttgcatggacgctggtagtcttccaggagagtttacttttgagcactcttacagacaacgggtcgcatattgtacgcgaaccacctatgacaataactctgatacaaatgctattgcaatatacaacagcttgaagggcagaatcaattgtatgattgccactaatgactgcagcatgctctagtatgacacggatagatttccgcttatagaccatctcct

SEQ ID NO: 212207 - DNA, 391 bp, Gossypium hirsutum
ataaagcgtttgtctcagatctcagaagatggcccgtaccaagcaaaccgcccgtaagtctactggtgggaaggctccaaggaagcaacttgctaccaaggctgcccgtaaatctgccccaaccaccggtggtgtgaagaagcctcatcgataccgtcctggaactgttgctcttcgtgaaattcgtaaataccagaagagtactgagcttcttatcaggaaattgcctttccagaggcttgttcgtgaaattgcccaggacttcaagactgatttgcgtttccagagccatgctgttctagctctccaggaagctgcagaggcataccttgtgggtctttttgaagacaccaacctttgcgcgatccatgccaagcgtgtcacaattatg

SEQ ID NO: 212208 - DNA, 316 bp, Gossypium hirsutum
ctactgctttcggtggagagttccaatctgagcatactgctgatgtactgaggcatatgatggagatggcaataggtatggaactggatcagatgatggaacttgcaagttatctgatatcagaaatggccaccagttgcaagtatactatcagcaacacaatgataaggacgttccacttgtgacctcaattgcattctccatatccggaagactactttttgctggatactcaaatggagactgctatgtatagtacacattattggccacggttgtgttgaacttaggatccgaccagaaatcacatgagaac

SEQ ID NO: 212209 - DNA, 438 bp, Gossypium hirsutum
  unsure (1)..(438): unsure at all n locations
atttcgggcactgctcttacaatgattcccccacattctctatggatgacttcgaagcccttggaagttctactgtgatatcatcaagtcccccagttactggggagaggaaactgttttcaaatgtcacgaggcttggttttgctgctgcacatgattctccttcgttgaaaattgaggaaggaaatggtatgcataacaatgagggggcaaccgattccactggtgcagctggctctagaagttcaggcacacaatcatttgccaatgtgatatctagagcaaaggctcctgaaaatttacagacgcctaagatgaatgagataggaaagaaaggaaagaaaggagggcgggtccttttgtccacagctggtggtcgacgctattgacatttgngcctgtactctactcccaactctgtttagccatcataatcaa

SEQ ID NO: 212210 - DNA, 437 bp, Gossypium hirsutum
  unsure (1)..(437): unsure at all n locations
cccacgcgtccgcggacgcgtgggcttttctctccccaaacacctcattttcctgagaaaaaaaaacaaaaaagaagcgtaagtgaagaaggagaagaagaaaaagaaaatggcggaccagcttaccgatgaccagatctcttagttcaaggaggcctttagcctctttgacaaggatggcgatggttgcattactaccaaggaactgggaactgtgatgcggtcactcggacagaaccctactgaggcagaactccaagatatgattaatgaagttgacgccgatggaaatgggaccatcgatttccctgaatttctcaacctgatggcaaggaaaatgaaagatactgattctgaggaggaacttaaagaagctttcanggtgttcgataaggatcagaacggtttcatatctgctgccgagcttcgtcacgtta

SEQ ID NO: 212211 - DNA, 402 bp, Gossypium hirsutum
cccacgcgtccgcccacgcgtccgcccacgcgtccgcactatcgggggaaactcactgatggaactgtattcgattcaagttttgaaaggggtgacccaattgaatttgagcttggtagtggtcaagtaatcaaaggatgggaccaaggactactaggaatgtgtgtcggtgagaagcggaagttgaaaatacccgcaaagcttggttatggtgaccatggttcaccacccaaaatcccaggtggagcaacactagtatttgacacggagcttgttgcagtcaatgggaagccatccagcggtggggataatacaagtgaagatgagctataataactgatgataggcacttgtctgagcagctttatccttttactacgtttgttttccttttaaaatgct

SEQ ID NO: 212212 - DNA, 272 bp, Gossypium hirsutum
aaagcagatgatcagatatgatctactaagggagctgtataagatcaagtctgtagaggcggcagtcaacctatagcacctgaaaacgaagaattccttattcatgcaagccacttcgatactgacaatttcccgtctgtgtgttttggtgaacaaaatcgatgttgatggtggaatcagtaaattggtgtctttgaaaaacgtcctagcatggcgtgccttgaaaggaaatatcccctatttcgagacatctgccaaggaagtgagttacg

SEQ ID NO: 212213 - DNA, 345 bp, Gossypium hirsutum
aagaaacttaccaggattcccctagtaacggcgagcgaaccgggaaaagcccagcttgagaatcggtcgccatcggcgtccgaattgtagtctggagaagcgtcctcagcgacggaccgggcccaagtcccctggaaaggggcgccggagagggtgagagccccgtcgtgcccggaccctgtcgcaccaagaggcgctgtctacgagtcggggtactgggggtggtcgtaggggttactccaatggccgtggaggtcgaggcagtggaaggggtggcggagcctaccaaaatggtcgtagccaatattatgatcagccgggcaacaattactattcgaggagcta

SEQ ID NO: 212214 - DNA, 349 bp, Gossypium hirsutum
ctttgatcatcttcattctagcctccacaatatttgtcagtgcaatatcactaggtggtgttggcatatcaaacatgatcgggaaaatcgagcggcacgagtacatgggattcgagaacctgtgcaagtacgaaagctgatatctcaggttattttatctctcaattgatccacctccttaagtctcctgtaagttaggctagattgcgttttggggaagaaagaagatggtcaataattttccattctttacacaatccccatttttcactttccgttccgttttatatttatgagatacatttattgacaatattcagaaattgtctagatgaatggaattatagct

SEQ ID NO: 212215 - DNA, 386 bp, Gossypium hirsutum
cccacgcgtccgagaacccttaaacctaccggaaacacaatgatccgaatcgccaaaaaccccaaacctctaacaactctgactcaccaattcctccaacgctgcaccgtcagtggaaccgccaaaggcaaatccaaactcaaagccggccaacctttgaaacgctccaaaatctccactaaaaaaggaaaaggcggcgcttctctcgacgattccctccccaaaggcggcagaatccccgacgagaagcaaaaactctacgaccaatgcctcaatgcacccacaccggtccgtcacctctcaccgaaagagcgagcccgcgaagccgaacgagaaaaattgggattaataagcaaggagcggcaacgggaaatggagattttgaa

SEQ ID NO: 212216 - DNA, 359 bp, Gossypium hirsutum
cttgacttatgtgatacttgtgagtggcttgaatttcccggtgcacttggaaacggaggatggtatgccacacatgtaacattagctgatggtaagttcatggtgtttggcggtcgggatttcccgacatacgaatttgttcctccagaaggacaataaaacactattaatgaagtgatcaatttcccattcttgaaagaaacacacgatcccattgagaacaatctataccctttcgttttcctttcaactgatggcaacctcttcgtttttgccaataattgttcggttcttttgaacacccaaacccacacgattatccacgagtacccagtgcttcctggtggtgcttataatta

SEQ ID NO: 212217 - DNA, 423 bp, Gossypium hirsutum
cccacgcgtccgataaattacctagcgcattaacaccataatttgagggtagtgtttaacttgagagagctttacagcaatggaaacaaaagtgcagagcacagatatgttatattctttaccagttgagaatgtccaagctcttgcatccaagaacctcaacagaatcccatccagatacatcagaccagaggtcgaattcgatgtggtttccatagatgaatcccagcagattcctgtaattgacatgagcaaactagaccatgatgctgaacagaaaaaactccaccaggcttgcaaagactggggtttcttccagttaatcaaccatgggatagcagatgaagtgattgagaaaatgaagaccgatacacaggagttcttcaactttgcctttgaggagaaaatggcttattcaagata

SEQ ID NO: 212218 - DNA, 423 bp, Gossypium hirsutum
cccacgcgtccgcccacgcgtccgcccacgcgtccggttcttcaaaactgatacctctacttcccttgctttcctcttatgtatttcttcttcatttcctcttcaatctagttcctttctccattcgatctggttttgtttctcagcatattctgggcctttatttctacgtataactcttccttcctttttagcgattctgttgccactgtatcgcgagagcgtttctcgattttggtgtatacttgaatatgacactcctagatctatttagtttctacttaatatcgtgaatatatgttccaatacatgatcgatcttgactctctgacaaacatttctttattattgtgagggaatcaccttctatgatgatcttttgcccatcttgttctactcctatttggacagcttttcgacata

SEQ ID NO: 212219 - DNA, 340 bp, Gossypium hirsutum
aaaatatctgctcctcttagtttccctttttgtcccttgtttatttgatactcccccctcatggctgccgctgatgtcgagttccggtgcttcgtcggagggctcgcatgggccaccgacgaccgggcccttgaagaagccttcagtgcgtttggtgaaatcgtcgaatcgaagatcattaatgatcgtgagactggaagatcccgaggctttggattcgttactttccgtgacgagaaagctatgagggacgcgatcgaaggaatgaacggtcaaaatcttgatggaaggaacataactgtcaacgaagcccaatcgcgcaaaaatggaggcggtggcg

SEQ ID NO: 212220 - DNA, 343 bp, Gossypium hirsutum
cccacgcgtccgctgcagttccgcaagtttactacaatgcacagcaaggggtcaagaatgtcgtgactgaaactggtgctggccaatggggtagttcattggcctttgcctgcagcttgttcggtcttggctgtgaagtgtggcaagttcgtgcttcttatgatcagaaaccatatcggaaattgatgatgcaaacatggggtgcaaaggttcatccttctccatctgacattacccacgcaggtcgtaaaatacttcaaatggatccttctagccccggaagtttagggatagctatttcagaagctgtagagattgccgctgcaaatgatgataccaagta

SEQ ID NO: 212221 - DNA, 425 bp, Gossypium hirsutum
ggtgaaccttacctcgttcagaccaatgtgtacgtcaatggtgtaggcaacagagagcaaaggatgaacctttggtttgaccctaccaaagactttcactcttattccatcctctggaaccagcgccaagttgtatttttagtggatgagaccccaataagagtgcacaccaacatggaacacaaagggattccttttcccaaagaccaagccatgggcgtatatagttcaatatggaatgccgatgactgggccacacagggtggcctagtgaagaccgattggagccatgcaccattcattgcctcctacaaagggtttgaaatcgacgcgtgcgagtgcccggtttcggtagccgccaatgaaattgccgataaatgtaggagcagcggcgagaagaggttctggtgggatgaaccgacaat

SEQ ID NO: 212222 - DNA, 424 bp, Gossypium hirsutum
ctcggctctcgcatcgatgaagaacgtagcgaaatgcgatacttggtgtgaattgcagaggcccgtgaaccatcgagtctttgaacgcaagttgcgccaaagccaaaactgttagaaggttagtgttcacatcatcagctggaactattgatgttgcagaacaacaaaagccctgttatgatgaaacctgttggagcgaccttgaattcattcaggccaaaaaaatgactggttggatgtattttgtctccaagacaatggcagagcaagcagcctggaaattcgctaaagaaaataacattgattttgtcagcataataccacctttggtggtcggtccatttattatgcaaaaaatggcggccagcctcataacttcacttttttctatcaccggaacagttttttgtttattttacaggtt

SEQ ID NO: 212223 - DNA, 347 bp, Gossypium hirsutum
cccacgcgtgcgctttgataagagactctcaatacattgttgaagaagtttctgatgcacaagttaaccagattgttagtggggctttagaccgtttacattatgaacgtgatccttgtgtacaattcgatggagaaaggaaattgcgggtttatttacacagagaaagagaagaagaagactttgcggatgatggtacttcatctactaagaaatggaagaggcctaaaaaggatactgctgaacaatctgatcaaggagctgttattgcggcttttcatgcagccggggatcagttgggatttgatgatgataaaaagatggagacagagtgtgaggatagacaa

SEQ ID NO: 212224 - DNA, 342 bp, Gossypium hirsutum
ggaaaacagaggtaaatagttaagcaagttaagaaatggcaaaagttcaacagatcactcttgtttccttggcgatctgcctttcaaccctcctcggcttcgctgccgccgccaaccctgaagagaagttcatcgttgaaggccgagtttactgcgacacttgccgtgttgaatttgagaccaaaatcagcaaaccaattaagggcgcatcagtgaaattggaatgccggaacattaccaacgagaaaatcgtgtcgcacagccaagacgtagttaccgacgaagccggaggatacaagatcgaggtgaaaggtgatcacgaagatgagatctgtgaagtga

SEQ ID NO: 212225 - DNA, 343 bp, Gossypium hirsutum
gaaacaacatgtatctctttccaggtattggccttggaactcttctgtctggctctaggatcatttcggatggcatgctacaggctgcagcagaacgtctggctgcctacataacagaagatgaagttctcaagggcatgatattccctccaatatcaaagataagagatataacaaaggaggtagcagcagctgtggtgaaggaagctgtagaagaggatctggcagaaggatatcgtgacattgacgctagagagctccaaaaaatatgtcagaacgaggaggaagttttagaatatgtggagaacagcatgtggagcccagaatatccaactctagttta

SEQ ID NO: 212226 - DNA, 409 bp, Gossypium hirsutum
cccacgcgtccgggaaaaagcagggactgaattcaagaaactacgacaaagcttttgcttcaaggcaagaccattgccggatttttataaagaaagaacacctaaagatcagattcaaaaggttccattgacaaaacctgaatcacctggcataggaagaaaatctactccctgcaaaacaagcattgttgaaagcaaaagctctgttcctccccatcggaagtcttcgattaagaacagttgcttcatgcatgtctcagaaaagaaaaaccgaacttcagctcgttctcttgcttcacgaattgcaatgtctgctcatgagaacacatctccaaatatccagcataaagtttgactaaattgtagaatttggcatgtccattgtatgaatcccacaatactactcaat

SEQ ID NO: 212227 - DNA, 362 bp, Gossypium hirsutum
gtagaaatgaactgaattctagtaatgctgataagaaacaatatgaacttgacattgaccgcatcatacgtggggatgacagcagaacaacacttatgattaaaaacatacccaacaagtacacttcaaagatgcttctggcagccattgatgaacattgtcgaggaacttatgattttatttatttgccaattgacttcaagaacaaatgcaatgtgggctatgcgttcatcaacatgattgatccgcaacagatcattcctttccataaggcatttgatggcaaaaaatgggagaagttcaacagtgaaaaggtggcgactcttgcttatgctaggatccaaagaaaggctgctcttatt

SEQ ID NO: 212228 - DNA, 389 bp, Gossypium hirsutum
gaaaatttcactgcgagattcatatcgggtttcaactcttttcctccaatttgcacttgaagtgatggataccggatcaaaggtgaagaaaggagccggaggaaggaaaggcggcggtccaaagaagaaaccggtttctcgttcagtgaaagccggattacagtttcccgtcggtcgaattggccggtacttgaagaaagggcgatactctcaacgtgtgggaacgggtgctccagtttaccttgctgctgttcttgaatacctagctgctgaggttcttgagttagctggcaatgctgcaagagacaacaagaagaataggatcattccaaggcatgttctattggcagtgaggaacgatgaagaacttgggaagcttttagctggtg

SEQ ID NO: 212229 - DNA, 359 bp, Gossypium hirsutum
cccacgcgtccgcccacgcgtacggcttattaatgctgtggattactgccatagcaggggtgtttaccatcgagacctcaagcctgagaatttgctgctagatggtaatggagttcttaaagtttcggattttggtttgagtgctttacctcagcaagttcgagaggatggattacttcacacaacatgtggaacaccaaactatgttgctccagaggtgatcgacaataaaggctatgatggagctaaggcagatttgtggtcatgtggtgtgattctctttgtcttaatggctggttacttgccttttgaggactccaatttagtctctctgtataaaaagatatctaaggctgact

SEQ ID NO: 212230 - DNA, 321 bp, Gossypium hirsutum
gtctttggaccacctccctccctccgagcagctctgttacgttcattgcaacatctgcgacactgtccttgcggttagtgttccttgcacaagtttattcaagactgtgacggttcgatgtggccactgcaccaatcttttgccagtgaacatgcgtgggttgcttatgccctcggctaatcagtttcatttgcctcacaattttttcactccttcccataatcttctggaagagatctcaaatccttctcccaacattttgctgaatcaaggcaacaccagtgacatcaccttacccactcgtggagtagttgatgagct

SEQ ID NO: 212231 - DNA, 337 bp, Gossypium hirsutum
ctttcagacaaacaagtccacgagccccttattcactctctctctttctagatataaaaatatttagctttctttttcctttacatctatagatccgtcggttccttacctttcctacgatgccatctcgccgtagaacccttttgaaggtcatcatcctcggcgatagcggggtagggaagacgtctttgatgaatcaatatgttaataagaagtttagcaatcagtataaggcaacaattggggctgattttttgacaaaggaagtgcagtttgaggataggcttttcaccttacagatctgggatactgctggccaggaaagattccagagctt

SEQ ID NO: 212232 - DNA, 332 bp, Gossypium hirsutum
cgaagaccttctttacagcaaagttgagaatgaagaacacttatgtgtgctcaatgaccgcaacaagccaattctgttcacaatggcaaggcttgatcgtgtcaagaacttaaccggactctttgagtggtacggcaagaacgcaaagttgcgtgagttggctaacctcgtaattgtaggtggtgataggcgaaaggaatctaaagatttggaagagaaggccgaaatgaataaaatgtttgagctgatcgagaagtacaacttgcacggccaattcagatggatatcatctcatatgaacagaatccgaaatggtgaactataccgataca

SEQ ID NO: 212233 - DNA, 342 bp, Gossypium hirsutum
gctgagaggagcttgcatgatgcaattatgattgttagaagagctctgaagaactctacagtagttgctggaggtggtgcaatagatatggagataagtcgatacttgaggcagcatgcacgcacaatagctgggaagtcgcaactttttattaattcttatgcaaaagctcttgaggttatcccacggcaactgtgcgacaatgctggatttgatgctactgatgtgctgaacaaattaaggcagaagcatgtgcttccatctggcgagggtgcttcttacggagtggacatcaacactggtggaatagcagactcatttgcaaactttgtctgggagcca

SEQ ID NO: 212234 - DNA, 382 bp, Gossypium hirsutum
cttcctcttcctctagaggggataattaataaattactgtcgggcgaaaaaaaagggtaagagatggctcgattaatgttaatatcgatgctatttctcttggcaggatcaatgcttatggtccagggcggagatcccaccctttttttcgaatggaacgtcacctatggcaccattgctcccttgggagtgccagtaaagggtattcttattaacgggcaattcccgggaccaaatcttaactctaccaccaacaacaatatcgtggtcaatgtgttcaataaccttgatgagccattccttgtaacatgggacggcgtgcagcatatgaagaactcttggcagatggtgttctgggaaccaactgtcctatcccccctgg

SEQ ID NO: 212235 - DNA, 369 bp, Gossypium hirsutum
cccacgcgtccgtaaaaacacctttttgaggttttgcgatggcatcgaagcggatcttgaaggaattgaaggatttgcagaaggaccctcctacatcatgcagtgctggtcctgttgctgaagacatgtttcattggcaggcaacaatcatgggtccaccagacagtccatattctgggggtgttttcctagtgactattcattttcctccagattatccctttaagcctcccaaggtggcatttaggacaaaggtattccaccccaatattaacagcaacggaagcatttgcctagacatcttgaaggagcaatggagtcctgcactaacaatttccaaggtattgctatcaatctgctctttgctta

SEQ ID NO: 212236 - DNA, 412 bp, Gossypium hirsutum
gttttctcaagccatcgttaccgcaacttgacctcatctggacagacgtatccaaaggagtatgcaaagcgaattcaagaggagtggaaaattctggagagtggcttaccagaaacaatatatgtgagagtttgtgaagcaaatatgggtcttttaagagctgtcattatgggaccttctggtactccataccatgatggccttttcttctttgattgtttcttccctccaaaatatcctaatgagccaccgatggtttattactattccggcggtctccggttaaatccaaatttgtatagctgtggtaaagtatgcctaagccttttgggcacttggcatggtgaagagactgagatgtggggttcaagccaatgaaccatgcttcaagttttgggttccatacaagccc

SEQ ID NO: 212237 - DNA, 376 bp, Gossypium hirsutum
ggctaacgctggaccgggaactaacggatctcagttcttcatttgcacggctaagactgagtggctcgacggaaagcacgttgtgtttggacaagttgttgaaggcatggatgtggtgaaagccattgagaaagttgggtctagcagtggaagaacttccaagcccgttgttgtcgctgactgcggacagctctcttagagaagaaaaagagaactatgtgttaagctgggatgttgtctaatgtctagaatatttaatgtctgtcatttagactcttttatggtgctgtttttatcgtcactgggtttggtggttttcaagaacttgctttatgtagtttttatgattaactaccattaaataagatactctttt

SEQ ID NO: 212238 - DNA, 373 bp, Gossypium hirsutum
gtttctagttgtcgcagatgaatcagttggcaggagtgtgcctttcgtttttcttgaacgggtgctagatgattttaaacaacgatatggtgcaagtataagaaatgagggtccccatcctttagctgatgatgacgatgatgacgacttatttgaggaccaatttagcattgcatataatcttgacagagaatttggaccaaggcttaaggagcacatgcaatattgtatgaaccatccagaagaaatgagtaagctctcgaagttaaaagctcaaatcactgaggtgaaggggattatgatggataacattgagaaggttttggatcgcggggagaagattgaacttctagtggacaaaactgagaactta

SEQ ID NO: 212239 - DNA, 354 bp, Gossypium hirsutum
gaacaaaggagaagataatcatggaaccaagagtgggaagaagaacagcaacaagaaaaacaataacaacaacgacaataacaacgaaaacaaggatgggaaaagtgctgctgataaaaggtttaagacactgccaccatctgaatcattgccgagaaatgaaactgtcggcggctatatttttgtctgcaacaacgataccatggaggagaatctcagaagacagctctttggtttgcctccacgttaccgtgattcagtccgggcaataactccgggcctgcctctgttcctctacaactactccacccaccaactccatggtgtttttgaggctgcaagctttggtggaac

SEQ ID NO: 212240 - DNA, 258 bp, Gossypium hirsutum
gatgatacaaatgcttattagctgtttttgtcggtccagccatggataaaagcaagacaggctgctgaatcaggatctgctacatacaaataactgcacatggggctggagaaatgcttactctaacactgtttgaacacaccgggttatgactgtacgactcgcattggatattctgaataacatgaaaagacacgtgctgcaacactgtacgagaatgatatcattgctgcagccgctctttttagtaatagaaac

SEQ ID NO: 212241 - DNA, 385 bp, Gossypium hirsutum
ggcatcttgaatgtctctgccgaggacaagactactggccagaagaacaagattaccataacaaatgataagggtcggttgtcgaaggaagaaatcgagaagatggttcaagaagccgagaagtacaagtccgaggatgaggagcacaagaagaaggttgaagccaagaattcattggagaactatgcctacaacatgaggaatactatcaaggatgagaagattggttcaaagcttgacccggctgacaagaagaagattgaagatgccattgatggagcaatccaatggttggatggcaaccagctagccgaggctgatgaattcgaggataagatgaaggagctcgagagcatctgcaatcctatcattgccaagatgtacc

SEQ ID NO: 212242 - DNA, 333 bp, Gossypium hirsutum
gtcagtgttatgatggctgcttgtgatacattccgatctggtgctgttgagcagttgaggacacatgcacgcagactccagattcctatatttgagaaagggtatgagaaagatcctgcaattgtagcaaaggaagcaattcaggaggccactcgtaatggttcagatgttgttcttgttgatacagctggtcggatgcaggataatgaaccgttgatgagagccctttcgaagcttatatacctcaataatccagaccttgtcttatttgttggagaggcactagttgggaatgatgctgttgatcagttatcaaaattcaatcagaaattg

SEQ ID NO: 212243 - DNA, 347 bp, Gossypium hirsutum
tagaaatcactttatttcttggtgtcaaaatcaaaacaaaataggatatgtggtataaaaacggggaatctattctcttctttttccaaaaaaatgctcttggagattgtgtaatgcttactcttaaactctttgtttacaccgtagtaatattctttgtttctctcttcatcttcggattcctatctaatgatccgggacgtaatcctggacgcgaagaataaaaaagggagagttccttgcttcatttttagaaatggtattaggatttgatctattccactaccaaaaaccgaaacggaaagagagggattcgaaccctcggtacgaataactcgcacaacgga

SEQ ID NO: 212244 - DNA, 345 bp, Gossypium hirsutum
acgtggacgcgtgggcggacgcgtggttctagctcaatttgattcgtaaaacttatcgtgaagcttatggggaagatctccttaagtctttggatgacgaactttcaagtgactttgagcgagctgtggagctgtttactttggaccctgcagagcgtgatgcatttctggctcatgaagctacaaagaggttcacatcaagccattgggttctcatggaaattgcttgcactatgtcttcacatgaactgttcaatgtgaggaaggcgtatcacgatctttacaagaaattccttgaagaagatgttgcgcaccataccaagggagactaccgtaagctttttg

SEQ ID NO: 212245 - DNA, 409 bp, Gossypium hirsutum
cccacgcgtccgcccacgcgtccgaaagttttcacagtctcttcctatcaaaatcaaacccaaaatatatgatttttcttcttatttccttcaaagtttcagttagtcagattctttcaagtatcaaattaagtcatgcccaccaacgaaaacttctcaggtgtttcgaattgctatgttttcaagagccaattgcaggagtatgcacaaaaggtgggtcttccaacacctgtatacgagactttcaaggaaggaccgtcccataaaccttctttccgatcaactgtaactgtaaacaatgttaaatacgattcgttaccccgggttttttaatcgcaaggctgcagagcaatcggcagctgaaggggctctcttggagttgttcaaagcggggaagcttatgaaagca

SEQ ID NO: 212246 - DNA, 343 bp, Gossypium hirsutum
gctaaacgtagattggaagcattggacaagaaggatgcagagcgaagaagaacagcagaggtgaaaaataaccttgaagaatatatatatgctacgaaagagaagcttgaaacatctgaagactttgaaaaagtatcttcaaatgatgaacgccaatctgttatcaaaaagcttgatgaggttcaagaatggttgtatactgatggtgaagatgcgagtgcctcggagtttcaagatcgtctaaattcattaaaagcgacagctgatccaatatttttccgatttaaggagttgactgcacggccagaagcggtagaagttgctcgacaatattttttctgac

SEQ ID NO: 212247 - DNA, 391 bp, Gossypium hirsutum
gccgtgtcttgcgggtttcacttcacagctagcaaaggatctgcaagatggaaagcatgaatagcttttggcagttaggagatgatctccggggacaatctaaagcctcagaggatcacaaatggttgatggttgcctccaaactggctgaacagacgaggataaagggtgagcgaatgaacaatctcgatctttcaaagggtccagctgaagtaaggacaagggataaatttgggttccatgaagacaacaaattcgagaaccttaacttcaatatgttgaacttggactccaagatcggagatagtgtaagcaaaagtaccttccgaaatggtatttacaacaccgatgctgtttaccagaaaaataacagccacaacattgggaacct

SEQ ID NO: 212248 - DNA, 400 bp, Gossypium hirsutum
cccacgcgtccgtataaaccctacggttctcgttttttctcttagctcaatacagatatttggtctgtttggaggattttaatcttactgagtgcatctgttgcagttaggtgcagggaaaagagcgatggcggcagttcccggacagttgatttgggaggtagtgaagaagaacaattgctttttggtgaggcagtttggaagaggaactgctagccttcagttcagcaaagaacccaacaatctctacaacctccactcctacaaacactctgggttggcaaacaagaaaacagtcaccattcaaagtgggggcaaagaccagtctgtgctgctagcaaccaccaaagctaagaagcagaacaagccttcggccttgcttcacaagttcctcatgaaa

SEQ ID NO: 212249 - DNA, 345 bp, Gossypium hirsutum
ggggacccatcagtataacgttacggcaccgcttgctatgccgtgttgttagagatgctgctaaaaatgagtacgaaacagaagaaccttttcttgttctaaatgaggttacaattgaccgtggaatatcatcatacctcacgaacctggaatgctattgcgacaattcctttgttacatgtgtgcaaggggatggtttaattttatcaactacatctggtagcactgcatattcattggcagctggaggatcaatggtccacccacaggttccctggtatctttgttcacaaccaatctgtcctcattcattattcctttcgacccctgatatttgcctgagca

SEQ ID NO: 212250 - DNA, 364 bp, Gossypium hirsutum
gtggatactctaatctcgggtgagattgattgtgctgatttcagagctaagttgcttgctaacaagagcaagccagctataatcaacgttaacataggtctctctctctctctccatatatataacaaaaagtcatgggttttgttaaaatgagagaaataaccagataacattgtttactgtaggaacaactgtcaaaggtgctgtagatgacctggatcttgtgatacaaacccttgaaggatgtggtttttcacgtgataggttctacattcattgtgatggagctttgtttggactcatgatgccttttgtcaaacgggtaagttaatcgcgtgtatagctttgttttaacgtggatttg

SEQ ID NO: 212251 - DNA, 347 bp, Gossypium hirsutum
cccacgcgtccgcccacgcgtccggcatgttgaaattgacacccccaatcccctcaacacctgtcgtgtgaaagagcaatccatgaagaggtgttccacagtttcctcctcagctcgacaaaccgggcacaatgtgttagcagccagatggcgtatttttaaattgtacatagtgggtaggaagccattggcaattctccacataaagattcgaagtttacttggtaatttaagctctcataggtttgtaaagaaattcgaagcaatttcactatgtattctattacccccctctgtagtaagtcattgatagccactttttactgtataaactcctatgttttcgc

SEQ ID NO: 212252 - DNA, 418 bp, Gossypium hirsutum
caatgccattacaaatgctgttgagatttatgtcactccaagtggtgcagttcactttacggcctcaaataatgactgtggagtcagagattttgatatggagaaatatcagctttccaagcattttcattttctttggcctgtcaatcatacttctctgagccctgatgggaaacttctaataatagttggagacaaccctgatattatgttggtagactctgatacagggaagactgttatgcccttgcgtggacacttggacttttcatttgcgtcagcatggcatcctgatggtgtcacttttgcaactgggaaccaagacaaaacatgccgaatttgggatgttcgaaacttgtcaaagtcaattgctgttctaaagggaaaccttggagcaatacggtccattcgctacaca

SEQ ID NO: 212253 - DNA, 408 bp, Gossypium hirsutum
gtttgttaacaagaatgcaagagatgtcattggattaccatttcacagtggaacaggaagttggatcagcaacacatgctttctttggttttaatgggacggctggtatatggagaattgcggccattaatgaggcaggtgggtggaaggatcggaccaccgtggaggacatggacctggcggtccgagcgagtctccggggatggaaattcgtttacctgggtgaccttcaggtgaaaagtgaacttcctagtactttcaaggcatttcgattccagcagcatcgatggtcttgtggccctgctaatctcttcaggaaaattgtgtgggaaatcattcaaaacaagaaagtgaaattctggaagaaagtatatgtaatttacagcttcttcttcgtccggaagatca

SEQ ID NO: 212254 - DNA, 336 bp, Gossypium hirsutum
cccacgcgtccgcccacgcgtgcgcccacgcgtccgcctcacaactacggattcatccctcgtactctttgtgaagacaatgatcccatggatgtcttgatcattatgcaggaaccagttattccaggatgctttcttcgcgctaaagctataggtctgatgcctatgattgatcagggtgagaaagatgacaagattattgctgtctgtgctgatgatcctgagtatcgtcactacaatgatatcaaggaactcccacctcaccgcctggctgaaatccgtcgcttctttgaagactataagaagaatgagaacaaagaagttgctgttaatgac

SEQ ID NO: 212255 - DNA, 352 bp, Gossypium hirsutum
ggtcgagcacgcgccacgcagaattctaaaaattgctaaagaattattataaaaaaagacagaattgaacaaccgggcaggcgttgttagtgcattggatacggctttacaatggaattctcttttttctttcatcgaaaaaagaaaaagagaaaatgtagagagcgtctattagacccagatcactaaataatccaattaccacccttcttttttttttcggaaaagttcaaaaatactatgatggctccggtgctttatatatttatttcgtctgtgattcaacattcccaaagtttatttttttttcaaaaaaaagaacgaaaaaaaatagtcgcggttttttcgaccc

SEQ ID NO: 212256 - DNA, 396 bp, Gossypium hirsutum
tgctaataagaagcctgtcactgatcagcagtatcagaaagctgcttacccgaatactcaaggaaattctggagagaacgatccgaataataccacaatttttgttggtggtttggatcctagtgtttctgaagaccaactaaaacaaatatttagccagcttggtgaggtagttcatgtaaaaattccggctaacaagcattgtggttttgttcaatatgctaacagggccagtgcggaacaatctttatctgttttgaatggtactgttttaggaagaagaaatgttaggctttcatggggacgtagtccttcagcaaacaggttcaacctgaacaggcccaatggaatactggatattatggatatgctcaaagatatgaagcatatggatat

SEQ ID NO: 212257 - DNA, 383 bp, Gossypium hirsutum
gaagaatagctaaaaatagctaaagaataataagaaaaaaagatagaattgaacaaccgtacaggcattttttgtgcattgcatacggctttacaatggaattctcttttttctttcatcgaaaaaagaaaaagagaaaatatagagagcgtctattagacccagatcactaaataatccaattaccacccttcttttttttttcggaaaagttcaaaaatactatgatggctccgttgctttatatatttatttcgtctgtgattcagcaatcccaaagtttctttttttttcaaaaaaaagaaagaaaaaaatagtctttttttttcgtactcttttattttataacataaatattgttataaatattgttaatagcctct

SEQ ID NO: 212258 - DNA, 376 bp, Gossypium hirsutum
  unsure (1)..(376): unsure at all n locations
atttaatcagtcgattgtttaagcaaagtaatgatgaagcttaatttgctctttggtcttacattggccatcctcatctcaggggctcaaatggcgaccttcaccgtaaaaaacaactgtcagtaccctatctggccggcaacccttgtcggtgatcctaatttgccacaattgcccaagactgggttccagttagaccctcaagcacaagattcccttaacgttcctagcccatggaaaggcaggctctgggctcgaacacaatgctcaacctcaggcggaaggttcacttgtgccactgctgactgtgggtccgaccagatagcttgcaatgganaaggtggagccccttcggcaaccctggccgagttcacta

SEQ ID NO: 212259 - DNA, 387 bp, Gossypium hirsutum
cccacgcgtccgcggacgcgtgggatcttctgagaaggatttagtgagagcagaagaatattgtgggagagcaatcttggcaaatccaaatgatgggaatcttctctccatgtacgctgatttaatctggcaaactcataaagatggtcctagagctgaaacttactttgatcaagccgttaaatctgcccctgacgactgttttgtactagcatcatatgcacgatttctttgggatgctgttgaggaagacgatgaagaggaaaaggctggcgaaaaatttagtaatggatcagatcaaagttttttccatggagctcctcctttggctgctgcttcttaagcctcgtggtgtgaaataacttgtatttaagcttttttggactt

SEQ ID NO: 212260 - DNA, 422 bp, Gossypium hirsutum
ggaccggtactgactggccgggccgacgcacgcggggttttcggtgttcttgcaatgtcaaggtccatcggtgatagatatttgaaaccatggattatcccggaaccggaagttatgtttattcctcgagctagagaagatgaatgtttgattttagccagtgatgggttgtgggatgtgatatcgaatgaggaagcttgcgaggtggctcgacggcgaatcctgctctggcacaaaaagaatggggttccatctctggtggaaagaggcaaaggaattgacccagcggcgcaagcggcagctgaatacctttcgatgctggccatccaaaaaggtagcagagacaacatctctgtaattgttgtagacttgaaagctcaaaggaagttcaagagcaaaacataatcagagtctcaaccccc

SEQ ID NO: 212261 - DNA, 384 bp, Gossypium hirsutum
agacatcctaaaacatatatttgcatatatcattgttgtctttgtcattgtttttccaagaaagcacaatgaatgtagacgaggaggtggagagactcaaggaagaaatccaaagactaggccagatccaatcagatggttcttacaaggtcacattcggggtgctatttaatgatgatcgctgtgcaaacatctttgaagcactagttgggacactaagagcagcaaagaaacgaaaagttgttgcatatgatggtgaactactgctgcaaggagttcatgacaatgtggaaatcattctcaaagctacaacaccagcagcagcccagagtagcaactaatgcagttctaaacaaataattgcaattatagttttgcagcaaa

SEQ ID NO: 212262 - DNA, 372 bp, Gossypium hirsutum
ttttggggtcctttttcttattttcccgtactttctctagtgtttcattcttttaatgtttgagttacctcctttaggatttgggatctgggtagttctcagctttagtagtttacatttgctgattctcagaagttgtgttttttttttggggggtatagagaaatagatcatggcaaaagtagatgaaccacagccacatccaccaaaggagcagctgcccaacatttcttactgcattacaagtccacctccatggcccgaggccatccttcttggtttccaacattatcttgtgatgcttggaacgacagtgatcattccaacttcacttgttccccagatgggaggtggaaatgaggagaaagcaaa

SEQ ID NO: 212263 - DNA, 384 bp, Gossypium hirsutum
caagccttggtgtggttgaactcactgtggctcttcattatgtcttcaatgcccctagagacaagatattgtgggatgttggtcatcagtcttaccctcacaaaatcttgactgggagaagacataagatgcataccatgaggcaaactaatggattggccggattcacgaaacggtcggagagtgaatacgattgcttcgggactggtcacagttcaaccacaatctctgcaggcttggggatggctgtgggaagggatctgaaaggtgaaaggaatcatgttgttgctgtcataggtgatggtgctatgactgcaggacaagcttacgaagcaatgaacaatgccggatatcttgattctgatatgattggtattcttaatg

SEQ ID NO: 212264 - DNA, 363 bp, Gossypium hirsutum
atctttgggatcaaagttggcaaactgctattgtgatggagaatcctagtttcactggggggcttgtctgtgccttgtgcatgtcctcaatggtacaatgcaaatacaactgccccgtatagtacgatccccatgatatgcaagaacgataccaacgatgggtggcccgtcatggccgaaagtacaagagcaagaacgaatgggcattgcggttctggatatacaaatccaattcttagttcattgattgtgtcaattcacagaacctatcattcaatgtgaccgataacgaattcgcatacatgacaaatgatgagttcagagctatgtattttggttaccaaagcattagatctccatgtg

SEQ ID NO: 212265 - DNA, 378 bp, Gossypium hirsutum
ataaatttcatggcaaggggcctggcaaaatgaagcaagaaaagcgaatgaagcaatatcaggaagagttgaagctgaagcaaatgaaaaattcagatacaccttcactttcagtggagaggatgagggaagctcaagctcagctgaaaacaccctaccttgtccttagtggtcacgtcaaaccagggcaaactagtgatcctgcaagtggctttgctactgttgagaaggattttccgggaggcttgacgcctatgcttggtgatagaaaggttgagcatttcttgggaatcaagcgcaaggctgaggcagggaattcaagcacaccaaagaagcctaaaacttgaaaattgtaagatgtatggtttgggtatgatg

SEQ ID NO: 212266 - DNA, 283 bp, Gossypium hirsutum
cccacgcgttcggtcgggattacccgctgtgtttaagcatatcaataagcggaggaaaagaaacttaccaggattcccctagttacggcgagcgaaccgggaaaagcccagcttgagaatcggtcgccatcggcgtccgaattgtagtctggagaagcgttctcagcgacggaccgggcccaagtcccctggaaaggggcgccggagagggtgagagccccgtcgtgccctgaccctgtcgcaccaagaggcgctgtctacgagtcgggctgtttgggaatgc

SEQ ID NO: 212267 - DNA, 387 bp, Gossypium hirsutum
cccacgcgtccggtgaagccaccttcaccgggaacaccgtgtcctccaccaccacctccggcacaacaaacatgccccatagacactctcaagctaggtgcatgtgtggacgtgttgggtggcttagtacacatcggcataggtagcagcgccaaagacacttgctgccctgtactacaagggctgttggatttagacgctgccatttgtctctgtactacgatcaaagccaaccttttgaatatcaatattataatccccatagctcttcaggtcctcatcgactgtggcaaaactccacctccagggttccaatgtccagcacaatgatgaaaaacataaaaaccccatgtttttttttctttcgaaagaacaaatattttcatg

SEQ ID NO: 212268 - DNA, 384 bp, Gossypium hirsutum
cccacgcgtccggccaacaataagttctataataaagttccaaatggatcgttcctctcattcagtctcagttgctttctttcttctgctgattcttttaaccacagagatggggcctatgtcagcggaggctaaaacatgcgagactaaaagcggtaaattcaaggggatgtgcatgagttctaccaactgtgctagtgtttgcaaatcagagcctggttttgatggtggacattgccgaggttttcgtcgtcagtgcgtttgcactaagccttgttaaaccactaagctttgttagatcagtaatctattatatttcattgtcacgaagatttccccttttttttttgcttatcatgcattttgtgcttgagagttgagaga

SEQ ID NO: 212269 - DNA, 386 bp, Gossypium hirsutum
caaggatgattcactttgtacttttaattagtcgacaagggaaagttaggttgacaaaatggtattctccttattctcagaaggaaagaacaaaggttatccgtgagctcggtggggtgattctcaatagagggccaaaactttgtaattttgtggattggagaggatttaaatttgtttataaaagatatgctagtctttacttctgcatgtgcattgatcaggatgacaacgaattagaggttctagaaatcattcatcactatgttgagatacttgatcgatactttggcagtgtctgtgaattggatttaatcttcaacttccataaggcctattatatattggatgaactcttacttgctggtgaacttcaagagtcgagc

SEQ ID NO: 212270 - DNA, 376 bp, Gossypium hirsutum
cccacgcgtccgaaaaggccaacccgatccggcaccaggatgttgttcgggtgctaaagggcttgctaagcaagctaacaccaaactagataggcaaggaatatgcgagtgccttaaaggtgtattgccaaaaataggaccatatgaccctaaaagattccctcttattgcccagaaatgtggtatcaatactttaattcctccaatttctgccactactgattgcaccaaggtgtgaagagtgaagtggggggaatgtgaaaatgaagagcatgccaaatgaataaaaaaatgggcagaacttttcataaattgatctgtaatcaaccccttgtattgcacttaagttatgattaattaaataataattacaatt

SEQ ID NO: 212271 - DNA, 375 bp, Gossypium hirsutum
cccttggattctcaggtggtcagcattgcgaaattccaagggggtggtgcattcaatgtcattccggattctgtcaccattggtggcactttcagggcattttcaaaagaaagctttcttcaactcagacaaaggattgaggaggttatatcgaaacaagcaagcgtacaaagatgcaatgcaacggtgatcttcgacgaaaggtccatgtaccctgtgaactcaaacaacaaagagttgcatgagcatttcagaaaggttgcaggggagattttgggctctgagaacattatagaaatgcagccgcagatgggaggagaggattttgcattcttttcaaagtcgatccctggactttttttctttcttggaatg

SEQ ID NO: 212272 - DNA, 381 bp, Gossypium hirsutum
cccacgcgtccgaaaaaagggattttcgtcgtttgtggatcactcgaataaatgcagtaattcgtggagtgggggtatcctatagttatagtcgattaatacacaatctgtacaagaaacagttgcttctgaatcgtaaaatacttgcacaaatagctatcttaaataggaattgtctttatatgatttccaacgagattagaaaataaggagatcggaaggaatccaacgaaatgctttaaatgaaatggggttccctcgagaatgaactcggggaaagtagagtagaaattaatatgataaaaaattctgattctgataaggtcatcaaaacaagatgagcgaaaacgctcaataaaaaaaagattttttttctttccc

SEQ ID NO: 212273 - DNA, 390 bp, Gossypium hirsutum
ttcgatcgttggatccatatttttccttccattcaacccaggactatatttggtgacaacgatgtctcctgcatccaagtcgaagtccaaagataaaaaatccagcaaggactctcagaaggcttttgcaaggccttctggacctgctaatgcagctagtggtgttccagctagtgcttacaatccacttttgggaacattccataccattgaaacagcaccatcatcatctgcttcacctcttcagagcaatggtcgtttccgaaacatagacgacacagatgagcatttgggaggctcacttggagctggggttgactttgattcaatatctaataatggtagctggtcaggtgaatcagaagagcacaaagagaaaacttcaaatct

SEQ ID NO: 212274 - DNA, 388 bp, Gossypium hirsutum
ggatgctgacactcttggattgactggccatgagcgctacacaattgatcttccaagctgtgtgagcgaaattcgacctggccaagacgtcacagtggctacagacagtggcaggtcattcacctgcactgtacgatttgatacagaggtggaactggcatatttcaaccacggaggcattctgcagtatgtcatcaggaacttgatcggctcaaaacagtgattacgctgtgtaatttatggttgcggagtttgacgaaatatttcataaccgtggttgctgcatatttaaatcgggtttgtgaactgaaactattaagtttgcagcaaaagttagttgaataaaaaattggagacagaggtgggttgggattcaaggcaaggcaat

SEQ ID NO: 212275 - DNA, 392 bp, Gossypium hirsutum
cgctcatcgaacttccgatttgctttttgaaacgcaagaaagaagagaaatctcaatggcgccgaaagccgagaagaagcccgctgagaagaagcctgccgagaagccaacggaggagaaaaagtccaccgtcggcgagaaagccccagcggagaagaagccaaaggccggcaagaagcttcccaaggaaggtccaggggccggagataagaagaagaaagaaagccaagaagagtgttgagacctacaagatctacatcttcaaggtcctgaagcaagtccatccagatatcggtatctcaagcaaagctatgggaatcatgaacaagttcatcaacgacatcttcgagaagctggctcaagaatcttcaagactggcaaggtataacaag

SEQ ID NO: 212276 - DNA, 376 bp, Gossypium hirsutum
cccacgcgtccggagaaggtgggatggaatcttcatcaatgtactatttaaaggctcgtttccactttaacaagaatcagtttgctgatttgatgctaattggtggaattgtagcaaccatttcacagttgtttatcatgcccttactagtatctcccataggagatggaaggttgctttcaataggactctttgcctcctgtgtatatgccattctttacagtatagcctggtcagcttgggtcccatatgcagccgctgcagtgtctactgtgatggtctttgcaccaccatcattacgcagtattgcatcaaaacaagctggccccagagaacaggggaaggctcaaggatgcatctccggaataatttcttt

SEQ ID NO: 212277 - DNA, 384 bp, Gossypium hirsutum
gtcttgaccttgcaggtcgtgatctaaccgatgccttgatgaagattcttaccgagagaggttacatgttcaccaccactgctgaacgggaaattgtccgtgacatgaaagagaagcttgcttatgttgccctggactatgagcaggaactggagactgccaagagcagctcatctgttgagaagaactatgagttgcctgacggacaagtcattactattggagctgagagattccgttgcccggaagtcctcttccagccatctttcattgggatggaagctgctggaatccatgaaactacctacaactctatcatgaagtgcgatgtggatatcaggaaggatctctatggtaacattgtgctcagtgggggttcaacta

SEQ ID NO: 212278 - DNA, 388 bp, Gossypium hirsutum
  unsure (1)..(388): unsure at all n locations
ctcaaagttgctggaatcaagcaactacattacgagacgacaagctatcaagttgttgggagatattttgttggaccgctcaaatgcagctgtcatgaccagatatgtgagctcaaaggataacttaaggattcttatgaatcttctaagggaatcaagcaagagcattcaaatagaagcttttcatgttttcaagttgtttgctgcaaagcagaataagcctccagacattgttagcatactcgttgccaataaaagcaagcttctacgattgtttgcggatttcaagactaataaagaggatgaacagtttgaggcggacaaggctcangttgtgagagaaatcgctgcccttgagcttagagacggcccatagtgaactctagtg

SEQ ID NO: 212279 - DNA, 390 bp, Gossypium hirsutum
attttacagttggggggaggaatcaggaggcaggcttgggcatggtgtggaagcagatgttcccaaacctaagcacatagatactctcaatggcacgaaatttgaatcagtagcatgtggggagtatcactcttgcgctgttacagtctctggggatctttttacatggggtgatggaacacacaactcaggtcttcttgggcatggaactgaagtcagtcactggatccccaaaagggttagcaacatggaaggtaaacatgtcttatatgtatcctgtggaccgtgtcatacagctctggtgacatgtggcagccagttgttcacatttggagatggatcttttggtgccctaggccatggggatcacagtagctcaaacattccccg

SEQ ID NO: 212280 - DNA, 384 bp, Gossypium hirsutum
cactttcgaaattgataagaattcaattactccgtgttttttagagagacagaatttgctaaggctagagaggtgtttttaccaaattggtgtatgaaactaaattagtcatacatggtgatactgttaatgcatttcaaaggggtgggtgccaaatccgttacttccgatatacatagagagaatacacagagataagcatgggagtgattcagcaacatatgatactgaaggaaggttcatgccagtgaacctggagaacatgttcaccaagtatgcactcacaaagcccgacaatttatcactcaaggagttgtggcagatgactgaaggaaatcgggccgctttcgactatcttggatggttggcatccaagttggaatg

SEQ ID NO: 212281 - DNA, 385 bp, Gossypium hirsutum
gtcgatatcaaataaaaaactttatgtttcttctccaccattatcttccatgctcacagtttggttatgtccctaagtaacatcttcatttatcattctttttgttttcttctcatcctttccctctatataaacccattctcaacctctctccattcccataactttttctctcttcttatcacatcaacaaaatcatgaggagcatttgtgttgtgcttgttatctctttgcctttccttctcggcattgcccagggtttcgatttccacgacaatgatttaacgtccgaggatagtttgtgggatctatacgagcgctggcggagccaccacacggtttccaggagtcttgacgagaaacatcggaggttcaatgtgttcaa

SEQ ID NO: 212282 - DNA, 383 bp, Gossypium hirsutum
ggagggtaatataatcggcaaaggaggtgccgggattgtttacaagggaattatgcctaatggtaatcaggttgcagttaaaaggttaccagcaatgagcctagggtcttctcatgatcatggattcaatgctgagatacaaacgttgggcaagattaggcacaggcacattgtgagattgttgggtttttgctcaaatcatgagacaaatcttttggtttatgagtatatgcccaatggtagtttgggagaggttcttcatgggaagaaagggggtcacttgcactgggataccagatataagattgcagttgaagctgctaaggggctttgctaccttcatcatgattgttcccctttgatagtccatcgagatgtgaaat

SEQ ID NO: 212283 - DNA, 384 bp, Gossypium hirsutum
aaacacctgtaactcctcaaacccaatccacaggatcgaagacactgtttgttggaaacttatcctttcaaattgaagatgctgatgtaaggaatttctttaaaggtgctggtgaagtcgtcgaagttcgtttttcctctgatgctgaggggaactttaagggctatggacatgttgaatttgccactgcagaggctgcacagaaagccctggagttgaatggggaatatttgatgaaccgtgctgttagacttgatttggctcgtgaaaggggtgcatatacaccatacagtggcaatgggaacaattcattccagaaaggtggaaaaggtcaatctcgaacaatattcgtcaaaggacttgatgcatcactcgatgaggata

SEQ ID NO: 212284 - DNA, 377 bp, Gossypium hirsutum
gtgatgtccctggaataaaaaggttacttccatccgggtggagggaatcagaattttttaataatatttatgaactagtgggagtgccggttgttaccgtgcaactccgatacaatggctgggtcacagagttgcgggatctacaacgggcaaggcaactgaggcaagctataggccttgataatcttctgtatactccagatgcggatttctcctgttttgcggacctagctctcacttctcccgaagattactacatcgagggacaaggttcattgctccaatgtgtattgacaccaggagatccgtacatgccgttgccaaacgacgaaatcattaagagagtatcaaagcaggttttgactctatttccatca

SEQ ID NO: 212285 - DNA, 298 bp, Gossypium hirsutum
cttttcaaaatgaagatcaagccttacattccagatttcaagctagcttttgaacatttctgcattcacgctggaggaagagctgttttggatgaactggagaagaatttgcagctctccgaatggcatatggaaccatcaagaatgactctcttccgatttggcaacacctcaagcagttctctgtggtatgaattggcatattcggaagctaagggtaggattaggaaaggggacagaacatggcaaatagcatttggttctggattcaaatgcaacagtgctgtatggaaagctt

SEQ ID NO: 212286 - DNA, 391 bp, Gossypium hirsutum
aacacacttgctaatattgctacttggagtggtggctctcgccactccctcttttggtacctatgagtctcccaactatgggaagccccctactcctgtttataaacctcctaaggtgaaacccccaccttatgaacatcctgtttataaacctcctaaggtgaaacccccaccttatgaacataagccccctgtctatgaaccaccaaagaaggaaaagcctgagcctaagccaccagtttatacacctccaaagaaagagaagcctgaacccaaaccaccagtatatgaacctccaaagaaggaaaagcctgagcctaagccaccagtttatacaccaccaaagaaagagaagcctgagcccaaaccaccagtttatgaacccccaaag

SEQ ID NO: 212287 - DNA, 382 bp, Gossypium hirsutum
ttggatcatctttctgcaagacaacatttgaggatgttttccctgctgaagcaacaagcattgaggagtatctgcagcaggaagattggcaaaaggaaaaacgggtcttcttatagagtttgagcagaatttcaacattacctaagacaaacatgattgataaaagtagtggtggtattcgttcaggtcaaatggttcccatggcttctagttctcatgtttcttctggtccttctgccaatgggcttctacctttagccgacaagccagttgttgagaaaaaagtgtcggtatatgcggaagttgttagaaatctgaacaatgcaagacaacaaggcttgccatttaaagcctgtgccatcagcgcttgtggtaattttgc

SEQ ID NO: 212288 - DNA, 387 bp, Gossypium hirsutum
ctcaagcgagcttgtatctcacggcaatcgtctcctctctcttgtctcgtccatttttggtgatactgaagtcaatgtttatgggaaagtcccattgatgcactcgtggtacaaaacccgggcacacccttctgaactgactgccggcttctataacacggcctcaagaaatggctatgaagcagttgcagagatgtttgcaaggaattcatgcaaaatcatcttgcctggaatggacctgtcagatgagcaccagccacacgatgctctctctagccccgaatcattacttgcacaaattcgaacaacttgcaacaagcacagggttgaggttgccgggcagaacctggcctctggagctcctggtggtttagagcagattaagaa

SEQ ID NO: 212289 - DNA, 371 bp, Gossypium hirsutum
gaaaaacttgcaaaagaaatacaagatcgtctgatgaagattgttaagaaaagagaagacgaagctgtgaatggagaagtccatagcttcggcaatgattttcttggattacttctaaatgtctatcatgattcggatgagaaaaacaggatttcattggaagacttggtagctgaatgcaaaacattctattttgctggacaagaaactgttaattccttacttgcatggatagtcttgcattggcaatccatggagattggcaagaaaaagcgagaagagaggtggttgacatatttggtaaccaaaatccacattttgaaagcatcgccaaactcaaaataatgaccatgatcatcaatgaaactcta

SEQ ID NO: 212290 - DNA, 382 bp, Gossypium hirsutum
cggacaagatcgccaacatctcaaacacgttccttccacaacaccccttactttgggtgaacaccatgaaccaaattcccaaatggaactagttggtcactcgattgtcttgacatcatatccttattcagatcctcagtattgtggaattctgacttcatatgggccacaaatgatggtgtcaccacatctatatggaatgcatcatgctagaatgcctttgcctcttaaaatggaagaggagcctgtttatgtaaatgcaaagcaatatcatggcattttgaggcgaagacagatacgtgctaaagctgaacttgaaaagaaaagccattaagttagaaaggtaaaaatggtattcttttagggggctttcccccccatt

SEQ ID NO: 212291 - DNA, 328 bp, Gossypium hirsutum
cactaattgactaatacccagaggccagatattgtttatcggggtcgtctgattctatgagcaggctatgggaacttggtcagcaacgctgtgtgcattcatatgctgtgcatacggattctgtttgggcacttgcaagcaccccaacctttagtcatgtttatagtggtggtagagatctttctttatatttgacagacttgacaactagagagtcttttgctttgcacaaaggagcatacgattttgcagctggcattgcatgatgatagtatatgggttgcaacgacagattctttggttcatagatggtcttgttgaggaaaaa

SEQ ID NO: 212292 - DNA, 301 bp, Gossypium hirsutum
catagttctaccgtcatggagagattacctgctatgcgttattctctgatttatgggggagcttacccatagtctcttttttgtcgttgttttcctgatcccaagattatggatttatgatgtgggaatgaaaaagaagggtgtggatgatttccctttttgtgtcacttggtcttctggtgagaaggaaaatgtctcttgtgaatctttggaagcatgctcgtattgctttcaacaagtattttttcaagtatgctgtgaatgattccttactcctgcttgttcgtgttcacccattcca

SEQ ID NO: 212293 - DNA, 373 bp, Gossypium hirsutum
gccagggatgagcttcatcgtatgctaaatgaggacgagctgagggatgctgtgcttcttgtgtttgcaaacaagcaagatctgccgaatgctatgaatgctgctgagattactgataagcttggccttcactcccttcgtcagcgccactggtatatccagagtacttgtgccacctctggcgaagggctgtatgagggactggactggctttccaacaacattgctaacaagggttgagggttggttgaattccagtcatatcttcaggcagctatccttattattttctggttccttttttaagttttacaggaaatgtatcagattgtgttatataattaatatatattcgccgtactactgaaattag

SEQ ID NO: 212294 - DNA, 345 bp, Gossypium hirsutum
caatcaataccctctaattttaaagctaagagatttaagttaacgaagcatttggtcggtgcgaagtaatggaaactaccggaaaagtaaagaagggagccggaggaaggaaaggtggtggcccgaagaagaagcccgtttcaaggtctgtcaaagccggtctccagttcccagttggtaggatcggccgttacttgaagaaaggaaggtattcacagcgggtcgggaccggagccccggtttacttggctgcagttcttgagtacttggccgctgaggttctggaattggctgggaacgctgcacgtgacaacaagaaaaacaggatcattccaaggcacgtgc

SEQ ID NO: 212295 - DNA, 370 bp, Gossypium hirsutum
gtacccttcttcaacaccaatctcctctctctctctctctctctctattttgtttgatagaatacccagaaaaccccttcagtcttctagctctcaatttctttttattttataccttcttatttcatagatccagggtgctcttcttcttagcagttcacattggcatagataaaggaccgtacggtcagatctaagccgtattctagcgatgtctgttaccggttctcagcagaaatgcaaggcttgtcagaagaccgtttatcctgtcgaacttttgtcggctgatgggatcccttaccataagtcttgcttcaaatgcagtcattgcaaagggacactaaaattgggtaattactccttgatggaa

SEQ ID NO: 212296 - DNA, 390 bp, Gossypium hirsutum
cagcttttgaagacggggacttgaagctcttcgagtcaagagcagtcacccattacattgctcatgaatacagcgacaaggggacccaactcttaattcctggctctaacaaggatatggctgtcttacaattatggaaggaagtggaagcccaccagttcgattctccatgttcaaaaatagcctgggaggcgttttacaagccattaatgggcatggttaccgactccgcggtcgtggaagaaaatgaaggtaagcttgccaaagttcttgacgtgtacgaggctcgattgacacggtcaaaatacttggcaagtgactgcttcaccttggccgacctgcatcaccttcccaccattcaatacttgttggctacaccttcgaagaagc

SEQ ID NO: 212297 - DNA, 323 bp, Gossypium hirsutum
atcaaaacaacacattgcaaagagaaagggaatattatcaaaagaacccaaccatggcattggcaggaacaacccagaaatgtatggcttgtgacaaaactgtgtatttggtcgataaattaacagctgataacagggtttatcacaaggcttgttttaggtgccatcactgcaaaggtactttgaagcttggcaactacaattcctttgaaggagtcttgtattgcaggcctcattttgatcaacttttcaaaagaactggtagtcttgagaaaagttttgaaggtacaccaaagattgcaaagccagaaaaaacaattgat

SEQ ID NO: 212298 - DNA, 377 bp, Gossypium hirsutum
cccacgcgtccgcccacgcgtccggtgaggttgcatcttgtttctctgtcatgctaaattgtcactacttatataatttgatctttgcacttattgaatagtatccaaaggagtatgcaaagcgaattcaagaggagtggaaaattctggagagtggcttaccagaaacaatatatgtgagagtttgtgaagcaaatatgggtcttttaagagctgtcattatgggaccttctggtactccataccatgatggccttttcttctttgattgtttcttccctccaaaatatcctaatgagccaccgatggtttatttctattccggcggtctccggttaaatccaaatttgatagctgtggtaaagatgcctaacctt

SEQ ID NO: 212299 - DNA, 332 bp, Gossypium hirsutum
cggacgcgtgggcttgtttcaagtacccagatatgagtcgtcacccggaagttctttgggctcagcgctctgataaggtatatcttacgatttctttgcctgatgcgaaagacatttctgttaaatgtgaccctcaggggctgtttagcttctctgccatgggagtgcaaggagaatccttcgatttcagtttggagctttttgggaaaatagttcctgagggttgcaaaactaatgttgggttaaggaatataatatgctcaatcatgaaagaagaaacagggtggtggaaaagattgttaaagtcagaagagaaacccgcgccttacatc

SEQ ID NO: 212300 - DNA, 349 bp, Gossypium hirsutum
  unsure (1)..(349): unsure at all n locations
cccacgcgtccgctatttttggccttctcttggccactgtgtcttcttttaacaacaatcaacatatataaccatattatatacatacatacacaagttctttccttctaaggaagccatgactggcaaagaaatcctccacaagatgaaggagaaagttcaagaaaaagttggcttaaacccttctagtaatgctgaatctggaaaagggaagagtaagatgtcgaagaatataacgcatggttatcatttagtgaaggggaaagcgaatcatccaatggaagactatgttttcgcggagtntaagcaagtcaatggcagtgagctcggtttatttgccatatttgat

SEQ ID NO: 212301 - DNA, 149 bp, Gossypium hirsutum
  unsure (1)..(149): unsure at all n locations
caagaaaaataccaggtattggagtttcaacagaggaaatgctgtgtcatattcgatctctcgtgtaatcttgcaaggttgttggagttntgtacccatgagattcctcaagcattcctctcagggcctgatacaaaccttcgaagact

SEQ ID NO: 212302 - DNA, 384 bp, Gossypium hirsutum
cccacgcgtccgcacacatatgttgagactgagaatgttcgatatgtttatcaaccaatagaagctctttatttgctacttgtaaccaacaaacagagcaatattcttgaagatttggagactctgagactgctttccaagctggtacctgaatattgttactctttagatgaggagggaatttgcaagactgcttttgaattgatctttgcttttgatgaagtcatttgtcttgggcacaaggaaaacgttacagttgcacaagttaagcaatactgtgagatggagagtcatgaagagaaattgcacaagctggtattgcagagcaagattaatgaaactaaggatgtcatgaagcgtaaagctagtgagattgataagagc

SEQ ID NO: 212303 - DNA, 389 bp, Gossypium hirsutum
ttctgggcgaactgttctttttccatataattttgattagaaagggcatcacaacatatgaatatgttgttgcaatgagaacacaaagtgaaccacctggacagtctgcagatggtggagatcagcagagtatgccatcatcacctaccagttcagctgtgactgccataagtggaagaagctctcttggaaagagcttgcaatacaaaggtgcttggtgtaccccaccaagaatcttcatggagcaccaggatgaaattgtcccacatttggacccgggccgcttaccatccacagtagatccagatgctgtacagccaccagacaagggtaaaagattaccccaacgtcctgtccgaattagtgcatggaaacttgcaaaattggat

SEQ ID NO: 212304 - DNA, 232 bp, Gossypium hirsutum
gcaccatcaagcttgccaacactgcacaaagagttgatggcaagctccgatatgctcttaatggagtctcctatgtcgaaccaaccactccactaaaacttgcagaatactatggcgtagccgacaaggttttcaagtatgataccattcccgatgagcctcccagtgacaacacttaagtaactttggcacctattgttctcaacatgacacatagaaactttgtgggaat

SEQ ID NO: 212305 - DNA, 388 bp, Gossypium hirsutum
cgcaaaaccctccttgcagacgtcttctgcttcttcctccaaacaatctccaaggaaacgaaaatggctgcctcttccgcttttctttctacttttatttctccccaaacggtctccttctcacccaaatcctcctcttctcttcgcctccttcctccaactagcgtgcgcatggtacgaactgtgaccctagccaccgcttcacagcccgccaccagcccccggacgccacgcggcatcatgaagccgcgtcgtgtaacgcctgagatgcaggatgtcgtcggagtccctgaaattccccgaactcaagcccttaagcagatttgggcttacattaaagagcacaatcttcaggaccctgaaaacaagaagattataaactgtgatg

SEQ ID NO: 212306 - DNA, 386 bp, Gossypium hirsutum
agaattgttatgtctacagagcacggttggaagaaactgaacaatactggagaggctggtatgaaggcctttcagaaaaatttctatcttctcctgttccaaagctcttacttttagctggcactgatagactggacagagcgctcacaataggtcaaatgcaaggcaagtttcaaatggtggttgttagacatacagggcatgctatacaggaggatgtacccgatgaatttgctatcttgataatcaattttatatctcgtaaccgcattgggcctcatggagttgagatcccaggacttgctcggccgaagccagcacaagcccaaggccaatcacccgcacaaacaaaatcatgaaacagtcgcaatgatgaacattattag

SEQ ID NO: 212307 - DNA, 386 bp, Gossypium hirsutum
cagaagataaataagcgtttgtctcagatttttgaagatggcccgtaccaagcagacagcccgtaagtcgactggtgggaaggctccaaggaagcaacttgctaccaaggctgcccgttaatctgccccaaccaccggtggtgtgaagaagcctcatcgctaccgtcctggaactgttgctcttcgtgaaattcgaaagtaccaaaagagtactgagcttcttatcaggaaattgcctttccagaggcttgttcgtgaaattgcccaggacttcaagactgatttgcgtttccagagccatgctgttctagctctccaggaagctgcagaggcataccttgtgggtctttttgaagacaccaacctttgtgcgatccacgccaagc

SEQ ID NO: 212308 - DNA, 240 bp, Gossypium hirsutum
caagaacaaaaaaaacaggtggaaaccccgttttcttttggtctcaaaacgattcaaaagggcaagattcttggttttagggtttgggttttcattgatttttagtgaaaaaattataaaaaaattatgggaagaggtagggttgaacttaagaggattgaaaacaagatcaacaggcaagtcacttttgcaaagagaagaaatggtcttttgaagaaagcttatgacctttccgttctt

SEQ ID NO: 212309 - DNA, 405 bp, Gossypium hirsutum
  unsure (1)..(405): unsure at all n locations
cggcatgattggaaaggtaagcccaaggggagagtgatnttgtgttgtacnaagaagggggcgcnnagtttgcganngtaggttgacttggattaaagaagaatgcaaaagttcaaaanagaatgaccacaaacaacgaacatgatcttctggcctaaaacatgttgtagacgaggccaagcagcatcataatgtgaagaatgtgtatgtgtggcatgctttggctggctattggggtggagtcaaacctgcagctgctggtatggaacattatgatacagcattggcatatcctgttcagtccccaggtgtgatgggcaaccagccggatatagttatggacagccttgctgttcatggccttggtttggtgcatccgaagaaggttttcaacttctacaatga

SEQ ID NO: 212310 - DNA, 393 bp, Gossypium hirsutum
  unsure (1)..(393): unsure at all n locations
atttagagtctcttcttaactattcatttcaagacccttcttttttagtggaagcactaacacatggttcttacatgcttgctgaaattccaggatgttataagcggctggaatttctaggagactccgttttagattatctcatcactcggcatttatataataattatcctgggatctcaccaggattattaacggatctgaggtcagcatctgttaacaacaattgctatgcattatcagctgttaaggctggattgcataagcacattctccaaagttcacagaagctntacaagcatataaaagaaactgttgaaagttttcaggaattatcgttggattgcactttcggttgggaatctgaaaaatctttccccaaagtactgggtg

SEQ ID NO: 212311 - DNA, 390 bp, Gossypium hirsutum
atttattatcaaaagtaaacttagaaggtccatgcaaggctcctattgagattaatgttcagggcactataaaggctccggctgatcctggtgctttcaaggaccctaattgggttagattctatagtattgaaaatttcaaaatgtccggcggaggaattttcgatggtcagggaagcattgcttatgagaagaataaagatccccacaatcgtgcatttcgtgtcaaactccccgttaatataaggtttgactttgtgaccaacgcattgatacaagatataactagcaaagacagtaaactattccacgttaatgtttttgcatgcaaaaacattaccctcgaacgtttcacggtagaggcaccggcagatagcccaaacacagatg

SEQ ID NO: 212312 - DNA, 395 bp, Gossypium hirsutum
cccacgcgtccgatgctcttggcaatgtgtttggggtggaattgagcaaaggcttcagaactgtgatttcgagttgagttatgcattggctttctcaaacgttctcgccagcaaaaggaaattacaagggaacaagcagttcaagatctaaaggaagttctcttcctcggggaacttgaggaagtacttgaagcaacacagtctgtggagttccaacgatgtatggttccgcttttcagacagattgcacgttgcctcaatagcttacatttccagcgtataactattcctgaaattctacaagatgaatggttcaagggtacaagccaccaaaatttgagcaagatgaggatgtaaatcttgatgataatattttatattttacatggttatga

SEQ ID NO: 212313 - DNA, 388 bp, Gossypium hirsutum
gttttcaggtcgggtcggtcgggtcacaagaacttatatataatggatgcaatcgaaggggagacgagttggattgaaagactaacagatggtccgtggacggatacaatgtgtaattggtcaccagatggtgattggattgcattttcttcggatcgacatgatccagggtcaggtagtttcgagttatatatgattcacccgaacggtaccgggttaagaaggttgcttaggagcggttcatccggacgggtcaaccacccgtcatttcgtccggatgggaagttattggtattcactacggattacggtggaatatcagcagagccaatctcaaacccacatcactaccaaccatatggtgagatattcacgatgaaattggacg

SEQ ID NO: 212314 - DNA, 391 bp, Gossypium hirsutum
cggacgcgtgggtgtggagttttatcactcgattatgcggagggattcaaagagagatgccggcgggtgtaacgtgccgtaagctttaccggcaacggcgaatgcgagggatatgattggggagatcgaaaatcggtcagcttatttgctagcgataaaaacagatgtagaaacacaaggagatttcataaggttttcgataaaagaagttgagaatgtttcgtttaccgatatcgaaaatgctgtcccttttgttaaatggctagacgatgagctctcctacttggtcgacgaaagagccgtgctaaaacatttcgaatggccggagcacaaggctgatgccttacgcgaggcagcattctgctactgtgatctcaagaaactagaatcc

SEQ ID NO: 212315 - DNA, 393 bp, Gossypium hirsutum
ttcattttcttgttccttccttcgccgtctattgcttttagttgcctcgatttcaagtgaatcagaatgggtaaggaaaagactcacattaacattgtggtcatcggccacgtcgattctgggaaatcaaccaccactggccacctgatttacaagcttggtggtattgacaagcgtgtgattgaaaggttcgagaaagaagctgctgagatgaacaagaggtcattcaagtatgcttgggtgcttgacaagctcaaggctgagcgtgagcgtggtatcaccattgatattgccttgtggaaatttgagaccaccaaatactactgcactgtgattgatgcacctggacaccgtgactttatcaagaatatgattactggtacgtcacaggct

SEQ ID NO: 212316 - DNA, 381 bp, Gossypium hirsutum
caatgctctactgtcacccaaccaaaatattttcctcatgcttgaagtagcttttttgacaatcgttttcacatgcagacccccaccctaaaatctgctacttttttctagatctaagcctgaaaattctttttcttttcttcaataatcagataaagtttccatttttttctgaaaaagtacagtatttgcatgcagatcctaacgcagaatctttccgaggcgagactagatcatttcttagaggaatcgacgtgaacagattgccatctacggtcgattgcgaagaagcagctggagtttcatctccgaacagcacgatatcgagtgtgagtgggaaaaggagcgaaagggaaagcactaatggagatgagcttgata

SEQ ID NO: 212317 - DNA, 389 bp, Gossypium hirsutum
gctgataactgtaccggtcttcaaggtttccttgttttcaacgctgttggtggaggcactggatctggtcttggttccctccttttggagcgtttgtctgttgattatggcaagaaatccaagttgggtttcactgtctacccatcaccccaggtctccacatctgttgttgagccctacaacagtgtcctctcaactcactcccttttggagcacactgatgtggctgttcttcttgacaatgaggctatctatgacatttgcaggcgctctcttgacattgagcgacccacttacaccaatcttaaccgtcttgtctcccaggtgatctcctctttgactgcttcacttaggttcgatggtgccttgaacgtggatgtaacagaatt

SEQ ID NO: 212318 - DNA, 392 bp, Gossypium hirsutum
gttttattagacatgaggagtctctaccaagagaactgaggcggcatctaaattctctggaagagaggcttttggagagcatggtgtgggataaaggttcctcaatgtacaattctttgatagttgcaaaacctgccctatctgctgaaataaatcgtcttggcttattggctgaaccaatgccacctttggatgcaattgcgacacatgtgaacttttctggaagtacacctccagtgccttctttgcagaaacacgaaacatcaacgggtaatgctggtagctcaatcttaggacaaaatggggatgtcaggtctcccatgagaccttgcactgagttgaggagtgtgttggttgaacggaatgcttttacatcgccagtgaaggatcgc

SEQ ID NO: 212319 - DNA, 386 bp, Gossypium hirsutum
cggacgcgtggggtcagagtcttgttcttgccctactatttgccctcttgtttgggtcaatcgagataatcttcctatcgtcgtcttttataagaatctctaaaggcggatgggttcctcttattctctctgtgatcttcatgctcatcatgttcgtctggcattatggttctaggaaaaagtatttatatgatttgcacaacaaagtacccatgaaacaaatcctgacactgggtcctagtctcggaattgtccgagtcccagggataggccttattttcaccgcgttggttagcggagttccggccacatttacccgttttttaaccaatctaccgacattttatcaagtggctgtctttgtctgtgagaagactgttcttgta

SEQ ID NO: 212320 - DNA, 259 bp, Gossypium hirsutum
  unsure (1)..(259): unsure at all n locations
cttcaacaagaatttccaatcgtctgcnnaggctgctgtgaagttaactcccgagctgtcgagatcaccaagcaaagctgccagcatgttttctgggacagtcgaaaaatgtgctacttgtggcaaaactgcatatccacttgagaaggtgacagttgaaggacagtcttaccacaaatcatgtttcaagagctataatagtggctgggctttaagtccatcaaattatgcagnacttgaaggcattttgtactgcaaa

SEQ ID NO: 212321 - DNA, 394 bp, Gossypium hirsutum
cagaactcgctctcggtgtcgaagctcacaccgatttaagtgcactcactttcattctccacaacatggttcctggcctccaactcttttaccagggcaagtgggtgaccgctaaatgtgttcctaactccatcatcatgcacattggagacaccatcgagatcctcagcaatggaaagttcaagagcattctccacaggggtctggttaataaggagaaggttaggatctcgtgggcagttttctgtgagccaccaaaggataagatcatccttaagccactcccggagactgtctccgagaccgaacctccactgttccctcctcgtacctttgctcagcatatcgagcataagctgttcaggaagacccaggataatctgtccaactgaaa

SEQ ID NO: 212322 - DNA, 392 bp, Gossypium hirsutum
gctctcacagccgacccaacgctacagttgtcaagagcaagcagcattgtcatgttgattgcatacgtatcatacatagtcttccaactattcactcacaggcagttgtttgaagctccagaggaagcagaaggcgacgatgatggaatatcagaagaagagccagtaattggattttggagtgggtttatatggctagttggaatgactgttgtcatttctctcctctctgaatatgttgtagaaactattgaggatgcctcggatacttggggaatttctgtaagtttcatcagcattattctgctacccattgttggaaatgcagcagaacatgcaggagctatcatttttgcttttaaaaataagctggatatttctttaggtgttgc

SEQ ID NO: 212323 - DNA, 393 bp, Gossypium hirsutum
ctcaattctttcatcccttgttttccttcaacccaaacaaaacctaatctttttgaaaaaatggcaccaaaagctgaaaaaaagccagccgagaagaagccagccgaggagaagaaagccgtagctgagaaagccccggcagagaagaagcctaaggctggtaaaaagcttcccaaggaaggcggagcggctgccggagacaagaagaagaagagagttaagaagagcgtcgagacctacaagatctacatcttcaaggtcctgaagcaagttcaccctgacatcgggatctctagcaaagctatggggatcatgaacagtttcatcaacgatatcttcgagaagcttgctcaggaagcctctaggctcgcgaggtacaacaagaaacccacc

SEQ ID NO: 212324 - DNA, 391 bp, Gossypium hirsutum
cccacgcgtccgctaaggcgttacatcaatgagtatgtcatttgccttggatgcaaaagtccagatacaattctttcaaaggagaatcgtcttttctttctcagatgtgagaagtgcgggtctggccgatcagttgctccgattaaagctggttttgttgctcgtgttggccgcagaaatgctggtacttagggtttttgattccagccaaaatgatattccagaagtgagaaatttaggaacacctgttgttagtatctatgagtaaaacgttgatgagattttttttttcttttattgataataatgctgatgagattttgaatggtactaaaattgaaggaatgtgtgtgtttgagacatgttatttttccccatgcgatcaactttt

SEQ ID NO: 212325 - DNA, 265 bp, Gossypium hirsutum
gaacatcctattaggggaaggcagaaagaagaaacaaagatgagcagcgggggtactggctacgatctcttcgtcaccactttctctcccgacggccgcgttttccagatcgagtacgccgtcaaagccgttgataacagcggaactgttggtggaattaaatgcaaagatgggatcgttatgggagtggagaagctgatagcatctaatatgatgttgcctggttctaatcgaagaatccattcagtccaatcgtcattccggc

SEQ ID NO: 212326 - DNA, 410 bp, Gossypium hirsutum
gtggaccaagccgtccggaggaaaccctttggtggaagcggtccatttttgaaggaaaagaagttttagaaggaaaagaagggaggtttggatggctaaaatgtaggttaagaaggtcccaaggatgaaaccggccctgactctggcatggttcctatatggggagatggaggtcaacatagtggcaaagctagacaggtatctaaacaatcgattattccagcagtcgaagttgagcctccgggatgttcatacaatcccacatttgatagtcatcaggattcgttggctcaagcggttgctgaagaaatgcaaaaggcctacaagatcgagttgggacctcagccagttccattaactgttatgggagaagtggttgatgaagatgataaatactttattgaagcaga

SEQ ID NO: 212327 - DNA, 389 bp, Gossypium hirsutum
cccacgcgtccggtgatggtggtttcaactatgcatcaactgacctggctgctcttcggtatcgcctcaatgaagagaaagctgagtggattatatatgttactgatgtaggccaacaacagcattttgatatggtgttcaaagctgccaaacgtgcagggtggcttcctcaaggtgataattatcccaaagctagccatgttggttttggacttgttcttggagaagatggcaagcgttttcgaacccgtaacactgaagtagttcgtttagttgatctacttgatgaagccaagaaccgaagtaaagcagcacttatcgagcgtggtaagggtgaagaatggaccgaggaggagattgagagtactgcagatgcagttggttatggt

SEQ ID NO: 212328 - DNA, 406 bp, Gossypium hirsutum
ggatcttgctgctccagttgaatcctttgttgataagcccgcggcagccgagacctcggcagctgctcctggagctggaaagggagcctatgttccaccaagcatgagagccggtgcagagagaacaaccggatcggatatgagacgtaggaacgatgaaaactctgtgagggtaacaaacttatctgaggacactcgggaggctgacttgcatgaacttttccgaccatttggtgctgtgacgcgtgtgtatgtcgctatggatcagaagacaggcacaagtagagggttcggttttgtcaactttgtgaacagagaggatgctcaaagagctattaacaagctgaacggatatgggtacgacaatctcatcctgcgagtcgaatgggccacaccaagaacaaac

SEQ ID NO: 212329 - DNA, 388 bp, Gossypium hirsutum
atgataagaaactcccagctctgtggtgaggccatgattgcttatctgcaacagaaggggttccctgaagtggctctccattttgtcaaagatgagaaaacacgctttaatttggctttagagagtgggaacattcaaattgctgtcgcatcagctaaggagattgatgacaaagatcattggtataggttgggtgtggaggcccttcgccaaggcaatgctgctattgtggaatatgcctaccagaggactaagaactttgagagattgtcttttctttatctcgtaaatggtaacctggaaaagctatccaagatgctgaaaattgcagaagttaagaatgatgttatgggtcagtttcacaatgctttgtaccttggtgatatac

SEQ ID NO: 212330 - DNA, 390 bp, Gossypium hirsutum
cccacgcgtccgcccacgcgtccgcgaagatttagtctcaactgacttcatcggagacaacaggtcaagcatttttgatgccaaggctggaattgctttgaatgacaactttgttaagcttgtgacttggtatgacaacgaatggggttacagttcccgtgttatcgacttgatccgacacatgtctaaggcttaagtgagtgagtgattgtgcttggtgtatccaagctttagcaattttaatttagaagagatgttatgagagaataaacgaattgtacggagcatatttttgtgtgaagaagggttgtttcagttttattacccaagtacttgaatgtttcaagtttcattgcagttgattttctactttaatgcatacgtggcgat

SEQ ID NO: 212331 - DNA, 374 bp, Gossypium hirsutum
ccaaggctgtggatttgcttccaaaaggaagtatttgttgggacgtgtcagcatgaagatcaagcttatacctggtgactccgccggaacagtcaccgctttttatatgaactctgatacagatacggtaagagatgagctagacttcgagttcttgggaaatcgtagcggccagccttatactgtccaaaccaatatctatgctcatggaaaaggagatagggaacaaagggttaacctttggtttgatccttctgcagatttccatacttacactattatgtggaatcatcatcatattgtcttctatgttgatgatgtgccaatccgagtttacaagaacaatgaagctagaaatataccattccctaagt

SEQ ID NO: 212332 - DNA, 363 bp, Gossypium hirsutum
cggacgcgtgggcggacgcgtgggtttgccctttcattgcttccttgcctgccttaaacctccttcaagcatagccatgactactgaaatggtaatggttgatgaagtcccttttcctccacaaatcacaactaccaagccactatctcttttgggtcatggaattaccgacattgagattcactttttgcaaatcaagttcacagcaattggggtttaccttgaaccagaagttgtaggacatttgcaacaatggaaggggaagcctgggaacgtgctagctgaagatgatgacttcttcgaggctcttattaatgctccagtggagaagtttctgagagttgtggtgattaaggagatcaa

SEQ ID NO: 212333 - DNA, 393 bp, Gossypium hirsutum
aaacaaggaaaaaacttaacaagtaaaacaattgagagaagatgtcctggcaagcgtatgtagatgatcacttgatgtgtgatattgagggcaaccatctctctgccgccgctatcattggccaagacggcagcgtttgggcccagagctccaatttccctcagttcaagccagaagaaatcactggcatcatgaatgacttttctgaacctggatcgcttgctccgactggattgtaccttggtggcacaaaatacatggtgatccaaggtgaacccggagctgttattcgagggaaaaagggccccggaggtgttactgttaaaaagaccaacctgtccttgatcattgggatctatgacgagccaatgactccaagtcagtgcaacatga

SEQ ID NO: 212334 - DNA, 165 bp, Gossypium hirsutum
cgatcctattgtgttggccttcgggatcggagtaatgattaacaaggacacgccggggccttcctatttcattttcagaggggaaaatcttgggtttttttaaaaccaacaaccgccaaagcctttgcccagggtgtttttatttatcaaaaaccaaaattgggg

SEQ ID NO: 212335 - DNA, 392 bp, Gossypium hirsutum
tgacaagaatgcaaaagatgatgatttgaagaaagcttataggaagcttgccatgaagtggcaccctgataagaacccaaataacaaaaaggaagctgaggccaaattcaagcaaatctctgaagcttatgaggttttgagtgacccacaaaagagagctatctatgaccagtatggtgaagaagggctaaaaggccaagtaccacctcaagatgctggcggacctggtggagcaacatttttccaaaccggagacagtccaaatgtgttcagattcaaccccagaaatgctaatgacatctttgccgagttctttgggtattctagcccctttgggggaatgggcggcagtgggatgagaggtagctcaaggtcatttggtggcatgtttg

SEQ ID NO: 212336 - DNA, 394 bp, Gossypium hirsutum
gacctattattattgatcaatacacttgccctcttcatcaacattgcaagaattatactacagctgtggagattagcaatatcttatataatgatttaagagggacaacaaacggtgaaattgcggtggaactttcatgcagtaagtcagttccatgcaaaaatatccgcatgaaagacatacagttggattacggaataaatggtaaaatgtatgatgggcaccccaaatctcattgtttgaatgttgttcaaagttgggacgaaagatatgtttatccaaatgttccttgtttaacaaaaaaattaagttactaaactttattattttggatgtaataattaggttgtatcaaaaggttgcatatataaaataaataaatgcatctttttta

SEQ ID NO: 212337 - DNA, 394 bp, Gossypium hirsutum
atgaattagcatctctttgttcatcgatcttcttatcttgatctaacccgactattaaaaacttcaaatctctaattgccattcaatttgttaattccaatttaaatactcttcccggatataaaaaaacttttcttctatggctgctgtgcaaaggccagcgagttcttctgattccgacgagaggaaaaggaagagaatgctgtcgaaccgtgaatccgcgaggcggtcgcgtattatgaagcagaagcagctcgaggatttggttaatgaagtgagcgcattgcagaaagataacagccagctctccgaaaagatcaacgtcacaactcagcgctacgccgagatggaatgtgccaacaacgtgttgagagctcatgcaatggaattgacc

SEQ ID NO: 212338 - DNA, 390 bp, Gossypium hirsutum
ggagaagattcaagttagtggtctaaaagagtttttatattcagaaggaaagctgatctctgtcagtttaggcgcagcaccaactgtacagttgatgttcagttcacctatgaccaaatctaaggcggagaaatttagggggcatattttacaagcattcgagactgttcttggttcatccgtgacagttgaaattagatgtgaagcaaagaaagatggccgagctggggtcggtccatctcagatggtcatggatctagagtctaattctagaaataggatgcatgctggggtcggctcccaagctcagcaatcagggaatgaaattgttgaaataccagcttctccaagagaagccaaggataacgaacatgctgataactttgaatc

SEQ ID NO: 212339 - DNA, 371 bp, Gossypium hirsutum
  unsure (1)..(371): unsure at all n locations
cgctttacagcggtcgaggaatggggaaaaatccggttggtttggtttacagcaaaggtaacagctccggtagtaatttatgtttgaccggttcgctcgatccggctttggtacgtgggaaggtagtgctttgcgatagaagaacaaccgcccgagttgaaaaaggagccgtcgtgcgcgacgcangcggcgtcgggatgatattagcgaacaccgaagctagcggtgaggagctggtggctgacagtcacttgttaccagccgtggcggttgggaggaaagtcggtgatttgatcagagaatacgcacggtctgaacccaatccaacagccgcgcttgtcttcggtggtacggttttggatatcaaacca

SEQ ID NO: 212340 - DNA, 396 bp, Gossypium hirsutum
  unsure (1)..(396): unsure at all n locations
cccacgcgtccggcgcaatcaaatgacgagcgtaggttctgggtagcgaataaccagcttagtatatccagtataaatagctgtagccgtggccttagcagtgactgaatgaaaaactttttgtaatggccatttcttgggttcctaatcttagcagggtattgtaactttaatctaaacgtagtctatgtaaatgctttgataaagttttaaaatatattactggtgatattcctgagtgctgactatgtaaaaagtgtattatattcgnnaaagaaagaannacnggaaaaacnaaagagcccaaaggattacaactacatgaatctggtgacacaacgaatgggtgcatgtctacaggagcacatttcaattctaacaatatgacacatgggt

SEQ ID NO: 212341 - DNA, 391 bp, Gossypium hirsutum
  unsure (1)..(391): unsure at all n locations
atcacaattggagcaatgcttgaagaaattcagggcctgtatcaacaacaccaccagccttgcttcctttatctctctagtgaagttataaagatatttggctctgatccttcttgtgcaagctacctcaaaaatatgatcgaggcgcttttcaagcacacaacatgtcttctcacaagtattaaggagttcaccagaagaccagacattggagatgattgttttctgttggcatcaaggtgcattcgttattgtcctcaattattcattccttcttccatatttccagctttagtagattgcgcgatgattgggatcacagtgcagcacagagaggcctncaattccatcttgaccttcttgtctgatatctttgatcttgcaaagtcta

SEQ ID NO: 212342 - DNA, 375 bp, Gossypium hirsutum
cccacgcgtccgcggacgcgtgggctggaaatgcaattcctttaactgcaggttttgtggggcaagcagaggcaagagaagctgctggtcttgtagtggacatgataaggcagaagaagatggctggccgtgctcttctgttggctgggcctcctggtactggaaaaacagcgttggcacttggaatttcccaagagcttgggagcaaggttccgttctgtccaatggttggatctgaagtatactcatcagaagtaaagaaaaccgaggttttgatggaaaacttccgacgggctattggtctacgtataaaggaaaataaagaggtctatgaaggagaggttactgaactctctcttgaagaacagagagcgt

SEQ ID NO: 212343 - DNA, 293 bp, Gossypium hirsutum
gctggccatattttcacgacaaccccgtcccacctcgctctgtcttttacatcctcaactaacccttcaaacccaccggttcttctctcctcatttcgtggggtctctcttaagctccctcgtcaatccctctcccttgctgctactattcccaagaagcccttttctgtgtttgctgttaccaagaaagctatccctgtttttaaacagaattcggaagttgaaggcgttgtcacagttacccacgaaaatgatggtcctacaactgagaatgttcgaattactggtcttac

SEQ ID NO: 212344 - DNA, 380 bp, Gossypium hirsutum
cttaccgtcagcttttccaccctgagcaactcatcagcggcaaggaagacgctgccaacaacttcgcccgtggccactacactattggcaaagagatcgttgacttgtgcttggaccgtatcaggaagcttgctgataactgtaccggtcttcaaggtttccttgttttcaacgctgttggtggaggcactggatctggtcttggttccctccttttggagcgtttgtctgttgattatggcaagaaatccaagttgggtttcactgtctacccatcaccccaggtctccacatctgttgttgagccctacaacagtggtcttttaaactcacttcccttttggagcacactgatgtggctgttcttttttgacaatgag

SEQ ID NO: 212345 - DNA, 304 bp, Gossypium hirsutum
cccacgcgtccgagaatgtggtgtcattgtcgaatggtgtatctgccaatgtcgtttttgtatgggaagaagtttgtgggtcctatcacacccacaattctatcttagagcatagctgattgcatgcatatggttatgtatttgttgaatgcatacatatatacatatttatgtctgtaaatgtgtgcattgggataaattttataggagatagctttgtgttacactgtagattggttggctaaggaattggttatacttgagagtggctgaaatttgataatgatgctatctgtgttgtttg

SEQ ID NO: 212346 - DNA, 399 bp, Gossypium hirsutum
caaaaaacacccaattgaccaccatgtttaaattaatcaacatcctaaccatccttgtgctacttacatttagttcggaaattgcagatgccgcacctccgtgccaggaggttatcgtgtcgattaccccttgcttgagcttcataaaaggccaacccgatccggcaccaggatgttgttcgggtgctaaagggcttgctaagcaagctaacaccaaactagataggcaaggaatatgcgagtgccttaaaggtgtattgccaaaaataggaccatatgaccctaaaagattccctcttattgcccagaaatgtggtatcaatactttaattcctccaatttctgccactactgattgcaccaaagtgtgaagagtgaagtggggggaatgtgaaaatg

SEQ ID NO: 212347 - DNA, 397 bp, Gossypium hirsutum
aggattggagcgtgcacacatgggtatctttactgagttgggagtcctgtatgccaaatatcgtgcagagaaacttatggagcacattaaattgttctctacgcgtctcaacattcccaaactgataagagcttgtgatgagcagcagcattggaaggaacttacctatttgtatatccaatatgacgagtttgataatgctgcaactactgtcatgaaccactctcctgaagcatgggatcatatgcagttcaaagatattattgtcaaagttgctagtgttgagctctattacaaggctgtccacttctacttgcaagaacatacagatctcatcaatgatatgctgaacgtgcttgcactttgtgtggatcacactcatgttgttgacattatg

SEQ ID NO: 212348 - DNA, 320 bp, Gossypium hirsutum
tacttaaatggctgctgttttggcttttattttcattgttttcaaagacaacaaagggggctataaaaagctagtccgtggtgcccaaacactctttaagaaagttagggatcaaagacgcacatatactgctggtggttctgaccctgacctgttttataattacttaaagcactgggatgaattggattggggtgaaacctggttatactataccactgtgaattcatactattttgagttagctactcatgctaaactagccaagcatgctcgtgcttgctggggtggcccatattatggtggtcttagctggaata

SEQ ID NO: 212349 - DNA, 386 bp, Gossypium hirsutum
cccacccgtccgcccacgcgtccgcccacccgtccgaacatattcacacttttaataatatttaaaatggaaaaatcttcccgttcaatgtcatctttagtccttcttatgtgggttcttctagcaacagagatgggatctatgacagggggaggtagaacatgtgagaccaaaagtagtgaatacaaggggatatgcttatttgatgctaattgtgatagtatttgcaaagtagagccaggtttcgatggtgggcattgccatggcttctttcgcagatgctattgcactaaaccttgttagatgagcaatctattaagatttcattatacttaaaagattgcctcatttccgcttgttatgtgtgtgcttgaggagtgagagaa

SEQ ID NO: 212350 - DNA, 398 bp, Gossypium hirsutum
cttgcattgggttacaagtcttgcattattcctatttttgctattgctatcatatttttgttagttttagctttgctgctatgtatggcattgctgttgctgcccttggaatgctgagtaccatagctactggattggctatcgatgcttatggtcccatcagtgataatgccggaggcattgctgaaatggctggcatgagccatagaatacgagagagaactgatgctcttgatgctgcggggaacaccactgctgctattggaaagggtttcgccattggttcagcagccctggtgtcccttgccctctttggtgcttttgtgagccgtgctgcaatttcaacagttgatgtattgacccctaaagtttttattggtttgcttgtcggggcaatg

SEQ ID NO: 212351 - DNA, 200 bp, Gossypium hirsutum
ggttgatccggtaatcggaaaaatcaagggtccttgttacgcctagtatgaaagagcaggccaaagaaatcgcggagacatggaaaaagagccttgaagagagaggagggattgaaaatgtgaaaacccctgatgttcatacttttttgcagcatttggttacgtttgggattgttaaaaaagaggatctggagttttat

SEQ ID NO: 212352 - DNA, 113 bp, Gossypium hirsutum
tttatatcgcgggcggtcgctcatgaggatccaatcttacggccgcgtgcatccgacgtcatagttcttttgtccggtcagctaaacacatttcactgaccactgttggacag

SEQ ID NO: 212353 - DNA, 423 bp, Gossypium hirsutum
accgggaaagacgggccgggccgacccgtccggtggaatgcaaggccgttaataaagctgtaaatatgatcatggatgccataaagcaagtggggggaatatatgttgtgaccgctgaccatggaaatgctgaggacatggtgaaaaggaataagtccggccaacctctttatgacaagagtggcaagctccaaatcctcacttccaacacttgtcagcctgtgcctattgcaatcggaggtccaggattggcagcaggcgttagattcaggaatgatgttccggatggcggacttgcgaatgtggctgcaactgtcatgaacctccatggttatgtagctccaaatgactatgagccaacactcattgaagtagtgagcaattagaggcatatgttgcggtcgctgaatgggctaaacgagt

SEQ ID NO: 212354 - DNA, 329 bp, Gossypium hirsutum
gctaacctcgtagttgtaggtggtgataggcgaaaggaatctaaagatttggaagagaaggccgaaatgaagaaaatgtttgagctgatcgagaagtacaacttgaacggccaattcagatggatatcatctcaaatgaacagaatccgaaatggtgaactttaccgatacatttgcgacacgaaaggtgcctttgtacagcctgcattgtatgaagcctttggattgacagttgtggaggcaatgacttgcggtttgccaacattcgcaacctgcaacggtggaccagccgagattattgtccatgggaaatctggtttcaacattga

SEQ ID NO: 212355 - DNA, 402 bp, Gossypium hirsutum
cccacgcgtccgcccacgcgtccgggctaaaaggacttaccgcttcatagttttcaagattgaagaaaaacaaaagcaagttgttgtggaaaaggttggtgaacctactgatagctatgaggctttcactgctagccttccagccgatgagtgtcgatacgctgtgtatgactttgattttgtgaccgatgagaactgccagaagagcagaatttttttcattgcctggtctcctgatacatcaaaagtaagaagcaagatgatctatgcgagctcaaaggacaggttcaaaagggaattggatggcatccaggtagagttgcaagctaccgatccttccgagatggatctcgatgtcataaggagccgtgccaattgaaatgtatgtaccatttcttcatt

SEQ ID NO: 212356 - DNA, 392 bp, Gossypium hirsutum
  unsure (1)..(392): unsure at all n locations
cccacgcgtccgcccacgcgtccgctcgagagtgagttcttttcaacggaacctcttccctgtgatcctttaagcttgccaaagtatcctccaagcaaagagttagatgcaaaattaagggatgaggaagctagaagacgagtggctggaaccaaaggcctgagacctgatcttgacaggagagcaactagagaatctcgagctgttccagcacctgatgcgaatgctgaattagtcatgtcaatgcagaaaagacaatcaaattcaaagagccggagtgagaagtttaatcctcatcccgaagaagttgcctcaggctttcctatagacccgcctagaccatcacaagcgatagaatcaaatgcggattcacagggaaatcatnccaagag

SEQ ID NO: 212357 - DNA, 406 bp, Gossypium hirsutum
cgggaagaaaacagcctctcttgcaagccaagctggtcctatatcagcttcaggggtttatgaggctttgcccagtttccgggatgtccctagctcagaaaagcagaatcttttccttaagaagctgagtctgtgttatgtggttttcgattttagtgatccctctaagaaccttagggaaaaggagataaaaagcagacgttgttggagcttgttgattatatatcgtctgtttcatccaagttcaatgaggtcgcaatgcaagaggttacgagaatggtggctgctaatctatttcgaacattcccatctccgaatcatgatagcaagattttagaaatgtatgatatggaagatgaagaaccggccatggatcctgcttggccgcatcttcagattgtctatg

SEQ ID NO: 212358 - DNA, 367 bp, Gossypium hirsutum
tgcaaaacagcgccacacctctgcacgacattcaaagccgcgtttcatttcctttgtattgttgtatctgaataaagtttagttctctttgcgcgtgtcccgttctcttctccaatcctccaaaacttgaacttaaaaccccattttagttgatcccaaagttgaccccttttttgtttcagtatagtaatataccaagcctttgcttaaatggaggttaagctatggaacgacaagcgcgagagagaaatgtatgagaattttgcggagctgtatgccattatcaaagcaacagagaaacttgaaaaagcttatgtgagggatattatatcatcatctgaatatgagactgaatgccaaaagctta

SEQ ID NO: 212359 - DNA, 401 bp, Gossypium hirsutum
cccacgcgtccgcggacgcgtgggcgccttcgattccaatagagatagagagagagaggaggagatcttcgcttctctccgtcgttctgctccatttgataaccgcttgcagttctctcagacgtgaaaaatggggttgtctttcacaaagctattcagccggcttttcgccaagaaggagatgcgtatactgatggttgggcttgatgctgctggtaaaaccaccattctttacaagcttaagttgggagagattgtcactaccattcctaccatcggtttcaatgttgagaccgtggaatacaagaacatcagcttcacggtttgggatgttggtggccaggacaagatccgaccattgtggagacattacttccaaaacacacaaggacttatttttg

SEQ ID NO: 212360 - DNA, 388 bp, Gossypium hirsutum
atcggagttggatatgctcttatgattgctcctgtttacacagctgaagtctctccggcttcctcccgtggtttcctcacctcattccccgaggtgttcattaatggtggtatattactggggtacgtatccaactatgcattttcgaagttaccaactgacttagggtggcggtttatgctcggcatcggagcaatcccgtcggttttgttggctgtgggtgttttagctatgcccgagtcaccgcgttggctggttatgcaaggccgactcggtgaagccaagaaagttctggacaaaacttcggaatccattgaagaagctcaacttagactaagtgaaatcaaagaagcagccggaatcccacaagaatgcaccgacgacgtcg

SEQ ID NO: 212361 - DNA, 392 bp, Gossypium hirsutum
ctttcattagcatcgaaatcactccagttttctttatcactgaaaaatgtcttgctttggtggaaactgtggctgcggttctggctgcaagtgtggcagtggctgtggaggatgcaagatgtacccagacctgaacgttgccgagatgaccacaactgagactctggttcttggtgtagcaccccagaaagcacactttgagggagctgagatggaattcggggctgagaacggctgcaagtgtggagacaactgcacctgcaacccttgcaattgtaaatgattagagaccaaagccaaagctccctggaagcagagacgcctttgtctttaagaaataatatgttttgttggttatgtgtttttagaataaagtagccatggcttgtcgt

SEQ ID NO: 212362 - DNA, 399 bp, Gossypium hirsutum
ggaaatcacctttccttgtatcagaaaggaaaggttgtggtggaaatgggcattcaagcaataaagttccacttgacgcaaactctaatggaagttctacagtcacttgtcacaaatgtggagaacaattcagcaaatgggaagctgctgaaactcaccatctatctaagcatgctgttactgaacttgtggaaggcgactcatctaggaagattgttgaaatcatatgccgaacaagttggttaaagtctgagaaccattgtggccggattgaaagggttttgaaggtccacaacatgcaaaagactctggctcgattcgaagattatagagaaattgtgaagattaaagcaagcaaacttcccaagaaacattctcggtgcattgctgatggaaatg

SEQ ID NO: 212363 - DNA, 350 bp, Gossypium hirsutum
gaacggaagggccgggccgacccacgcgttcggtaaattacctttccttgtatcagaatgtttatgtagtggtgcaaatgggcattcagggggtatttttacacttgacgcggactctaatataaaatcaacaatcactcattacttatctatttaacaacacaccaaatgggaaactgatgaaactcaccatttatctaaacatgcatggactgaacttgattaaagcgactcattttggaagataattttaattatatgccgaacaagttggttaaaaactgaaaaccattgtggccggattgaaagggttttgaaggttcacaacatgcagaatacttttgttttat

SEQ ID NO: 212364 - DNA, 374 bp, Gossypium hirsutum
cccacgcgtccggaagaattggatgcttcctcaagtaaggataatggagtcatagctacccgcctgaaccagatcaaacgttggttgttatcccattcccaacacatgaacttcttcaccattttagtgcttgcctcggtcccgaatcctttatttgaccttgctggcatcatgtgtggacaatttgggattccgttttggaagttctttcttgcaactttggttgggaaggcaattattaaaactcacatacagacggtttttattatctctgtctgtaataatcaacttctggactggatagagaatgaactgatctgggttctcagtagcctcattcctggatttgattcttacttgcccacactcacaga

SEQ ID NO: 212365 - DNA, 319 bp, Gossypium hirsutum
gaaagcccgggccgacccacgcgtacgggaaagcacctatacttgtatcacaattgttatgttgggggggaaaagaacattcagggggttgttttccacttgacgcggactctaatggaagttttacagtaacttgtgacaaatgtggagaacaattcagcaaatgtgaagctgctgaaactcaccatctatttaagcatgctgatactgaacttgtggaaggcgactcatctaggaagattgttgaaatcatatgccgaacaagttggttaaagtctgagaaccattgtagtcggattgaaagggtattgaacgtcca

SEQ ID NO: 212366 - DNA, 406 bp, Gossypium hirsutum
cccacgcgtccgtttcaggagagtttcctgattcgtatgtcgattgcaaatcactggaaaggttgaggatcaataagaatcatctttctgggaaaattcttgatggagtttgggcacttccacatgcaaccatgattgattttggtgataatgactttgagggagagatatcccccatgattgtattttccattagcttaaatcagttggttttgaagaacaataggttttcaggtaatgtcccatcagtacttggcaagttggcaaacctagagaggcttcttttgaataataatagcttttctggcaatctacctgctgaaattggtgctttgaagcagttatcttccttgcatcttgagcaaaattcactgactggattgataccgggggaaataagcgactg

SEQ ID NO: 212367 - DNA, 406 bp, Gossypium hirsutum
  unsure (1)..(406): unsure at all n locations
cccacgcgtncgcttttatcttcttagatcatataatctgtcattcatggcggaaaaaggggaagcgttgccaaagtttggggagtgggacttgaaggatccagcaacggcagatggatttacggtgatattcaacaaagctagaaatgagaagaaaaccagagctactgctcctcctcctcctagtattgtccctcaaaaagttgatattggcaataaacctcccccttctcctcctaagaccaaatgcttttgcttttttagagtttaaaaggtagcatttagggggagatcggaaatggagaattgaatgatttggctagtgatgagcaacttgcctttcccctatatatgtatatataatattacactattcataattggctgcaatggaatgggaccacct

SEQ ID NO: 212368 - DNA, 276 bp, Gossypium hirsutum
caaaacttacatggacagccatgtttaggaagcaacataagaaggacattgctcaagaggccgttaagaagaggagacgtgccacaaagaagccatactccagatccatcgtcggtgccaccttagaggttatccaaaagaagaggagcgagaaacctgaagttcgtgacgctgctcgggaagctgcactccgagaaatcaaggaaaggatcaagaaaaccaaggatgaaaagaaagcaaagaaagccgaagtagcggcgaagcaacaaaagacgc

SEQ ID NO: 212369 - DNA, 358 bp, Gossypium hirsutum
gccaaatttctgtcactgattttgtccggttaacaggtactgaatgtggctaggatcttcaacatctatccaagaaaaggagcaattcttgttggatccgatgcagatatcattatatttaaccctaattcgagcttcgaaataaatccaagatctcatcattcgagaaccaatacgaatgtatacgaaagtagaaaaagaaagggaaaagttgaggtaacaatttctagaggaagaattgtttggaaagatgatgaattgaaagttgcacctggttccgggaagtatataccaatgccttctttcggttttcttttcgacggaatcgaaaaaatcgatgctaagcttgtttctttct

SEQ ID NO: 212370 - DNA, 407 bp, Gossypium hirsutum
cccacgcgtccgctgtcattgatgcttacttggacggccttgaggcttctgggttgagtgatctctccagggttactagtgtagcttccttctttgtcagtagggtagacaccctcattgacaaaatgcttgaaatgattggaacaccagaagcccttgatctccgaggaaaggctgctgtagcacaagcagctctggcatataggctctaccagaagaaattctccggtccaagatgggaggctttggtgaaaaagggtgccaagaaacagaggttgctctgggcttcaactagtgtcaagaaccctgcctaccctgacaccctatatgttgctcctctcattggacctgacacggtctcaaccatgcctgaccaagcactccaagccttcatagaccatggcaca

SEQ ID NO: 212371 - DNA, 368 bp, Gossypium hirsutum
cccacgcgtccgcccacgcgtccgaagaaaagtttccaaaaactccgatcgacgatgtccggtatggaacgattgcacaggatgttcgccggcgctggtggtgcgttgggtcacccgccgccggattcgccgactctcgattcgtcggagcaggtctacatctcctctttggccctcctcaaaatgctcaagcacggaagagctggagttcccatggaagttatgggtttgatgttgggagagtttgtcgatgagtacaccgtacgtgttgtggatgtctttgcgatgccacagagtggtactggtgtcagtgttgaagctgtggatcatgttttccaaacaaatatgcttgatatgctcaaacaaac

SEQ ID NO: 212372 - DNA, 398 bp, Gossypium hirsutum
gttcgagaagacggccatattatgctcacggattttgatctttcacttagatgctcggttaatccaactcttctaaaatcctcatcgaatttggatcctgcaaggatgtctggttcgtgtggaggatcgggttgcgctgaacccttttgcattgaaccatcgtgtcaaatccgttgcttcagtcctaggttatcgcctgctcctacaaaaacaaagacggtaagaccaagccatgcttcccaagttagatcattgccacaactcgtggccgagcctactgatgcaagatccaattccttcgttggaacacatgagtacttggctcccgagatcattaaaggagaaagtcatggagccgccgttgattggtggacttacggtgtctttctttacgagct

SEQ ID NO: 212373 - DNA, 281 bp, Gossypium hirsutum
gaatgaaggaccggccgcgcgtcccgctatttgttacttggccggtctatatcttctacttcacagaggcagctaagtgagttggggcggggatgattcgtggggcggcggccggaccccacgggaagaagaaaggggcctcctttaccatccactgttctaagccggttgaagataagatcatggacatagcctctctagaaaagttccttcaggaaaggatcaaggtcggtggcaaagccggtgctctcggcgattccgtcactgtcacccgcgacaag

SEQ ID NO: 212374 - DNA, 404 bp, Gossypium hirsutum
gctgatttcgtccgtggatatccattcagtctccgtgagggtgtcccaactgctggggcgcatggcctgtggctaaacatcccagattatgatgcaccaacccaacttgtgaagcctcttgagaggaacactaggtttgttgatgcggttctcaccatcccaaagggcaccttgttccccatgtgtggtatgaatctggctttcgaccgtgacttgatcggccctgccatgtactttggactcatgggagatggccagccaattggtcgctacgatgatatgtgggctggctggtgcatcaaggtgatatgtgaccatttgggattgggggtgaaaacgggtctaccatacatctatcacagcaaagccagcaacccctttgtgaatctgacgaaagaatacaa

SEQ ID NO: 212375 - DNA, 370 bp, Gossypium hirsutum
  unsure (1)..(370): unsure at all n locations
gtcaagaggctctcctctcgccgctggctacgatctgtcaagtgcaacggatacaaaggtgccagccagaggaaaagcgttgattcccactgatctaagcattgctatccctgaaggaacatatggtcgcgttgcgccaaggtctggtttggcttggaagcattccatcgacgtangtgctggagtgatagatgctgattacaggggacccctgggggtgattttgttcaaccattctgatgttgattttgaagtgaaagtgggtgacaggattgcccagttgatcattgagaagatcatgacacctgatgttttggaaagtgatgatctggattctactactagaggtgctggggggatttggatctac

SEQ ID NO: 212376 - DNA, 330 bp, Gossypium hirsutum
aaaaaagaaaagaaaaaatacagtgaaaatggcaacccttaaggttccagctcatgtacctgccccttctgaggatgctgagcaacttcgtaaagcttttgaaggatggggtacaaatgagcaattgattatcgacatattggctcacaggaatgcagctcagcgcaatttgattcgtaaaacttatcgtgaagcttatggggaagatctccttaagtctttggatgaggaactttcaagtgactttgagcgagctgtggtgctgtttactttggaccctgcagagcgtgatgcatttctggctcatgaagctacaaagaggttcacatc

SEQ ID NO: 212377 - DNA, 311 bp, Gossypium hirsutum
gatgatattgcctacaatgaagaaaaccctagacctggaatcatcattaacaatccccatggtgatgatgtttataagggtgttccaaaggattacactggagaaaatgttactgttaacaacttttttgctgctatccttggaaacaaatctgctcttacagggggtagtggcaaagttgttaatagtggccccagtgatcatatcttcatatattactctgaccatggaggtcctggtgtacttggcatgcctaccttaccttatctttatgctgatgatttgattgatgttttaaaagaaaaacatgc

SEQ ID NO: 212378 - DNA, 305 bp, Gossypium hirsutum
ctgaaattaagccactcccaaatcctgttcaaatccttaccgccggagctccaccgccggcggcagtgctgtctaggaccgagtcactcggattcgtcgtgagtcacggttacgggttaaccgaaacgggagggcttgtggaatcttgcgcttggaaaagggaatggaacaagttaccggcgacggagcgagcaaggttgaaagcgaggcaaggagtgagaaccatcggaatgacggaagcggacgtggtggaccctgagtcaggactcagtgtaaaacgagacgggtcaactcttggggagatc

SEQ ID NO: 212379 - DNA, 363 bp, Gossypium hirsutum
cggacgcgtgggcggacgcgtgggcgggaatgaagttttcttcaggatcaaaagaagcacacaattgaagaagctcatgaatgcatattgcgaccgacaatctgtggatttcaactcgattgccttcttgttcgatggtcgccgcctgcgaggtgagcaaactccggacgagcttgagatggaggatggtgatgagatcgatgctatgcttcaccaaaccggtggtactgtgtgaagcgagtactactttgccgcatttagtatttgatgagttagttatggtctgattatgtaagatgtttccaatgtttttatatacgaccttattgccatgttatgaagacttgtggacctttgtttgat

SEQ ID NO: 212380 - DNA, 351 bp, Gossypium hirsutum
  unsure (1)..(351): unsure at all n locations
agaactactactggtaaccgtgtttttggtgttctcaagggggctctggatgggggaattgatattcctcacagtgacaagaggtttgctggatttaacaaggacagtaagcaacttgatcctgaagttcaccgcaaatacatttacggtggccatgttgctgcatacatgaggaatttaatggaagatgagccagagaagtaccagtctcacttcagtgagtacattaagagaagcattgagcctgacaccatagagggaatgtacaagaaggtccatgccgccattcgtgcaagtccagaagcaaagaaatccgagaaggcttctccagggacacaagngtacacctga

SEQ ID NO: 212381 - DNA, 321 bp, Gossypium hirsutum
  unsure (1)..(321): unsure at all n locations
cccacgcgtccgttcaaagaaacttgcacccaccataggtattgctgttgatcaccgccgtaaaaatagatctcttgaaggtcttcaagccaatgttcagaggcttaagacctacaaggccaaacttgttgtcttcccaagatgtgctcgcaaatttaaggctggtgattctactgtcgaagagcttgcaactgcaacccaagtacaaggatcatatatgcctatttctcgtgagaagccttcagttgatcttgtgaaggtcacagaggagatgaagtcattcaaggcttataacangctccgtgtggaacgaatgaatga

SEQ ID NO: 212382 - DNA, 376 bp, Gossypium hirsutum
  unsure (1)..(376): unsure at all n locations
atgccaccgataagcacctttgcaagtctattcttcattgccttgtttctttcaatctttgcaactggtattctcgagctaaggtggagtggagtaagcattgaagaatggtggaggaatgagcaattttgggtcatcggtggcatttcggcacatttgttcgctgttatccaaggcttgttgaaagttctagctggtattgacactaatttcactgtcacatccaaggcaactgatgacgaggagttcggggaattgtatactttcaaatggacaacccttctaattcctcctactaccgtcttaatcatcaatttagtcggtgtcgttgcaggcatctcggatgccatanacaatggataccaanntcatggga

SEQ ID NO: 212383 - DNA, 319 bp, Gossypium hirsutum
gccgcatcttcttcttagccttttaaatggcgaagtcaaagaaccacactggcgacaaccaatcttacaaggctcacaagaatggcatcaagaaacccaagaggcaccgccacacttgcaccaaagggatggatcccaagttcttgaggaaccagaggtatgcaaggaagcacatcaagaagagcgctgagtctgccactgaagaagagtaaatttttaatggcaaaagatctagctttgattagtgctatataattgatgcttttcccccaatggaattgagggttcggtgactataatcaccttagatgaaatgtta

SEQ ID NO: 212384 - DNA, 319 bp, Gossypium hirsutum
cccacgcgtccggtcaattgaagtctagattgggccagttggatcctagctcagaatccttttctctaaggcggttcaagtggcttatggagttctctatggaccatgaatggtgtgctgtagtgaagaaacttctaaatattcttcttgatggaacagtgggctctggggagcaccactctatctaccttgcattaacagagatgagtcttcttcacagagctgttaggaaaaattgtagacctctagtggagctccttttaagatttattccggagaacgcttcagataaattaggatttgagaatgggacagtcgc

SEQ ID NO: 212385 - DNA, 329 bp, Gossypium hirsutum
cccacgcgtccggtttcagaaggctcaacggcttgcagctgaaagagaaacttcatattccccttttgttccccagtcagctcttcctgcaagctacactgcaggtgagatggatgcaggttctaataaaagtgctgaacagcgagcccttcttgttgaaagaagacaagaggtcgtgctgttggataatgagattgcatttaatgaggctatcattgatgaaagagaacaaggaattcaagaaattcagcagcaaattggtgaggtgaacgagatcttcaaagatcttgctgtgctagttcatgagcagggaactatgattgatgaca

SEQ ID NO: 212386 - DNA, 366 bp, Gossypium hirsutum
  unsure (1)..(366): unsure at all n locations
cccacgcgtccgctctttcacaatgagcagatccggccagcctccagatctcaaaaagtacatggacaagaagctccagattaagctgaatgcaaatcggttggttgttggaacacttcgcggatttgatcagtttatgaacctagtagttgacaacaccgttgaggtgaatggcaatgagaaaactgacataggcatggtggtgatcagaggaaatagcgttgttactgttgaagcacttgagcccgtaggccggatgcagtaatttaggtttttcgttccaaaacttggatttcactttctgtatctctttcactctttgngtctagcctgctagcttcgggcttcatatgttacatgatcgag

SEQ ID NO: 212387 - DNA, 375 bp, Gossypium hirsutum
  unsure (1)..(375): unsure at all n locations
gaaactaacaaggcgacgctctttatactttgagaagaagcctatcggatccggataacgtgctgcagagctgggatcccacccttgttaacccttgtacttggttccacatcacttgcaatcaagataatcgagtcactagagtggatttaggtaattcaaacctatctggacatttggtaccagagctcgggaagcttgagcatttgcagtatctggagctttacaaaaataacattcaaggaaccatccctaccgagcttggcaacttgaagagccttatcagtttggacttatataacaacaacatctncgggcaccattctcttcacttgngaaacttaagtctcttgtatcttgcggcttaatgacaac

SEQ ID NO: 212388 - DNA, 268 bp, Gossypium hirsutum
gttttgttgttgccacaaacatagctgaaacttctttgacagttgatggtgttgtgtatgttattgattctggttacgtgaagcaacggcaatataacccagcaactggaatgtattcccttgatgttgttcaaattagcaaggtacaagctaatcaacgtgctggacgagccggaagaacacgtcccgggaagtgttaccgtttatacccatccagggtttaccatgatgatttccttgatgtaacagttcctgaaatacagcgatc

SEQ ID NO: 212389 - DNA, 301 bp, Gossypium hirsutum
cttggaggtcgagagttcggataccattgacaatgtgaaagccaagattcaggacaaagaaggaatcccaccagaccaacaaagattgatttttgctggaaaacaacttgaagatggaagaactcttgccgattataatatccagaaggagtctactctccatttggttctccgccttcggggtggtatgcagatctttgtaaagactcttaccggaaagaccatcactttggaggttgaaagttccgataccattgacaatgtgaaggcaaagatccaagacaaggagggtatcccccca

SEQ ID NO: 212390 - DNA, 344 bp, Gossypium hirsutum
gccgccgcctgcgtctctctcttcatctctctgaacctaaaagtctttagcttttcgcttcgagagagaccatgttggtttaccaggatctcatctccggtgacgagcttctttctgactcattcccctacaaggaaatcgagaatgggatgctgtgggaagttgagggaaagtgggttgtgcaaggagctattgatgttgacattggtgccaatccttcagccgaagatgctgatgaggatgaaggtgttgatgaccaatctgtgaaggttgttgacattgttgacactttcaggcttcaggagcaaccccctttcgacaggaagcagtttgtcgtgttcatg

SEQ ID NO: 212391 - DNA, 415 bp, Gossypium hirsutum
  unsure (1)..(415): unsure at all n locations
gccatgttagatctccttctacatgtataatttctggcttgaaatttctatgcagggaggtgctattcggcaagaactttattaccttctcaaagacgagaaagatgtacactttgcattcggcacaattcaagggaatggagtcaaccaggctgggcatgggatggcgtcatccaaattctgcctcaacattgccggtgatacaccgtcttcgaaccgtctctttgatgctattgtcagccattgtgttcctgtgattgtaagtgatgagatagagctaccatttgaagatgtcatcgactactcngcaaattgcattttcgttcgtgcatcagatgttgtgaagaagggatatctactgaaccttctcagaggaatatcgagagaccagtggaccaagatgtgggaaaaattg

SEQ ID NO: 212392 - DNA, 275 bp, Gossypium hirsutum
cggacgcgtgggcggacgcgtgggattttctcggctttgacgaggagccgacgctgccatggataacgtcagtatctaccgctactatgggaagacctttaagaagccacgacgtgcgtatgagaaggaacgattggatgctgagtcgaggcttgtaggagagtatggtcttcgatgcaagatggagctgactaggggtcagtatgcgttgaggcgcattcgtcatgctgatatggaccttctcactcttgatgagaagaactctcgtggtattt

SEQ ID NO: 212393 - DNA, 305 bp, Gossypium hirsutum
atttcattgctttttaaatatcatccatggcatataagcttcttaagtcattggaggtggtggcgatttcagtgctgtttgtaatattgcaaaactcggcaaatgcaaagccccaagtgccatgctatttcatttttggggactccttatccgataatggcaacaacaataaccttaacaccttggccaaagtcaactattcaccctatggcattgattttcccaaaggaccaacaggaaggttcagcaatggcaaaaacatgcaggattatattgctgagtatttggggttcacacgttctatg

SEQ ID NO: 212394 - DNA, 350 bp, Gossypium hirsutum
ccctaatctagacccagaaagctcttcccagaaaaaaatgggaagaggcaaaatcgagattaagcggatcgagaacaccactaatcgacaagttaccttctgcaagcgccgcaatggactgctcaaaaaggcctatgaattatctgttctttgtgatgctgaggtggctctcatagtcttctccagccgtggccgtctctatgaatatgctaacaacagtgtgagagcaacaattgagagatacaagaaagcatgctcagatgcaacaactccaaggtctgtggctgaagccaacattcagttctaccagcaagaagcaaaccaaactccgacgacaaaattcgtgatgt

SEQ ID NO: 212395 - DNA, 342 bp, Gossypium hirsutum
  unsure (1)..(342): unsure at all n locations
cccacgcgttcgcccacgcgtncgcaaggatccgtgctgctgttcccaccatcaagtatttgatgggtcatggctctaaagtcatcctctctagtcatttggtaatttgttatgggatacttttggttttgatggctgttgggaactttataaacacaatacagacactcgtgacaaaatcaatgtttaaagcaaagatgaaaagatctaagagcaagccggagttggattaaaatgtccttgattgttaggactgagcaatgctttctttacaggtaaataaaccattagttatattcattgatgaaactgatgctttagcaactagacgtcaggggattt

SEQ ID NO: 212396 - DNA, 407 bp, Gossypium hirsutum
  unsure (1)..(407): unsure at all n locations
tgcctacaacgctgccaccttttttagtccaaatttccatgaggaacaacatgattgaaggcacaatccctccaagtcttaaatatttgaaccttctgcaagtattagacctgagtcacaacaaactcaccggctcagtcccttatttcctctttaaccacccatctcttcaacaactcactctcgcattcaactcctttgattctttacaagctccctctaatctaggcacccaaagtgagcttattgctgttgacttgagcaataacgagctacaaggctggttacctcctttcttgccattaatgccaaacctgtcagctttatccatggaaaacaaacaagtttcggtatgatccctatcaatacgcattgagagccgctctngctgcctccggaatgccccg

SEQ ID NO: 212397 - DNA, 165 bp, Gossypium hirsutum
tcgtttaaagttatcaaaaaagaaatttgtgagagggagggttcagttgaagaggggggagaacaagatcaacaggcgagttactttctccaaaaggagagctgggttgttgaaaaaagctcatgagatctccatcttgggtgaccgctgaggtcccttttgatt

SEQ ID NO: 212398 - DNA, 317 bp, Gossypium hirsutum
ggtattcttataacgggcaattcccgggaccaaatcttaactctaccaccaacaacaatatcgtggtcaatgtgttcaataaccttgatgagccattccttgtaacatgggacggcgtgcagcatatgaagaactcttggcaagatggtgttctgggaaccaactgtcctatcccccctgggaagaattacacctataaattccaggtgaaggatcagattggcagctacatgtactatccggtgacggctatgcacaaggcggttggtggttcggtggcctcgtgttacagccgctactcatcctgtccctacctg

SEQ ID NO: 212399 - DNA, 327 bp, Gossypium hirsutum
cccacgcgtccgccttaatttcttaaatccagaaaacaatttctctctttcctttttctttttttttttaatttcgatttttctggggatttttgaatctgggtatttctgaaaatggggaaaaaccaagcctacaagtctatgcaaagagccaggcttggctcttcctctgctggccctgaagagatcgaggatggcatggtggatggttcttttcattcaccagagtggcatgctgctcgtttggccagtcttaaaacttctcatacagttacgtgggaagagttccaaaagaaacaaaaagaagatgcattggaaaaggggaat

SEQ ID NO: 212400 - DNA, 347 bp, Gossypium hirsutum
ctttatgttgaccatgtaatactcaaatgtgttggttattttcttttccatgagcatgtgaactttggatataatacaggaggtttgattcaattaaaccatggaaggcctcagccactgcaatacgtagtcaatgcagccttcttagccgccctatatagtgattatcttgatgctgctgatacacctggatggtattgtggtcccaatttctattcaactgatgtcctgcgtgaatatgccaaaacccacattgattatatccttggcaaaaatcctcgaaaaatgagctatgttgtgggctttggtaaccattatccaaagcatgttcaccatagaggtgcatc

SEQ ID NO: 212401 - DNA, 292 bp, Gossypium hirsutum
  unsure (1)..(292): unsure at all n locations
cccacgcgtncgcccacgcgtccgcccacgcgtccgaattttttaaagttttttaatttttaaaataaaaatgggccgggccggccgggcccgggcttatgattttttttttccaggccgggcttgggcaaaattttacgcccatgagtacctctagtcaggccttgagacgaggcgcgggcggtgcgttcgaggaagagcggcgtacatgggagctagggtttttgcttctgctgaaactgtttaatcatttgagcttgtaatttttgggctagattttttatttatttat

SEQ ID NO: 212402 - DNA, 331 bp, Gossypium hirsutum
ctctgtgttgtctctcccaccaactcgcgagataacccagttgaactcacaaaggagaaaggggaagggaaaatgagtctggaaccgtttatttacagcttcgtggctcgaggaacaatgatcttggccgagtacactgagttcactgggaatttcccagccatcgcaactcagtgtttgcaaaaactcccttcttctaataacaagtttacttacaactgtgatcaccatacctttaattttcttgttgaagatggttacgcttattgtgttgttgccaaagattccgttggaaagcaaatctctattgcatttttggaacgtatgaaaa

SEQ ID NO: 212403 - DNA, 351 bp, Gossypium hirsutum
  unsure (1)..(351): unsure at all n locations
gcagtatgcattttgtcagccaacggggctgtctctactgtaactcttcttcagccatcatcttcgggtggcactgttacatatgaggggcgattcgagatattatgtctatcaggctcttacctgctgatcagcaacaatggctcttgcagccgaagtggtgctcttagtgtttcccttgccactcctgatggccgcgtcattggtggaggtgtcggagggatgcttattgcagcaagcccggttcaggtgattgtcggaagtttcaatggggtggtccaaaggcaaagaacaagataccggaaagtcaagaatgtctaaatganctcgacaatcagagtgtcgacaatc

SEQ ID NO: 212404 - DNA, 389 bp, Gossypium hirsutum
cccacgcgtccgaaacctatgaattgtttcctatgtcgcatgttatggcaaccagtgtgggagctctcctcactgaggttcgcaagaacggaacttgcacgttgctgacgccctacggcaagactcaaatcatagtcacattattacaacgataagggtgccatggtgcctgttcgtgaccacatcgcgctcatctcctgtacacatgaccagaccgtgactaaccatgagatagctgctgatgtgaaggaacatgttatttagccggctatacccgctaagtaccttgatgagaaaaccatttttcaccttaacccgtcaggccgtgtcgttattggaggtccccatggtgatgctggtctcactggccgcgcgattattattgatac

SEQ ID NO: 212405 - DNA, 388 bp, Gossypium hirsutum
gaagaatttacgtagtgaccgatccttcagatgatgattttttaaatcctaaacctggaaccctacctcatgctgtgatccagaaggaacctctttggatcatctttgcacgagctatgatcatcaggctaaaagaggagctcattatgtcgggtaacaaaacaatcgacgctaggggagccaatgtgcatgtggcttatggggctggtattactatccagtatgtgaggaacgttattatccatggcctccatattcaccacattgttcccggcaatggcggcatgatcagggattccgtaaaccactatgggttcaggacaaaaagcgatggtgatgggatttctctttttggagcaacgaacgtttggcttgatcacctttcaat

SEQ ID NO: 212406 - DNA, 170 bp, Gossypium hirsutum
gctgaagctatacaatatcctgtacgaaccaaccagattccaagggagattcctgctcgcaaatatccatcttggcttcttgttcttggtgcagggacccttccatttggaaccctgttcattgaactcttcttcatcctttctagcatctggcttggcaggttctatta

SEQ ID NO: 212407 - DNA, 322 bp, Gossypium hirsutum
aagaacactgtcggcggcaatggcaacttacgatctaaccccgcgtatcggcccgaacctagacaggcacttagtgtttccattgctggagttcttgcaagagcgacaactatacccagatgaacagatcttgaaagcaaagatcgagcttttgaacaagacaaatatggtcgattacgctatggatatccataagagcctttaccgcaccgatgatgtccctcaggacatggtcgataggagagtcgaggttgtcgctcgtctcaaagctttggaagatgccgccgctcctcttgtcactttcttgcaaaaccctaacgct

SEQ ID NO: 212408 - DNA, 413 bp, Gossypium hirsutum
gctttaatcctcgcttttctccgccatcaaccacttcctcgttttctcaaggttgtagaagatggcagagggcgaggatatccaaccccttgtttgcgacaatggaacaggaatggttaaggctggatttgctggggatgatgcaccacgagctgtgtttcctagcatcgtcggtcggcctcggcacaccggtgtaatggttggtatgggccaaaaagatgcatatgttggtgatgaagctcaatcaaaaagaggtattttgacgttgaaataccctattgaacatggtattgttaacaactgggatgatatggaaaagatttggcatcatactttttacaacgagcttcgtgttgctccggaagaacaccccattttacttaccgaagcccctcttaaccctaaagcaaatc

SEQ ID NO: 212409 - DNA, 365 bp, Gossypium hirsutum
cccacgcgtccgaaacccctgaattgatgcctttgacgcatgttttggcaaccaggcttggtgctcgcctcactgaagttcgcaagaacggaacttgcccttggctcaggcctgatggcaagactcaagtcaccgtcgagtattacaacgataagggtgccatggtgcctgttcgtgtccacaccgtgctcatctccactcaacatgacgagaccgtgactaacgatgagatagctgctgatttgaaggagcatgtcatcaagccggttatacccgagaagtaccttgatgagaaaaccattttccaccttaacccgtcaggccgtttcgtcattggaggtccccatggtgatgctggtctcact

SEQ ID NO: 212410 - DNA, 413 bp, Gossypium hirsutum
ctgtagtattatgagccatcaagggactagctttacctaaaggcctcttaatccttaataattttcttttcaaagatatcttcaaaatactcttttttcccggtaaaggaaaaaaggagtattggatttgctttacgtggtatgaaatactaagattaagtatctggaggtaatactcttaaaataaattgcatatgtggaggcaatatagttgcttcttccttttgcaaatcaatgacaatactttttctggtgatttacttataggtatggcaatgctaatgtttggaagatctttacagacctttttgactattttccattaactgctttggtggaatcagaaatattttgtctgcatggtggattgtccccttcaattgaaaccctggataatataagaaactttgatc

SEQ ID NO: 212411 - DNA, 426 bp, Gossypium hirsutum
gggaagaacttcgaaaattgcttggccattcggaaaggagttgattttttgcttagaacccaaagagaagatggtggttggggagagagttacctttcttgtcccaaaaaggtatatacacccattgaggaaaaagaatcgaatttagtaagtactgcacaagcaatgatgagtctaattgttagtggccaggctgagagggatcctacacctctacatcgagctgcaaaattgttgataaattctcagttgccaaacggaggttttcctcagcagggactggctggtgtcttcatgaggaactgtatgttacactatgcaatatatagaaatgtttttccactgtgggcgcttgctgagtatcgggaccatgtttggccttcaaaatatatatgcttttgaattataagaatggatcagagaatt

SEQ ID NO: 212412 - DNA, 425 bp, Gossypium hirsutum
  unsure (1)..(425): unsure at all n locations
cagtgctcacctggagtggaacctcgatggtctcctggataagatatgggagtatcttaatttaactcgcatatacacaaaaccaaaagggatgaacccagactatgaagatcctgttatcctgtcatcgaagagaaggacagttgaggacttctgcactcgaattcataaagacatgcttaaacaatttaagtatgcacttgtatggggatcaagcgtaaaacacaagcctcaaagagttggcaaggatcatgaacttgaggatgaagatgttgttcagattatcaagaaagtgtgatttgaggatattggaatttatgccttcatgttttaggaatcccatgaatcatattgctcaacattgtaagctgctgccatttaggttgtggagcttgaaattangtgaaaaacgtgacagcttgaat

SEQ ID NO: 212413 - DNA, 383 bp, Gossypium hirsutum
atttgcccaaagacgtgtgcgcgttttcaatagcctcatcggggaaaaggtgtgtgttggaaacggcggcggacaaaggcggcgacgtcgagcatcaatgccggacatcggaggtcgtggtggagaggatggcggattatatagagagtgatgaatgtgttgctgcctgcggcgtcaatagaaactccatcggcatatcatcggattcacttctcgatcaacaattcacggccaagctttgtgcaccagcttgttaccaaaactgtcccaacgttatcgacctttacttcaatttggccgccggtgaaggtgtgttttttcctgatctttgtaacgctcaatggtcgaacccacggcggagcatggtggaccttatatcgagc

SEQ ID NO: 212414 - DNA, 408 bp, Gossypium hirsutum
ggcacaggcatattgtgagactgttgggtttttgctcaaatcatgaaaccaatctcttggtttatgaatatatgcctaatgggagtttaggagaggttcttcatgggaagaaagggggtcatttgcactgggataccagatacaagatcgcggtcgaggcggctaagggactatgctaccttcatcatgattgttcccctttgatagtccaccgggatgtgaaatcgaacaatatcctcctcgactcggagtttgaagctcatgttgctgattttggccttgctaaattcttgcaagattctggcacttccgaatgcatgtccgccgtagctggttcatacggttacatagctccagaatacgcctacacactgaaggtagacgagaagagtgacgtgtatagctttg

SEQ ID NO: 212415 - DNA, 317 bp, Gossypium hirsutum
cccacgcgtccgccatcttcccttccttataactatcctcctcctctccaccctggacccattaagcgcccccttccttttccttttccttaattgggggggagggaccgtttttttgttggggaaagaaagttttgagaagccaaaagagaggggaaaaaatgtcaatggacttgacatctgaacgtgtttggtatgttcacttgaacttctgcaacaccattttagcggttagtgttccatgcaacagtgcgttcaacatcgtgactgttagatgtgggcattgtgccaatctgctgtctgttaatattggaact

SEQ ID NO: 212416 - DNA, 426 bp, Gossypium hirsutum
ttaccatgttaataacgcatgatgcctgaactacggggcccaccattcgtctagctaaaacactgactgatctttttatgtaaaaaagccgtagaagcaagtattggtttgttctttgaagatcaggagcaaaaccttcctgagccctgtaaatactctgcatctctgggtatattgatgatacaagcattggattagatatcaatgatgtgcagttaattatccaggaaaatgattggcaaaagcagaacattaaaaggtgtacgattctcttctaggggttcttcgacaggttcaaacaccttgggaagtgctgctactgatagtcaaagcacgggagatgaaactctaactcaatcagcagaagaagtacctggaagtccagctgaggctactaagggtactaagagaaagcgagagcctaca

SEQ ID NO: 212417 - DNA, 434 bp, Gossypium hirsutum
gaagaatttacgtagtgaccgatccttcagatgatgattttttaaatcctaaacctggaaccctacgtcatgctgtgatccagaaggaacctctttggatcatctttgcacgagctatgatcatcaggctaaaagaggagctcattatgtcgggtaacaaaacaatcgacgctaggggagccaatgtgcatgtggcttatggggctggtattactatccagtatgtgaggaacgttattatccatggcctccatattcaccacattgttcccggcaatggcggcatgatcagggattccgtaaaccactatgggttcaggacaaagagcgatggtgatgggatttctctttttggagcaacgaacgtttggcttgatcacctttcaatgtataagtgtagggatggtctcattgatgcccattcagggtcaact

SEQ ID NO: 212418 - DNA, 416 bp, Gossypium hirsutum
cttactctcatcttctcaagaaacaaacaagtcatcacttaaacccactcaaacgcaaatggcacgtaccaagcaaaccgctagaaaatcaacgggaggcaaggcgccgaggaagcagttagccacaaaagcggcgcgaaaatcagctccggcaaccggtggagtcaagaagccgcataggttcaggccaggaactgtggcgttacgtgaaatccggaagtatcagaagagcacggaacttttgatcaggaaactcccatttcagaggttggtaagagaaatcgcccaggatttcaaaacagatctgaggttccaaagcagcgctgttgctgctctccaggaggccgccgaagcttacttggttggactttttgaagacaccaatctttgtgctattcacgctaaaagggttacta

SEQ ID NO: 212419 - DNA, 422 bp, Gossypium hirsutum
ggagtgtcgcagtgacattcataggctaaatgcacctttacttgctatttacgagtcacttattccgcctaaagaggaaaaaactaagcaacaacagttattggcgttactcgagaaactagtttggaaagaatggcctcaagcaaagttatttccttatggttcatgtgttaatgattttggggtttcgagaagtgatattgatatctgtcttgcacttaatgaggatattaacaacaaatctgaaatcttgttaaagttggcggatattttgcagttggataatcttcagaatgtgcaggcactgactcgtgctagagtccccatagtaaagcttatggatccggtgactggaatttcctgtgatatatgcataaacaatgtattggctgtagtaaatacaaagcttctaaggattatgc

SEQ ID NO: 212420 - DNA, 395 bp, Gossypium hirsutum
ctcttcttgtacacaaagatttagtgacaaatggtgcacttaatgagctaattgttgatcttcgtatacaaggtgttactttatatggtggaccaagggcaagtttattgttgaatatcccacaagcacgctcttttcatcatgaatacaattcaatggaatgcactgttgaaatagtggacgacgtggctgcagccatcgatcacatccatcaccatggcagtgcacacacagattgtatcatcaccgaagaccaagaaactgcagaaatcttcttgcatcaagttgacagcgctgctgttttccacaatgcaagcacaagattttgtgatggtgctcgattcggtctaggcgctgaggttgggataagtacaagtaggattcacgctcggggt

SEQ ID NO: 212421 - DNA, 409 bp, Gossypium hirsutum
aaagagcttagggttttaggagctgaaaacttaggaagagacagcgatgatggctacatcaagactgtttggaaggtgcggcggattgttagaagcggcgaaggctttctctgcttccttcgcttattcgtcttcttcttcttccagtggaaatggaagggggcttatgcgggtgatacctgtctctccacagctgggcaagttccttggagcctccgaagcttctcgcaccgacgccattaaaaggatttgggactacatcaagctccacaatctccagaaccctgcaaacaagaaggagattatttgtgatgagaagttgaagacgatattcgccgggaaggagtctgtcggaatgttagagatcagcaaatatctctccccacattttctgaaatccaaataatct

SEQ ID NO: 212422 - DNA, 418 bp, Gossypium hirsutum
aaagctatgagatttttgtagctttttgttcttgaagagtggcggcagggagagagggaggattttggacggctgagatggatcgggaaggaggatcccacggcggatcttgttattactacgttcttggaattcgtaaggatgcctctttctctgatatccgcactgcttatcggaagctcgctatgaaatggcatccagacagatacgccagaaacccaggaatcgccggagaagccaaacgccggtttcagcaaatacaagaagcttattctgtcctctccgacgagagcaagcgatcaatgtatgacgccggcctttacgatcccttggaagaagaagaccaagacttctgtgattttatgcaagagatgatgttcatgatgaataatgtgaaagacgagggtgatagttttga

SEQ ID NO: 212423 - DNA, 365 bp, Gossypium hirsutum
ccaaggtctcggagctgggaaagccgccgatttgacctactgggagagcgccgctcgtatgatcgctgatgtagcgaaatcgaacaagatcgtggtcgaaaaatcgacggtgcccgttaaaacagccgaggcgatcgagaagattttgacccacaatagcaaagggatcaacttttcgatactttcgaaccctgaattcctcgctgaaggcactgcgattagtgatttacttaaccctgatcgtgttcttatcggtggcagggaaactccggaaggtaaaaaggctattgaagcattgagggatgtgtacgcacattgggtccccgtggatcgtatcttatgcaccaatctgtggtctgctgagc

SEQ ID NO: 212424 - DNA, 406 bp, Gossypium hirsutum
  unsure (1)..(406): unsure at all n locations
gaagttctgagaaattggcctcagaaggatattcaagtcattgttgtcactgatggggaaagaattttgggtctaggagacctcggatgtcagggaatgggaatacctatagggaagctttctttatatacggcactaggaggggtctgtccgtctgcttgcttgcctgtaaccattgatgtgggcacaaacaatgagcagttgttgaatgacgagttctatataggacttaggcgaaggagagctaccggactggaatatgccgaacttatggatgaattcatgactgcagtcaagcagaactatggggagaaagttctcattcagtttgaagattttgcanatcacaatgcatttgatttgcttgctaaatatggcacaactcatctggttttcaatgacgata

SEQ ID NO: 212425 - DNA, 427 bp, Gossypium hirsutum
gccgattccatggacagagtagagcatatgcagagagcagcacagaccaacaaatgcttatgcttttaaatactccatacgccctctcactttctcgctcattagcttcttcctctttcccttctcctcccacgcgccgccttcttttcctttcttccacttttacccttcctccccctcgattcccccattcctccctcgtttcctcgagggtatccccgtcttttcgcacccaagcttcagccgccaccgcgaccatgggtgacgctccccacgttggtatggacgctgtccaaagacgcctcatgtttgaggatgaatgtattttagtggacgagagtgataatgttgttggccatgaatcgaagtacaactgtcatttgtgggaaaagattctaactggaaagatgctgcataaagcattcag

SEQ ID NO: 212426 - DNA, 404 bp, Gossypium hirsutum
gaataagcagggcttccatattgttggatatggctgcacaacttgtattggaaattcaggagaattggatgaatcagttgcctctgctatttcagaaaacgacattgtagcgtctgctgtactttctgggaaccggaattttgagggtcgtgttcatgccttaacaagagccaactaccttgcttcacctcctttagtggttgcatatgcccttgctggcacggttgatattgactttgacaaggagccaattggaactgggaaggatggtaagagtgtctatttcaaggacatctggccttctactgaagaaattgcagaggctgtccaatccagtgtcttgccagagatgttcaaaagtacttacgaggctattacaaagggcaatcccatgtggaatcagc

SEQ ID NO: 212427 - DNA, 433 bp, Gossypium hirsutum
cagtgcttggcaaatgcctcagggtgggattgatgacaatgaagatccaaaagttgcagccctcagagaattaaaggaagaaacaggtgttagctcagctgaagttctcgcagaggtaccttattggctgacatacgacttccctccagaagtcagggaaaaactgaaacatcagtggggatcagactggaagggtcaagctcaaaagtggtttctccttaaattcacggggaaagaagaagaaatcaatcttctgggtgatgggagtgagaaacctgagtttggtgaatggtcttggatgacaccagagcaaatagttgagcatgcagtggatttcaagaaacctgtttacaataaggttttggaagttttcactccctacctccattgatatttgcaaacatcaccatttctaatgtgttgagatcatagt

SEQ ID NO: 212428 - DNA, 298 bp, Gossypium hirsutum
aggatttctaaattagactgcagaaggaatcatgtgcatttatgaatggaagggaccatccgtgatatatgcttcttataccgcagaagaagtttctcatgggattgatggatctgctcctactggcatggatacaggatcatctagtggtattggtgaagagacaactatcgttctcgaattgagcggagtgcacatacttatggcggtatggaatgcagatgcccgtcagaatgtcaaagaatcaatactatgagaaatccctagtgctaacactgatgttatggaactggatctg

SEQ ID NO: 212429 - DNA, 428 bp, Gossypium hirsutum
cccacgcgtccgagtaaatggcaaatggttactggaatcggcgacaaccaaatcctccgatgctctcttctggtgggatgcttaaacgaccacgtactgattacgatgctccgccttctggaccacgttcagctcttgagatgcctagttatttggcaagagatgatgatcatggtgggcatctgtctgtgagggatacaaaatctattggatcagcatatgatcgttatctccagagtgcaaaactttcttcttttacttctggagaagctagtgcatttggtgggtcaggaagggctgttggtggtgcaatgcctgttcatccaatagctgatcctcccctgatgggtcgtcttggatctgctgctccagatctgtcatcaaatggtcataatatcggttatagtggtcaacatccagtggatgca

SEQ ID NO: 212430 - DNA, 431 bp, Gossypium hirsutum
cccacgcgtccgaaaaaaaaatctttccagtttctattttctaaaaacaaaactgaaaatgtcttgctgcggaggaaactgtggctgcagctctggttgcaagtgtggcaatggctgtggaggatgcaagatgttccctgacataatagagaagactacaactgagactattgttcttggtgtgacaactcagaaaatgcactttgagggatctgagatgggagttggggttgagaatggatgcaagtgtggagacaactgcacttgcaacccttgcaattgtaaataagagggggggaaaatgaacaacaaagagaagcagagaggcctttgtctttttaactaaataaattctattactttagtatgtatcagcaaatcttcatgaggatttggttcttaattatgtgtaatgtgggcttttctgctat

SEQ ID NO: 212431 - DNA, 368 bp, Gossypium hirsutum
tgcactcattagcctgtctctcatggaatcccatattgagaaacaaaatagagatgtgcttcaaaaatctttcaaagagatgatatctactctccctaaagagaattgttggggtattcctgaagctctatatcaatatcagggtttttggctcacccccccttttctacaaggagcattgtcggctcaacaacaattccaggctcaacccactgatatcatcctttgtagctctccaagaacaggtgcagcctggttaaaatccctcactttcgccactattacaagaacttcatacaatgattccaccacccctttactttccaagatgcctcatgatgttgtgcctttcatggagttcgatcatg

SEQ ID NO: 212432 - DNA, 400 bp, Gossypium hirsutum
  unsure (1)..(400): unsure at all n locations
ggggcttgagttttagccaaagaaaactccatggctaaacttgttgctactttcttcttggctctcattgccatctccatgggtcaaactttggttatggcatcacatggacatggtggtcaccattatgataacaaacgttatggacctggaagtctcaagccttaccaatgtccatctcagtgcacaaggaggtgtagccagacacagtaccataaaccatgcatgttcttctgtcagaaatgttgcaggacatgcctttgtgttcctccagggtattatgggaacaaacaagtttgcccttgctacaacaactggaaaaccaaggaaggaggccccaaatgcccttaaattactcanaagaagacccttttttttcttttttacattattatcccta

SEQ ID NO: 212433 - DNA, 395 bp, Gossypium hirsutum
ggggcttgagttttagccaaacaatactccatggctaaacttgctgctactttcttcttggctctcattgccatctccatggtttaaactttggttatggcatcacatggacatggtggtcaccattatgataacatacgttatggacctggaagtctcaagccttaccaatgtacatctcagtgcacaaggacgtgtagccagacacagtaccataaaccatgcatgttcttctgtcagaaatgttgcaggacatgcctttgtgttcctccacggtattatgggaacaaacaactttgcccttgctacaacaactggaaaaccaaagaaggaggccccaaatgcccttaaattactcaaaaggagaccctgtttttttttttttacattattat

SEQ ID NO: 212434 - DNA, 434 bp, Gossypium hirsutum
ccttcacaaaagataatcagagagttcaagaagaatgaacttcaaaaacatgttgctcagcaaactggtccaactacaacgaaagctagtgtcacagaatggcaggtcttgtatactacacaagtaactcaaaaggccaagaagtaccatgatggtttcttaaaactcgtaaattctgcagcgctgcagagacagattatgttatatgatggaagcaagaaactaataaatagcagattcctcaataaagatgaagtaatacaatctggtgaatcaataacgtttgatgctcatttggtaaatattggagaagctgaaggaaaccatccaggcctcatggactctgatgcccatgtaagcaattataatgctgctggtaaaacagagatgatccacagagtgcagaatcgtcttaaaacccacaaatcgttttt

SEQ ID NO: 212435 - DNA, 419 bp, Gossypium hirsutum
aaagagagcaagctgaaagaaatagattagcggaatctcttgatgcggatgtcaagaggtggtcgagtgggaaagaagggaaccttcgtgcattgctttcaactttgcaatacgtatgtactattatccaaattctctccaatcaagcttttataatcatttcctttgtttactgggtcgtttaattgacttaatgcttaatcttccatcattcggaataatatcaaaatttctcattgctaatgtactttgatatccttacaacaagttaaaacccgagctttcttcatttgacggatccttggcccagagagtggttggcagccaattccgttaaccgaagttataacttcagctgccgttaagaaagcatacagaaaagccactctttgcgtccatcccgacaaattacagcaacg

SEQ ID NO: 212436 - DNA, 427 bp, Gossypium hirsutum
caaggtgcagccacatatttacacttggatcaacagatatgggaggaattatctttattggaacggtattcgacctgaactggttatttcagagcctgaactattcaaagaggttctcaaaaatagtgaaaatacatttccgaaaaagaagccttcgatcttttttagcaagctactggggaacggacttgtgcttcttgagggtgaaaaatgggtgaagcatcggaagctagccaatcatgttgtccatggggaaagattaaagaacatgacaccagcagtaattgccagcgttgaaacaatgttagagaagtggaaaggccaagaaagaaaagaaattgaagtgtttcaagaatttagattgctgacttcataagtgatatccagaacagcttttggtagcaactacttggaaggggagaagatt

SEQ ID NO: 212437 - DNA, 424 bp, Gossypium hirsutum
gccgagatctcgtcttcctgtctcaagttagctgatctccaaagctctgtattttgctgagttctctacttcatttgcaatggcggacgaggaacctgttgatcagaaaaaatatcttgaagatggttgcaagcctaaatgtgtgaaacagcttcgttcatatgaggcatgtgttaagagaatccaaggtgatgaaagtgggcacaagcattgcactggtcaatattttgactattggtcttgtgttgataaatgtgttgcaccatcgctattcacaaaactgaaataaccagggccagagttgtacaacggtagcatcatgtcatgctgttgaatgattgtttcagacaatttggctccataaacttgacaagtgttaaaatttttttgtgttactttggaagcatttaaataaaattggatc

SEQ ID NO: 212438 - DNA, 399 bp, Gossypium hirsutum
  unsure (1)..(399): unsure at all n locations
cccacgcgtncgctagatcgtatggctaactgggtcggcaccagcatggcatctgcatttttcgcatcattggagcgctgctcctgtattaatctcagcaccaccgattttgatgacgaagaggaagcctatgaccgccctcttgtactcaccaagcccctcatccacgacgaacctgaaactgaaccacaaccccgtccagccgcttagacccttttcactgtcaatttgctcgaccttcgtcacttcgtattctagggttcgttccttatatttatgtacttttctttttagttttatacgtgccgaggatattgtgaatcaattctcgcacaggttggtttataatttgaaagaattntggttcttttcttatttattttaatggaactcccttgg

SEQ ID NO: 212439 - DNA, 419 bp, Gossypium hirsutum
ctccgtcaaaaattgtgattcctaaagggatatattttttaagtacagctaccttagatggtccttgcaaggctcctattgagcttcaagttcaaggcactgtgaaggctccggtagaccctggtgctttcaaggagcctaaatggattgctttcaatagaattgaaaatttcaaattgtctggcggaggagttttcgacggccagggaaccactgcttataaaagggaaggttgcaaaggtcatgattattgtggttcacttcctattaacctaaggtttgattttttaaccaacgcaatgatacaagatataactaccaaagacagcaagcagttccaggctaatgttctaggatgcaaaaacattactttcgaacatttcaccgtatctgcacctgacgaaagcccaaacacagat

SEQ ID NO: 212440 - DNA, 399 bp, Gossypium hirsutum
cccacgcgtccgtgttcagtcagggcagatacacttttacaatacaaggacccatacgagaacatcaaaggatccaaggagaagccctgaacccccaagccccgttcacatgagcttagaccttgagctaaacctaccatgcgattcatcagtaaggaaagttgatgcaacagatcaccaattattcaacaagcacaactccatcggccccacgagggccggttcagttgataagaagatcaactcatcgggaggattaactcgcaacctttcgtggttggcagtggaggagaatgatcagcaagagcaagagatggtagcaacagtgtgcatgagatgccacatgttggtgatgctttgcaagtcatcacctgcatgccctaactgcaaattcatgca

SEQ ID NO: 212441 - DNA, 377 bp, Gossypium hirsutum
cccacgcgtccgtatttttccttctctttctcattctttcttcaattaataaccaatcaaagtgctctctttgcttttccctgttttataagtcatcgaactgttgtttttcttgatctctccatcattcccgtttctgggtttttttgttttttttttttttgagtttttagtaggtagccatgaatgctcttgctgcaaccaaccgcaatttccgactggcgtctcgtttacttgggttagactctaagcttgaaaagagtcttctgatcccttttagagaaatcaaggtggagtgcacgattcccaaggacgatggaaccttggcgacttacgttggatttaggatccaacatgataatgctcgtggcccgatg

SEQ ID NO: 212442 - DNA, 282 bp, Gossypium hirsutum
ctctcttctttgttttccaatagtgcgtaacaatgtcgggctcacttcaagctgcagctaccctgatgcaaccaatcaaggttgctgcaccatcaaagaccaaagtgctgctcaggtcctcccagagcgtttctaaggccttcggtttggagcctgttggtgctaggctcacctgctctttgcaaactgacctcaaggacttggctcaaacgtgtgttgatgctaccaagctcgctcggttcgctcttgctacatctgctcttgttgtctcgggagcaagcg

SEQ ID NO: 212443 - DNA, 386 bp, Gossypium hirsutum
gttctcacttaacccgtttgcctccggcatcttcccactcatggcttcggagaaagaagctgcccttgctgctgctccctctgattctcctaccatatttgacaaaatcatcaacaaggaaatcccagctaccgtggtgtatgaagatgataaggtcttagctttcagggacatagctccccaggctcctacgcacattttaattattccaaaatcaaaggatggcctaacgggtttgtctaaggctgaggagaggcactgtgaaatccttggctgccttctttatactgcaaagcttggtgcaaaacaggaagggctggaagatggattcaggattgtgatcaatgatggccctaaaggatgccaatctgtgtatcacattcatg

SEQ ID NO: 212444 - DNA, 373 bp, Gossypium hirsutum
  unsure (1)..(373): unsure at all n locations
cccacgcgtccgctcaaagtactcgtatccaaatacatgaaaaaaggtgcaaaaattcaattaatattaggatcagttcatcctggttcactcaccatcaatcttggatcttcgggtgtgatggcttattctcgcgaaaaacagaacccccttctgcccgggctgtctgcggtagtcgacgaaattttctgcgtgttattgggacatattgagaacgttggtgtgcttaaacatctatgtggctggcacataacagcatacgangggattatcgttactgaagcttactgaaccgttagaggctgacgcccttacccttcttaccaggttgtgagatatatacaggggaaggtcattttcatgctcttcgata

SEQ ID NO: 212445 - DNA, 397 bp, Gossypium hirsutum
aactagagcagcaagaatattttgatccaaagatagctgatgaggagcgtgagaaagggaatgaatgtttcaaacagcagaagtatccagaggctgtgaagcattataccgagtcattgagacgaaaccccaaagatccaaaggcatacagcaatagagcagcatgctacacgaaattgggtgctttgcccgagggattgaaagacgctgagaagtgcattgagcttgatccaacattttcaaagggttacacaagaaagggagctgttcagttcttcatgaaggagtatgacaaagctttagaaacataccaggaagggttgaagcatgatccgaataaccaggagttgcttgatggtgttagaaggtgtgtagaacagattaacagagctagtcg

SEQ ID NO: 212446 - DNA, 408 bp, Gossypium hirsutum
aactagcgcacgatgaatattttgattcaaagatagctgatgaggagcgtgagaaggggaatgaatgtttcaaacagcataagtattcacaggctgttaagcattataccgagtcattgagacgaaaccccaatgatccaaaggcatacagcaatagagcagcatgctacacgaaattgggtgctttgcccgagggattgaaagacgctgagaagtgcattgagcttgatccaacattttcaaagggttacacaagaaagggagctgttcagttcttcatgaaggagtatgacaaagctttagaaacataccaagaatggttgaatcatgatccgaataaccaggatttgctagctggtgttagaatgtgtgtcgaacagattaacatagctagtctaggtgatttca

SEQ ID NO: 212447 - DNA, 414 bp, Gossypium hirsutum
cagtaatgttgcagaatgctactcaaaagagtcaaaaggtttttgttcatgttccatctgaaattgctgctcacgaagttgaggagattggtatgccatttgatgaaatttggtgtcatcttttcaggatattacccttgtggttaagataacccctttttcacttgcaaacagcagtgaaacacttgcttagggatgtaaaggatacaacaattagtacacttgcaactgaggtcacagggaaactcacagctttgaagggtttggatgcgaggttacgggagatacgcggttaccttgatcttgttattgatgagaagcttcctttgaatcatgaaatactttaccatttacagttaaactaagttgagtgaaagctgaaaatgaagctaaagatattttacaattatgaac

SEQ ID NO: 212448 - DNA, 413 bp, Gossypium hirsutum
  unsure (1)..(413): unsure at all n locations
cccacgcgtncggaaacaatggagtccaacaccaaaatgtcagctcttcttttgatttgcatgcttttcatttcttcagtgacaccaattcttgggtgtggttcatgtgggaaagcacacaagcatcgaaagcctaagggaaagtcccctaaaggtcccatcactttgcctccccttgtgaaacctccaatcaagttgccaccggttgttcctccaatagttaagccacccattgacctccctccggttacggtccctccaattaaccttcccccagggacggttcctccagtaactaagccaccaagtgggaaaccctgcccaacaccaccaaccaaggacacttgccccattgacacactgaaattgggtgcttgtgtggatctgctgggagggttggtgcacattggact

SEQ ID NO: 212449 - DNA, 380 bp, Gossypium hirsutum
aaatttttcccggaagatttggggaagtacaaaaaattattgacctgtgggactttgctgggggtttaaccaggcaattgaatgggtctgtaataccttcaaaacgtccaaatcatatgatgttggagatgtggaatccccttggaattgttggtgtaattacggcatttaatttcccatgtgctgttcttggatggaatgcctgcattgcactggtgtgtggaaactgtgttgtttggaaaggtgctccaaccactcctctggttacaatagcaacaacaaaattagtggctgaagttttggaaaagaataacttacctggtgcaattttcacatcattttgtggcggtgctgaaattggggaagcaattgcaaaagat

SEQ ID NO: 212450 - DNA, 412 bp, Gossypium hirsutum
cccacgcgtccgtggcaaactgtctcaagatgatgaggcccttgctattgctaccacaatgccgaagctcaagcaactcgaggtagcatacttgcttattagcacagaaggtgtgggtaagatacttgaaaactgccctgcgcttgaattattggacgtgagaggatgttggaacgtgaagctggatgaaaatcttgtcaagaaattctcacggctgaaggtggtcggacctctcggtgcggattattttgggatgaagggctgggatgattgttcaaactattcatgttcctcaggttacttggcctgagactttgttgctggagatgtcggtattgattacgatgatgagatatcagatgtggattgggaagacgaccaaagtatagaagatgtgggaatgaggttctac

SEQ ID NO: 212451 - DNA, 418 bp, Gossypium hirsutum
attactagtaagcgcgagtcatcagctcgcgttgactacgtccctgccctttattatatatcaaaagcttttacaactgctgcatcaaagttggagaagattggatatgttgatactgaaaatgaaagtgaagcttcggaaccaaagggtggtaaagaggcaattgacttcaaggaagttaagcgtgtggatcatattcttgcctctttacagcgaaagttaccaccagcccctccaccaccttcgtttccagatggctttgttccgcctacaacagaagcagataaagagccagaaaaccagcaaacagcagaacctcagcctcctgctgttgatcccatcatagatcaaggtccagctaagagaatgaaattttgaactcattgtttttcctcccatttcaatggagcattagaac

SEQ ID NO: 212452 - DNA, 297 bp, Gossypium hirsutum
tgagatcgaagaccctagctttagcagcagtctcttctctttgatagtggctgaagatgatgtgtgcttagagagccggatgcttgacagattactggaaattactgacactgatgcccatgttggcagaatggaagccgataatgtagccgtggacgttattgatgaagcaggctggcttcttcatagaagtcacatgaagactatattgggacagcttgattctaactcagaattctatgctctaatgcggttcaagtgggttaaggaatttattatagaccatgaatggtgtgc

SEQ ID NO: 212453 - DNA, 376 bp, Gossypium hirsutum
  unsure (1)..(376): unsure at all n locations
caccaggcggccaacagcggttggattcttgagaagggtcatggcaggggtcaactaatagtcctacctcgaaacgaatttaaccatcctgagctgaagaaaatcgctgctgatagtgttccattggagcacatcacccgcattttccccattcttggttaagcctctagctgggatgaacacttttttggagttatttgtgccatgttttcgttgacattgcgaccattctctttgtttttttgtcttggatatatatatataactgagaacaagctattttaggatagacttgtcaagctaccccaaagattagctttgaatcggntcctttttatatctattttttcacttatcagaatttcagaatatattt

SEQ ID NO: 212454 - DNA, 423 bp, Gossypium hirsutum
  unsure (1)..(423): unsure at all n locations
cccacgcgtccgcccacgcgtncggaagcaatcagtaggaaacccaagtgtctattgcaaacttactcttggcaacactccacctcggcagaccaagattgtatcaactggtcctaatccagagtgggatgaaagttttgcatggacttttgagagtcctccaaaaggccagaagctgcacatatcttgcaagaacaagagcaaaatggggaagagttcctttggaaaagttacaatccaaattgatcgagttgtaatgcttggatcggtagctggtgagtacacgttattgccaaagtaaaagtgggccatcacggaatttggaaatcgaattccagtggtctaacaagtgaagaaggtgagagagataattatcattattattattattactattattatttttcccggaaatttgatgat

SEQ ID NO: 212455 - DNA, 430 bp, Gossypium hirsutum
atgaatctgtctctagcatccctcaaaagtcgctctacctcaatgagcaatacttgaatgtgaaaaaggctttggtcgatgctttctttggtcctcctgaacggggtgtatatagtgcatctgttcaaagcactcttttgcagatggcaaaggctgtacttggcaggttcagtgacatatcatcagttaaactaaaaatgccgaatatccatttcttacctgttaatatatcaagcaaggatcacggcagcattgtaaagttcgatgatgatgtatatcttccgacagatgaacctcacggatcgatcgaagctagcttgagccggttctggtcaaagatgtaggtacaagacaaacgtactgtatggtggaagaaaggtataataaatttctgcttcatgctttgctcattatctaataacgataatca

SEQ ID NO: 212456 - DNA, 408 bp, Gossypium hirsutum
ctcgtttgaaaatctgcgatttcggttactctaagtcatctctgttgcattcaagacccaaatcaacagttggaactccagcatatatagcaccggaagttctggcgcggcgagagtatgatggaaagttggcagatgtatggtcctgtggagttaccctttatgttatgttggtgggagcttacccttttgaagaccaagctgaccctaggaattttcggaaaacaattcagagaataatggccgttcagtacaaaattccagactacgttcatatatctcaagattgcaagaacctactctctcggatatttgttgccaatccttccaggaggatcacacttaaggaaataaaaaatcatccttggtttctgaagaacttgcccagagagctaacagacacagcac

SEQ ID NO: 212457 - DNA, 408 bp, Gossypium hirsutum
cggacgcgtgggcggacgcgtgggcggacgcgtgggttcagatcttcctaaaacagaagaaattgttgatgttttagacacattcaatgtcttagtagagctcccagcagataacttcggagcgtacatcattttaatggcaactgcaccttctgatgtttttgctgttgagctcttgcaacgtgaatgccatgtgaagcaaccattaagagttgttccactatttgagaagcttgcagatttggaggctgcacctgctcctttggctcggctcttctcagtagattggtacagaaatcagatcaatgtaaagcaagaagttatgattgggtatttagattcaggtaaagatgttgggcgtctctctgctgcctggaaattatacaaagctcatgaggagcttataaa

SEQ ID NO: 212458 - DNA, 406 bp, Gossypium hirsutum
cccacgcgtacggccgcgaactcgctgcaaaaagtaacgagccaacttcgagtggctcggagcacgttgggttcgttctcgagaaccttctcttcagatgcattggttgaggttaaaccaggcgaagttggaatggtttccggaatccctgaagaacatcttcgtaggagggttgtgatttactcgcctgcaagaactgcaactcagcaaggatctgggaaagttggaaagtggaagatcaatttcgtgtcgacacaaaagtgggagaacccattgatgggttggacatcaactggtgacccttatgctaatgttggtgattccgcactcggttttgatagtgaagaagctgcaaagtcttttgccgagagacatgggtgggattatgtggttaaaaagcaccaga

SEQ ID NO: 212459 - DNA, 386 bp, Gossypium hirsutum
cccacgcgtccgctgcttctcttcttctgtatcccaaaatggttgcttttaggtttcatcaataccaagtggtgggcagaggccttcctacagaagcagatgagcatcccaagatttaccgtatgaagctttgggccactaacgaagtccgtgccaaatccaagttttggtattttttgaggaagctgaagaaggtgaagaaaagcaatggacaagttttggctatcaatgagatctttgagaaaagccctaccaagatcaagaactatggcatttggctgcgatatcaaagtcgaactggttatcacaatatgtacaaggaataccgagacacaaccctcaatggtgctgtagaacagatgtacaccgagatggcgtctcgtcat

SEQ ID NO: 212460 - DNA, 410 bp, Gossypium hirsutum
ctgctcttggaagccagcttcatgctttagggattaaagattccccaaaaatagacctcgatgatcctttggcagatgaattaatgagtctctatgagagaatgggcgacacacttgcgcatcaatatggtggctctgcagctcacaataagatattttctcagagaaggggtcaatggagagcagcgacccagtcccaagaattttttaggactcttcaacgttattatagcaatgcatacatagatgcggagaaacaaaatgcaattaatatattcctcgggcatttccagcctcagcctggtaaacctgcactttgggagttgggttcctaccagcattataggggaagaaatggggaaacaataatggacgaagatggaaggtcacttttcaaaagatccttttct

SEQ ID NO: 212461 - DNA, 411 bp, Gossypium hirsutum
gcaacacgtccggtggctatctctaaatgcattgaagagaggcagatgaatctttctgtaaattccaagaggcttctgcttttccatttgcagaagcttgtggctgctgcgaaattggccacgggtaacaatgcgcctctacttacttccgctcaggcttcaaagccgggtataactggttgtgctcgcgctaagagaaaaccggctgttgacaccatacctgtttcaaagcccactgagggaaaacgcgctccaacaacttatatatccgctgctgacacaaaggctaaagcggcgctcaatccaaaggcttgttctaaggctacatccaccccaccgtaaacggaggctgtgaatgctgggacaccgaaagcgactgcatctgcttagccaagaaccgttgcataatca

SEQ ID NO: 212462 - DNA, 405 bp, Gossypium hirsutum
cagctttgggatcaaagttggcaaattgcagtgatgatggagaatcctagtttcactcttttacttgtctgtgtcttatgcatgtcctcagtggtacaatgcaaatacaactgccccgaaaagtacgatccccatgttatgcaagaacgataccaacgatgggtggcccgacacggccgaaagtacaagagcaagaacgaatggacattgcggttcgggatatacaaatccaattctcagttcattgattgtgtcaattcacagaacctatcattcaagttgaccgataacgaattcgcagacatgacaaatgatgagttcagggctatgtacttgggttaccaaagcataagatctccatgtgagagcaacagcaaaggcttcgcatatgacaaatatcacaat

SEQ ID NO: 212463 - DNA, 403 bp, Gossypium hirsutum
cccacgcgtccgcaaggctggttttgctggtgatgatgcccctagggcagtcttccctagtattgtcggtcgtccacgccacacaggtgtcatggttgggatgggtcaaaaggatgcttatgtaggtgatgaagcccagtcaaagagaggtatcctcactttaaagtaccctatcgaacatggcattgtcagcaattgggatgacatggagaagatttggcaccatactttctacaatgagcttcgtgttgcccctgaagagcatccagtacttcttacagaagcaccactcaaccctaaggcgaatagggagaagatgacccagattatgtttgaaacattcaattctccggctatgtatgttgctattcaggcagttctttcactttatgccagtggacga

SEQ ID NO: 212464 - DNA, 408 bp, Gossypium hirsutum
  unsure (1)..(408): unsure at all n locations
gngaaaagaacaggaaaaagttggctgattgcgcacttggatttggccgtggtactaccggtggaaaggatggacccatttacgttgtcactgatcctaccgatgatgttcttaacccaagtcgcggaactttgcgtcatgctgtgatccagaaccgcccactttggatcactttcgctagggggatgattattaggttgaaagaggagctccttatgaccagcaacaaaaccatcgatggtaggggagccaacgtgcatattgcttatggggctggtattaccatccagtttgccaagaacgtcatcattcataacatccatatccataacatcttccctagcaaaggtggcaagatcaaggatggcgagaaccaccttgggttgaggacaaggagcgatggtgatg

SEQ ID NO: 212465 - DNA, 405 bp, Gossypium hirsutum
ccaacgccgtccgcccacgcggtccgccattgtacgacaaaagctttaaaattgcaaatggagattctctctcaacgaccatcttctttctcaactttgaatcccaacgctccattgtttgttccgttagcgtaccggacggtcgaggatttctctgatgagtggtggtctctcgtccaatcctccccgtgtttccgcgactactggcttcaagaacgtttccacgatccccaaaacgacgacgccgatcttcttttccccgacgatcttgatgccgtctttgacgattacgacgactttttcgttgaccctacccgtgaagggaaggaagaagatactcaaaaggaattattacccgttggagcattcaaatggcggaaggggcgagttgtgagtgagtcacct

SEQ ID NO: 212466 - DNA, 410 bp, Gossypium hirsutum
cccacgcgtccgcgttgaactcccactactccctcttcctcttcatcttcctcttcctcttcttcacttcatttctgctctgcttctcagtgggaaaaaaaaaattcatagagcagagcaatggtgcccattttcgcttctttctctcttttactcatttctgctctcttcattgttgcagactgtggttctattggagtaaactacggaagaatcgccaacaaccttccttcagctaccaaagtagtggaactacttatatcccatggtttaaaccgtgtcaaagtctacgacactgacccggctgttctccatgcattatctggatccggaatcaaggtcaccgtcgacctcccaaacgagcaactcttcgccgctgctaaaagcacttcctttgctaactcttgggt

SEQ ID NO: 212467 - DNA, 411 bp, Gossypium hirsutum
cccacgcgtccggaagaatctggaattaaaaagcgatagggtttggttcgttgttaaaaagataggcagaggcatttaaaaagttttagaaattacttaggggaagcctaatcagagagatccatggagtttttagctaaagaatacgggtacgtagcgttagtggtggtggcttactgctttctcagcatatggatgggtatccaagtagggatggctcgcaagaagtataaggtttattaccccaccctttacgctcttgaatccgagaacaaagatgcaaagctcttcaactgtgttcagagagggcatcaaaactcgctggagatgatgcctatgttctttgtactgatgattttgggagggatggctcatccttgcatctccgctgcgcttggacttttttacacc

SEQ ID NO: 212468 - DNA, 408 bp, Gossypium hirsutum
agttagcatagaagtttaaaggcattcttacaccctacttctcttctgtctttctcttcttcagctaaatcccacttgttgaatagtagaacatggaagggaagatgagctggacggtggcggatgcggtggactacaagggtttccctgctgacaggtcgaaaaccggaggttgggttccggctgcactcattctagggattgagatctgtgagaggctttcaacaatgggaattgcagttaaccttgtgacatacttggttggtgtaatgcatttgccaagttcaacttcagccaatgttgtgacagatttcatggggacatctttcctcttgtgtttgcttggaggcttccttgctgattcattccttggcagatacaagacgattgccatctttgccgctatac

SEQ ID NO: 212469 - DNA, 395 bp, Gossypium hirsutum
  unsure (1)..(395): unsure at all n locations
ccgtccgnnggcgggatnntacccgctgnnagtttaagcatnnatcaataagcggagggaaaaggannaacttaccaggatgtcccctagtaacccggcgagcgannaccgggaaaagggcccagcttggagaanntcggtcgccanntcggcgtnnccgaattgggtagtctggggagaagacgtcctctagcgacggggaccgggcctcaagtctcccttggaaaagggnngcgccggagaagggtgaagagccnnccgtcgtgccccgggaccctgtcgcaccaaagaagggcgctgtctacgagtcgggtttgtttgggaatggcagccctaatcgggcgggtaaattccgtccgtatatgataataaaaatacataaaaaggtttaantt

SEQ ID NO: 212470 - DNA, 407 bp, Gossypium hirsutum
catttccaagcttctctagttgtcaagtgtttttgcagagcagaaatgaaggtctttgaaatcaatggcaacactctctcgcttgccctcttcgctgatgtcaccaactccaaggaactcctagactctatgcaagccggaacgcttgatcctgaagttgcgtttcttaatgcatcacttattgcggatgtttttccagttctagcagcagtgcataagacacttatttccaagtcacgtgagtcgttgactacacgaacactccattccgaacttgtttacaattactctgggtctaagcatatcaccgaatccctgaaacgatgtggtatttctgaaagttcaaggtatgtccttgccgctcgatttaacgcttctcccgatgagatgaaagctgtggagaagct

SEQ ID NO: 212471 - DNA, 406 bp, Gossypium hirsutum
gagcaattgcttttgatttcaggggctacggactctccgaccacccaccggagcccgaaaaagctagtttcaaggaccttgtcgacgatgttgttgccccttcttgatttgttgggaatcaataaggtttttcttgttgggaaggattttggagcagtgcctgcatttatggtagctgttatccaccctgaaagggtgttaggtgtcataacactaggcattcctttccttatacctggtcctgttggtatccaatttgatctcctccccaaaggcttctacatattaagatgggcagaaccaggaagagctgaagcggatttcggccgatttgatgttaagaccgttgtaagaaacatttacattctcttctgcagaagtgagctacaagtagctggtgaaaacg

SEQ ID NO: 212472 - DNA, 383 bp, Gossypium hirsutum
  unsure (1)..(383): unsure at all n locations
cccacgcgtccgcccacgcgtccgcccacgcgtncgaaaaaaataaaaaaaataacacaaaacaagagaataatcacaaaaagaaagcccggagatttagatcggaaaatcatcttcagatattggttgtctttttgtattgcctattgtgcatccaaaaaaatacaatgatcgaatgcttttgctttatagctgaaaatgaaaaaaaaaataaataaaaatacaaaattctttctttgctttcacattgggtatatgctgctgttgcttgtttatttttttttgcaggtacgggtgcaaggcgctcgggtacgggactgtgttggcgcgggcgtggctgctggacagtacggagcgcacgacgctggcatcgtacggaggct

SEQ ID NO: 212473 - DNA, 403 bp, Gossypium hirsutum
  unsure (1)..(403): unsure at all n locations
gatgaagagtgggagttaaaggaagaaggaaaggagattacacagcaatgggaagatgactgggatgatgatgatgtcactgacgatttctctttacaactgaggagggaacttgagaataacactgagaacaacaactaagctggacttatgcattcctctgcactgaacttgtctgaatcggggttattttttttgtttgattttcttttccatgcaaagcgaatgaaggaatcagctgtaactctttatgcttgggtgtactggtagaaacttaaaatgcagaaactggtttgatggttctctaaaatatagacatttgatttaaaaaaaaaaaaanaaaaaaaaaaaaaaataaaaaaaaaaaaataaaaaagaaaataataaaaaaaaaaaagggcgg

SEQ ID NO: 212474 - DNA, 405 bp, Gossypium hirsutum
acgcttgtttaaaatataagaaaaaaaatcatacgcaatgagcactgctggtcaggttattcgttgcaaagctgcggtggcatgggaggcggggaagccactatcgatagaagaagtggaagtggcaccaccccaaaagcatgaagtccgtattaagattctcttcactgctttatgtcacactgatgtatactactgggagtgtaagggttacactcctctgtttcctcgtatacttggtcatgaagcctcagggatcgtggagagtgtgggtgagggtgtgaatgatttgaaacctggagatcatgtgctccctatcttcaccggagaatgcaaagaatgtcgccactgtctgtcagaagaaagcaataacatgtgcgaactgcttaggatcaactgcgaccg

SEQ ID NO: 212475 - DNA, 411 bp, Gossypium hirsutum
atcaaaaccagctagctaaatcaaccgcatttcaccaggatggctagaggattgaagaaacacttgaagaggctcaatgcccctaggcattggatgcttgacaagcttggtggtgcttttgcacccaagccatcatctggaccccacaaatccagggaatgcttgccattaattctcattctgcgaaacagattgaagtatgctctcacgtacagagaagttattgctattctcatgcagaggcatgtcatggttgatgggaaggttcggaccgataagacttatcctgctggtttcatggatgttgtgtccattcctaaaacaaatgaggacttccgtctcctttatgacaccaaagggcgtttccgtctccatgccatcacgggtgatgaaaccaagtttaagctttgc

SEQ ID NO: 212476 - DNA, 399 bp, Gossypium hirsutum
cccacgcgtccggaaaaggtttcatcttggcacatgaaggtgttggtagatgctatcacgaattcagggctttcaacgatctccaatacgttagacgaaagtgtttacaaagaaggtggtgaacaagcagataaagagatcactaatgaggaggaggcacagtatgttgctcatcaaattttctcgaacgtggtctgtcatgagagtaatcaaaatcgccgttacattgatgaagacgatctcttaaggttcatgatcaaggaggaggtggaactcgtgtttccattgtttgaagtatcaagcactggaaaaattgacagaaaaagtttcactaactgggtgataaaagtttaccaggaccggaaaacgctagcacatgctttgagcgacaccaaaaca

SEQ ID NO: 212477 - DNA, 407 bp, Gossypium hirsutum
cggaagttatcaaagcgtgtagctttttatacagttgactgtagaggctcttgtggtgaaatttttgtcgatttaaaggactataaatattcgaagaaaaaacttgaggaaaccgttgaatgccaactagaattcccaagctttgaggatactatttcagtaccttggaaagcacttccgaagagagtgtcaaagctttactttgctatgagagtgatagagcaatttgaagatgctgaaggtcgtaatcccggggaaacctcaattgctgatcttcctggtgttctgaagctcagaaaggaactttgtgaaacgaattcagtgaacgagtctcaaatacccgatgcactcctagaaagactgctaatggatacaagtgagtaccctccagtttgtgccatcattgg

SEQ ID NO: 212478 - DNA, 385 bp, Gossypium hirsutum
gggtaataagtaaacttgaaaggaaaacggttgcttatcatgaatcaggtcatgctgtttctggctggttcttggaacatgctgaacccctcttgaaagtaacaattgttcctcgtggtacagcagcacttggatttgctcagtatgttccgaatgaaaaccttctcatgacaaaagagcagctttttgatatgacatgcatgacccttggtggtcgagcagctgaacaggttttgttgggaaagatatcaacaggtgcgcaaaatgacctggaaaaggtgactaagatgacgtatgcccaggtggcagtttatggctttagtgacaaggtaggtctcctctcttttcctctgagagaagatggatttgagatgtcgaagcccta

SEQ ID NO: 212479 - DNA, 406 bp, Gossypium hirsutum
gttcaacgtgaaagggtctaatctgtatttctggatagcagtccttcccattacccttgttcttcttgtgggcgcaaagctacaacatgtcatcgcaaccttggcactagagactgccgacatgactggttatgttactggagcaaagctgaggcctcgagatgaacttttctggttcaagaagccggaatggttgttgtcccttatacatttcattctattccagaatgcattcgagctggcttcatttttttggttctggtggcaattcggctacgattcatgcttcatccgtaaccatacgcttgtttacataagacttattttggggtttgctgggcaatttatttgtagctacatcactcttccactctatgctttggccactcagatgggaacgaactac

SEQ ID NO: 212480 - DNA, 389 bp, Gossypium hirsutum
ccgaattctgcgtccagaaggtgcggttatattccgtgatgaagttgatgttctaattaaagtgaagaagataacagcaggaatgaggtgggacactaagatggtagaccatgaagacggtcccttggttcctgagaaagtattggttgctgttaagcaatattggaccgttgggggaaacacgacatctgcacagtaaacagcagacggcgacaagcttaaaccgtggcatgaactgagtttgtggattatattcaattgatgaatttccagcctgaaaatttttgccagcaggattgttttggtgggtcacaggattaggtgaactaaggatcagtctgtattcatttgtattaatttatgaacagatagctataaactatgcttcc

SEQ ID NO: 212481 - DNA, 387 bp, Gossypium hirsutum
ggaccctgatgtgcatcaccgacatctttcacacttgtatgggctttttcctggacacacagtgacaattgaaagcatgccagacctttgcaaagctgcagagaatacacttcataaacgaggagaggaaggaccaggatggtcgaccatgtggaaagctgctttgagggcacgtgtacatgacagtgagcactcatatcggatggtgaaacatttaatatactttgtggatccagaacatgagaaagctttcaaaggtggaatatacagtaacttatttgcagcacaccctcctttccagatagatgccaactttggttttactgcatcagatgcagaaatgctagttcaaagtaccttggaagacctatacttgcttcctgctct

SEQ ID NO: 212482 - DNA, 336 bp, Gossypium hirsutum
cggacgcgtgggctgcaagatagtttttttgctagctttgctcttggttggctcatcacaaatggtgctggtcttgcatcgtacccaattgaacacttggcgtagaaaaatgataaaaacctttggtgaaacaggaaagtccaagactcactcgatgcattctctcagatcttgaaaaatgagggagccaagtttttattcaagggtgctggagctaacatccttcgtgccattgctggcgctggtgtgcttgccggatatgacaagttttaacctataagctgtcgctgctgggatggggatatgaaccaccaaataaggactttttaacattct

SEQ ID NO: 212483 - DNA, 408 bp, Gossypium hirsutum
catctggtgatgatgacgagaaaaagggacaatacaccaagttctggaatgaatttggaaaatccattaaactcggtatcattgaggatgcaaccaatagaaatcgcttggcaaaactccttcgatttgagagcaccaagtcggatggtaaattgacatcacttgatcagtacatctcaaggatgaaatccggacagaaagatatattctacattacaggaaccagcaaggaacaactagaaaaatctccattcttggagaggcttaagaagaaaaattacgaggttattttcttcactgatcctgttgatgagtacctgatgcaataccttatggattatgagggaaagcagttccaaaatgtatccaaggagggcctgaaaatcgggaaagaaaagaacaaagaac

SEQ ID NO: 212484 - DNA, 409 bp, Gossypium hirsutum
cccacgcgtccggggaaaccatggaacagtgtcaactttatatgtgcacatgatggttttactttggctgatctagttacctataacaacaaacacaacttagcaaatggggaagacaacaatgatggagaaagtcataactatagctggaactgtggacacgtatatgaaattggcacggaggatagaatttgtccagcttgatggcttgaattggaaacactaccattgtcagtatccattagatacatgttatgatttacaaaccactcccccccccccccgccccccagggctgcggaaatggaacaaaaaaaaagaaatataatgcaaatgtctgtttcagtaccttttcatttcaagttttagctgaccaaattcagaatttaaagaagtgcccatttgcttt

SEQ ID NO: 212485 - DNA, 403 bp, Gossypium hirsutum
cccacgcgtccgcccacgcgtccgcccacgcgttcgtgattattaggttgaaagaggagctccttatgaccagcaacaaaaccatcgatggtaggggagccaatgtgcatattgcttatggggctggtattaccatccagtttgccaagaacgtcatcattcataacatccatatccataacatcttccctagcaaaggtggcaagatcaaggatggcgagaaccaccttgggttgaggacaacgagcgatggtgatggcatctcccttttcggagcaaccaacgtttggcttgaccatctttccgtttacaagtgctccgatggtatcatcgatgctattcagggttccaccgccattaccatttccaactgccacttcactgaccacaacgatgtgatgct

SEQ ID NO: 212486 - DNA, 402 bp, Gossypium hirsutum
aactttcaactggaatccataatttttttctttttccttttcttcccggggattctaaaaattctgaaatggtgtatacctgtatctcaccacttctgtagttcagcggtggctctttgctcattgtttcattcttatttttatgcaactctggtccacttctggatgtcttacaatcaaaattgagacgatttgatggtttttcgggttgggttagagatgacatatcttgttgtttgcgcaacagatgcagaagtattttggcggatgctgaacaaccaacaattggcttgaccatctttccgttgacaagtgctccgatggtatcatctatgctgttcatgggtccaccgccctctccatttccaactgccacttcactgaccacaacgatgtgatgct

SEQ ID NO: 212487 - DNA, 365 bp, Gossypium hirsutum
aaaaagacgaggaagaagaagcggaattcaaagctcaaacaaaggagcttgtaaatgccccgcaagatttacctccgcaacttctttttgttcatcagggacaaaaggacttgaaagaacttcattggcatgctcagattcctggaatgattgtgtcaactgccgcggatggtttcaacatcttaatgccttcaaatatacagagcactctcccctccaatggctcttgaaaagaatagtgtctttttggctccttgctggtaacaaatgaatcaacagctaatgcaaagctcataggaattcatgcatggaatatggaggttttttttttccttaaattattatttttgcatggtgatgtcaat

SEQ ID NO: 212488 - DNA, 234 bp, Gossypium hirsutum
aaaagagacacggaaaatctggaatgattctgatgttaaagacactgctacatgcatacgagtccctgtgacgcgtgcacatgcttaaagtgataatcttcacttcaagaagccacttgattaggacacagcaagagaaaatttggtatggatcaccggggacatagttattgatgatctgatttctaatcacttccctacgccattggaggtatcaaacaaagatgatgtagc

SEQ ID NO: 212489 - DNA, 338 bp, Gossypium hirsutum
  unsure (1)..(338): unsure at all n locations
gacattttggaagggacgaccccgacttcacctgggaagttgtgaagcccctcaaatgggaaaagcctcaatcttgaagtccccccgtccgtactgccccgtgcttttctcatccgcggtgctgaataatcccgatgtttcgtagctcctaccggaaatatctaatctcatacttataatgccctttttcattttcattttctatttcttcttttatcgatgcttgttttgatttatgtgtctttttatcagcgtcggtgttgcaaaactgagtgagaattttgcttatattgatggcattggaattnaaaaaaaaaaaaaaaaaaaaaaaanccccc

SEQ ID NO: 212490 - DNA, 374 bp, Gossypium hirsutum
cccacgcgtccgcccacgcgttcgatgggcaccattgatgggaaaacagctttgttcggctggagatgattcgagggctctaatatgggaggtggtgggctccaattatcgagcagaaaatggagttgcagtgatggaaccagagatgtggtatggatcagcggctgagatcaatcatgctcgatggtctccaattgagttggattggattgctatagtttttctcaacaaattgcagctgttgaaagtttaagaaaatttttgacttctaataacaatagtttcaagttagccagccatgttaattaaaagtcctatatatgtttcattactaaaaataatttcttatatatgagattggaaaatgatacacc

SEQ ID NO: 212491 - DNA, 407 bp, Gossypium hirsutum
gtgatgttgcaattgcgtcatccatatcaaaagtgcttgcctctattatgacttacccacatgaggtaattcgatcaaggcttcaagagcaagggcaggcgaggcacaccgaggtccaatatgcaggggtggttgattgcattagaaaggtattccggaaggaaggtgtttctggcttttaccgtgggtgtgcaaccaatctcctgagaacaacaccatcagctgtcattacatttaccagttacgagatgatacaccgatttctgcaccaggtattacctcctgaaaggaagaaatcagaggctgggcctaggtctgatggccatgtgaacaagtcatggccaaataagagagccagtgcggaagaaagtaaaatatcgcaaactcactcaaataagattacacct

SEQ ID NO: 212492 - DNA, 408 bp, Gossypium hirsutum
cccacgcgtccgagcacacagcattgttgtagcagaaagaatagctctcaactttatgcagcggatgagtggtatagctacactaactaaggcaatggctgatgctgcataccctgcatacatcttagagacaagaaaaacagctccgggcttacgtttggtggacaagtgggcagtactaattggtggaggaagaaatcatagactgggtttgtttgatatggtgttgataaaggataatcatatatcaatagctgggggaatcagcaatgcccttagatctgttgaccagtatttagagcggggaaatcttcaaatggaagttgaggttgagacccggacgcttgcggaagtaaaggaagtattgcagtacgcatcacaaatgaagacttcattgacccggataat

SEQ ID NO: 212493 - DNA, 408 bp, Gossypium hirsutum
ggaatttgcaccttcaatccctgcaaagaacattacctgtttgacaaggttggatcataacagggcactaggtcaaatctcagagaaactaaatgtccaagtttctgatgttaagaatgtgattatttggggtaatcattcatcaactcaatatcctgatgtcaatcacgcaactgttatgactccatctggagaaaagccggttcgcgagcttgttaaggatgatgcatggttgaatggagaattcataaccactgtccaacaacgtggtgctgcaatcatcaaagctaggaaactctcaagtgcactatctgctgctagtgctgcttgtgatcacattcgtgattgggtccttggaactcccgagggcacatgggtttccatgggggtttactctgatggttcata

SEQ ID NO: 212494 - DNA, 392 bp, Gossypium hirsutum
tgggagcggattttcaggtgcttttctgaccgggggtgaacataatgatgagttctatactgatgaacatggaagaataaggacatgaacacatcgctccggtgggatacagggtggaatatgcaatggggaaattatcaacatgagagtagctttcaagccaacacctgctattagtaggaagcagcacacagtgactcgcgagaaaaaagagatagaactactagtccacggtcgtcatgatccttgtgttgcccctcgagcggtgcctgttgttgaggccatggtagccttggtgcttgtggaccaattaatggcacaatatgcacaatgtgacctttttgctatcaatgcggagttacaagaacacgtgagcttatgtttccccaact

SEQ ID NO: 212495 - DNA, 395 bp, Gossypium hirsutum
aaaagtgtgctgcagtgacagagcgtgttcttgctgcttgctacaaggctctaaatgaccaccatgtcatgcttgagggtactcttttgaagcctaacatggtgacccctggttcggactccccgaaggttgccccagatgttattgctgagtatactgttcgtgccttgcagcgaaccgtccctgctgcagtcccagctattgtattcttgtctggtgggcaaagtgaggaggaggctactcttaaccttaatgccatgaacaagctccagaccaagaaaccatggtcactctcattctcatttggacgtgcccttcagcagagcactctcaagacctgggcaggaaaagaggagaatgtgaagaaggcgcaagatgctttgctcgttaggtgc

SEQ ID NO: 212496 - DNA, 407 bp, Gossypium hirsutum
cccacgcgtccgcccacgcgtccggggatttgcttcaacagacaacccccccccaaaaaaaaccttgaactttttccgcagtcaaaatgggtatttctcgtgattcgatgcacaagaggcgtgccactggaggtaaaaagaaggcttggaggaagaagagaaagtatgagcttggaaggcaaccagcaaacacaaagctttcaagcaacaagacagttagaaggattagggttcgtggtggaaatgtcaagtggcgtgctctcaggctcgacactggaaactactcgtggggaagtgaggctatgactcgtaagacccgaattttggatgtggtgtacaatgcatccaacaatgagttggttcgtactcaaactctggttaagagtgctattgttcaagttgatgct

SEQ ID NO: 212497 - DNA, 409 bp, Gossypium hirsutum
cccacgcgtccgggagttgcttgtttacttcattgagcagggcaagaaggaatgttttgcggcatgcctctttgtctgttatgacttaattcgaccagatgttgctcttgaaatggcctgggttaacaatatgatagacttcacattcccgttcctgttgcagtttatccgtgaatataccggcaaagttgatgaacttatcaaggataagatcgaggctcaaaaggacgtaaaggctaaagagcaagaagagaaggaggtcattgcacaacagaacatgtatgcgcagttgctacctcttgccttgccagcacctccgatgccaggaatgggaggaggttttgctcctccaccacctatggggggaggaatgggaatgcctccgatgccaccatacggtatgccacaa

SEQ ID NO: 212498 - DNA, 409 bp, Gossypium hirsutum
acagaaatggcatgtttactctgcttctgctgaatctgttaacaccaaagcccctacttacactttagagatgtgcatgactggtttggacactgaaaaggctacagttttttacaaagacgaatcgacctcggcagcttcgatgaccatgaagtctggcataaggaacatacttccaaactctgaaatatgcgattttgagttcgaaccttgcggctattctatgaattcaatcgaaaccgatgctatttcgaccattcatgttacacccgaagacggttttagttatgcaagcttcgaagcttggggctatgatctgaaagagttgaatcttgagcaagtggtgcaaagggttttagtttgcttcaaaccaagtaatttctcttgtgccgtgcatgtggatgttgat

SEQ ID NO: 212499 - DNA, 226 bp, Gossypium hirsutum
aaagcctacagttgtttacaaagtcgaatggacctcagtagtttcgatgaccatgaagcctggcataaggaacatactctcaaacttttgaaatattgcgattttgagttcgaaccttgcggctattctatgaatacaatcgaaaccgatgctatttcgaccattcttgttacacccgaaaacgtgtttatgtatgcaagcttataaactgtgggctatgagcacc

SEQ ID NO: 212500 - DNA, 402 bp, Gossypium hirsutum
ggcaggcaaaacgtacaagtacaggatttgcaatacgggtatcaagacatctctgaacgtcaggttccagggccacaccatgaaattggttgagatggagggttcccacacaatgcagaatgactatgactcccttgatgtgcatgttggacagtgcttcagtgtgcttgttactgccaaccaggaaccaagggattactatgtggtggcctctacccgttttaccagacgtgaggttacagcaaccggcatcatcctttacaagaatggcaagggagctgcctcatccgagttgccacccccacctgttggttgggcttggtcactcaatcaattccgtaccttccgttggaacttgacttctaacgctgctaggcctaaccctcagggctcctacaaata

SEQ ID NO: 212501 - DNA, 234 bp, Gossypium hirsutum
cccacgcgtccgcccacgcgttcggacgaaggcacacgcgaccgcccttacggccattgtttggttgccgggttaaaaaataccccgaccaaatcattccgcagggcctgggccaaaaaaccgggaaaaaatcgcgcgggaaatggttcgtcaagcttgtgaattaccaacaccttattgccacgcgcttcacccttgaagtggattttaaagacatggtcaacgcccatgctt

SEQ ID NO: 212502 - DNA, 309 bp, Gossypium hirsutum
gttcggatcgcggcgacgtgggcggttcgctgcccgcgacgtcgcgagaagtccactgaaccttatcatttagaggaaacggagtgcttgcatcaaagttctgtacaatatgggcattccatattttaccctcaaattagaatcttagtatccattgcacgttaaactgttcaattgaagctatgtttgctattttgttttatattctcaaacatttaatctaaagggtgatgaaatagttagttcgatccattgttaattgaactataattaactaaaccgttagttaaattgagctttttttctgtt

SEQ ID NO: 212503 - DNA, 404 bp, Gossypium hirsutum
cccacgcgtccggtgaggagacctagtgactataatccgtcgcttgctgcaacacttggtccaagccagcccaatccgaatctaaatctagctgctgtgggtctaactccaggttctgctggcgggcttgagggccccgaccgcatatttgttggtgggcttccatattacttcacagaagcacagattagggagttattggagtcttttgggcctcttcgaggttttgatctagtaaaagatagagaaaccgggaactctaaaggctatgcattttgtgtttatcaagacctgtcagttacagatattgcttgtgctgctctaaatggaattaaaatgggtgataaaacgctcactgttaggcgagcaataccaggtgctacccagcctaaacccgagcaaga

SEQ ID NO: 212504 - DNA, 344 bp, Gossypium hirsutum
aatgggaatacctatagggaagctttatttatatacggcactatgatgggtctgcccgtgtgcttgcttgcctgtaaccatggaagtgggcacgaacaatgagcagctgttgaatgacgagttctatatacgacttaagcgaacgatatctaccggactggaatatgcggaacttatggacgaattcatgactgccgtcaagcagaactatggggagaaagctctcattcagattgaacattttgcaaatcacaatgcatttgatttgcttgctaaatatggcacaactgatctgggtttcaatgacgatattcagggaacagcatgtgtggttcttgcatggc

SEQ ID NO: 212505 - DNA, 396 bp, Gossypium hirsutum
cgagtagcaaaggcatgtgaggcctttgttgaactggcagatgcttgtggctatccgattggcgtgatgccatcagcaaaaggattagtgccagaacaccactctcgattcattggaacttactggggcgctgtgagcacttctttctgcgctgaaattgtggaatctgctgatgcttacttatttgttgggccaatcttcaacgactatagctcggttgggtactcactccttcttaaaaaggagaaggccattgttgtgcagcctgatcgtgtagtcattgctaatggaccggcttttgggtgtgtcctaatgaaggactttctccaagcacttgcaaaaaaggttaaccgcaacccaactgcttttgaaaactaccagcgtatattcattcca

SEQ ID NO: 212506 - DNA, 392 bp, Gossypium hirsutum
ctgccttgaacatggaatccagcctgatggccagatgccaagtgacaagactgtcggaggaggtgatgatgcttttaacacctttttcagtgaaactggtgctggaaagcacgtccctcgtgctgtctttgtggatcttgagcctactgttattgatgaagtgaggactggtacttaccgtcagcttttccaccctgagcaactcatcagcggcaaggaagacgctgccaacaacttcgctcgtggccactacactattggcaaagagatcgttgacttgtgcttggaccgtatcaggaagcttgctgataactgtaccggccttcaaggtttccttgttttcaacgctgttggtggaggcactggatctggtcttggctccctccttttgg

SEQ ID NO: 212507 - DNA, 351 bp, Gossypium hirsutum
gtcttaataaaatcagatgttagccttgttggcttggtgtcggccttgttgaattcttctaaattgcagttgaagaaggtgttctcttcattcaaggatgtcaaagtcattcagttctcttcaatgcaggatgcttttcttggtttcactgacaagacaagagaagagaaattcaagaaacgtgtaaagcagtatgtaggtatatggtgctgtgttgagaaccacattcctggacacatatattatgacatgtattgggacgagaaaccgggttggaaacctgttccacctaaaaccccagaggacgatcatccacctttctgaagccctctcttcaccctcttatcaaaa

SEQ ID NO: 212508 - DNA, 385 bp, Gossypium hirsutum
ctacacacggatgtgcctctcacctactatactggacttcttggtatggctggtatgactgcttatgctggattttatgaaatctgcaccccgaagaaaggggaatatgtctatgtatcggctgcatccggagcagttggtcagcttgtcgggcaatttgcgaaactgtcaggctgctatgttgtcggaagtgccggaagcaaagagaaaattgatctgctgaagaacaagttcggcctcgatgaggcgtccaactacacagaagatccggacttggatgctgacttaaaaaggtactttacagaacgcatcgatatttacttcgtatacgtactgggaaagatgctcaaagcagagctgctcaccatgaaaggccatggtcgta

SEQ ID NO: 212509 - DNA, 420 bp, Gossypium hirsutum
gaaaagctctttctttggcagtgaaaattgaaaatcgacggcgaaaatgttgaggctggcgtcgaaacggttgcttgggctaacgtcaagggagatcccgtcacggcccgttcagattctgccacgtctttaccacgaaaaggtcatcgaccactacaacaatccccgtaacgtcggttccttcgataagaacgatccgaacgtcggcaccggtttggtcggagctcctgcttgtggcgatgttatgaagcttcaaatcaaaatcgacgaggaatcggggaagattgttgatgcttgctttaaaacattcggttgtggatcggcgattgcgtcttcttctgttgctactgaatgggtgaaagggaaaagcatggacgaggttcttaccattaaaaacacggagattgcgaaacatctatc

SEQ ID NO: 212510 - DNA, 398 bp, Gossypium hirsutum
cttggctttaagccccttcctgctgaagttgttaaagctgttgacccacagctggaaacagtaaataaaaatcttgaagcatattatgatgcatgggacaagttcattaaggcatggattgttatcaaaattcaggacccaagttgtgtctaccggtggcgtctgcaggctgaggttgccatgagggaggctgggaaacctggaatgtctgatgaagaggtggaagattttgtgtcacgttatttgcctgcttacaaagcttaccttccaaccctgtactcggaaggaccaaatggatcagatccaaaccatctcctcgtaattgaaattgatgaagggaggaatcccatcttattttagtatttgatccttaacatgtttagtgcgtctacctgtac

SEQ ID NO: 212511 - DNA, 377 bp, Gossypium hirsutum
cagaaccacttgatcggagatggcatgtgttaggtttaggttacgatcttaacatcgacaaccgcctgatcgagagtgcagcagtcattcacttcaatggaaacatgaagccatggctaaaactggccatcggaaggtataagcctctatgggaaaggtacataaatcttagccacccatatctccacgaatgtgtcacaagttagacaaatgtgctctgtgctctatttttggttccaattgctcgacctccaatgatataaacccatgaaaaggccgatcgcaaaaattcttttttgacattgttaggagatttgacatatcttttttggtagtttttttttttttggttcatcataagatcttgaaaaggaaaa

SEQ ID NO: 212512 - DNA, 410 bp, Gossypium hirsutum
cccacgcgtccgcccacgcgtccgataccacccaaacatcgtcgtcttctacactcttctctggtaagttcatcgaaagatcaaatcaagatccctgccaaaatgaacgacgctgatgtatccaagcagatccagcagatggtgagattcatccgccaggaagcggaggaaaaggctaacgagatctctgtttccgctgaagaggagttcaacatcgaaaagcttcaattggtggaagcggagaagaagaagattaggcaggagtacgagaagaaggagaagcaagttgaaatccgaaagaaaattgagtattcgatgcagcttaatgcatctaggatcaaggtccttcaagctcaagatgatgtggttaatgctatgaaagaatcagcatccaaggaccttctcaatgt

SEQ ID NO: 212513 - DNA, 400 bp, Gossypium hirsutum
atcgctgtaattttttttctcttcttcctttttcttttttaaaagtatcagcaaaattcccaatctaaaaaaatggagtctcctcaaccccaacaacagcaacaacaaggtcctaagaagagaggtcgaaaaccaaagccaaaggaagagaaagaacagcagcaacaacaaagtgctagtaaaatgaaagagggaaagaaagctcaccaacctagcgttgatgagaagtacactcagtggaagtctttggttcctgttctttatgactggcttgctaatcacaatctcgtttggccttctctttcttgccgctggggaccacagcttgagcaagctacttacaagaatcggcagcgtctctacctctctgaacagactgatggtagtgttccgaatactc

SEQ ID NO: 212514 - DNA, 411 bp, Gossypium hirsutum
atcgctgtaatttctttttctcttcttcctttatcttttttaaaagtatcagcaaaattgcgaatcgtaaaaaaatggaggctcctcaaccccaacaacagcaacaacaaggtcctaagaagagaggtcgaaaaccaaagccaaaggaagagaaagaacagcagcaacaacaaagtgctagtaaaatgaatgagggaaagaaagctcaccaacctagcgttgatgagaagtacactcagtggaagtctttggttcctgttctttatgactggatcgctaatcacaatctcgtttgggcttctctttcttgccgctggtgaccacagcttgagcaagcatcttacaagaatcggaagcgtctctacctctctgaacaaactgatagtagtgtccccgaatactcttgggatt

SEQ ID NO: 212515 - DNA, 378 bp, Gossypium hirsutum
cccccacctctttatatatatagcaccaccattatagtctccaaaaaccagtaagaatcaaccacttcgataatggccatgcataacctagttcaagctcttgtttttgttgctgtttttttcaacacattggcacccacagtcgcaaatgttgaaggggatgctttgtatgcattgaggagaagtgttaaagaccctaaaaatgtgctcaagagttgggatccaaccttggtggatccttgtacttggtttcatgttacctgtgatgctgataatcgtgttactcgtctagatcttggaaatgcaaaattgaagggcagattggtacctcagttgggaaagcttgaacgtcttcaatatttagagctgtatatgaac

SEQ ID NO: 212516 - DNA, 373 bp, Gossypium hirsutum
tcgatacactctggattctctcatttttctttgtatggagaagtttttgagttttgaaagaagtttggcaaacaatggcggagaagcaacaagcgggaagagcgctggattctctcgcgtcgcccttaatgaaagaatcctttcttcgatgactcgaagatcgattgctgctcatccttggcatgatttgaagattggacctggtgctccagcagtttttaactgtgtggttaaaattggaaaaggtagcaaggtcaagtacgagctctacaataccagtggtcttataaaatgcgagatggatgacaagatttttgctgtatgtgctgatgatccctagtttcgtcattacacagacatcaaaacagttcct

SEQ ID NO: 212517 - DNA, 390 bp, Gossypium hirsutum
cgaaagacgagaggtctggcgatggcgacgacggtggtgaagagcgcgttgcaggcgatccgtgagaggggtctccgcactttcttaagggagctcaaggatgatggcttcacgaaatgcttcttcgatggaaaccttctgcaaaccaaaatccacaacataggggcaacagttgtgggtgttgataaatttggcaataagtattatgagaaactcggagacacacaagctggaagacacaggtgggttgaatatgcgaaaaaggatcgttatgatgcttctcaggtaccaccagaatggcatggttggcttcacttcataactgaccataccggtgatgagcttttgatgcttaaacccaagaggtacggggtggagcacaaggagaac

SEQ ID NO: 212518 - DNA, 355 bp, Gossypium hirsutum
  unsure (1)..(355): unsure at all n locations
acanaatgttcatccttggtgaccagatgttgcagagtgatcctagggtgccaatattgcctattgagagaaagtggaaatccaacgttgaaactgctcccaattgtccacgttgtgcctctgccaacaccaaattctgttattacaacaactatagtttgtcacagcctatgtacttttgcaaaggctgtagaaggtattggactaaaggtggttcccttaggaacgtgcctgtcggtggtggctgtcggaagagtcgaagaggcaagtctagaagggaaagggtcgagaaaagagatcaaatttccatgactgatagtaagaattcaactagttcttctgatggggattcggg

SEQ ID NO: 212519 - DNA, 391 bp, Gossypium hirsutum
cccacgcgtccgcggacgcgtggggttttattgcagccggaacccgagtttcgacctcccatgtctgaggtcgtgcaagcgttagtgaggttagtacaaagggcaagtgttgtgaaacggcgaccaagcgatgaatcgggattcgggtataagactccagatcatgaggcaggggacttttcattctaaggtctgggaaaaccatcaatcccgtaaatcgaaagagaaatcaagtttatgtaattatatgtctcatacattgacactttttttaaaaagtttattatagtgtttacagtgcaaatatataggtgtattattggacaacctgatgcacattcatgttttttgcatcatagtaataaaataataattttctgtagtttcaagc

SEQ ID NO: 212520 - DNA, 407 bp, Gossypium hirsutum
gtgaatttgatctggagaatattgttacagctgcaaaagttcctggcaggaaggttaatgtgttgcttcggatcaacccggatgtggatccacaggtccatccatatgtcgctactgggaacaagaactctaaattttgtattaggaatgagaagctgcagtggtttctggatgccgtaaaggcacaccctaatgagctaaagcttgttggggcccattgtcatcttggttcaaccattaccaaggtggatatattcagggacgctgctgttctcatggtcaactacattgatgaaatccgtgcccaaggtttcgaggtagattatttaaacattggaggtggtttggggatagattactaccatagtggtgccgtccttcccacaccgagagatctcattgacact

SEQ ID NO: 212521 - DNA, 402 bp, Gossypium hirsutum
cgatatgttaccatcctggctccgaccgactcgccgaacaccgatgggatcgatccagattcaagctccaatgtttgcatagaagactcgttcatttcaaccggagatgatcttgttgctgtaaaaagtggatgggacgaatacgggattgcttacggacgtcccagctctcacatcaccatccgacgtgtaacagggtcatccccatttgccggtatcgcagtgggaagcgaaacctccggcggagtggagcacgtcttggccgagaacatagttatttacaactccggtatcggtgttaacatcaagaccaacattggcaggggagggttcataaagaacatcacagtatctcaagtgttcatggagaacgtaagaaccggtatcaaaatcactggcgac

SEQ ID NO: 212522 - DNA, 379 bp, Gossypium hirsutum
cccacgcgtccgcttttataagaatctctaaaggcggatgggttcctcttattctctctgtgatcttcatgctcatcatgttcgtctggcattatggttctaggaaaaagtatttatatgatttgcacaacaaagtacccatgaaacaaatcctgacactgggtcctagtctcggaattgtccgagtcccagggataggccttattttcaccgcgttggttagcggagttccggccacatttacccgttttttaaccaatctaccgacattttatcaagtggctgtctttgtctgtgagaagactgttcttgtaccatatgtccctcaaaaagaacggtacctcataggtcgtattggtcccaaatctttccgaatgta

SEQ ID NO: 212523 - DNA, 353 bp, Gossypium hirsutum
cccacgcgtccgcccacgcgtccgcagcttccaattatcttaaagcctgccatataatcatataaccaggctccgtcgtggtactcttcggccaccacaatgccgaaaatcgccttgggaacaagccaagaggctgctcagcctgactgcatcaaagcccttgtggtcgagtttatcaccactttcctcttcgtattcgttggagtaggagctgccatggccgccgatgagtcgggggcaaatgcgctggtgggattgtttgctgtggcggtggctcatgcccttgtcgtcggcgttatgatatcggccggacacatattaagcgggcattttaaaccaacccgtcacgcttg

SEQ ID NO: 212524 - DNA, 315 bp, Gossypium hirsutum
acgcaattatactgaatactggattctatattttttatgtatggaagcccgcatgggactgggtctggctaataatgcactcatacgcatctcccaagtctaattaaaaaggcttgctgagattcatgttttctctgcatcaagtattgaacattgattggacatacctcgtgactaaaacagatatcaactggcctacagttaaaagttacctggacatatactgggcagtgactggaatgcaaattttacaaagacgttggggaaactacatatggccttttctttatatgaagcaactctttgctttttgaa

SEQ ID NO: 212525 - DNA, 406 bp, Gossypium hirsutum
gtctgtctcacctgaagagaatattgatgtcacagaaacaatcggtcctgctatgatatttctgccttccgaaacaaccagtgaggatttggatagtatcgtggcttgtaccaaacatggagttgctttgactggggctgcagcaaccggaacaatgggaccgatcgtagggttagtggacatcggtgtattagaggattcatactattttcgtgtctcccttcctggagtatcaccggataaaaaagacttcagctgtgacatcgagtctgatggaaaagtgctaatcagagggataacaacaaccggtgagaaagttgtagtcaagaactttcaagtctttcatatgctcacacaaaatctatgcccatctggacacttcactgtttcattcgagctaccgggc

SEQ ID NO: 212526 - DNA, 285 bp, Gossypium hirsutum
  unsure (1)..(285): unsure at all n locations
gtgcttgccggatatgacaagttgcagctcattgtgttcggaaagaagtacggatctgggggagcttaatatctctttttcattttttacttgtttatgttaagatggtgatgaaaagctcgactacccagaaatttatttcggtcaacaacttcattaaataattctagtttagtcagagagatgagagaggagtgtntaaaccctaactatttatattctcatatggaaattttgattaagaaatactggtggctaatggccccagcccctgtcggattttta

SEQ ID NO: 212527 - DNA, 427 bp, Gossypium hirsutum
cccacgcgtccgcccacgcgtccgcccacgcgttcggacaattcaaacgattgcttttcttgcacatttgaaaggaaatgggatggatgggccttatttgattattgctcctttgtcgactctttctaattggatgaatgagattgcaaggtttacgccctcaattaatgccattatttatcatggaactcagaaagaaagggatgagattcgtaggaatcacatgcctaaagtaattggccccagttttccaatagttgttacttcttatgagatggcaatgagtgatgcaaagaaatttttgaggcattatgagtggaaatatgttgtggttgatgaggggcacagattgaaaaacttccaatgcaaattagtgaaagaattgaaacacttacgtgctggggcataagctctcttaactggaaca

SEQ ID NO: 212528 - DNA, 320 bp, Gossypium hirsutum
  unsure (1)..(320): unsure at all n locations
agaggttggaccaggagatgctcccacgttctctaaagcaaaatatgaagggaggtggctggatgttggtgacaccactcgggaccagctgcttgctatcaaaagggtgtctcttccgaggaaagcgaaggtgacacttgaatatgctgctcccactgctgctacggagaaggcatacactntgtatttcatgtgtgattcttacctaagttgtgatcaggagtatagcttcactgtcgatgtgaaagaagccgctggccctggtgaagacagtggctcanagtaagctcatgtgctgctcatgtttttttaaattcctg

SEQ ID NO: 212529 - DNA, 406 bp, Gossypium hirsutum
cccacgcgtccgcccacgcgtccgcaattcgtgaattagatggcaagaatggctggagagttgagctttctcataattctagaggaagaggcggacgtggaggtggtcagggacgctctggtggttctgatttgaagtgttatgagtgtggtgagcctggtcattttgctcgagaatgtcgcatgcgtggtggttcaggaagacgccgcagccgcagccctagatatcgtagtagcccaagctatggacgaagaagttatagtcctcgtgcccgatctccaagacgtcgcagtccctctcctcgtgggcgtgggcacagcaagtcaccaccatatcgtggtcgtgaggaattgccatatgctaatggaaatggtgcaagggaacaccgacaaagcaggagctaagt

SEQ ID NO: 212530 - DNA, 418 bp, Gossypium hirsutum
  unsure (1)..(418): unsure at all n locations
agcgcatcttattacccgtgcatggatatactgtatgagtgctatgaagatgtagccagcggaagtgaaatccgcagtgttgtattggctgggcaacggttttatgagaaggatggtctccctgctttttcaatgggaaaaattgatcagacacgcatgtggaaagttggtgagcgagtccaaaaggcacgcccatctggtgatttatggccattgtattcttttactgccggngtctatgtggccttgatgatggctcagatcgagatattgaggaagaaaggacactcgtactctgagatcatcaacgagagtgtgatagaggcagnggattccttaaatccatttatgcatgctcgtggaggttccttcatggttgataactgctctaccacagcacgattgggatccacgaaat

SEQ ID NO: 212531 - DNA, 430 bp, Gossypium hirsutum
ggcatctattgtagatgatacatatgactcatatgcaacatatgaagagctcattccatatacaaatgcaattgagaggtgggatatcaaatgcatagatgaacttcctgaatacatgaagccgagctacaaggcactattagatgtttacgaagaaatggaacaactggtgcctgagcatggaagacaatatcgtgtcgaatatgcaaaaaatgcgatgatacgacttgctcaatcttaccttgtggaggccagatggactcttcaaaactacaaaccatcattcgaggagtttaaggctaatgcattgccaacttgtggctatgccatgcttgctattacatctttcgtcggcatgggagatatcgtaacaccagagacctttaaatgggcagccaatgaccctaagatcattcaagcttccacaatt

SEQ ID NO: 212532 - DNA, 382 bp, Gossypium hirsutum
gtggcccctggagcaaaactggtggacttggtgatgtcctcggtggacttcctcccgcaatggctgccaaaggacaccgtgttatgacagtgtgtcctcgctatgatcagtacaaggatgcatgggatacaagtgtgttagttgatctaaaagtcggagacaaagttgtaactgttcggttcttccactgctacaaacgtggagttgatcgtgtctttgtcgatcaccccatgttccttgagaaggtatggggcaaaacagcatccaaaatctatggccccagagcaggtttggactacgaagacaatcaactgcggttcagcttgttatgccaggctgctttggaggcacctagagttctaaatttaaatagcagtaaaaa

SEQ ID NO: 212533 - DNA, 397 bp, Gossypium hirsutum
gcataacttacatactgagctgcattaccaaacattctcctcagtacaaggttttaatgctaggacgagtcttgggtggcattgcaacttcccttcttttctcagccttcgaatcttggcttgttgctgaacacaacaagcgaggttttgatcaacagtggctttctataacattcgcaaaggcaatatttcttggaaatggattgatggcaattttatctgggttgtttggtaatgtactagtggatagtttgaaattaggtcctgttgctccatttgatgctgcatcttgcttcctttcaattggcatgataattatactgtccacatggactgaaaattatggtgacccttcggaaaataaggatttgcttactcaattcaagggtgccgctgc

SEQ ID NO: 212534 - DNA, 432 bp, Gossypium hirsutum
cccacgcgtccgcttgcatcttacccaattgacactgttcgtagaagaatgatgatgacttctggtgaagctgtcaaatacaagagctcgctcgatgccttctctcagatcttgaaaaacgaaggtgccaagtctctattcaagggtgctggagctaacatccttcgtgccattgccggtgctggtgtgctcgctggatacgacaagttgcagctcattgttttcggaaagaagtacggatctggtggtgcttaaatttagggtggtactatctcccttcttttgttatgttttaggttttaaagatggcgatgaaaagctcgacacattgagaaatttatttcggcaaaaaaattcattaataattcagatttagggggggaaattactccctaaacgatttatacatttgggatgtgaaattttgattta

SEQ ID NO: 212535 - DNA, 428 bp, Gossypium hirsutum
gctaaaaggcttgagctttcagccaaaatgggtatttctcgtgattcgatgcacaagaggcgtgccacaggtggcaaaaagaaggcttggaggaagaagagaaagtatgagcttggaaggcaaccagcaaacaaaagttgtcaagcaacaagacagtcaggaggattagggttcgtggtggaaatgtgaagtggcgcgctctgaggctcgacactggaaactactcatggggaagtgaagctgtgactcgtaaaaccagaatattggatgtggtctacaatgcatctaacaatgagcttgttcgtactcaaactttggtgaagagtgctattgttcaagttgatgctgctccattcaagcaatggtatctccagcactatggtgtcgaccttggtcgcaagaagaaaacacttgcagcagctaccaag

SEQ ID NO: 212536 - DNA, 427 bp, Gossypium hirsutum
cccacgcgtccgcccacgcgtccgggagtgataaacaaaagaagtgtttccagaagtttcagatcattcacttttgaaggagtttgtacgttcaattcgtgcccgcaggcggtattgggccaggagctatgctggatggaggcagtttactgcagcacaacctggtgctgcacatgttgctttagcatctctagagcaagctggccgaataaattttatgataacacagaatgttgacaggctgcatcatcgtgctgggagcaacccacttgaattgcatgggactgtttatagtgtgatttgcttagattgtggtttttcattttgtcgaaatttatttcaagatgaagtgaaggcccttaatccaaagtgggcagcagcaatagaaagcttggactatggtaatgctggatcagataagagcttt

SEQ ID NO: 212537 - DNA, 436 bp, Gossypium hirsutum
gagttgagcaaattacgcagtgaattgaatggaaaaatggtagaaataagacgtttgcaaatggagttgaatagacaggaggatgaaagtgcagatgatacacaggataatttgaaaagagctatttccaccttggagaaagagaacactcgtctaaagatggagaagaatgaacttgaagctgccctggaaagtagcaggaaatctttaactggcaagatcgatcccaatgcttcagagactctgaagttagattcatcaggaagttcttcccggatgaaagaaatggaactatcactgcagcaaatggaaaaggatctgaaagaaacctgccgtgaaagggataaggctttacaagaattaaatcgtcttaagcaacatttgttagaaaaggaatctgaagaatcagaaaaaatggatgaagacagcaaaatta

SEQ ID NO: 212538 - DNA, 457 bp, Gossypium hirsutum
cggattcccggtcgaccacgcctccgtttcggccaccactgttgcgataaccgttagatcgacgagatctcctgttccaaccgcagtcaaatcatgtccaaatctcgcgtttatgctgacgtcaatgtccttcgtcctaaggagtactgggattacgagtccctcattgttcaatggggtgatcaagatgattatgaggttgttcggaaagttggaaggggaaaatacagtgaggttttcgaaggcataaatgttaataacaatgaacgctgtataatcaagatcctcaagcctgttaagaaaaagaagatcaagagagagataaaaatccttcagaatttgtgtggtggaccgaatattgttaagcttcttgatgttgtaagagatcatcactccaaaactcctagcttgattttcgagcacgtcaacagtacagatttcaaagttctttacccta

SEQ ID NO: 212539 - DNA, 430 bp, Gossypium hirsutum
  unsure (1)..(430): unsure at all n locations
ctcctttgttttcccttttgtctctctctctctttttccaaccctaaccctacctcaccaaccaggattcaacatgaagggaggaaaatccaagtcagatactaagagtgccaagctatccgtgaaatccaaagctggaaagaaatcggggaaggctgccaaggatccaaacaagccaaagaggcctgctagtgccttctttgttttcatggaggagttccgtgagcaatacaagaaggatcaccctaaaaacaaatccgttgcggctgtcggcaaagctggtggagataaatggaagagcttgtctgaagctgaaaaggcaccttatgtagctaaggcagaaaagcggaaggttgagtatgaaaagaacatgaaggcctacaataagagacaggctgagggtcccatagacgaagatngtgagtctgac

SEQ ID NO: 212540 - DNA, 430 bp, Gossypium hirsutum
ctgagagaactatccgggaaggccctaggaacgactggactcgccaacagatcgactccatctaccattctccccttcttgatctccttttccatggagctcaagttcacagatatgctcataacttcagagaggtgcagcagtgtactctcctctcaatcaagactggtggatgtagtgaggattgttcctattgccctcaatcctctaggtaccatactggcctaaagccccagaagctcatgacgaaggatgccgttatgcaggcagctaaacaggctaaagaggctggtagtacacgcttttgcatgggtgcagcatggagagacacagtccgaaggaaaactaacttcaaccaaattcttgaatatgtaaaagaaattaaggatatggggatggaggtgtgttgcactttgggcatgctggagaa

SEQ ID NO: 212541 - DNA, 428 bp, Gossypium hirsutum
aggagttcccggtgcttactcgggaagctgcggggggaaaaggcttatcccgaatgggaagctttttcttgggaccaggttgaagttgcgtttcaagcggttgagctttggattgctgatcgagctgttttaccggtggaaaattcactcggcggttcgattcatcggaactatgatcttcttcttcgtcaccgacttcatattgtcggtgaagttcaattacctgtccatcactgtcttttagctctcccgggagttaggaaagagtatttgacgcgcgtcatttctcatccacaagctctgtcacagtgtgaaaacactgtcaccaaactcggcctcaacgtcacgcgcgaagcagtcgatgatacagccggagccgccgaatatatcgcgacaaacaacctccgtgacacagcagccatagcgag

SEQ ID NO: 212542 - DNA, 340 bp, Gossypium hirsutum
cccacgcgtccggtgtggataaacaagaatcaaatgatgcataaagcaactgaaatggctgacaaggggtttaatgggtatgggtgcccacattatcgaaaaaagtgccggattagagctccctgttgtggtgagatatttgattgtcgtcactgtcataatgaggcaaagaacaatatcaatgttgaccagaagctcagacatgatctcccacgccgtcaaatcagtaaggttatttgttctctatgtggcacagaacaagaggctcaacaagtttgcatcaactgtggtgtttgtatggggaagtatttctgcaactcctgcaaacttttttgatgat

SEQ ID NO: 212543 - DNA, 449 bp, Gossypium hirsutum
  unsure (1)..(449): unsure at all n locations
cgtnnccgaaaannaaatggcctnntattctcccgcattccgtacctaccggccaccacanngctttccgcttgccgccacttttcaanccgtcgtccccaaaccctcctccacctctctcaccacccacaaaaaatcacgcgccgccctctcccgcctaaaatccgagcaagaccctgattgcatcctcgaaatctgccgcgccgcccgcctcaccccatcctcccatatcggccgaatcgctttatccgtcgccatctccaaactctgcgaaggcaatcatttccaatccatcgacactttcctccaagaactccgttcccgtcccgacttacaaaataatcgtttcgcctcccattctttaatcctctacggtcaagccaagatgctaaaccgcgccgtgacggtctttgacgaattctataacgaggggttttgccgttcgacga

SEQ ID NO: 212544 - DNA, 411 bp, Gossypium hirsutum
cgcataatgtagcatgaggctcatattgagaaagatagacatacccatactgccaaggctgtacttcctctgtaatacatatccaaataggctttgaatggcactccactacagaaccaaattgaaaaaccgctctttttaactcgattctagcaaatacgtgcatactacgattactactgcaaagattgtgactgccaaactcttgattatacgtcataaacacactgcccacactgcccccataatagtgtgacgcattcttgacattggaataaatacatcgctactccaatacaacaatctcgacatgaacagatctgtaaaagagctctgatattgctaagacacatagattctaataacatctacctataacataccaaaaaacgcaggccagctgatcttgat

SEQ ID NO: 212545 - DNA, 384 bp, Gossypium hirsutum
cggacgcgtggggttggagttcgattgagctttggtcaaagaaattttgcaaaaatgtgtgtaggaaaatgtagtatgttgttcctatatacaggtagtgttgctagacttgaaatcttggggaattgacgggtatgtttggtttgcgaatagcaaatagatccatactcctattacttgtgcaaagattgtgactgcaaaactcttgattatagttcatcaacacaatgcccacactgcccccataattctgtgaggcatttttgttggtggaataagtacgtggctactccagtgcggcgttctggaaatggtcagatcggtaaacgagctctgatagtgctaaaacacattgttttgaagaacattttcctaagacggccc

SEQ ID NO: 212546 - DNA, 436 bp, Gossypium hirsutum
aaaagatggcaattgagattcctagagtgaaacttggaactcaaggatttgaggtttcaaagctgggatttgggtgcatgagtcttacaggtcacgatcattcagtgtcagatgaagatggcatagccatcattaagcatgcagtcgaaagaggagtcactcacatcgatacagccgacctctatggacccaaaactaacgaaattctggtcggaaaggcattgaagcatctgccacgagagaaggtacagttggctacaaaattcggtgttgaaagcatgggtccagatggtccggttatcaatggcactcctgaatttgttcgttcttcacttgaggctagccttcaacgcctcgatgtggattatattgatctttactatataatcagagttgaccgcaagactcctatagaagatactatgtgagaactgaa

SEQ ID NO: 212547 - DNA, 429 bp, Gossypium hirsutum
cccacgcgtccgcccacgcgtccgcccacgcgttcgcccacgcgtccgcccacgcgttcggccaaaatggatcccactaacgctgagaagggaaatctagggattcctcagttgcctggtcaagggtgttcctttcatagcttccgtactaatacttacaagcttagtttcatggaaactccgtcggggattaagttcattttggtaactaatcctaggactggtgatcttcgtgaaacactcaagtatatttataacctgtatgttgagtatgttgccaagaacccactctatactcctgggactcttatcaggtgtgagttgtttaatacagcacttgaccaatacgtgaggagcatcgcatagtatctaaaattaatgccttctgtctagtctctggtacctacttttatatgcaatttcatgtga

SEQ ID NO: 212548 - DNA, 426 bp, Gossypium hirsutum
  unsure (1)..(426): unsure at all n locations
cacactttcgagggccaaaactatgcccaggccttggccttctggccctcttcttcttcctcttcttctcagttcattcccaagaagacactcccatagctcgattccttcgttaccttcaattcaacaccgctcatcccaatccaaactacgctgaccccatctctttcctcatatcccaagccaacgccattggactccaagcccgaactcttgaattcaccctttctaaaccacttctccttctaacatggcctggctccaaccccttctcttccctcagttctcttcaattcccacctcgattccgttccagctgaaccttccaaatggatctaccctnctttcttcgccactctcgcccctgacggtaaaatctacgcgcgcggtgctcaagatgacaagtgcatcgctatgcaatacttg

SEQ ID NO: 212549 - DNA, 387 bp, Gossypium hirsutum
  unsure (1)..(387): unsure at all n locations
cttgtaaaattatttgttgggctgttatattttatttgtttatgggcccgggcaatattgggcttgtacatgaagtaaaaggtttaactgagcatgagcgctatctcgcattgagcaaaattccaaatcatccaacgcaaatgctcattttctttagtttacctttttctgtgcgattggaatggatcagaagatttcttgctgaccattaaaaatcatggttgtgttgatgatattttcgtaaccttttgtgtttgtaatttttggatgctataatgacatgatagaatgtcattacaatgttgtaattttttgaagttgtaaaattttataatatatagattatgatatataaactaataaaatcatgtaactttttgttnttna

SEQ ID NO: 212550 - DNA, 426 bp, Gossypium hirsutum
caaacactacattacaactatcatcaatgggtctgatgtggagcctactttctcagctggtgccgtgtgcagaacttcgcacggaggatacagcgtgctcgctgttaaatgatgtgcgggatcaagttgaacgaaccacggatgctaatgttgtttaccgtactgctactggtctgagtgcacgggttcactcgatggctactggaaaatctagtgttgtcggtgctggtgccacttttcgaccggcttctagcagcactaatgttggcatgaaaggtgctcagaatgatggtcatgctgatgtaagaagccgctcatctctaactacatggtcttgcattggtcctcgtcgacagaatgtagttttgggatcgaatgctgaaggcgatgatatgaccgaaccttcattaaaatctaaaacaagtt

SEQ ID NO: 212551 - DNA, 362 bp, Gossypium hirsutum
cccacgcgtccggttagaaggtagcatttgggcgtgaaatgtcaatggggaccgataccacttgggttgggaagaagcctttgaggcgcatcggaggaatgtccgatgctctctccattgccgccgatcttggtttctctgttccccctcctccttctcaggaagaagtgcaaaacttatcatctgctacaggagaaaagggtgatgacttgataaaggtattaagagagctaaccactgtacaaagaaagatagccgatttgcaagttgaactacagggccgaaaggatgacaaaaatgttgcacaccttacacacgtgagtgaaatggaaaaagaagtgtgagacattggcgaggattac

SEQ ID NO: 212552 - DNA, 424 bp, Gossypium hirsutum
ttctcattttcaagtctgcaaaacccctagccagccacttccccgccgcctctccgaaccatgggccgagtccgaaacataacggcgaagaagttatctcttcttgtgatcgagaggtactactctcgcatgacgcttgatttccacaccaacaagaagatcatcgaagaagtggctatcatcccttccaagcgtctccgcaacaagatcgccggcttttccacccatctcatgaagcggatccagaagggtcccgttcgtggcatctctttgaagctccaagaagaagagcgtgaacgtcgcatggatttcgtccccgacgaatccgccatcaaggttgatcaaatcgaagtcgataaggaaactctcgatatgctttcggttctcgggatggctgatattcccggccttgttaaggtcgatc

SEQ ID NO: 212553 - DNA, 428 bp, Gossypium hirsutum
cggacgcgtccgcccacgcgtccggatcattaactccgatgaggtacaatcagtggtgaagcctattaagaaggagatcaaaagggcacctttgaagaagaatccaatgaagaacttgaatgctatgctgaagttgaacccttatgctaagactgctaggaggatgtctcttttggctgaggcacaacgcgttaaggctaagaaggagaagcttgacaagaagaggaagcccatttctaaggaggaggcaaccgcaatcaagtcggcaggcaaagcatggtatcaaactatgatctcagacagtgattacaccgagttcgagaacttctcaaaatggttgggcgtatctcagtaatttagttcttccttaagaaattatggcagacaatcatttttatcagttttgttttaatgtttttgacatgtta

SEQ ID NO: 212554 - DNA, 421 bp, Gossypium hirsutum
cccacgcgtccgggctgatagaggatcttgttggatgtcaagccaaccagataagtcaacactaacacagcttcaaggaccctcagcattggttcccagtcagatgggttctggaaatcagccccctcggcctgcatcgttgactcctgagatggagaaggcactacttcagcaggtaatgagcctcactccagaacaaattaatcttttgcctccagagcaaaggaatcaagtacttcagctccagcagattcttcgccaatgagaaggtctaatagcagaaaagattaatctctcttccccccgcccccccccgggcacattgcatgcgaggaattgatgatcgagattgaaagaattgtttaacatttgctgacaaacttatgcgagccctagatatttatttgaaggtttatagata

SEQ ID NO: 212555 - DNA, 384 bp, Gossypium hirsutum
cccacgcgtccggcttcaccatttttgtttcgtcctcactcaatttcgtctatggggctgaaaatatgagctacgtcgtcgtaggccatgtttactgtgacacttgccgtgttgagtttgagaccaaactcagcgaacccatcgctggagcagtagtgaaactggaatgcaggaatcgtacagacaatcaccttaccttccagagccaagaaatagtgactgacgaacgtggagactatcacattgtagtggaaggcgattatgaggaatcagactgcgacgtcgccttggtgaggagtcccaacccggattgcaatgatccctccgaaatgtggaggatatccagggtggttctcaccacacttgacggcgtcagcggtgaac

SEQ ID NO: 212556 - DNA, 372 bp, Gossypium hirsutum
cccacgcgtccgggctgatagaggatcttcttggatgtcaagccaaccagataattgaacactaacacagcttcaaggaccctcagcattggttcccagtcagatgggttctggaaatcagccccctcggcctgcatcgttgactcctgagatggagaaggcactacttcagcaggtaatgagcctcactccagaacaaattaatctcttgcctccagagcaaaggaatcaagtacttcagctccagcagattcttcgccaatgagaaggtctaatagcaaagaagattaatctctgtccctcccgcccgcccccgggcacattgcatgcgaggaattgatgatcgagattgaaggaattgtttagcatttg

SEQ ID NO: 212557 - DNA, 375 bp, Gossypium hirsutum
accattcgtccgttctgatagaggtttttattttatgccaagccaaccagattatggagcgcgtacacagcttcaaggaccctgagcattggttcccagacaaatgggttcttgaaatcagcccccatggtctgcatcgttgactcctgagatggaaaaagcactacttcagcatgtaatgagccttactccataacaaattaatctcttgcctccagagcaaaggaatcaagttctttagctccagcagattcttcgccaatgataaggtctaatagcagaaaagattaatttttctcccccccgcccccctccggtcacattgcatgcgaagaattgatgatcgatattgaaggaattgtttagcatttgctg

SEQ ID NO: 212558 - DNA, 338 bp, Gossypium hirsutum
ctcacgcgtacaccaccatagcatttacatggggccactcactatggttccgctgcggatctatcgaaggcagggtgcatactcgctgatatatatgctggctagcctatcatgccaggacgaactgaggaggagcatttgcataaaatttgcaagactatgtggctggccttatgaagactattggagtaaattaaagatgcttaatgcacacattttgacacctactcgtccttgtaaacgctgagcctgtgaaacattgatggaattctctgaccagctctagctacaatggagaccttactttgcatggaccctgctgtgcgaggatctgcagc

SEQ ID NO: 212559 - DNA, 431 bp, Gossypium hirsutum
gtggaactgagggggataaagggaagaaagaaatgaacaaagagaatgaaaagaaaaaaatttacaacagagatgaactagaagatgtaagcattgatgggtcagctttgaattatgattcagatgagttcactgagaataacaaagttgaggaagctcttaaaaatggtgggaacacctcaaatgcaaacagtacagttactggaggagatcaaaagggtaaaaggaaaggtcttcctgctaaaaacttaatggccgagaggcgccgtcgaaagaaactcaatgataggctttacatgttgcggtcagttgttccaaagattagcaaaatggatagagcatctattcttggggatgccattgagtacctgaaggaactactgcaaaggatcaatgatctccataacgaattggagtcgaaccctggtagc

SEQ ID NO: 212560 - DNA, 405 bp, Gossypium hirsutum
  unsure (1)..(405): unsure at all n locations
gnggaactgagggggataaagggtataaagatttgaacaaagagaatgaaaagaagaaaatttacaacagagatgaactagaagatgtaagcattgatgggtcagctttgaattatgattcagatgagttcactgagaataacaaagttgaggaagctcttaaaaatggtgggaacacctcaaatgcaaacagtacagttactggaggagatcaaaagggtaaaaggaaaggtcttcctgctaaaaacttaatggccgagaggcgccgtctaaagaaactcaatgataggctttacatgttgcggtcagttgttccaaagattagcaaaatggatagaagcattattcttggggaagccattgagtaccttgaggaactactgcaaaggatcaatgatcttcata

SEQ ID NO: 212561 - DNA, 375 bp, Gossypium hirsutum
ttttggcaagtgtgtagttgttgcagaagagtaaaatagtaaagagtcacagctgagacacggaagaagatgccttgcctaaacctttcaaccaacgtcaatctcgacggcgtcgacacctccgccatcctttccgaagccacctcttccgtcgctaaactcatcggcaaacctgaggcctatgtgatgattgtgttgaagggttcagtacccatgtcatttggtggtactgagcagccagctgcctatggagaactggtatcaattgggggccttagtccagatgtgaacaagaaactgagtgctgcaattgctgcaattcttgaaaccaagctacaagtgccaaagtcacggtttttcctcaaattctatgac

SEQ ID NO: 212562 - DNA, 402 bp, Gossypium hirsutum
  unsure (1)..(402): unsure at all n locations
cccacgcgtccgcccacgcgtncgagaaacaattttatagggattgtctcatcagcgggacagtggatttcattttcggggatgcggcgagtgtgttccaaaattgtctgatcattgcgaggaagccaggtgaaaaccagaacaacatgattacggcccacggaaggaaattcccatacactcactcagctattgtgcttcaaaattgtaccatctcaggcgcccctgactacctcccggtgaaggacaagagcaagacgtatcttggtcgtccttggaaagctttggcgaggaccatcataatgcaaagcaatattgatgacatcattacaccagagggttactcccccatggaaagaaccgtangactagacaccggttactttgtagagttccaaaata

SEQ ID NO: 212563 - DNA, 370 bp, Gossypium hirsutum
tcgacaaaatcagttgcttcacaatggcctctacaaccatggctctttcttacccatcattcgccggtaaggcagtgaagttcttcccttccacccctgaaatccggggaactggccgtgtttacatgaggaaaaccaccaagcctgttccttctggtagcccatggtacggtcctgaccgagttttgtacttgggtccacttttcggtgagccaccatcttacttgaccggtgagttccctggtgactatggttgggacactggtggactctcagctgatcccgagacctttgctaggaaccgagagctcgaagtcattcactgcagatgggccatgttgggagctctcgggtgtgtcatccctgagct

SEQ ID NO: 212564 - DNA, 409 bp, Gossypium hirsutum
  unsure (1)..(409): unsure at all n locations
cccacgcgtccgtgcagatctgatcaagaacttgtttatcccaacaatctcacttttagttcaccagaggagcaggagaactatatacgtaactggcttgaagaaaggactggatttaaagctgattttaaaatctccttttatccaggaaagttttcaaaagaaaggcgaagcataatacctgctggagatacttctcagtttatcccatcaaaagatgctgatatttgtattttggaagaaccagaacatctgaactggtatcatcatggtaaacgctggaccgacaaattcaaccatgttgttggtatcgtccacacaaattacttggaatatattaagagggagaagaatggtgctctacaagctnttcttgtgaaacacatcaacaattgggtcaccagagcgt

SEQ ID NO: 212565 - DNA, 428 bp, Gossypium hirsutum
cccacgcgtccgagacaatgagaggaacattgacgttgactcggattctgatggtctgcctctcccaagtagcggggcagagccaatactactcggagagcttaccatatgatcccaggccgggtaaggacactaatctttacttctttttgcatgaaactctacgcggtaagaacccaacaggatgcatggcagcccaagctaacaacacaagcaacgacaactactcatcagtgccatatgccaccctatatgccattgatgatcctctcaagatacgtcctggggacaactcagaggtgattgggaatgctctgggacttgagatcttgtccggcaaaaattcaacgactggggcgatgcactcagattttggatatactgtcggcaagtttaagggcagatctattagcatattttgaaggaat

SEQ ID NO: 212566 - DNA, 450 bp, Gossypium hirsutum; identical to SEQ ID NO: 195900

SEQ ID NO: 212567 - DNA, 403 bp, Gossypium hirsutum
ggtgattctgcacgagaattttggtttcaaacacctcctaagatcggtccagatgttccttacaaatttggaatcattggtgatttgggtcagacatataattcactgtccacccttgagcattacatgcagagtggagcacaaactgtcttgtttgtaggagatctttcttatgctgatagatatcagtataatgatgttggtataagatgggattcatggggtcgctttgttgagaaaagtactgcatatcatccttggatctggtctgctgggaatcatgaaatagaatacatgccttacatggatgaagttgtcccttttaagtcctatctccaacggtaccctacacctcatttgtcttgtaaaagcagcaacccaatgtggtatgctattagacgtg

SEQ ID NO: 212568 - DNA, 455 bp, Gossypium hirsutum
cggacgcgtgggcggacgcgtgggttgtgtttgttctggcagcaacaaacctcccctgggaattggatgctgccatgctccgtcgtcttgagaagcgaatccttgttcctctcccagagccagaagcaagaaaagcgatgtttgaagagcttctgccccaacagcatggtgaggaggctcttccttatgatatattagtggaaagatcagaaggttactcaggttcagatattcgattactttgcaaagaagcagccatgcagcctttgagacgcctaatggctgtccttgaggataaccaggaagtagtgcctgaggatgagctgccgaatgttgggccagttacgtctgatgatatagaaactgctttgaggaacaccagaccatcggcacatttacatgctcatcgctacgagaagtcaatgcagactatggcagtcaaatactccgatgat

SEQ ID NO: 212569 - DNA, 441 bp, Gossypium hirsutum
ctttgaaaggcttttaccttttagaagcaccatatgtggatcgaaagaaagattcaaatctactgggtcttaggcgaacctgtattatgttgatggaatgtcttagctttttgttaaggaatatggatatggtttctgtttctgctttaatctcagaagatgttagggggcaggcaaagttaattgctgaggaatggaaaccaaagttggatgctcttgacatggatgctagtaatggtaattcattggaagctcatgcattcctgcaacttcttgccacttttggtattgcttctaacttcaatgaggaagaactctcaaggctgataccaatggtctctcgtcgtcgtcaaacagctgatctcttgccgtcccttggtttgtctgaaaaaatgccaggtgtaattgaggttctggtgaataatggaaggcagattgatg

SEQ ID NO: 212570 - DNA, 448 bp, Gossypium hirsutum
  unsure (1)..(448): unsure at all n locations
gacccacgcgtatcgtgcatctatgtgtgtgaacaagattgatcagattacactcgaagagctggaaatattggataaacttcctcattactgcccaatcagtgctcacctggagtggaacctggatggtctcctggataagatatgggagtatcttgatttaactcgcatatacacaaaaccaaaagggatgaacccagactatgaagatcctgttatcctgtcatcgaagagaaggacagttgaggacttctgcactcgaattcataaagacatgcttaaacaatttaagtatgcacttgtatggggatcaagcgtaaaacacaagcctcaaagagttggcaaggatcatgaacttgaggatgaagatgttgtgcagattatcaagaaagtgtgatttgaggatattggaanttatgccttcatgttttaggaatcccatgaatca

SEQ ID NO: 212571 - DNA, 413 bp, Gossypium hirsutum
  unsure (1)..(413): unsure at all n locations
gatggagttacagtaaaaaattgcaccatgactaatacttccaatggtgttagaatcaaaacttggccaggaagaatcgaaagttaaactaagcaacattagtttcaaaaacattcacggcacttctgcgcgtccagaagctgtcaagattatttgtagtgctactttgccttgtgaaaatgtagaacttgcagacattgaaattacgcatagtggaccgactggacctgcagtatcacaatgttcgaatgtgaagcctaaagttagtggcaaacaaaatccagctgcatgttctgcccctatcccagcaaaacctaccctgaccgcttaatcaatagcagaggtataattntttttgatgacgttgtaactcttataattatatttattttgcaaataaattttgttttttt

SEQ ID NO: 212572 - DNA, 428 bp, Gossypium hirsutum
caaagctggtggagataaatggaagagcttgtctgaagctgaaaaagcaccttatgtagccaaggcagaaaagcgaaaggtcgagtatgaaaagaacatgaaggcctacaataagagacaggctgagggtcctaaagacgaagatgttgagtctgacaaatcagtgtctgaggtgaatgatgaggatgatgatgaagaaggcagcggagacgaagaagatgatgagtaggaaggtccgtggtggatagcataatcaatgtaggctgtgatagtgtttgatcaaaaccatatgttaatgctttcgatgtttccatgttattcttttagatgcgcatgccatctaagggagaaatgtacctctgaatcctgttggttccttttgaccttctgaaattaatagttgtagatgggataatctgcttctatat

SEQ ID NO: 212573 - DNA, 360 bp, Gossypium hirsutum
  unsure (1)..(360): unsure at all n locations
gaaatggtgacaagtaaaggtcttgaagttgcttaatctgagatcactgacatgctttgggaaagcactttcttcttgcgtcagttgcctgaatcaaacctttatgaaattcctgatcttgaagatgattacaggaaggtgatgaagcaatttgcagtggagttaaagaagctggctgagaaacttttggacatactgtgtgagaatcttgggttggaacaaggttacctgaaaaaagtgttatatggttccaaatggccaaaattttggtaccaaagtcaacaactaccctncatgccctataccagacctaatcaaagggctaagggctcacactgatgctggtggatcatattactc

SEQ ID NO: 212574 - DNA, 361 bp, Gossypium hirsutum
cacgcgtccgtgctttttcttagttttcctttttgtcccttgtttatttgatatttccccctcatggccgccgctgatgtcgagttccggtgcttcgtcagagggctcgcatgggccaccgacgaccgggccctcgaagaagccttcagtgcgtttggtgaaatcgtcgaatcgaaggtccgtttgttgcaggtatcggactccagatctgacttgatccgacccgatctgggcgcccctgtcatatgatctgtgatccttgttctgttcttttgtgttacttgttacttgatactactctcttgttactattctcttttaaaactctcaccgatcattaatgatcgtgagactggaagat

SEQ ID NO: 212575 - DNA, 393 bp, Gossypium hirsutum
cccacgcgtccggggacgcctgggcggcggaggagacggtggggataacagcggcggcggaggcgatagtgagagtaaaggagaaggggagttttcggacgacggtggtaagaaaaagatggctttgtctatgtctcagaagttgacccttggatatgctgcacttgttggagtgggtggtgttatgggctatgtgaagagtggcagccagaaatcgcttgcggcaggaggattgtcagctgcggtgctctattatgtttatactcagcttcccacaaatccagtttttgcctcatacgttgggcttggtatatctgctgcacttttgggagtgatgggttcccgtttcaagaggtcgggaaaagtctttcccgggggggttgtatcactcgt

SEQ ID NO: 212576 - DNA, 414 bp, Gossypium hirsutum
ctcgccttcaatggcttctaatgaccgtggctttagtgggatgtcaagtaataggaaagttggctataatggtgagaataatgtgggttctgctatggaattatggcaagcttttttcgccaatcctactgaatggtgggataataggaaaaataagaggaacccaagatatccagattttaagcacaaggatactggagaagctctatggattgaaggtaggaatactccccattgggtgagatcccagttggagatactagattctagaatgagctctctgcaagatgaggatgaaaggatgttttcttcgatggccagtgacaatctcctgcctttttaatggtttaaaccagtgtgtttatgatgttactataaagtgattgcacttggccaggtccctgcattttgtat

SEQ ID NO: 212577 - DNA, 412 bp, Gossypium hirsutum
  unsure (1)..(412): unsure at all n locations
attatccttgcatggaaatcctatatgagtgttacgaagatgttgcaagtggaagcgagattcgcagtgttgttttggctgggcgtcggttttatgaaaaggagggcctacctgccttccctatgggtaaaattgatcagacacggatgtggaaagttggtgagcgtgtccgagcaactagagcgaaagatgatttaggtccactgtgccctttcacttctggggtttttgtggcgctaatgatggcacagatcgaggtcttgagaaagaagggccactcgtactcagaaatcatcaatgagagtttgattgaagctgttgattccttgaaccccttcatgcatgctcgaggagtttctttcatggttgataactgntccacaaccgcacgattgggatcaagaaaatgggc

SEQ ID NO: 212578 - DNA, 446 bp, Gossypium hirsutum
tatgcctgatcttagtcaaatattggaaatggtcccagaaagcattgttgatattcctactgaaatggggaatgatggattgattgatcccgatacattggctgtaaatggtttgttatccatagaacttgatgagattggttctgatcctgacatagatgccttactggttaactctcctttttttcatgacctttttccaagtccagtatgtgaggaaattgagtcaacctcaatggagggtaaaagcaaggaaaatgaatggcaggcgatggacgatggatgggacaaatatcagcatatggataagctcacagaacagatgggtcttcttagatcagaaaacaaggggatctaatcttttatttccatttatttgaggtgaacctgaaagttgtattttttgactttattttggtcattggaaaacgagtaatgtcttcata

SEQ ID NO: 212579 - DNA, 413 bp, Gossypium hirsutum
cccacgcgttcgaccattctatttagattattgtaaattcgagtacaaagcgctaaccaagatgagagccaagtggaagaagaagcgtatgaggaggctgaaaaggaagcgccgaaagatgagacagagatccaagtagatgcgccttggactgaaatagttttgccctgacaatcccttgtcttcataattatcctgcatatgttgcttgaagttgtgaagattgaagggtattttcaggaaaccttatctgttgtcttctaaatctaggttaaagttttaagactatttgagctgtttgtctagtactattagatattatggtggggtttttgggattgatctgtggaaacaggtattttaacatcctaaatgtttgaaattgaaacttttggtcttcttatatgggctat

SEQ ID NO: 212580 - DNA, 343 bp, Gossypium hirsutum
cgtcactttcatgctcttggggctggggtgatagaggaggttcgggtccagcgtgataaaggctttggctttgtgagatacagtactcatgctgaggcagctttggctattcagatggggaacgctcagtcatatctatgtggcaagcaaataaagtgttcttggggcagcaagcctacaccaccagggacaagctccaatccacttccccctcctgcagcaccattacccggtttttcagccactgaccttttagcttacgaacgacaacttgccatgagcaagatgggtggattcatgctctatgcacccacaggacagcatctctgagcagcagcatggg

SEQ ID NO: 212581 - DNA, 451 bp, Gossypium hirsutum
gtgaagttagcttgtacaattcttctgaggtttggaagaaatatacctgtaacatatctacaccttccgggatttgtactacacctgggcggctgacccctcaattctatagtcagatgtcagctgcggtgaatattagttatggtctatatcgctacggtccattcctggttaatttgcaagactgcactttcgtgcgcgatacattcacagatatcagtcatgatcattgcccaggtctgcgccgctatagtcaatggatctacatcggattagtaattgtatctgcagctgtgatgctgtcattgatgttttgggtgatttatgcaagagagagaaggcatcgcgtttatactaaacagcacgatgctagagtggaaggcgtaaacaagtcactagaacgttacaaaccgcacttgtttatttccgagtaactttcgttgcattactt

SEQ ID NO: 212582 - DNA, 414 bp, Gossypium hirsutum
  unsure (1)..(414): unsure at all n locations
gttctcatgttgcgcagttcattgcgcttgacggacagctcgatggaagactcaagtggcgaccaattgtcttgccagacaactatatcgagcatgcatcaccgaaagaacagcttgctcttgctgggctgactggacatcacattgctgcaaccacattgagtctcctcggacgtacccgtgaagcgttacttttaatttgctagaatgctgtatagttttccttactggattgatgatgtacctgaagagcgtgagaaggctaagcaaagaatgaacagtggaatagaatattgtagcattttgatgatccctgtaatttgtatagatgttgaagtgtgaattgtgaagttgacagagtagtggtgaagaaccagaattgaagtgaatgaaatntataagaaattctacctc

SEQ ID NO: 212583 - DNA, 415 bp, Gossypium hirsutum
ggaagcgatagcgaagtagagaagacgcagcagaaggagaaggagaggaagaagatgttagctatagctcctatcgcaaaaccccttgctggcaaaaagctctccaagaaaacccttaagctcgtccgaaaagcatctgagcacaaatgcttgaagagaggagtaaaggaagtggttaaaagtattcggcgtggtcataaaggattatgtgttatagctggaaacatatctcctattgatgtcataactcatgttccgatcctatgtgaagaggctgaaattccatatgtctatgtttcttcaaaagaagatcttgcaacagcaggagctactaagagaccaacatgctgtgttttggtgctaaccaagcccaccaaaggtgaactcgccatcgaggaacaagaaaagatgaaag

SEQ ID NO: 212584 - DNA, 329 bp, Gossypium hirsutum
agaccccatgccttagctacacaccgttttacaggaaccaagtggcttcaaacccagttttcaaagagttctactacgtaactctacgtaaaattctggtgggcgataagcacgtcaaagttccgtacagttatttggtcccaggatcagacggtaacggtggcaccatagtggactcgggatcaacattcacttttatggagagaccagtgttcgaggtagtctcgaaagagttcgagaaacaaatgggaaattatagaagagtgcgtgaaatagaaaacagatcgggtttagccccatgcttcaacacttcgggctatacttcaata

SEQ ID NO: 212585 - DNA, 409 bp, Gossypium hirsutum
ggttgcttgtggatggcggcataccatatcagtctctgttactggtggattatacacttatggctggagcaagtatggtcaactaggacatggggacttcgaggatcatcttgttccttacaaggtggaagctttagccgacagttctattaaacagatatcaggtggatggagacatacaatggcactcacatctgatggaaaactctacggctggggatggaacaagtttggacaggttggggttggtgacaataccgacatttgctctccagtgcaagttaaatttccaaatgatcagaaagtagttcaagtttcgtgtggatggaggcatacacttgctattaccgaagagcaaaacatcttctcctggggtaggggtacaaatggacagcttggacatggagaa

SEQ ID NO: 212586 - DNA, 412 bp, Gossypium hirsutum
cccacgcgtccggtctttaccttccttatttcttgcatcattttctgctattaaaaacccccaaatcctaaacagaaagatcactactttcaaatctgtctgtcattgaactcgttataatcccaaaaggagtcatttttataccttttttttttgggagggggagtgtgtacccttatgaagaaggatctgcgttcacattggagtttaaggaagatggtgactagaaatgggatgttatacccaattcttggatttgcatcatgtgtggcttttctttacatgtcttttggtgacttgaagcttagtgctaatttcaccaagggaccgaggtttagttttgtggaaaggaatgggactcaattctttttgaatggtaaacccatatacattaatggatggaattcttact

SEQ ID NO: 212587 - DNA, 370 bp, Gossypium hirsutum
  unsure (1)..(370): unsure at all n locations
gaaagatcaaatctcccccctccccttgtgtttcgtggtgatcaacagtttaaggtttttgttctctttctgaacaacaaaaatggtggggactactgagggagtggattcatctgcctccaacaacaagaagaaccgtatccaagtctccaatacccagaaaccccttttcttctacgttaacctcgccaagaggtatatgcagcaatacaacgaggtggaactctctgctcttggaatggctattgctactgttgttaccattgctgagatattgaagaacaacgggctggctgtcgagaaaaaaatcatgacttctaccattgacatgagagaggaatcagggggacgaccagtncaaaaagcaaaa

SEQ ID NO: 212588 - DNA, 359 bp, Gossypium hirsutum
cccacgcgtccgcccacgcgtccgcccacgcgttcgcccacgcgtccgcaaaatgttggtggtgagaaaccaaattaaagaaacaagaaaattagaagaagggtgatctattctcttgttgttgatcagcttttatcatccattctttgattgcttcattcattcattctttctttcttatcttcttcaaacttgattgctttcccttcacaatcacattgctgtaatggccgttcaagctcagtatccttccaatgtcctcctcttaaacagaagtggacaagaagggcatgagttttcgttgcaacaacaagggggaggggtttatgttgatcaatcccatatgttctttaacagca

SEQ ID NO: 212589 - DNA, 397 bp, Gossypium hirsutum
agtactggttcactacctacgttctaaccgctgtagaacttggcaaagcacatggggagatcagaagtctgtaagaagaattgccgagaaatcgaagtgaactcgaatccgaaagttctttaattgatgaattaaatgcaagggtgagttctttagtggttgaaagagataattctatgcgggagttcgtttctcttcaagaggagtacaacgattcgaaactgttgtctgaaaataaagcagtggctgatgctgagcttttgggggaaagagaaaatgaaatccggctgctaaaggaaaaactcgagcttgctctgaacgatgcgagtgaaaataaaacaattgctgctgatttgaacaaggaaaaggaaagcctggagcgagcactggagatgga

SEQ ID NO: 212590 - DNA, 423 bp, Gossypium hirsutum
taggaaccagcaggatgcccaaagtgcaataaatgacttaaatgggaagtggctcggaagtagacaaatccgatgtaactgggctgcaaaaggtgctacttccaatgatgacaatgccaaaagtatcgtagacttgaatggaccttctgaagaaggtcaagaaaaatctaatgacgattctccggagaacaatcctatgtataccactgtttatgtgggcaacctcgctccagaggttacatcagctgatctccacagtcatttccatgccctcggagcaggaactatcgaagatgtccgtgtccaacgagacaaaggtttcggttttgtgaggtacagttcacacgatgaagctgctctcgccattcagatgggaaatgctcgaattctttgcagtaaaccaatcaagtgctcatggggtag

SEQ ID NO: 212591 - DNA, 245 bp, Gossypium hirsutum
ctaatgagtgccttgaaagaaatggtggttgttggcaggataaacatgccaacataacagcatgcaaggacacattcaggggaagagtatgtgaatgccccattgtgaagggcgtgcagtatagaggagatggttacatatcttgtgaagccttcgggcctgcgagatgtacgattaacaacggaggttgctggtctgacacaaaagatggattaactttctcggcttgctcaaaaaagcaatta

SEQ ID NO: 212592 - DNA, 354 bp, Gossypium hirsutum
cgatatttgtattaagaatcgccctttagtgatcagtgaggtgaagaaaaatgtcttgctgtggtggaaactgcggttgcggctccggttgcaagtgcggcagcggctgcggcggttgcaagatgtaccctgagatgaactttgctgagcaaaccacaaccgggacacttgttcttggcgtggcaccccggaaagtgcactttgatggagctgaaatggaaactggggctgaaaatggctgcaaatgtggagataactgcacttgcaacccttgcaattgtaaatgagaaaaaaaagctaagcatattatggaagctgatctaaataatatatgatgtatttgggtttttacta

SEQ ID NO: 212593 - DNA, 449 bp, Gossypium hirsutum
cccacgcgtccgggaaactgcatgctctttggtattcctctcataagtgcttctagcgcatcagagcctgcagtctctcatattagtgctttcgccaagcctgtaggacatatgcaagctgcattgcaccaggttcatgcacttgaatctgataaaaggtctgaaaattcaaacgcctcccagatggcagaggatgtttctgcttttaatgagcaggagaaaatagtgaagctgggtcagccccatgcacgggagtttcaaagcaaactgtctactgcttcaactaggagttgtactaaggttctcatgcaggggactgctcttggaaagtctgtggaccttaccaagttcaacaactatgatgagttgatcgctgaattggatcaattatttgagtttggaggtgaattaatggcccctcaaaagaactgggctgttgttatactgat

SEQ ID NO: 212594 - DNA, 311 bp, Gossypium hirsutum
gccacacgaccgcagtatagtttttgcatgtttgaacgctgattatgaatcagggaactcagttaagttcaatgagattctaacaatcttagcagccaaaattggcgcaaaagctgacggcaaaacggattcgagcaagccattaatggatgctgggaaagaaacatgtgcctctgaaactccatcaacagttgtgattgctaaaaggacatatttattatcaaaagtcatcttcgaaggtccatgcatggctgctattgagatttatgcttagagcactatacaagcttcggctgatcctagtgctttca

SEQ ID NO: 212595 - DNA, 433 bp, Gossypium hirsutum
ggctgattggcatgcatgtcttgtattacaatgttggattcaagggttttgctgtgccaaaggaagagcagaataaagtttctaagttcacattccatggcctgcctgccgaacttagacatggaagtgttgtaattgcggctatcaccagctgtacaaacacatcaaaccctattgtcatgctcggggctggtcttgttgctaagaaggcttatgaattaggtttggaggtcaagccatggattaaaacaagtcttgctcctggatctggagttgttacaaagtattcgcttcaaagtgggctgcaaaaatacttgaatcaacaaggttttaacattgttggttatggctgcacaacttgtatcggaaattctggagatcttgatgaatcagttgcttcagcaatttcggaaaatgatatcattgctgcagc

SEQ ID NO: 212596 - DNA, 379 bp, Gossypium hirsutum
  unsure (1)..(379): unsure at all n locations
aataactatgcggtggtggtgagcactgagatggtgggttataattggtaccctggacgggacaggtccatgcttgtcccgaattgttttttcaggatgggatgctccgctgtgcttttgtctaaccgccgtcgtgactaccgncgtgctaagtatcggcttgaacaccttgtacggacgcataaaggtgccgatgaccggagtttcaggtcaatctaccaggaagaagatgaacaaggtttcaaaggtcttaaagtcagcaaagacctaatggaaatcggcggcgacgccctcaaaaccaacatcacaacattgggtccgctcgtcctcccattctccgaacaactcttcttcttcgccaccctaatttggcgccatt

SEQ ID NO: 212597 - DNA, 359 bp, Gossypium hirsutum
aataactattctgaggtggtgttttctgaatttttggggtataaacgccaccggggacgggacaggtccatgctggtgccgaattgctttttcaagatggaatgctccactgtgcttttgtcttaaccgccgtcgtgactaccgccgttctaagtatttgcttgaacaccttgtacagacccataaatagtccgatgtccggagatgcatgtcaatctaccataaaaaaaattaacaatgtttcaaatgtcttaaaatcaacaaagacctaatggaaatcggcggcatcgtccgtaaaacctacattacaacatttggggcgctctctctctcattcttctaacaactattttattttt

SEQ ID NO: 212598 - DNA, 375 bp, Gossypium hirsutum
  unsure (1)..(375): unsure at all n locations
tgcagatcttcgtcaagactctaaccggcaagacgatcactctcgaggtcgagagctccgacacgatcgacaacgtgaagaccaaaatccaagataaggaaggcatccctccagaccagcagcgtctgatcttcgccggaaaacagcttgaggacggccggaccttggccgattacaacatccaaaaggagtcaactctccacctcgtcctccgtttgcgcggtgggatgcaaatcttcgtgaaaaccttgaccggcaagacaatcactctcgaggtcgagagctccgacacgatcgacaacgttaaggcgaagatccaagacaagggaggcntccccccagaccagcaacgtctcatcttcgccggaaaacaac

SEQ ID NO: 212599 - DNA, 290 bp, Gossypium hirsutum
  unsure (1)..(290): unsure at all n locations
cgttgatattgtcacctacaagagaactggcgtctcaaacagagaaagtgataaggacaattggcgatttcatgaatatacaagcacacgcgtgtattggaggcaaaagtgtgggtgaagatataagaaagctagaaaacggagttcatgtagtgtcgggaactcctggtagagtctgtgatatgatcaagaggagaaccctacgtacaagagctattaaactatngattctcgatgaatctgatgagatngtaagcagagggttcaaagatcaanattacgatgtttac

SEQ ID NO: 212600 - DNA, 348 bp, Gossypium hirsutum
cgttgatattgtcacctacgatagaactggcgtcttaaacatagaaggcgagtaggacaatgggcgacttgatgaatatacacgcacacgcgtgtatcggaagcaaaagtgcgcgtgaagatataacaaagctagaaaacggagtgcatgtaatgtcggcaactcctggtcgagtctgtgatatgatcaagaggagaaccctacttgcaagagctcttaaactattgattctagatgaatctgatgagatgttaagcagagggttcaaagatcatattgacgatgttgacagacatcttacacccgagcttcatgtttgtgtgatatctgctacacttactcatgaaa

SEQ ID NO: 212601 - DNA, 238 bp, Gossypium hirsutum
aaggacaaggggcgatttgatgaatatacaagcacacgcgtgtattggaggcaaaagtgtgggtgaagatataagaaagctagaaaacggagttcatgtagtgtcgggaactcctggtagagtctgtgatatgatcaagaggagaaccctacgtacaagagctattaaactattgattctcgatgaatctgatgagatgttaagcagaaggttcaaagatcaaattaacgatgtttac

SEQ ID NO: 212602 - DNA, 430 bp, Gossypium hirsutum
cccacgcgtccgctagacttataaatttaagctaaaaaggcccctccatattggcacctaagaagcacctgcaggaaaaatggcatccatcaccatgacaacatcattccttagcaccactaacctcacaaagggttctccaagaattacccagcggagactagtggttgccaatgctgctaagggagctcaagtggagagtgtccagatgagcggtgagaggaaaacagagggcaacaatggcaggagggagatgatgtttgcagctgcagctgctgctatttgctcggttgcgggggttgcaacggcggagcctaaacgtggtagcgcagaggccaagaaagcgtatgctcctgtttgtgttactatgccaactgctaggatctgtcgcaactgaggcagtgccactgcacattgctcgagtgccatg

SEQ ID NO: 212603 - DNA, 444 bp, Gossypium hirsutum
ctgaaccagagaagaaacgccaagtatcatttcaaggtgtaggaagaactcttggtagcagcagtacttcggcagctcctgaaccaactaccggttccagtcctctcaacacagctctgaacccttcacctggcttggttgtagatgaaagtttaccatcgacctcaattcaacttaggctggctgatgggactcgcatgataacccgcttcaatctccaccacacagttgatgacatccgttccttcatcaattcatctagacctgggggtgcaacaaactatcagttgcagataatgggtttccctcctaaacttcttactgatccaacccaaaccatagagcatgcaggccttgccaattctgtggtaatccagaagttctaagctccgactgtgtcgaaagtgtcgtatctgcttatctctacaagtgcttattgtacct

SEQ ID NO: 212604 - DNA, 445 bp, Gossypium hirsutum
gattcttcctcacgtcgataactttgcacatatcggtggcttcttgaccggctttctccttgggtttgttttactgcttcgtccccaattcgggtgggttcaatgtcagcatgttcctgctggtgcacctgttaaatctaagcacaaggcataccagtatgttttctaggtgattgcagtggtcttggtcataattggattcacaatgggattggtgatgctgtttagaggagaaaatggaaatgaccattgcagctggtgccattacctgagctgcgttcctatatcaagttggcactgtggaaaataataatgaaaccattaccattactactataaaccccagtcttcatcttgtcacactccattctttcacaatttttattcggttattaatttcttccgcttgatatttgcctatgtatatgctttaagattatatttg

SEQ ID NO: 212605 - DNA, 408 bp, Gossypium hirsutum
ccgacccacacgtgcgggcaaaagaaggagaaatggggtgggcaattgctgttcatggaggagctggagacatccccctttctttgcccccagaaaaacgtctccctcgtgaagctggcctccgccgctgccttgacgttgggatcgccgctctcaaagcccataaccaccccttggacgttgttgaacttgtggttcgtgaactggaaaacaatccgcatttcaatgcaggaaaggggtctgtcctcaccacctcaggtacagttgagatggaagcatgcatcatggatggcaagacaatgaaatgtggagctgtttcaggtgtcagcactgttgtgaatgccatatcccttgcgccgttagtcatggacaagacttctcatatttatctggcatttgatggtgctg

SEQ ID NO: 212606 - DNA, 260 bp, Gossypium hirsutum
cccacgcgtccggtccaatgaagtttgtaatagagaggataaacgaacaatagcacctgagcatgtactcaaggctttagaggttcttgggttcggaaagtacattgaagaggtctatgctgcatatgagcagcacaagattgaaacactgcaggactctttgaaaggtgggaaatggagcaatggggccgagatgaccgaggaagaagcagtagctgagcagcaaagaatgtttgccgaggcacgagcaagaatgaatg

SEQ ID NO: 212607 - DNA, 358 bp, Gossypium hirsutum
  unsure (1)..(358): unsure at all n locations
gacattataccagcagtcatcattcgccctaccatcgtaactagcacttacaaagaacccttccctggttgggtcgaaggaatcagaaccattgatagcctatcagttggttatgcaaaaagcaaattaacattcttcctgngagatctggaggcaatagttgatgtgataccagcagacatggtggtgaacgccataattgtagcaatgatagctgaggcaagacatcaacaaccccaaaccatttaccaagtaggttcctcaatcagaaaccccctaaggtattctaatcttcaagactatggcttccgctacttcaccaagaatccatggatcaacaaagatggaaaacctgtga

SEQ ID NO: 212608 - DNA, 434 bp, Gossypium hirsutum
caaactcgcccctcccttcctctctgcttttactttgctaagtccaagccttcgacaatggccgaaccctctaccatttcaccagctcccctcttgaaagatgagctcgacatagtcattccaaccattcggaacttggactttttggagatgtggaggccctttttccagccttaccatctcatcattgttcaagatggtgatccttccaagaccatcaaggttccggagggcttcgactatgagctttacaataggaacgatatcaacaggattttgggtcctaagtcttcttgtatctctttcaaggattctgcttgtcgctgctttggttacatggtttccaagaagaagtacatttataccattgatgatgattgctttgttgcgaaagatccgtccggcaaagacattaacgcactggagcagcacat

SEQ ID NO: 212609 - DNA, 415 bp, Gossypium hirsutum
aagaagtagaaagagagaaatcaaagatggggagaggcaagattgagatcaagaggattgagaactcaagtaacaggcaggtcacttactcaaagagaaggaatggaatcatgaagaaagctaaagagattaccgttctttgtgatgctaaagtttctcttatcatctttgctagttctgggaagatgcatgaatattgcagcccttctactaagttgattgatattttggaccaatatcagaaaacttctgggaaaaagttatgggatgctaaacatgagaatctcagcaatgaaatagatagaatcaagaaagagaatgatagcatgcagattgagctcaggcatttgaaaggggaggatatcacatctttgccttacaaggagctgatggctttagaggatgccctcgagaa

SEQ ID NO: 212610 - DNA, 419 bp, Gossypium hirsutum
acccacgcgttcgaagagtataaagagagaaatctttttggtgataggcttgattgagatcaagaggttcgataactgaagtaacaggcacgacacttactcaaagagaaggaatggaatcatgaagaaagctaaagagattaccgttgtttgtgatgctaaagtatctcttatcatctttgctagttctgggaagatgcatgaatattgcagcccttataataaagtgattgatattttggaccaatatcagaaaacttctgggaaaaagttatgggatgctaaacatgagaatctcaccagtgaaatagatggaatcaagaaagagaatgatagcatgcatattgagctcacgcattttaaacgggaggatatcacatgctttccttacaaagagctgcatggtttacaagatgccc

SEQ ID NO: 212611 - DNA, 338 bp, Gossypium hirsutum
cccacgcgtacggttataattttttttgcatcttacctctgctctccatccacttgtaggttgactctggatcggggtactttagatcctaatgacagagtaactgaacttaaatttgagcagcgagatggattaaaacatagcatgcggaagaggaaatgatgcattcttttgggtacagataaaatgcgttgctaacgattgccgtgactattctagcgctaatgtgcgccatcacatctgtatcggacaacttaaacactccctcttgctctgcatagatcaagattatgaacattaattggttccagaagcaagcacaggggcatgatgagggc

SEQ ID NO: 212612 - DNA, 378 bp, Gossypium hirsutum
gtggttggtgaggtgttggaagttgggtcagatgtaagcaagttcagagttggtgatattgttggcgttggttgtattgttgggtgttgcagaaactgccgaccatgcgactcagacaatgaacaatactgtcttaagaagatctggtcgtacaatgatgtttacactgacggaaaacccacccaaggtggctttgctggttccatggtcgttgatcaaaagtttgtggtgaatatcccagaaggaatggcaccagaacaggtggccccgctgttatgtgcaggggtgacagtttacagcccattgaatcactttggtttaatggggagtgggttaaggggaggaatattgggacttggaggtgtaaggcacatgggg

SEQ ID NO: 212613 - DNA, 407 bp, Gossypium hirsutum
cccacgcgtccgagcatatcaataagcggaggaaaagaaacttaccaggattcccctagtaacggcgagcgaaccgggaaaagcccagcttgagaatcggtcgccatcggcgtccgaattgtagtctggagaagcgtcctcagcgacggaccgggcccaagtcccctggaaaggggcgccggagagggtgagagccccgtcgtgcccggaccctgtcgcaccaagaggcgctgtctacgagtcgggttgtttgggaatgcagccctaatcgggcggtaaattccgtccaaggctaaatacgggcgagagaccgatagcgaacaagtaccgcgagggagaatcagaagaggccaagaaaggaatgttcgtaaagggatatgtctactaagctgctgcaaacaaagctt

SEQ ID NO: 212614 - DNA, 396 bp, Gossypium hirsutum
cccacgcgtccgcaaaagttttgctagagggatggatcgctagggatggtatccattgtggttgttgtagtaaaatcctcacagtttcaaaatttgagattcatgctggaagcaaattgcgccagccatttcagaatatatacttggactctggtgtttctctccttcagtgccaagtagatgcctggaacagacaagaggagtctgagcagattggtttccattctgttgacgttgatggtgatgaccccaatgatgatacttgtggcatttgtggagatggtggggatctaatctgttgcgacagttgcccctcaacatttcatcagagctgcttaaatatagagtttttaccagcgggtgattggcactgtccaaattgcacatgcaaatttt

SEQ ID NO: 212615 - DNA, 411 bp, Gossypium hirsutum
gcatgaccatgttgatgcttggccattcaaggaaccagttgatgcccgtgatgtccctgattattatgacattatcaaagaccccatggatctgaagacgatgtcaaaaagagttgaatcagagcaatattatgtaacacttgagatgttcgtagctgatgtcaagaggatgtttgccaatgcacgcacgtataattctcctgataccatatactataaatgtgcaaccagattggaagcacatttccagagcaaagttcaatcaggtcttcaatctaacaccaaaattcagtagggtcttcaatcaggtcttatgatccctgaagatcagatttcagcgattccagctgtcccatttcaacaatatgtaacagtagtcttcatatactgtctataatttgcagatttttc

SEQ ID NO: 212616 - DNA, 399 bp, Gossypium hirsutum
cccacgcgtccgcccacgcgtccgattcatttcattgtgttatctaagatgacagacttaaccaagaagaaattaaccggaaaagtagccatagtcaccggcggagcaagcggtatcggcgaagccacagcgcgtttgttcgccgagcacggcgcccgtatgatcatcatcgccgatatccaagaccaactcggccaacaagtagctacttcaatcggttcccacaattgtacttacattcgctgcgacgttaccgatgaaaaccaagtgaaagcattggtcgaatcaagtattcaaaagtatggtcaacttgatataatgtttagcaatgctgggattataagtaagtccgatcagagcattcttgatcttgatttccaacagtttgatcggttgatg

SEQ ID NO: 212617 - DNA, 411 bp, Gossypium hirsutum
gcatgaccatgttgatgcttggccattctaggaaccagttgatgcccgggatgtccctgattatgatgacattatcaaagaccccatggatctgaagacgatgtcaaaaagagttgaatcagagcaatattatgtcacactcgagatgttcgtagctgatgtcaagaggatgtttgccaatgcacgcacgtataattctactgataccatatactataaatgtgcaaccagattggaagcacatttgcagagcaaagttcaatcaagtcttcaatctaacaccaaaattcagtagggtcttcaatcaggtcttatgatccctgaagatcagatttcagcgattccagctgtcccatttcaacaatatgtaacaagagtcttcatatactgtctataatttgcagatttttc

SEQ ID NO: 212618 - DNA, 415 bp, Gossypium hirsutum
cccacgcgtccgcccacgcgtccgcccacgcgttcgtccacgcgtgcgtgatactcaaaattttgaaaagtttgacgagtccgacgatcagtgtcctatgccatcaaaatctggtccatggagaaaaatgctttcatccaaggacgtaaattttgtgggatacacatacaaaaactttgaaattgtcaatgattttcacgtgcctggaatggccgagttgaagaagaagagctccaaatcaagtacgccgtcagttaagacactttttgacagtggggcagaggcatctgatgcttcagactcaacacctggtgcacagcctgttcaagggagctttttgaatctcttgcctccagaactggaagccactgtaaagcagtgtggatcccagtaactcaccccatctcttagaact

SEQ ID NO: 212619 - DNA, 310 bp, Gossypium hirsutum
ttaagattcacgcccaacataagcattacaccataccatgcaaatgttaaggagtctcgctttaatgttgatttctataaagagtttgatgttgttctgaatggacttgataacttagatgcaaggcgccatgtaaaccgtctttgcttggcagctgatgtcccactggttgaaagtgggaccacagggttcttgggacaggttactgtacatttgaaggggaatagaaatttagcattgtctacgacgaaaattaaaacactttttgacaattgggcaaaagacatctgatgcttaaaactaaacacct

SEQ ID NO: 212620 - DNA, 328 bp, Gossypium hirsutum
acccgtccaaagttcattcgatttcattgatgggtataacaagcccgtcaagggaaggaaaattaattggatgaaggctggaatattggaatcacatagagtcttgactgtaagcccatactatgcccaagagcttgtattggtgaagacaaaaggtgaactgatacatattcgtaaatggctaccggcttggaatgtgatgtaagatggatctgcttgcaaacataggtaattatcacactgtatgagcaagcatgtaagaactttaactgaggggatgcttgcacgaatgtcttatcgattatggggctaaaacaaaggtcaatat

SEQ ID NO: 212621 - DNA, 395 bp, Gossypium hirsutum
  unsure (1)..(395): unsure at all n locations
gccttatcctaatcctctctgcaattcaaagaagaagaaaaatggcttcttcagctctctcaacactttctctccgcttacccacttcctctaatcctacgaacccttcccatttcaaagccccttccctccaattccctctccgttccctcactcctcctaacctcacccaccgttccaccgccctccgcgccacggncgcccccgaaaaaatcgaaaaacttggcaccgaaatctccaacttaaccctcgaggaagcccgcacccttgttgactaccttcaagagaaactcggcgtctctgccgctgccttcgctcccgcagccgtttcagttgccgcccccggtggtgccgatgccgaagcggctgttgtcgaaaagaaaaccgagttcgat

SEQ ID NO: 212622 - DNA, 352 bp, Gossypium hirsutum
  unsure (1)..(352): unsure at all n locations
cttcggttgggaaaaaaaatcggagttggcatgggccaaagatcctgtgatacaagcagcgtttgaaaaatttaatgggaggttaatggagcttgaaaggattattgatgagaggaatgcaaacaaggatntgaggaacagaaatggtgctgggattgtgccatatgagtttttgaagccgctctctgagcctggggtcactgggaagggagttccatatagcatctccatctgagcttaatatctcaaattgttctgttatgggatgctcgaatgccttcggggtatggtatggacatgtgtctacttgaaataaaattgacctctttaaaataaaaataaaattgagagc

SEQ ID NO: 212623 - DNA, 377 bp, Gossypium hirsutum
acactattcactctcgcccaaacaggttttttttcaatgaatggccgtctaaaataaagctggggatctgcatcactatgagaggaatgaaagatatctccctactccaaataacataccctaaactcagaaaccacgtttacttacttcgcctatattgctccttttaacaccctaatatatatggcttatatggcgaaacgggtatgaataactgatgcgatgtcttttttgctagaacataaaccctatctgtaacgcgacctctacaacaccatattcagcttttacttttgagactacggtcacatagcaggggcatggaccttacttgacttaccacgactcgtatctacctattactagtggatctggca

SEQ ID NO: 212624 - DNA, 277 bp, Gossypium hirsutum
ggtgtgcaggttaccgaacccgacacctattatcttccatatctgcaggcagtgatcaaggagacactcaagctccgaatggccatccctctactaatcccacacatgaacctccatgatgcaaagcttggtgggtatgacatccctgcagagagtaagatccttgtgaatgcatggaggttagccaacaacccggctcactggaagaacccagaaaaagttccgccccaaaaggtttttcaggagggattgaagggtgaaaccaatgggaatgact

SEQ ID NO: 212625 - DNA, 403 bp, Gossypium hirsutum
  unsure (1)..(403): unsure at all n locations
tttccgagtcttataaacatgcttaatgcctttgcttttcaacattggaacagtaacctctctaaccgcgttcctaattgtactagnttttgacatgctattgtattgaggtctgcctgtgtgattattgcttttgtgacaggttgattggctaactgagaagatgcgtagcaataacttcacagtatcatcaatgcatggagatatgcctcagaaggaaagagatgcgattatggctgagtttcgtgatggtgcaacccgtgttcttatcacaacagatgtttgggccagggggctcgatgttcaacaggcaagtctcgggagattattatgtctgccatttttttcatgtattttgctagttaaatgctttctagttgagtaaatgttaattttctttttc

SEQ ID NO: 212626 - DNA, 406 bp, Gossypium hirsutum
cccacgcgtccgcccacgcgtccggagacagtccaatataccttcctggattacctagctgcgggttttgaacttaactttatggttgctattgatttcactgcttcaaacggaaatccccggctccctgattccttgcattacattgatccatcaggacggctgaatgcataccagaaagcaatctatgaggtaggagaggtattgcagttttatgatgcagacaagcgctttccagcttggggattcggagcacggcccattgatggtccagtttctcactgtttcaacttgaatggaagcagtaactactgtgaggttgaaagaattcgaggaattatgatggcctacaccagtgccctttttaacgtgtctcttgcagggccaacactgtttgggcatgtga

SEQ ID NO: 212627 - DNA, 388 bp, Gossypium hirsutum
agcttgcctctgttcccagcggtggtggtgttgctgtggcggcatctgcacccggagccgccgccgccgccgctcctgctgcagctgagactaagaaggaagagaaagttgaggagaaagaggaatccgatgatgatatgggcttcagtctcttcgactaaaactaccacgcaccgccagcaacctatcaatgaaatacggatggtttttggtttctacggaggatttcttttgaatttaaggctgccctaggtttttaaagttagttatccagtgccatgtagttctttctttttggattcatatatttgttttgctgaacccttttgttgcaatggaattttcttccgacttaattttaatcatcttctcgagtttcattcccccg

SEQ ID NO: 212628 - DNA, 379 bp, Gossypium hirsutum
acacaattcactaaagcaaaaacagctagaataagaaggaatggccgcctcggataaagttcaagaactgcatgtatatgagatgaatgaaagagatcgtggtagtccagcttaccttcgtttaagtcagaaacctgttaactcacttggtgatattgtcccttttagcaacaaaatatataggggagatatggagaaacggataggaataactgcagggatgtgtatattgatagagcataaacccgaactgaaaggtgaccgctacgaagccatcttcagcttttacttcggagactacggtcacatagcggtgcagggaccttacttgacttaccaagactcgtatctcgctattactggtggatctggcattttt

SEQ ID NO: 212629 - DNA, 373 bp, Gossypium hirsutum
gttattttctctctcgacaaacaatggaagcattctttgaatcgcgatcgagaagcaactggagttacgatacactcaagaatttccgtcagatttctcccgtcgttcaatctcatctcaaaagggtttatttgaccttatgttgtgccctggttgcctctgcttttggggcttatcttcatatcttatggaacattgggggttacctcacatcattcgcatgcttcggaaccatgatttggctcctctctatccctccttatcaggaacaaaagagagtttctcttcttttggcatccgcagtgttcgaaggggcttcagttggtcctctgattgacttggccattcagattgatccaagtgttttggtagc

SEQ ID NO: 212630 - DNA, 323 bp, Gossypium hirsutum
tcattctatcgagtttctagtgcagatttttctgtgagaggcgaaagatggtgtccacatctgtattgtacacgtatacactgtccagctacaccttcggttccaaacagccaaggatggaaaatgactcgtgcgatgcctaccgccttgcttgcatgaaaactaattgtctgaaagagggcttgtgaacgagcgttgcagcgatgatactggtccatgaacataattatcctcacattcttcttctgcatattgggaacaaattctgtatacttgctggtggacgcccgaagcctgtataaaatgagattgatggtctgaag

SEQ ID NO: 212631 - DNA, 415 bp, Gossypium hirsutum
gaaagaggcactttgcttaagaagttcaatgctccagactctccttattttatgtttctattaagcactcgtgctggaggtcttgggctgaacttgcagacagcagacactgtaattatttttgatagtgactggaacccccaaatggatcagcaggcggaggatagagcccatcgtataggacagaagaaggaagtcagggtttttgtgctggttagtgttggatcaattgaagaggttattttagagcgtgcaaagcagaagatgggtattgatgctaaggtcatccaggctggattgtttaatacaacttccacagctcaggacagaaaagaaatgctggaagaaatcatgcggagaggaacaagctcacttggaacagatgttccaagtgagagggaaatcaatcgacttg

SEQ ID NO: 212632 - DNA, 409 bp, Gossypium hirsutum
gaagaagcaggacaccttaaggctgaagtgattcttaaagtacgagcagagttcccctcaaacattactgcaaacacagttgttttagagatgccacttcctaaatatactaccagagctagttttgagttggaacctggagttactgggcaaagaacagatttcaaaggagcaaacaagaaacttgaatgggatttagaaaagtttgttggtggagttgaacatacactgcgtgcgaagctgactttttctcaggaattgcatgcaaacatcataaaggaagcttgaccagttagcatgactttcacaataccgatgtataatgtttcaaggcttcaggtgaaatacttgcagatagcaaagaaatctagttcctataatccatatcgatggatgagatatgttactc

SEQ ID NO: 212633 - DNA, 408 bp, Gossypium hirsutum
ctagctttggagatttgaaccatttgatttctgcttcaatgagtggcgtaacatgctgcttgaggtttcctggacagctgaactccgacctccgaaagtttgccgttaatatgatcccattcccacgtcttcacttttttatggctggattcgcaccgctcacataccgtggttaccagcattacatttgcctcaccgtcccagagctgacacaacaaatgtgggatgccaagaacatgatgtgcgctgccgatcctcggcacggccgctacttgacagactcagctatgtttcgaggcaaaatgagcaccccagaagttgatgaacaaatgatcaatgtgcaaaacaagaattcatcatacttcgtggagtggattcccaacaatgtgaagaccagagtctgtgata

SEQ ID NO: 212634 - DNA, 389 bp, Gossypium hirsutum
  unsure (1)..(389): unsure at all n locations
cccacgcgtccgtaattattgtgcagccattagagtggcatcctcagttgcaagtccacatccacatcctgggtccagagaccgtaatgtgaagcttcggattaaatccttcaaggttccagaacttcttgttgagattcctacaaccgccactgttggttcactgaaagtcatttcaagaaataatgtatgaccatatcagagatgaagcggcttcttattcttcaatttcatagatatgaagtcaagcatattggttcctatctgtatattgctgataattaatgtccagtggttattatagaggtcagtcatggaagcagtgactactgtacttggagatggcttacatgtcggcatccttcttaaggaaaagaagntagagatga

SEQ ID NO: 212635 - DNA, 415 bp, Gossypium hirsutum
gattcctaaacgaaaccctattttcctatctgtaatctttgtttcgctcctcgccatcgcctccgctaaagtattcttcgaagaacgttttgatgagggatgggaaagtcggtgggtaaaatctgactggaaaaaggatgagaacatggctggggagtggaattacacttctggaaaatggaatggagatcctaacgacaaaggtattcaaactagtgaagactacaggttctatgctatttcagctgagttcccagaagtcaacaacaaagataagactctagtcttccaattttctgtcaagcatgagcaaaagcttgattgtggtggtggctacatgaagttgctcagcggtgacattgaccagaagaaatttggtggtgaaaccccatacagcatcatgtttgggcctgat

SEQ ID NO: 212636 - DNA, 400 bp, Gossypium hirsutum
aagaaatctgatgcagtaacttcatcttagagtaataacagtaatacaaaggaacgtggaaaaaatgctactcaaacacttgaatatggcggtgttagttatcacatggttaactgtggcttaatattgctgaaaatgctgtcagagtacattgacatgaatcatcttctgccagcactatccttggaggtggttcatcgtgttgtggagattctaaaatttttcaacacgagaacatgccaacttgttttaggtgctggagccatgcaggtttctggtttgaagtccattacttctaaacacttggccttggcaagtcaagtcattagtttcatatatgctatcattcctgaattgaggcaaatcctgttcctcaaagttcctgaacctcggaagtcac

SEQ ID NO: 212637 - DNA, 412 bp, Gossypium hirsutum
ctccgaaatcaaaatcccctctcggtcactgttcgagaggcttctgtgtcttcttcttcttccctttcttctctcgctttgcccttgctatggcttctgatttggagaccaaagccaaagaagccttcatcgatgatcactttgaactcgcgctcgatctttactctcaagccattcaacttaaccctaaaaatgctgaactctacgctgaccgcgctcaagccaacatcaaactcaataatctcactgaggctgtcgcggatgcaaacaaagcaattgagttggatccttccatgtctaaagcttacttgcgtaaagctacggcatgtatgaagcttgaggagtatcaaactgctaaggctgcgttggagactggtgccactttggcaccgggagagttgagattttctaa

SEQ ID NO: 212638 - DNA, 349 bp, Gossypium hirsutum
gcagcctccgtagaagaacactacacgagtggttttgaactgcaaaaggagatcgatttcgaagccttttcaccatgagagctaagtggaagaagaagcgtatgaggaggttgaagaggaagagaagaaagatgaggcaaagatctaagtagtttaattttatcttaaagcaagcaatttgttctatgtttctttagattttctgttgtttgatggatactttactttaaaaggatttaagttatctttatcgaaaccttttgaatattctggaaacttgttattttctattaacaacttatggctttggatgttaattttctaatatttttggctcaaagttgcactt

SEQ ID NO: 212639 - DNA, 385 bp, Gossypium hirsutum
  unsure (1)..(385): unsure at all n locations
ctgtcttttttgtgggagccatattgatcagtttagctgtttatgatcgttttattattccactttgtaaaaaatggagaggtgaaccagggtttacaaatctgcaactgataggcataggtctgttcctgtcagccatgggaatggcagctgcagcagtggtagaggtgaaacggctatcggtggcaaagaaatacaatgaaacaaccacactaccgataaccgttttctacctgattccgcaattcttcttggtgggtgctggagaaggatttatatacactggtcaactggatttcttcatcactcaatccccaaaaggaatgaaaacaatgagcactggcctcttcctcaccactctttcactcggnttcttctttagtag

SEQ ID NO: 212640 - DNA, 406 bp, Gossypium hirsutum
gaacgttgtgtaaccatctcttctgacaaaggtctctgtggtggaattaactctacatcagtcaagataagcaaagggatctataagttgaactctggccctgaaaaagaaacaaaatatgtaattctgggagagaaggcaaaggctcaattggttcgtgactcaaagaaggacattgagttgatcataactgagctgcagaagaatcctttgagctacactcaggtctctgttcttgctgatgagatcttaaagaatgtggagtatgattccttgaggattgtcttcaacaagtttcactcagtagtttcatttgtgccgacagtctcaactgtattatcacctgaaattgttgaaagggaatctgaatctgggggaaagcttggtgaactagactcctatgaaa

SEQ ID NO: 212641 - DNA, 389 bp, Gossypium hirsutum
gccctgcaccatgtgaagggtcttgtgtgcttggtattattgagaatcctgtgtccatcaaaagcattgaatgtgctatcatagacaagggatttgaggaagggtggatggtgccacgacctcctctcaagagaacagggaaaagcattgctgttattggaagtggaccatctgggttggctgctgctgatcaactaaatagaatgggtcactctgtgactgtgtatgagcgtgctgatagaattggagggcttatgatgtatggagtccctaacatgaagactgacaaggtagatgtagttcagcgacgtgttaaccttatggctgaagaaggagttaaatttgtcgtcaatgcaaatattggaaaagacccgtcctactcccttgac

SEQ ID NO: 212642 - DNA, 400 bp, Gossypium hirsutum
  unsure (1)..(400): unsure at all n locations
accaaaattggggtttctgtaaagtaaaaaattaaattgaaatcaaaatcgttttgaaatcttaaggaatgcggccgaattgttgtcatgtttcgtttgcttttgttctgaagttcttgaattttctccaagctttccttggagtgtcgattntactctactcgttttggatgttggatcaatggaatcatcacgtccccatttctcctccgccgtcagttccgtggccggattcttctctctcggctctcttcaattcgagaccggaggttgggggagctcgaggagccaaggttttcgatgatttagctgccggtttggtctccgggttggataatggagtcgggtttgaattgagttcggtgaagctacctgctccatggttcatctactctttttt

SEQ ID NO: 212643 - DNA, 419 bp, Gossypium hirsutum
gcaatttgcagatacccaatataagttcttctcaactagatatggacaacaagtgattgacattttggagttcccaatcaaagtagtgctctctccgttcactcttgcctttgacattgctgggtccgctcctcgtgggtttggcatccccgagtttatctccaagctttctcatacttctatctttgctattgctgctttgggaacctatgatattgctttagagctaggaaagaaggtgatatgtcaaaggaactgtcgtacttgcaatggatggcaagctttgcggtgtaccatgtgcaaaggatcagggaaagtgcactatcaagtcaaaactcattccttgagaagtggggagaaggcaaccgcagaatgtgttgcagatgctattgctgataatcgagcagagttagtgcacc

SEQ ID NO: 212644 - DNA, 408 bp, Gossypium hirsutum
cccacgcgtccggaaacagaggagagtgtgtgtgagggtgtgaatgatttgaaacctggagatcatgtgctcgctatcttcaccggagaatgcaaagaatgtcgccactgtctgtcagaagaaagcaataacatgtgcgaactgcttaggatcaactgcgaccgaggtgttatgcttgctgatgggaaaaccagattttccatcaacggcaagcctatctaccactttgttggaacctcgacctttagccaatatactgtcgtccatgttggccaggttgccaagatcagtccaaccgcccctcttgataaagtctgtcccattagctgtgggatatgtacaggttttggggccactgtgaatgttgctaaacccaaaaagggtcaaactgttgcaggttttggactg

SEQ ID NO: 212645 - DNA, 403 bp, Gossypium hirsutum
tgtctattgaattctttccttcactttcttgataaaaaaaaaaatgtcttcaggttgcaattgcggatctagctgcagctgcggatctggctgcaattgcggtgagaactgctcaatgaaccttaaccttggatactcggagaagacaaccagcactcagaccatcatctccggagttgcgccagtgaagatgacctttgagggaccagagatgggcactactgaatcaggacatggatgcagctgtggatcaagctgcaaatgtaatccatgcacctgttgaaaagcttgatgaaagccatagattatgaaaaaagaaagcagcaaaataacaggcctctgtaatgatttattttcaaggatggatgcctgcaaggtctataattatgtctctctctgtctt

SEQ ID NO: 212646 - DNA, 406 bp, Gossypium hirsutum
cttgccaacaataagttctataataaagttccaaatggatcgttcctctcattcagtctcagttgctttctttcttctgctgattcttttaaccacagagatggggcctatgtcagcggaggctaaaacatgcgagactaaaagcggtaaattcaaggggatgtgcatgagttctaccaactgtgctagtgtttgcaaatcagagcctggttttgatggtggacattgccgaggttttcgtcgtcagtgcgtttgcactaagccttgttaaaccactaagctttgttagatcagtaatctattatatttcattgtcacgaagatttccccttttttttttgcttatcatgcattttgtgcttgagagttgagagaaataacacatctccaacatatattgtatacc

SEQ ID NO: 212647 - DNA, 393 bp, Gossypium hirsutum
  unsure (1)..(393): unsure at all n locations
cccacccgtccgtggcgatgtctccgattgtgtcaaacagtttttcacattcgacaagacacttagttactcaggccacttcaagcccttagctgcagttcaagtaaccgagttggccgacggggtctntattgggtgtatagtgaaccacgctgtgaccgatgggacttcattctggcactttttcaacaccttcgctgagatcaccaaaggggctntaaaaatatcgaaatctcccgattttggtcggaacaccgtgtttaattcccaagccgtgcttaaattccctcccggaggacccactgttactttcgccggcgacgagccgttgagggaaaggattcttcatttcagcagagaagcgattttaaaacttaaatacagagctaatta

SEQ ID NO: 212648 - DNA, 279 bp, Gossypium hirsutum
cccacgcgtccgatacctctggatagatgacaacagtgtggtggatttcattggaaaaatatttattgctgtggtgtcatttatagctgcattaggattcttgttgtatggaggaagattatttttcatgctaagacgattccctattgaatcgaaaggaagaaggaagaagcttcacgaggttggatctgttacggccatttgtttcacctgcttccttattaggtgctttgtggtggttttatctgcctttgatgcagatgcgtcactgggatgttt

SEQ ID NO: 212649 - DNA, 400 bp, Gossypium hirsutum
cccacgcgttcgaagcaacccttgttttacttataaagatccctatccaacaatggctgctaatcccaaggtcttcttcgacatgaccgtcagtggccaaccagctggtcggatcgtgatggagctctttgccgattgcactccccggactgctgagaacttccgtgctctctgcaccggcgagaaaggggtaggccgtagcggcaaacctctccactacaaaggctcatccttccaccgggtgatccccaatatcatgtgtgaaggaggcgactttaccgccggaaacggtaccggatgtgaatacatctatggagccaagttcgctgactagaactttatctagaagcacaccggacctggcatgctcttcatggcgaacgctggacccggaacaaac

SEQ ID NO: 212650 - DNA, 331 bp, Gossypium hirsutum
gaattccgggtcgcccaccccgtcggttaccaagacttttgacaagaacctcgcttcttgtttgttcaagttgctcctcaagtacaggccagaagacaaagcggtcaagaaggtacgtttcttgaaaaagaccaggccgaggctgaaggaaaagcccccgagtgttaaataccaattgtgtgtgaaatacgcggttaaccatgttactgtaccttatctagcacaacaagggtcaattggttgttattgctcatgatgtggatcccataaagatggttgtgtggcgtctcgctttgtgcctgaaaatggacggaccatatttgattgttaa

SEQ ID NO: 212651 - DNA, 243 bp, Gossypium hirsutum
gttcaacaaaaatttttgacaagaacctcgcttcaggtttgttcaagttgttcttaagtaccgggcaaaagacaaaacgggcaagaaggaacgttttttgaaaaaagcccaagccgaggctgaaggaaaagccccccaattttaaaaaaccattggtgggaaataccggcttaaccatggtacttaccttattgaacaaaacaagggttaattgggtggtattggtcatgaaggggatcccat

SEQ ID NO: 212652 - DNA, 366 bp, Gossypium hirsutum
cccacgcgtccgaaacaacgtcgtttcaagttcagatggaatcaacggcgaagccagcgggtggtagaaagggaggagtgaagaagaaggcagtatctaagtcggtaaaagcggggctccaatttcccgtgggtcgtatagctcggttcctcaagaaaggtcgttatgcgcagcgttacggcggtggcgctcccgtttatcttgccgccgtccttgagtatcttgccgctgaggttttggaactggcggggaatgcggcacgtgacaacaaaaagaacaggatcaacccgaggcacgtgctactagcagtgaggaacgacgaagagttgggtaagcttcttcaaggagtgaccattgctagtgggg

SEQ ID NO: 212653 - DNA, 410 bp, Gossypium hirsutum
cccacgcgtccgcccacgcgtccgttccattttccctttatttcctttgccgcccctagggtttaattacattccgcacatggcttctgcagatgtcgagtaccagtgctttgtcggaggtctcgcatggaccatcaacgaccgtgctctcgaagaagccttcagtgcttacggcgagatcgtcgattcgaaggtccgtttgtcgcagtgatcggactccagatctgactcgaatccaacccgacctgggcctccatgtctatgatctgtgatccttgatctgttattttgtgttactactcgataatctcttgttactattctaaactggtttctaaagtctcgctggtacgttccatcttcataccctctgggccgaagatcgatcgattctaacaatttttagtttt

SEQ ID NO: 212654 - DNA, 380 bp, Gossypium hirsutum
aaagaggtccgggaaagatgtcagcaggagctgaaaaaggctgccatggaatggggtgtgatgcaccttgttaaccatggcatctccgaggagctcatggatcgtgttaggaaagttgggcagaaattctttgaactccctgtggaggagaaagagaagtatgccaacgaccagagctctgggaatgttcagggctatggtagcaagcttgctaacaatgctagtgggcagcttgagtgggaggactacttcttccatcttatttttcctgaggataagagagacttgtcaatttggcctaaaatccccagcgaatacactgaagttacaagtgagtatgcaaggcaactgcgaggcctaacgagcaaaatactttcagc

SEQ ID NO: 212655 - DNA, 329 bp, Gossypium hirsutum
ctttggtgtgcactgtaaacagtattatgcattggacatcacttatttcaagtcctcacttgattgtcacctcctggatctgttatggaataagtactgggtaaacaccctttcttcttcacctctcttgggtaatggagattatgttgcaggacaaatttcagatttagctgaaaagctggagcaagcagagaaccaactggctcactctcgcattggcccactaggaccccctcgaaagaaggaagaatctcagcttgctaagattactagagatagtgcaaagataactgtggagcaagtccatgggtttaatgtcacaggtcatc

SEQ ID NO: 212656 - DNA, 397 bp, Gossypium hirsutum
aacagactcagcactcgatctcgatgaacagatctcacagctaatgcaatgtaagccactttcgaagcagcaggtcagagcattatgcgacaaggcaaaggaaatattaatggaagaaagcaatgttcaggactggactggtttgaactttcaagaagtaatggatgaagcagaaaaaattcgagtaacggtatgtggcatattttatgttgcattcttcctaaatgagccattgtctggtcgtacactttacagccccatctccatgagtatgcttacaggtgcatactttggctttctattccagtattttggattctctggcggttgaattgaaagcatcgaaggacttctctaagttatatgcaagcattgcaatactctggcttcatctaag

SEQ ID NO: 212657 - DNA, 406 bp, Gossypium hirsutum
  unsure (1)..(406): unsure at all n locations
cccacgcgtccggccaaactcattggacttgctggggagatcaatattcagggtgaggagcaaaagaaactggatgtgctttcaaatgaagtctttatcaaggctttagtgagcagtggcagaacttgcatccttgtctcggaagaagatgaagatgcaattattgtggagccctcaaagtgtggaaggtactgtgtagttttcgatccactcgacggttcctccaacattgattgtggtgtttctattggaacaatttttgggatttacatggtgaaagatgaccatgaaccaacactagctgatgtgctgcaacctgngaagcaaatggtagctgctggctattgcatgtatggaagttcttgcacgcttgtgttgagcactgggaaaagagttaatggattca

SEQ ID NO: 212658 - DNA, 209 bp, Gossypium hirsutum
gtgaggaaaaaaaaagcttcaatctttggttgttaagtgggtgaaacaaaaaaaaaatggagggcaaagaggaggatgtttaactaggagccaacaagttctctgagagacaacctattgggacatctgctcaaacagacaaggacttcaaggagccaccaccagcaccattgtttgagcctggtgagctcaagtcatggtctttctac

SEQ ID NO: 212659 - DNA, 334 bp, Gossypium hirsutum
agaacctccaaatcttaataatcgaaatggtaacctgaaagaagaaatgtctgagaattctgctttccaagaagagcatttttatgtcagaaacagtcatatggatcaagctgatggtgtaacaaggcgagacatgatggatgataaagataaatctattacacctagtggtttgaaagagattgatagagatgtgcagaacgttgaaacaagcgggtcagatacaagttccacaaagggtaaaaatgcagttgataaattagcagagtgtcacagagaaaatgcagatgttcgagaagatgaaaaagttgaaaccgttcaaactgaagaaaag

SEQ ID NO: 212660 - DNA, 360 bp, Gossypium hirsutum
ggagggttcccacacaatgcagaatgactatgactcccttgatgtgcatgttggacagtgcttcagtgtgcttgttactgccaaccaggaaccaagggattactatgtggtggcctctacccgttttaccagacgtgaggttacagcaaccggcatcatccgttacaagaatggcaagggagctgcctcatccgagttgccaccaccacctgttggttgggcttggtcactcaatcaattccgtaccttccgttggaacttgacttctaacgctgctaggcctaacccttcaggctcctacaaatatggttccattaacattacccgcaccatcaagcttgccaacactgcacaaagagt

SEQ ID NO: 212661 - DNA, 396 bp, Gossypium hirsutum
gcagaaaatatctcaaatctcctcctcctcctcagaaatcttagtatcatcaccatggcctcaaatcccaaggtcttctttgacatgactatcggtggtcagcccgctggtcggattgtgatggagcttttcgcagattgcactcctcgcactgctgagaacttccgtgccctctgtaccggcgagaaaggcgtcggccgcagcggtaagcccctccactacaaaagctcctctttccatcgtgtgatccctaactttatgtgccaaggaagtgacttcacggccggaaacggtaccggaggtgaatccatctacggatccaagttcgcttgacgagaacttcatcaagaagcacactggtcccggtattctctaatggctaacgctggtcccgga

SEQ ID NO: 212662 - DNA, 406 bp, Gossypium hirsutum
  unsure (1)..(406): unsure at all n locations
ccaagacgaagtgacgactcactaatcactgcttggatcttgttccgctacctggtgattgggctctatgtggggatagccactgtcggggtcttcatcatatggtacacccaccatagcttcctgggcattgatctgagtggagatgggcatagtcttgttacctactcccaacttgctaactggggtaaatgcgattcttgggaaggtttttctgtgtcaccattcacagcaggttcccaagtgttcaaattcgattacgacccatgcgactactttcattcagggaaaatcaaagcctcgactctttccctctctgtcttggtagccattgaaatgttcaactcccttaatgccctatctgaagatggaagctngttaacgatgcctccttgggtgaacccat

SEQ ID NO: 212663 - DNA, 357 bp, Gossypium hirsutum
atatacttcccttacaccgaagagaagcggaggttgaagcatttccatcctgagatcgaagaccttctttacagcaaagttgagaatgaagaacacttatgtgtgctcaatgaccgcaacaagccaattctgttcacaatggcaaggcttgatcgtgtcaagaacttaaccggactcgtcgagtggtacggcaagaacgcaaagttgcgtgagttggctaacctcgtagttgtaggtggtgataggcgaaaggaatctaaagatttggaagagaaggctgaaatgaagaaaatgtttgagctgatcgacaagtacaacttgaacggccaattcagatggatatcatctcaaatgaac

SEQ ID NO: 212664 - DNA, 404 bp, Gossypium hirsutum
tgcttgcaaccaaggtgttgagaagatagttgacctggcaacactaaccggggcttgtgttgttgctcttggaccctcaattgcaggcgtcttcacacccgatgatgatctagcaaaggagttatttcaagcttcagaggctagtggtgagaaactttggaggatgccattagaggaaagctattgggaatcaatgaaatcaggagttgctgatatggtaaataccggcggtcgtcaaggcggtgctatcaatgcagctctgttcttgaaacaatttgttgatgaaaaagtaaagtggatgcacattgacatggctgggcctgtcttgaatgataagaagcatgtggcaactggatttggcatctcaactttggtggaatgggttctgaagaactcttcttctt

SEQ ID NO: 212665 - DNA, 369 bp, Gossypium hirsutum
aaagaagtagaaagagaaaaatcaaaaatggggagaggcaagattgagatcaagaggattgagaactcaagtaacaggcaggtcacttactcaaagagaaggaatggaatcatgaagaaagctaaagagattactgttctttgtgatgctaaagtttctcttatcatctttgctagttctgggaagatgcatgaatattgcagcccttctactaagttgattgatattttggaccaatatcagaaaacttctgggaaaaagttatgggatgctaaacatgagaatctcagcaatgaaatagatagaatcaagaaagagaatgatagcatgcagattgagctcaggcatttgaaaggggaggatatcaca

SEQ ID NO: 212666 - DNA, 303 bp, Gossypium hirsutum
gcctccgctgccagcaagctttttttcctgctgcaggagcggtagaacgtcttacacgaaatttgagcacccaaggcatggatcccttggattacttccaaggaagcgagcctcttgtcacagaggaaaagtgatggcattgccacatgatgaccctaccaaacattgcaagctcactgcctttctggtgtacaaggctggtatgacacacattgacagagaggtcgaaaaacccggatctaagctttacaagtatgtgacgtgtacaagctgttactattatctgaaacccctgctatggtg

SEQ ID NO: 212667 - DNA, 291 bp, Gossypium hirsutum
gccgccgctgacagcaagctgttgttactgcatcaggagcggaagaatatctaacaggaaatatgagcgcccagggcatggttcccttggatttcttccaaggaaacgagcctctcgactcagaagtaaagtgatggcactgccaaaggatgaccctaccaaaccttgcaagctcactgcctttctggggtacaaggctggtatgacacacattgtcagaaaggccgataaacccgcatctaaacttcacatgaaggaaacgtgtcaagctgttacaatcatttgaacccc

SEQ ID NO: 212668 - DNA, 372 bp, Gossypium hirsutum
cccacgcgtccgcggaagcagtcttatggtgtctccagtgcttgagcaggggaaaacatcagtcaaagcactcttcccacccggttcttggtacaatctctttgatatgacacaaaccatagtgtcaaagggacagtacttcatgctcgatgcgccgttgcatgtggtcaatgtacatttgtatcaaaacaccatactaccaatgcagcaaggagggaatgatctccaaggaagctagaatgacaccatttactcttatagtaaccttccctgccggggctagcgaagcagaagccaaaggaaacctttatctcgacaatgacgagcttccagaaatgaaactcggaaacgggtattcaacatatgttgact

SEQ ID NO: 212669 - DNA, 410 bp, Gossypium hirsutum
  unsure (1)..(410): unsure at all n locations
cccacgcgtccgcagaattggtgatgaaatcgattgtacccgttgttatggctggtgtcttgggtatttacgggttgattattgctgtcattattagtaccgggatcaatcctaaggcaaaatcgtattaccttttcgatggttacgcccatctttcatctggtcttgcttgtggccttgccggtctttctgctggaatggctattggaattgttggtgatgctggtgtcagagctaatgcacaacaaccaaaactttttgttggaatgatacttatcctcatctttgccgaagctttggctctttacggccttattgtcggcatcatcttgtcttcccgggctggccaatctagagcagaataagataccggnggaattggggtagattcttttatttgcttatattgg

SEQ ID NO: 212670 - DNA, 402 bp, Gossypium hirsutum
tgcagattttatgtggcagaagtgctccttgctttggagtatcttcacatgcttgggatcatttacagagaccttaagcccgaaaacgttttggtgagagaagacggtcacataatgctctccgattttgacctctcccttagatgtgccgtctctccgacgcttgtaaaatcttcgaactcaaccctggaatcaaaaaattcggcatactgtgcccagcctgcgtgcattgaaccaacttgtgtaatgcagcctgattgtatccaacctgcatgttttggaccccgatttttttcaagcaagcagaagaaagacaagaagagcaaagtaaagaatgaaacaaatcatcaagtgagtcctctccccgagctcatcgctgaaccgaccaatgctcgatcaatg

SEQ ID NO: 212671 - DNA, 380 bp, Gossypium hirsutum
gcagccgcagccagcaagcagcagtagcaacagcaggagcggaagaatgtctcacaggaaatttgagcacccaaggcatggttcccttggatttcttccaaggaagcgagcctctcgtcacagaggaaaagtgaaggcattcccaaaggatgaccctaccaaaccttgcaagctcactgcctttctggggtacaaggctggtatgacacacattgtcagagaggtcgaaaaacccggatctaagcttcacaagaaggagacatgtgaagctgttacaatcattgaaacccctcctatggtgattgttggggtggttggatatgtgaagacaccacgtggccttcgctccttgaacaccgtctgggctcagcatctgagtg

SEQ ID NO: 212672 - DNA, 312 bp, Gossypium hirsutum
cccacgcgttcgcccacgcgttcgcccacgcgttcgcccacgcgttcgcttaaacattttcattttcaaacccccctccccccatggctggtctcaagcttatttgtggcctagtactgttgtgcatgttggtggtggaacccatggccacaactgctctcacatgtggacaagtggcaagcgaaacggctggttgtataaggtatttgcagcgtggagggaaccctccagctgcttgctgcaacggagtaaggaacctaaacaggcaagctagaaccacccgtgaccgtcaaactgcatgcagatgcttgc

SEQ ID NO: 212673 - DNA, 404 bp, Gossypium hirsutum
gcagcaacaatttcgtagcctaagctctagggagcttggctctggctcggctgccattgttggttccccggttaattcatggtcaaaatggggatcctccaatgggaagccagactgggctgtcaatgccgatgggttggacaagcatcgcaggtcttcctcatttgagcttggtaatggggatgaacccgatttatcatgggttcagtcccttgtaaaagaatctcccactgagatcaaagagaaaatagcagcaccagtctcgggtgagggttctagcatgaatgcagatccggtcgataatgcagtgttgggtgcttggctggagcaaatgcagctcgatcaactcgtggctcagcaaaactgaaacccgtttcgctgagccatcctgaggtagagataag

SEQ ID NO: 212674 - DNA, 404 bp, Gossypium hirsutum
  unsure (1)..(404): unsure at all n locations
cccacgcgtccgctgatcatcatgctgctgcaaacaaggctgatgttgaagttgaaacctcggttcaggttgacgcagttcagacaaacgaccagcctaaggatccaaaggatgcagcaggcagccgggaacttcaggaaactgaagcaactaaggcagttgagaaggtggtggtggacaccacaaacctagccaattttgttgggaaaccagttttccatgcagagcgcatctacgatcggactccagttggtgttgtgatgggtctagcatggactgccatgggtggttccaccttgtacatcgaaacaactcaggttgaacaaggtgaggggaaaggagcccttcatctcactggtcaactnggagatgtcatgaaagaaagtgcacaaattgctcacaca

SEQ ID NO: 212675 - DNA, 382 bp, Gossypium hirsutum
ggcaccacaccttaatattgttccttccatgtttgtacttttattattattcatttcagcctctaaagttcaatcagatgcttttgatgttgttgccaagtttggcgcaaaagctgacgggaaaacggatttgagcaagccatttttggatgcttggaaagaagcatgtgcctctgtaactccatcaacagttgtgattcctaaagggacatatttattatcaaaagtaaacttagaaggtccatgcaaggctcctattgagattaatgttcagggcactatacaggctccggctgatcctagtgctttcaaagaccctaattgggttagattctatagtgttgaaaatttcaaaatgtttggcggagggaatttcgatggt

SEQ ID NO: 212676 - DNA, 403 bp, Gossypium hirsutum
cccacgcgtccggttttgctgttggataatgtgatcgcatttaatgaggctgtcattgaagaaagagaacaaggaattcaagaaattcagcagcaaattggtgaggtgaatgagatcttcaaagatctcgcagtgctagtacatgagcaaggaactatgattgatgacattgggactcatatcgagaattcacgggctgccactatacaggctaaatcccaacttgcaaaagctgcaaagactcatagatcaaattcttccctgacctgcttgcttatggtgatattcggaatcgtgattctgattgtggtcatactactagtggtctaatcccaaactaaagatcatctcatcagcgagacgctgatctcttcgcctatgtatttgattatgttgttctatg

SEQ ID NO: 212677 - DNA, 407 bp, Gossypium hirsutum
gcaaaagagtccttcagcttcttccttgggtccaggtggtctagacctggctcaagccttcttcaagcccatcctaaacaccgatccaccttcctccaccaagcgccataccaagatctccgtcatcggagttgggaacgtcggtatggctatcgcccaaactatcctcacccaggacttagccgatgaactcgccctcgtcgacgccaagtctgacaagctccgcggcgaaatgctcgatctccaacacgccgcggcgttcctcccacgcactaaaatcaacgcgtccgttgattactccgtcaccgctggatctgatctgtgtattgtcactgctggcgcccgtcaaaaccctggcgagtctaggctgaatctgctgcagaggaacgttgctctgttttcgaata

SEQ ID NO: 212678 - DNA, 394 bp, Gossypium hirsutum
caagatttaagaaaacccttaaacctctttgcctttttcttttcgtttcattttcgacgaaataacaatgagggaaatccttcacgtgcaaggaggccaatgcgggaaccaaatcggatccaagttttgggaagtgatctgcgacgagcacggtgttgatcctaccggaaagtacagtggagatggatcatccgatattcaattggagcggatcgatgtgtattacaacgaggcttccggtggaaggtacgtccctcgtgcggtactcatggatcttgaacccggtaccatggatagtatcagatccggtcccattggccagatctttagacctgataatttcgtgtttggacaatccggtgccggaaacaactgggccaaaagtcattacact

SEQ ID NO: 212679 - DNA, 355 bp, Gossypium hirsutum
caacagctggaggctgttatagaagcagaaaagcaagctgctagagacttgattcgtgaaaagaggaaggatagagctttgttagctttgaagaagaagaaagctcaagaagaactattgaagcaagttgatacctggcttattaatgttgagcaacaattggcagatattgaactagcaagcaagcaaaaagcagtttttgatagtttgaaagcaggtaacaatgcaattaaggcaatacaaagtgagatcaacattgatgatgtgcagaagttaatggatgacaccgaagaggctaaggcttatcaagatgaaattaatgcgatctttggggagaagttatcagcagaagatg

SEQ ID NO: 212680 - DNA, 300 bp, Gossypium hirsutum
cccacgcgtccggaaaaaaaaaatgggaaggagtccttgttgttcgaaggaaggccttaacagaggagcttggactgctcttgaagacaaatttcttacagattatatcaaagtacacggtgaaggtcgttggagaaatctccccaaaagagctgggcttaagagatgtgggaaaagttgtaggcttcggtggttgaattatttgagacctgatattaaaagaggtaacatatctcctgacgaggaagagcttatcatcaaactccacaaactcttgggaaacagatggtctttgatagc

SEQ ID NO: 212681 - DNA, 296 bp, Gossypium hirsutum
gtcagaaaattacatttgagggacaagctgatgaggctccagatacaataactggagacattgtttttgtattggaacaaaagaaacaccccaaatttgataggagatttggggacgaactttatgttgaccacaaactcagtttgacagaggctctatgtgggtttcagtttgccctaactcaccttgatggcaggcagctcttaattaaatcaaaccctggcgaggtcgttaagcctggtcaatacaaggctatcaatgatgagggtatgccccaccatcagagacctttcatg

SEQ ID NO: 212682 - DNA, 318 bp, Gossypium hirsutum
cttgttcgatggtcgccgcctgcgaggtgagcaaactcctgacgagcttgagatggaggatggtgatgagatcgatgctatgcttcaccaaaccggtggtactgtgtgaagcgagtactactttgccacatttagtatttgatgagttagttatggtctgattatgtagatgtttccaatgtttttatatacgatcttattgccatgttatgaagacttgtggaccttgttttgagtcatcttgctcttatagaagagcttgagtttctagtgtttacaaagtgagatggaactcgggactttgttccgatatgcact

SEQ ID NO: 212683 - DNA, 331 bp, Gossypium hirsutum
cccacgcgtccggattgaagcaatacatcagtttcttcttaaaaagaaagtaggttgtattcgaattgatggtactacccccgcatcctcaaggcaagctttggttaatgattttcaagagaaagatgctatcaaggcagcagtgctttctatcaaagctggaggtgtcggattaactttaacagctgcaagtacggttatctttgcagagttgtcatggactccaggtgacctgattcaagcagaagatcgtgctcataggattggacaggtctcttctgtgaatatatactatctgctggcaaatgacacggttgatgacatcatatgg

SEQ ID NO: 212684 - DNA, 384 bp, Gossypium hirsutum
gttttaatggaactgctggtatatggagaatagcagccattaatgaggcaggtggatggaaagatagaaccaccgtggaggacatggaccttgcggtccgagctagtcttaggggatggaaatttctttaccttggtgaccttcaggtaaaaagtgaacttccaagtactttcaaggcctttcgtttccagcaacatagatggtcatgtggccctgcaaatttgttcagaaaaatggtgggggagatcatcacaaacaagaaagtgagattctggaagaaactatacgtaatttacagcttcttcttcgtcagaaaaatcattgctcacatggtcactttctttttttactgtgtggtcctccctttaaccattctagtccctg

SEQ ID NO: 212685 - DNA, 387 bp, Gossypium hirsutum
gatttaatgtaactgctggtttatggagaattttagccattaatgaggcatggggatggaaggagggaaccacggtggaggacatggaccttgcggtccgagctagtcttaggggatagaaatttctttaccttggcgaccttcaggtaaaaagtgaacttgcaagtactttcaaggcctttcgttaccagcaacatagatggtcatgtggccctgcacatttgttcagaaaaatggtggtggagatcatcacaaacaagatagtgagattttggaagaaactatacgttatttacagctgtttcttcgtcaaaaaaatcattagctaacatgggccacttttatttattttcctgtggagggcacttcttttaacccatttctaat

SEQ ID NO: 212686 - DNA, 343 bp, Gossypium hirsutum
ggtgtcttggctcttaaggctttgaagctatctgattcttttatggaactttaccgagctaatagctttactggagaaaagctgagggagaaaaacttgtcatggatggacattctcgaggaaattactatcaaagtctcaaattctgcccttatcagtgcctttatgactgagctggaatctgacacaccagttacacagtgtgattatgaccgtctgcaattgtcaagcaatccatatatggagaggaatatggaatttttgattgaatgcatggatgatttgtcagtggaacagcagaagttgcaattttactacatgagcctgtcacgtcaacaagccc

SEQ ID NO: 212687 - DNA, 280 bp, Gossypium hirsutum
agaaaatatcacaaatcttcttctccttctcagaaatcttagtatcatcactatggcctcaaatcccaaggtcttctttgacatgacgatcggtggtcagcccgctggtcggattgtgatggagcttttcgcagattgcactcctcgcactgcggagaacttccgtgccctctgtactggcgagaaaggcgtcggccgcagcggtaagcccctccactacaaaagctcttctttccatcgtgtgatccctaactttatgtgccaaggaggtgacttcacc

SEQ ID NO: 212688 - DNA, 281 bp, Gossypium hirsutum
agaaaatatcacaaatacttcttctccttgtcataaatcttagtatcatcactatggcctcaggtcccatggtcttatttgacatgacgatcggtggccagcccgctggtccgattgtgatggagcttttcgcagattgcactcctcgcactgaggagaactttcgtgccctgtgttctggcgagaaaggcgttggccgcagcggtaagcccctccactacaaatgctcttctttccatcgtgtgatcactaactttttgtgccaaggaggttacttcacc

SEQ ID NO: 212689 - DNA, 386 bp, Gossypium hirsutum
ttcaaattgttatctctgagggtgtcttaataaacgccttcgatttactttcggtttccatttacttctttatttctacgtttttgaatttttagtaagcgaaaatgagagagtgcatttcagttcacatcggtcaggctggtatccaagtcggaaatgcctgctgggagctttactgccttgaacatggaatccagcctgatggccagatgccaagtgacaagactgtcggaggaggtgatgatgcttttaacacctttttcagtgaaactggtgctggaaagcacgtccctcgtgctgtctttgtggatcttgagcctactgttattgatgaagtgaggactggtacttaccgtcagcttttccaccctgagcaactcatcagc

SEQ ID NO: 212690 - DNA, 352 bp, Gossypium hirsutum
gtgaaagaaggcaagcgtgctgtgaatgtgattctagctaaacacatctggcatgcgacgatttacggtgatggcaaaacaaagactttaatttccggcggccacaactttgctgatggaactcccacatttgctacagctactttcgctgtgtcaggaaaaggatccattgcatatggcctagggttcattaacacaactggtgcactaaagcaccacgcactgtctatgcggcctggttataatcgcttcgtattctacctctgtgcatttgatgcctaccaggacactctttattcccattccaatcgaccgttttaccgcgaatgtgacattttgggcacaattgact

SEQ ID NO: 212691 - DNA, 316 bp, Gossypium hirsutum
cccacgcgtccgatcatcaatggccaaggcgagaagaaggcatggaactctgtatgcgatggttgccgtcgacagtctgctagtttgaagttaatcaagttgaacgacgtgctcattagtggcattacctccgtcaactctaaagggttccatatgatgatcagcgtttgcagcaacttcgtgatcaccaacgttaatatatcggctccggatgaaagccccaacacggacggcattcacatgagcaaaacaaataaggtcagaataagcgacagtatcatcggcactggcgacgattgtgtctcaatgatccatg

SEQ ID NO: 212692 - DNA, 330 bp, Gossypium hirsutum
ggatttgaatgtggagttcagtaacgaagtggaagagccggtaccaaggaggagtgaggggaaccatgctggatacggtgaagaggataacatggaagggaacggattttttgagggtcttgatgagtttttaagtagcttgcctatactctcagctgttggggatgataaagttaaggctacttagtgaagtaagatccttgtttccttttttgcagcagttgtagttctaatcgtatgcttgtagtatttaactatgtggaggtactcggttgaatttgactggatactttgtagcatcctatgttattatttttatagttccgagct

SEQ ID NO: 212693 - DNA, 406 bp, Gossypium hirsutum
aaagatgaatgtctcaacttatctctccggccattacaagtttcagatgtggatgatttcatggtctgggccagtgatgaaaaagtgacacgtttttgtacttgggaaccttacaccaacaaagaagatggcttgaattacataaagaacactgttgtgcctcacccttggtttagagcaatatgtgttgacgatcgaccggttggtgctatttcggtgagtgcaaattcaggcaatgataaatgtaggggtgaacttgggtatgttttggcatccaagtattggggtaaagggattgtaacgagagctgtgaaaatggtggttgataccatatttgttgaatggccacatttggagagacttgaggctttggttgatgttgaaaatgtggggtctcaaagggtgc

SEQ ID NO: 212694 - DNA, 371 bp, Gossypium hirsutum
gtgggatcaacaagatttttgttttgactcagttcaactcggcttcccttaatcgtcaccttgctcgtacatattatggcaatggtatcaattttggagatggttttgtcgaggttctggcagcgactcaaacatcgggagaagcagggaagaaatggttccaaggaaccgctgatgctgtgagacaattcatttggttatttgaggatgcaaagaatagggatatcgagaatatacttatcttgtgcggtgatcatctttatcgaatggattatatggagtttctacagagtcacgtcgacaataatgctgatattacaatctcgtgtgtgccagtggacaacagccgtgcatcggattatggactggtg

SEQ ID NO: 212695 - DNA, 323 bp, Gossypium hirsutum
cccacgcgtccgatcatcaatggccaaggcgtttagaaggcatggaactctgtatgcgatggttgccgtcgacagtctgctagtgtgaagctaatcaagttgaacgacgtgctcattagtggcattacctccgtcaactctaaagggttccatatgatgatcagcgtttgcagcaacttcgtgatcaccaacgttaatatatcggctccggatgaaagccccaacacggacggcattcacatgagcaaaacaaataatgtcagaattagcgacagtttcatcggcactggcgacgattgtgttttaatgattcatggaaccac

SEQ ID NO: 212696 - DNA, 386 bp, Gossypium hirsutum
agcaaataaaactttgaattattcatacaaaacaatgaaaacccacttttttcccctggtttttctcctcatttttttcttagcccaaggtctgaaccccaaatgtgccatccaagaccatggctcaaacctgcaagtgttccatgtttacagtccatgctcacccttcaaaccctcaaaaccactctcatgggaagaggatgtgctgcaaacgctagccaaggaccaagccagggtgcagtttttgtccagcctggtggctaagaaatctgtggtgcctatagcttcaggcaggcagattgtgcaaagcccaacttacattgtgaaggccaatattggaaccccacctcagcccatgcttatggccatggatacaagcagtgatg

SEQ ID NO: 212697 - DNA, 313 bp, Gossypium hirsutum
cggacgcgtggggcagcagctcaagcatgatcaaaacattggagaggtaccaaaaatgcaactatggagctcctgagccaaatgtgtcatctagggaggctgctttggaattaagcagtcgacaggaatatttgaagcttaaagcacgttacgatgccttacaaaggtcccaaaggaatttactaggagaagatttgggacctttgagcagcaaggagctcgagtcacttgagaaacaacttgattcatcattgaagctaatcagatcaacacggacccaatacatgcttgatcagctcaatgatctccaaag

SEQ ID NO: 212698 - DNA, 396 bp, Gossypium hirsutum
gccaatcccgtcgcacaaagaacctctgtttctgcccttctctaacaacaaacatggcaaagcgattgattccttcatttaatcgcattttggttgagaaaataatccctccttctaaaaccaactctgggatcttgcttcctgagaagacccccaagttgaactctggaaaagtggtagcagttggaccaggagctcgagacagagatgggaagcatatcccagttaatctgaaggaaggagatacagttcttttgcctgaatatggtggcactgaagtcaagcttggtgaaaaagagtatcacctatacagagatgatgacatcttgggaacccttcatgactgaattttgcggctgtgggactggagaatgattctcattcaaatatgtctct

SEQ ID NO: 212699 - DNA, 410 bp, Gossypium hirsutum
ctttgcaattgcttttcttttgaagttgggacttctctcgaactggtttaagatctcatctcagtgaacaatggctagtctttacagaggggcatcaaggaaagacaagcagaagggaagacaccatggattaagccaacagaagaggcaagagattaaggaagcatttgaactgtttgacactgatggctcaggtaccatcgatgccaaagagctgaatgttgccatgagggctcttggtttcgaaatgacagaagagcaaatcaatcaaatgattgcggatgttgacaaggatggcagtggtgccattgactttgatgaatttgttcacatgatgactgccaagatcggggagagggacactaaagaagagcttatgaaagcattccaaatcattgatcaagataaca

SEQ ID NO: 212700 - DNA, 328 bp, Gossypium hirsutum
cggacgcgtgggcggagctgtgggaacgttcatgagtgtgtactacaaatccaagaaaggaaggaagaccgaaaaagaggtccaagaagcggaacaagcccaccttgaaactgcgtatgcagaggctgattagtaagcatgggggagtttggtagaagttatgtgaatctttgcattgtctttgttgtctctttaattcaatatttgctttcaacgatggtattatgtggggtcggaactgatgttatgggataggtataagcagtggttgttgtggaatgatttatggctttagtttagctattatggatagacttatgataacgag

SEQ ID NO: 212701 - DNA, 453 bp, Gossypium hirsutum
gaggaatcggacaatgacgaaaatggaggtggaggagaagaagaaccaggattttggaggggatttatttggcttgttggaatgactgctgccatctctttgctctctgaatatgttgtgcaaacgattgaggatgcttcagattcttggggaatatctgttagcttcatcagcattattttgctacctattgttggaaatgcagctgaacatgcaggagctatcatttttgcttttaaaaacaagctgaatatttctttaggtgtggcattaggatctgcaactcagacttccatgtttgtggtcccactttatgttattacggcttggattatgggtattaagatggatcttaatttcaatctcctcgaaactggctctcttgccctatcaatcatcgtcgtggccttcactttacatgacggcacttctcactacatggaaagactggtt

SEQ ID NO: 212702 - DNA, 390 bp, Gossypium hirsutum
caatgctcttgaagctaacggatggccgttaatgctgccagcctacagcatgtcaaaggtggtcctaaatgcttacacaagaattctagccagaaaatatccaaatatgtgcataaattgtgttcatcctggttatgttaacactgacttgaattggcacacgcgggtgatcacgacagaagagggggctagaggccccgttaaatgtgctctcatccccgacgtaggccctactggttgctattttgatcagaccgaagttgcagagttttgagatgcaccctcttttttgtttgattggaactattgctgaggttagagattatacattcgaatgcaatttgtgctttgctacattctatttatgttacctacactttacattttctg

SEQ ID NO: 212703 - DNA, 262 bp, Gossypium hirsutum
ctgatgttgattttgaagtgaaagtgggtgtctagaattgcccagttgatcattgagaagatgatgacacctgatgttttggaagttgatgatttggattctactagtagaggtgctgggggatttggatccactggcgtttaaatctctgggtttttttccctaatgttataatggattagcgttaggtttaggattaggggttgttttagaaggttaagtttgggggactactgcctactggtgaaacaaagctttgctt

SEQ ID NO: 212704 - DNA, 222 bp, Gossypium hirsutum
cccacgcgtccgatcatgcctaaggatatccatcttgctaggaggattagaggtgagagagcctaggtttgcttttaggtgattgatgtctgaggcctaagctttttttcattttgatgtattagatttctctgcaagtgtttgatgtaaatcgatgcgattctaaaggatgccatataatttcatgatttttgattaatgagaaaaaaataaaaaagataa

SEQ ID NO: 212705 - DNA, 304 bp, Gossypium hirsutum
gtataaatggactgtggaacaatttgaaggtttcaataacatgggcaatggtggcttgattgtcatgcaaaaaggttatggcggaagatacagcttatctatgcatcataatgaagaagagctaagagagtttgggttgacagatgaaatgttgattgaccaataatggcaaaagattgcgagaataggagaactgaattatgattgccctatggtgaattccttctttcctcactttgaagatgagggctgcataacatgaaacaaggtgctgaaaagtttaattaataaatcatgattctac

SEQ ID NO: 212706 - DNA, 345 bp, Gossypium hirsutum
ggcaccggctacagattctagtgacgactcattttgagatgactcagaggctgacgatgctgaaacgaaggctgagatattagcttgtgctaagaagatgctcaggataaagcaatgggatcaaatgcttgatgatgctcataataaatatatgtttgatgatgacggtttaccgaaatggttcttagaggaggaaacgaggcatagccaaccaattaagcccgttacaaaagatgagatagctagaatgcgtgcacaattcacagagatcaatgctcgagcagctaagaaagttgcagaggcataagcccgaaagaagcggattgcaatgaaaaagcttgaaaa

SEQ ID NO: 212707 - DNA, 448 bp, Gossypium hirsutum
  unsure (1)..(448): unsure at all n locations
gcttctaatctttattctgaatcaaacccattaaactatgccaattgctaccttatctgtcattctttaggctattgctgccaaaagtctctcctttctccctaaatcttcttttctctcaaaacccacaaaaacccagttttcttttgccttcaaaactaccgagaagaggcctttttncatatagtctcaatgagcatggaagcaggcattggagtaatgggcacaaagcttggaatgatgagtttctttgaaactgatggcacagttgttccagtgactgtagttggttttagagaaggaaatatagtgacccaagttaagacatcggctactgatggctatgatgctgttcaagttgggtatcggagagttagggataagaagttgacaaagcctgagttgggtcatttggggaaagctgcttgtattcctatgaggcatttgc

SEQ ID NO: 212708 - DNA, 444 bp, Gossypium hirsutum
aattttgcaacctctttcttttatttcctggtctttatttatttattggtgggtgcatgccagtcagttggttaaccattactgtatttttaagagggtagaaaggttcttgtttcctatttcaggtgttgctttctatctgctccctcttgacggacccaaacccagatgaccctctggttccggaaatcgctcacatgtacaagacagacagagctaagtatgagtcaactgctaggatctggacccagaaatatgcaatgggctagtctaataaattggtaagaaaaagtttaggatattgtttcctcattactcactgtgtataaagcaactgtgcatttgtggcgattgctcctgtagtatactaaatagacaaagtgaagactagatggaaagctggctgatgttgtatatggaactgctgtatgatcattagataat

SEQ ID NO: 212709 - DNA, 438 bp, Gossypium hirsutum
gaaaatgtatgtaccttgcgagttaggatgcctatttcatcggatttagccaatccccgaaacttcatcacaaaaatcactcggtatgataaagtggttaacattcctaactcgatgaccatcctcgatgagcttcttccgatttccatcgagatgggaaagaggaacttgactggaatttggaactttacaaacccgggagtggtcagtcacaatgagatattagaaatgtaccgtgactacattgaccctaacttcacctggaagaacttcaatctcgaggagcaggccaaagttatcgtagccccgagaagcaacaacgaactcgatgccaccaaattgaagacagaattccctgagctcctttcgattaaagagtctcttgttaagtatgtattcgaaccgaataagaagactggtggagcttgagcagttact

SEQ ID NO: 212710 - DNA, 450 bp, Gossypium hirsutum
  unsure (1)..(450): unsure at all n locations
ggccaatggaagaagatacaccaaagaatgatgaagaggaatttaacactggaccgctgtgcgttttgatgatgagtgttaaaaataacactcaggttcttatcaactgtcgcaacaacaaaaagcttctcggccgagtgagagcattcgatcgccactgcaacatggttctggaaaatgtcagggaaatgtggactgaggtaccgaagaccgggaaaggcaagaagaaggcactaccagttaacaaggacagattcatcagtaagatgttccttatgggagattctgntataattgttctaagaaatcccaagtaaatttggtgctcttatgttatgaaacttttgtagtgtttatgtattcaactatggaaatgctatttaaaccaccaacggcactgcattggatttgctcaaagaactgtatctatattgagtagtagtttgggtt

SEQ ID NO: 212711 - DNA, 115 bp, Gossypium hirsutum
cccacgcgtccggttggattagcagaaatggtgggtccggttgattttaataggactgtagagtattggcagcaagacaagtggactggttgcttccctgtgaagtggcacatcg

SEQ ID NO: 212712 - DNA, 392 bp, Gossypium hirsutum
gacccacgcgtccgcccacgcgtccgccctgttggagctatcattctggctttgtacacaatacggacatggtcgatgacagtattagagaacgtgaactcattggttggaagatcagcagctccagaatatcttcagaaactgacctatctgtgttggaaccaccataaggccataaagaacatcgatacggtccgagcttacaccttcgggtctcactactttgtcgaagttgatattgtacttccggcaaacatggcattacaagaagctcatgacattggagaatccttgcaagagaaactggagttactgcccgacattgagcgagcgtttgttcatttggattatgaattcagtcacaaacctgaacatgcacaggcacatgctct

SEQ ID NO: 212713 - DNA, 409 bp, Gossypium hirsutum
gttaatgcattcctcgtcatgatcacatactttcaacacactcaccctgcattaccacactacgactcatccgaatgggattggttacgtggagccctcgcgacggtcgaccgagattatgggatattaaacaaggttttccataacataactgatactcatatcgctcatcatttgttttcgacaatgccgcattaccacgcaatggaagcaacaaaggcaataaagccaatattgggcgagtattattcatttgatggtacaccagtttataaagcgatatttagagaggcaaaggagtgtatttacgttgaaccagacgaaggtgagcagagcagcaaaggtgtattttggtttagaaataagatctaattttgccgatagcgttgcggttgccgatgatgatgcg

SEQ ID NO: 212714 - DNA, 453 bp, Gossypium hirsutum
gggtactggaggatctgagacggaggttacttgggaggatcaacagaatattaacaagtttggaagattaaacaatcgatttcatgagcttgaagatgaaatcaaggttgccaaggaagcaattgataacctggaggatgctagtaatgagttgattttaactgacgaggaagtagtacggttccaaatcggagaagtctttgctcatgtccccaaggaggaagtggaaaccaggatagaagagatgaaggaattgaatagcaagaacttggaaaaactcgaggaggagaaagagtcggtagtggcacaaatggctgagttgaagaagattttgtatgggaagttcaaggactccatcaatcttgaagaggattaatccccttggtttgcttttctttaccttttaagttggattactacttgcttgtgattgatatcaaagctttggtcatc

SEQ ID NO: 212715 - DNA, 407 bp, Gossypium hirsutum
cccacgcgttcttccactctttcgctcgttttttcttacacttaaagaatttcaacatatgggtatgttatttgcgaaagatgccctcaaactcagctttatctgaagagcaaaccagtgcgtaacattttccatcgttcatcccaagtcaaaggaaaagcttcaaaagaatcaattgagctgactattgtagaatttaaatctgctctttccgaagttgatactcagttgaagaatctgtccgcgactgcacaagtttcaaatcaacaaggtgcttatttcgctaagttcttcaatcgaatggaagagtgtgaaattaatcctgaaggtcccactaggatcaatggaacacgtcgccattgttttcttccctttaagtacaagcacttggtacaattttgctcctt

SEQ ID NO: 212716 - DNA, 367 bp, Gossypium hirsutum
cgctcatcgaacttccgatttgctttttgaatcgcaagatagaagagaaatctcaatggcgcggaaagccgagaagaagcccgctgagaagaagcctgccgagaagccaacggaggagaaaaagtccaccgtcggcgagaaagccccagcggagaagaagccaaaggccggcaagaagcttcccaaggaaggtccaggggccggagatcagaagaagaagaaagccaagaagagtgttgagacctacaagatctacatcttcaaggtcctgaagcaagtccatccagatatcggtatctcaagcaaagctatgggaatcatgaacagtttcatcaacgacatcttcgagaagctggctcaagaatct

SEQ ID NO: 212717 - DNA, 445 bp, Gossypium hirsutum
  unsure (1)..(445): unsure at all n locations
ccaaagctgaacaatgtgcggtttcagcttgtcgtaaactcaacaagctccctctcttccctcaagttgcctcggtcgttgtcccaacagctgcttattgcagcgacaagtataacgagacagtggttagcagtgcagagaaagggtacaaggttgcctcctatttgcctttggttcctactgagaagatcgctaaggtgtttggtgaacagacgactgaaatggagccattggtatctgagagttgatctgctttgaatcttgtttacgttggctatgactcgtgaatataatctggacctgttttatgtttttacttgtgactgtctcttgtgatggatggaacaatgggttttagttttcatgtttggttttgttgtattttagttttattgaaataaatttggttttgatgggattgttaaaanaaaaaanaaaagggcgg

SEQ ID NO: 212718 - DNA, 387 bp, Gossypium hirsutum
cccacgcgtccgcccacgcgttcgcccacgctttcgcccacgcgttcgaccacgcgtccgcgcacgcgttcgctttcagtctccgtgagggtgttaccactgccgtctcacacggtctctggctcaacatcccggattatgatgctcccacacagcttgtcaagccactcgagaggaacaccacgtatgtcgacgctataatgacgattccgaagggaaccttgttccccatgtgcggaatgaatctggcatttaaccgagaattgatcggccctgcaatgtactttggactcatgggagatggtcaaccaattggacgatacgatgatatgtgggctggctggtgcaccaaggttatttgtgatcaccttggatggtgagtgaaga

SEQ ID NO: 212719 - DNA, 429 bp, Gossypium hirsutum
gaacgaagttacaaaagttttggatgttcttgtattgcagccaccttggtcttataacgaggttttgctgcaattaaaggagaaagcattgacgagagccgggttggtggaggatgatgtgattcgtctaattaacgagcgagctgaagtgaggagaaacaaagacttcttgaaaagtgatcagatgagagctcatttgcaagcaaagggcattgcactcatggatgtaggcacggaaacaatttggagaccttgtgttcctgttcaacaagactcggaaatagtgccatcagagggccagaaggtccctcccaagcctgaaagtgcataagaatgcagatcttgattcaagttcaccaaaagaaaaaacatattgaatttgcttcgtatggcggtttctattgttaaaacaacttagtgggatcaaga

SEQ ID NO: 212720 - DNA, 281 bp, Gossypium hirsutum
tcgacctattgcgtcaccatatctttttcagacttttacaagctccctctcttccgtgaagttagggtaatctttgtaccaacaactgcttattgcagcgacacgtataactagacagtggttagcagtgcatagaaagggtacaaggttgcctactatttgcctttggttcctactgaaaagatcgctaaggtgtttgttgaacagactactgaaatggatccattggtatctgacagttgatctgctttgaatcttgtttactttggcttataactgtg

SEQ ID NO: 212721 - DNA, 354 bp, Gossypium hirsutum
cccacgcgtccggctcgttgtgttgctacgcttctgcatgaaatgaagcgtcgtggcaaaggctgccgattcggagtggtttcgatgtgcataggcacaggaatgggggcggcagcggtcttcgaaaggggtgattgtgttgatgagctgtgcaatgcccgaaaagttgaaactcacaatctcttatctaaggatgcccgataggatacctagttttcttgttaaaaatatcctaaatcgagttggaaaatttaataaagcaatgtaataagtcaccgatcatgttaccccagaaaagagtagtattcagacgttctggctattatctttcataaaattatatctcagctatat

SEQ ID NO: 212722 - DNA, 444 bp, Gossypium hirsutum
gttgggtttggtggcaaagctgctccagctgtttctgctaaagctgaggctgcagatgatgaggacgacttggatctattcggtgatgagacagaggaggataagaaggctgcagaggagagggaagctgcaaagaagtcagctaagaagaaagaaagtggaaagtcctctgttctcatggatgttaaaccatgggatgatgagactgatatgaagaagttggaagaagctgttcgatccgttgagatgcctggacttttgtggggagcatcaaagctggttgctgttggttatggcatcaagaagctacagatcatgcttaccatagtggatgatcttgtttcagttgatacccttatagaggagtgcctcacgacagagccacgcaatgaatacattcaaagctgtgacattgttgcattcaacaagatttagaggacacag

SEQ ID NO: 212723 - DNA, 427 bp, Gossypium hirsutum
cccacgcgtccggtccctagctatattgaagggaagaatgggagcaataagaggagtgaagggcacatcggatggtcggttcctggccatagctgagcctgcagatttcgttcacatctttgatacgaagttggggtatgttaattgccaagaaattgatattttcggtgaaatagctggagtatcgtttagcccggatacagaaacgctctttgttggggttgctgatcgcacttacggcagcttgttagcgtataaccgcagacgatataaccaatatctggactccatgttgtagaatgcagtgcctctgataatttatatgagaggtaaggtaagctagtgtgaatattttaaggggttgtatcagaattgccttggataattgtgtttcagtgtataacttcctggggaggaacagcagcag

SEQ ID NO: 212724 - DNA, 451 bp, Gossypium hirsutum
cccacgcgtccgcaaaagctgagaagaagccttctgagaagaagccagctgaggagaagaagagggtagctgagaaagcccccgccgagaataagccaaaggcaggcaaaaagcttcccaaggaaggcggagctgcggccggagacaagaagaagaagagggccaagaagagtactgagacctacaagatctacatcttcaaggtcttgaagcaagttcaccctgatatcggtatctcaagcaaagctatgggaatcatgaacagcttcatcaatgatatctttgaaaagcttgcccaagaagcgtctaggctcgcaaggtacaacaagaagcctaccatcacttccagggaaatccagaccgctgttaggcttgtacttcccggtgagcttgcgaaacacgccgtttctgaagggaccaaggccgtcaccaagtttacttcttcttgaaa

SEQ ID NO: 212725 - DNA, 426 bp, Gossypium hirsutum
cccacgcgtccgaaatcatggtaagtctcaaatcacttgtatctctcagttcccgatccgctggcgtagcactacttgttttggtggtttcagtggcagtgcagacccatactacaaatgcacaaagctgcccgaccgagctgacgagcctgaacgtgtgcgcacctttcgtggtgcccggtgcagctgtggctaaccctagcattgactgctgtaacgcactccaatcggtgcaccatgattgcctttgcagcactctaaggatcgcttctcgactcccttctcaatgcaatctcccaccactcacttgtgcttgaaagaaaagcagtggtgctgcatgcttaattgggtaggaaaatctaataacgccatggaatatggataccgccctgtttttttctttcttttttaatgggaaaaagcaat

SEQ ID NO: 212726 - DNA, 447 bp, Gossypium hirsutum
gaagaagcaatccgatgttatgaggttcttgctgagagtgaggtgttgggagtaccgtcaacgacccttccattgtgcgagttaaccacccaactcgtcctgacaaggctcgtcgcttgggatacaaagccaagcagggttatgttgtctatcgtgtccgtgtgagacgaggtggaaggaagagaccagtacctaagggtattgtgtatgggaaacccacaaaccagggtgtcactcagctgaaatttcagcgcagcaagcgatcagttgcagaggaacgagctggtcgaaagcttggaggccttagggttgtaaactcatattggatcaacgaggattcaacatacaaatacttcgaggtcatcttggttgatactgcccacaatgctatccgcaatgacccacgaatcaactggatctgtaatccagtgcacaagcacagggaac

SEQ ID NO: 212727 - DNA, 449 bp, Gossypium hirsutum
ttttatttttttttctctcaaagaagcaagcttaaattttagggagcacaactccccccggggaagtttcgctgttcagtgacaatggcgattgtgaagatggtgatggctgtggttatcatggcagcgtccctcggagggaaattgggtgcagcacaagtgcaccatgtggtcggaggtgaccgtgggtgggacgtttcctctgacgtggcatcttggtcctccggtaggagcttcagggttggagacaaaatttggtttgcctacgccgcagcacaggagagcattgctgaggtgaatagcccggaagaatatgagtcgtgcgatgtgagcaaccccataagaatgtacacggacggcatagatggcatcccactggatggggaagggatccgttatttcgtaagcggcaaggaagagagctgcaagaacggtctaaagctacacgt

SEQ ID NO: 212728 - DNA, 269 bp, Gossypium hirsutum
gttctcttcttttctctagtcagtgcttgcttttcttgcccttcccccaacccaaaaccaagggctactggttccccatccccctcaggcaaatgcccccaagatacccttaagttaggcgtctgtgctgaggtgcttggcttagtcaatgtaactgttggttcgcccccagtgcaaccatgctgctcccttcttcaaggccttgctgatcttgaagctgttgtttgcctttgcacagcactcaaagctaacgttttgggcatcaacct

SEQ ID NO: 212729 - DNA, 431 bp, Gossypium hirsutum
  unsure (1)..(431): unsure at all n locations
accaactttcccttaacatcttttggggccctttcctcatttgtggcattgcttgcgggctgactcttaccatattctgctggggagtctttacacagtaccgcagattcagccccgaagatgaggaaagtgagattgagacgatcgaaccgtcgaggtcaagtcgactgtccatccgctcaacaagcttcaagcagattattgactttgtagataagaaagaagaagagattaaggagatgttgaagagaaagaacagtaatagtaataaacaacagactagcatccatagtttctcagatggtcaagcaagttcaccttcctaagagagacaaaaatccaaacacatttttgtatggatcatttggaacctcaaatatttcctttttatccgnttatattatagaatctgaattaatacaaaaatcata

SEQ ID NO: 212730 - DNA, 451 bp, Gossypium hirsutum
cccacgcgtccgcccacgcgtccgataggatttcgttttaggaggaaatatttgttactgtggcctgttatcatcttttccctacttgtttttctttcacaagttgcatatcttgttagatgggctgttggaggctataaacaaagtgtaggagatgcttggtggctcaagctaattggttttatgataatccagtcttagagatctcccactgtgatctattttttggttacacaacttctagtgctagtagttgcattgcttgatatacatgggaatagattcggtcttgttccgtagcggtatacttgttggggtcatttcttaacagttgttgaacaattaggtttaaaatacgcatggtcgagaaagtgatgatgatgacaacgacgatgatgatggtgatgatgacggtgaatcaaacaattcaagtggttttgaaatggaatta

SEQ ID NO: 212731 - DNA, 445 bp, Gossypium hirsutum
cccacgcgtccgcgcctttctctttagtttacgaaatggaagcagttttgccaatcgaagtggagatccgatcccttcaagtgttgtcagagttaaagttggacgaagaagaatagatcaagtctcgatacgaccaatttaacttgattgaggaaaagaggctaagagctatccgtcatggtcagatgtaccaaaaacgaatgatgcggtcttatgacaaaaatgttcgccctagagaattccacgagggagacctggttttgaaaaagattcttcccatacagaaagattttcgaggaaaatggatgcctaattgagaggggccttacgtggtgaagaaagctttttccggaggagcattaattctagccgaaatagatggtaaaaacctgccctatcccgtaaattcggataccgtcaggaagtattttacctaaaaaaggaa

SEQ ID NO: 212732 - DNA, 323 bp, Gossypium hirsutum
gcttttcatctccagcattcgttttaaagatcttgggtagcaacccaaagcgataataagggaaccactgataaaagatacccagagagacttgtcatatttttacttatatcaacccttcttcttctttaatctctctattttttttctgggttttttaattcaagggtcgaaatttggaagaaaaaaaaagggatatcagcatggggaggggtagggttcagttgaagagaattgaaaacaagatcaacaggcaagtcactttctcaaagagaaggtctggcttattgaagaaagcccatgaaatctctgtgctttgtgat

SEQ ID NO: 212733 - DNA, 461 bp, Gossypium hirsutum
cggacgcgtgggtaagaatcgccctttagtgatcagtgaggtgaagaaaaatgtcttgctgtggtggaaactgcggttgcggctccggttgcaagtgcggcagcggctgcggcggttgcaagatgtaccctgagatgaactttgctgagcaaaccacaaccgggacacttgttcttggcgtggcaccccggaaagtgcactttgatggagctgaaatggaaactggggctgaaaatggctgcaaatgtggagataactgcacttgcaacccttgcaattgtaaatgagaaaaaaaagctaagcatattatggaagctgatctaaataatatatgatgtatttgggtttttactattagaataaagcagctatggttcattaggtgttgtgcttcttgtatccatgggtgcttggtttgtgtatgtacgagtgtatatagtgaaatgaaaataatttaacta

SEQ ID NO: 212734 - DNA, 347 bp, Gossypium hirsutum
  unsure (1)..(347): unsure at all n locations
attatcatctcccatggaatcccagaatctcaaacaccgttccagggatgaccctcgttttggcaccaccacctccaacgaaaagaacagagcaaacaggcgagaaaaaagaatggcaatggccaaacgtgggctaagatcactagtcatagcagtttcattccctttgtctctcaccttgttaaacatatacttgtttggttcaggtcgtggttacgcctctttagccaaacctttctggttccctcctttgtggcttttacatacgggttgcttggcttcgagcttcttgatggggctgtcagcttggttngtatgggttgaaggtgggtccacgttaaaccgac

SEQ ID NO: 212735 - DNA, 452 bp, Gossypium hirsutum
gcttcaagtgccaaaatctagggatttgcggttggagaagacgagagcccatctctctgcggcaaagctcctgtccaggtagaattctcttcttcccttgcgttgtgttctttcctgttcaatcgccatggcttcaaagcggattttgaaagaactcaaggatttgcagaaagatccacccacttcttgcagtgctggtccagtagctgaagacatgtttcattggcaagcaacaatcatgggaccctcagatagcccttatgctggaggtgtgtttttagttactatccatttccctccagattatcctttcaagcctcctaaggttgcatttaggaccaaggtcttccatcccaacatcaacagcaatggaagcatttgtcttgatatcctcaaagaacaatggaaccctgcactaaccatttccaaggttctgctctcaatctgctcac

SEQ ID NO: 212736 - DNA, 474 bp, Gossypium hirsutum
cagcaaaatccaaagtgcacttggttacatggctcctgaattcgcttgtaagacggtaaaaagaactgagaaatccgacgtgtatggctttggggttttggtcttagaagtgattacagggaagaagccagtggaatacatggaggatgatgtggtggtgctgtgtgaaatggtaagggaagcactcgaggatggtaaggtggaagaatgtgtcgacgggaggcttcgtagtaactttccgacataagaggtaattccagttataaagcttggtctaatatgtgcatctcaagtgccgtcaaatagaccagacatggaagaagtagtgaacatattagagctaatccaatgcccttcggaaggccaggaagaggtggagtaaagtattcgggtccgagaaaagaacgaaacagagcggtgtttcacggtgaagatgaattcagtttggtcaacagaggaagaaaagaaaagagt

SEQ ID NO: 212737 - DNA, 383 bp, Gossypium hirsutum
cccacgcgtccgcaacagaccatgtcaatgattcaggaaagggctagtctacggatcatctgtatacaacccgtttttgccggggctgctagaaaaacttctcatgccgttggccaagccacaaagacgatcatgaatatcatatatcgaggagaatccgagtcagagaatggcgatgatagtgtcattgatcgagttgaaatctaaggactacattgcttctcaacactgatggtctgtgtacataaagaactaagacttgggaccgagcttgtttaattttccaacagcatataatatgtcggaaaaatatacactaatataagttcaatatgttgcatataattaatgaatatattgtggtttgaaattaaaaaataaag

SEQ ID NO: 212738 - DNA, 461 bp, Gossypium hirsutum
gaaatgtttgaaaaagacacggtaacttggcttcatcgggttgagagctatgggaatctctggagtccaaagattgaggatgacacttcgagaaatttgatggacatgaaagcaaactggggatcatttgcagctgctcttaaaagcaagaatgtttgggtgatgaatgttgtcccggaggatggaccaaacacacttaaggtgatatatgacagaggtctgattggcactactcataactggtgtgaagccttttccacataccctcgaacctatgatttacttcatgcttggactgtcttttctgatatcaagaagaaaggctgcagtgccgaggatttgttactcgagatggatcgtattctccgtccaagtggattcgttatcatccgggacaaacaaccagtgatagatttcgtaaagaaatatttatcagctttgcactgggaagcggtagcaac

SEQ ID NO: 212739 - DNA, 415 bp, Gossypium hirsutum
  unsure (1)..(415): unsure at all n locations
cccacgcgtccgcccactcgtccgccgactcttctcaggtgttggaggagcttgaggaatgcaggaaggcataccccaatgcattcattagaatcattggcttcgacaacgtgcgtcaagtgcagtgcattagtttcattgcctacaagcctccaggcttctaagctttttattaactttgtctctccatttgtttgaatttgtactcagaaaaaatcatgttctttacttttgcttttccttttctttgagttattggcctttgtttctcgatttccgggttttaatcctgagaactaatgaataaaaagttggttttcttcccaaaaaaaaaaattttttaaaaaattaattatatataaaatatcatttaaatttattanttatattttttttattcttaatattaaattaa

SEQ ID NO: 212740 - DNA, 466 bp, Gossypium hirsutum
cccacgcgtccgcccacgcgtccggacccacgcgtccgattcttgacaagaaaataggtcttggacaaccaaaacgaatagagaacgcaaagattttggtggcaaatactgcaatggatacagataaagtgaagatatatggtgcacgtgttcgcgttgactcgatgtctaaggttgctgagattgaagggggtgaaaaggaaaagatgagagagaaagtgaaaaagatcttaggacatgggattaactgctttgttaacaggcagttgatttacaatttccccgaagaactctttgcagatgcaggcatacttgctattgagcatgctgattttgatgggatagaacgtctggctttggtaacaggtggtgaaattgcttcaacctttgacaacccagagtctgttaagcttggacattgcaagcttattgaagaaattatgattggtgaggacaagttgatcca

SEQ ID NO: 212741 - DNA, 453 bp, Gossypium hirsutum
cccacgcgtccgcccatttggctctgcccgttccgactgttcaagcttcctggcaagacaggggtgtatcctgaaccaggctttgagcagcagcacagacaaggcgacacaccatacgctcagatgttcaccgatgttggggtgtattatgctccaggccctgtattgaggggtgaagtatttgatggtgctgaggcagttcgtaaaatggagcaatggctgatcaaaaaccatagttttcagccacagtatgcagtgtcggagctgaacgagaaggatttctggaggatgttcgatgctgacctgtatgagcatgtgcgtaggaagtacggagctgtgggaacattcatgagtgtgtactacaaattcaagataggaaggaagaccgaaaaagaggtccaagaagcggaacaagcccaccttgaaactgcctatgccaaggctgattattga

SEQ ID NO: 212742 - DNA, 188 bp, Gossypium hirsutum
atataaattttatacatccttattaccctacgactccatatataagcaagtaaaaataaatatggctcgctctgcttcttcctttaagttccttggtgcttacgatactgatgctcattatgtctacatatcaaggagaggttactcaggtgcaccgtcggcagcagtgacggctagctttgagaggc

SEQ ID NO: 212743 - DNA, 422 bp, Gossypium hirsutum
tttggcaattggtttacaaaacccagttccttcctgaccaggacgagatttatcgggtgttcattttgcaatggaatgcctacacgcaaatactaaaagcttgcttgatagtgatctccaagatggtaactacatatcagctaagggcaagaaagtagtagtcatcggtggaggtgacactggtacagattgcattgggacatctatccggcatggatgtagcagcattgtaaatcttgagttgcttcctcagccaccgcagacaagagctcctggcaatccttggccacagtggcctcgcatattccgtgtagactatgggcaccaagaagctgctaccaaatttggaaaagacccaagatcctatgaggttttgactaagaaggttataggagatgataatggaactgtgaaaggacttg

SEQ ID NO: 212744 - DNA, 296 bp, Gossypium hirsutum
cccacgcgtccgtccacgcgttcgcccacgctttcgcccacgcgtccggaactttcaatactgctgaagaagctgcgagagcttatgatgctgaggcgcggagaattcgtggtaagaaagcgaaggtgaacttccctaacgagactccgcgtacctctccaaagtgtgcggtcaagacaaattctcagaaaccactttccaagtcgaatttgagccctgttcagctaaatctcaaccagaattacaattacttgagccagcctgagcaggaatacttcgataccatgggtttcgta

SEQ ID NO: 212745 - DNA, 439 bp, Gossypium hirsutum
cccacgcgtccgtgctaatggaccgttcaatcatagaggagctgtgcccatcaatagatcttgcgttggttaaacgcattctctgcaacttcactccagatgaattttgtccagatcctgttccaggagctgtattggaagccttgaatgctgagactattgttgagcggaggttatcaggggacccatccagaagtttcccttatacagctgccctcgttgtctatactcctccatcctcagcagatgtggctgaaaaagttgcggaggcaggagggaagtcgccactgtctatgaatgcgtcagtggtacagaggaaagggtataccagtgacgaggaactggaggaattgaattctccactttcatcaataattgagaaatttccattgtcaccaacaattgttaccaatggaggagtgaatgggaaccatgaaca

SEQ ID NO: 212746 - DNA, 325 bp, Gossypium hirsutum
attgtagacaaaatgtctgttcgtagctctcctaaaccacccattgattcaaggcgtgttccagagacaatgagatcagctgcaattgggcttccacgatatcgcgttttcagcttggaagaaattgaagatgcaaccaacaactttaacccatcaaattttatgggggaaggatctcaagggcagctctataaaggttggcttgtagatgggtcagtggtggtggtaaaatgtttgaaactacagcagaagcatgcacctcaaaatctgatgcaacacatggaagttttgttcaagctaaagcatcgtcatttgggtagcgttc

SEQ ID NO: 212747 - DNA, 469 bp, Gossypium hirsutum
  unsure (1)..(469): unsure at all n locations
cgcagatggttcagttcaaaatatttctgaaatacctcatgaactgaaagcaatttaccggactgtttgggaaattaagcaaaaaacattagttgatatggctgttgatcgaggatgctacatagaccagagccaaagcttaaatatacatatggaccaaccaaatttcggaaaacttacatccttacacttctatgcctggtccaagggtctgaagacaggaatgtattatttaagatctcgtgcagcagctgatgcaattaaattcaccgttgatacatcgatgttgaaggaaaagcctaaagtagaagatgatgaaacaagaatggcacaaatggtttgttcccttacaaatcgtgaagagtgcatgtcttgtgggagctaaagatcggttcctttttgaagctttgagagcatgcaatcagggaatttggtgtcnacgaatggcgactctatatgtgggttttaa

SEQ ID NO: 212748 - DNA, 381 bp, Gossypium hirsutum
ccccgatctatgttggcaggctattgggggatgggcttgttacaactgaaggagaaaaatgggcgaagaagaggaagttggccaactatgctttccatggggagagtttaaagaacatgactccagcagtaattgccagcgttgaaacaatgctagacaagtggaaagacaaagaaggaaaagagatcgaagcattccaagaatttagaatcttgacttcagaagtcatatcaagaacagcttttggtagcagttacttcgaaggagagaagattttttacatgttgcagaagctcgcagatattgtgagccgcaattcaaacaagtctaggattccaatcctcagcacgttttggaaaactgacgatgacattgagtcag

SEQ ID NO: 212749 - DNA, 449 bp, Gossypium hirsutum
ggacaactcactcagtcttgctcacacgcttgttcagattgtttgtcaagatcataaaggtgggtgatacgacataacgcgaactctaaaggattacaacattcagatttcatatggacgcttctatataaaacaaggaagaaagtgtgagattgacttgtttataatgcaatccgatgggaagaagatagttgatcctagcaagcaaactgcattgtcgtcgcgtctgaaaatggaactgctccaaccactaagagtaactgtagtgagccggggtcctgacactgagcttctagttgcaaatcccgtagagttatcaagcaagggccggcctcttgttttttatgacattacccttgctctaaagatgcttaatacttgcatcttctcggcagagattgggagacacatgatcggagatcgagagtgggaagtttacaggattctac

SEQ ID NO: 212750 - DNA, 292 bp, Gossypium hirsutum
tcgacgcacgcgtccgaagaatattaccacaggcacactagatgtttttattgtgaggggaagcttatacttccattgtgagatcaatggtggtttaggtgtcttttgggctgcctgatgccacccaaggtttccttgctcaaggctactcaaggtgaatctataataaactattaccatgagatgcatgtcattcaagacatgcttgttcctctttacacggttggagatagcccttgagtgggtccaccatgagatggagatctatcccattttgctctacccgcaccta

SEQ ID NO: 212751 - DNA, 419 bp, Gossypium hirsutum
  unsure (1)..(419): unsure at all n locations
ctttgtgcaaaaccagaaagtaaaaagaacagttcttggatatcctaagctaatgtcggacgaggagcaccatttcgagtccaaggccgacgccggcgcctccaaaacctatcctcagcaggccggtactatccgtaaaaacggctacatcgtcatcaaaggccgtccttgcaaggttgtcgaagtttccacttccaagactgngaagcacggacatgctaagtgtcactttgttgggatcgacatcttcactgctaagaagctggaagatatcggtccttcttcccacaattgtgatgtgccgcacgtcaaccgtactgattaccaattgatcgacatttctgaaggatggatttgtgagcttgctgactgagagcggagacactaaagatgatctgaggcttccaactgatgaaaac

SEQ ID NO: 212752 - DNA, 273 bp, Gossypium hirsutum
  unsure (1)..(273): unsure at all n locations
gtaagaatcatcactttgaacaggcctcgacatttgaatgtcatctcatccaaagtggtctccgggctagctaaatacttagaaaaatgggaaagagatgagcaagctcagcttatactgatcaagggagccgggcgtgcattttctgctggtggagatttaaaaatgttctatgagggaaggaaatcaaaggattcctgccttgaagtggtctatagaatgtatgggctntgctatcacattcatacctataaaaaaactcaagttgctctt

SEQ ID NO: 212753 - DNA, 478 bp, Gossypium hirsutum
ggatttgaccccaggacagaaacattgaattgctattgctcgagtggtgctgaagagtgctcccatcttattattggatgaagctagctcgtccatcgaatctgagtcaagccgagtggtgcaggaggcacttgacacattgataatgggaaacaaaacaaccattttgatagcccgtagagctgcaatgatgaagcatgttgacaacattgtagtacttaacggtggtcgaattgttgaggaagggacacatgattctttgttagcaaaaaatggcttgtatgttcgtttaacgcaacctcatttcgggaaaggtttgcgtcagcatcggctggtttaggttgactttgcaattgattgtgacttgcatcagttcttctgtatattactcatttcactcatttgaattgctggaactatgaccattctgtgagcttcacttctctcggttgaaaagaatcccaaatcagaaggggaa

SEQ ID NO: 212754 - DNA, 421 bp, Gossypium hirsutum
cccacgcgtccgttggagtggaaaggtcgattgtttatggtcacctagaagtattggagcaggtgttaaagggaattgctatgatgaaagagttaacattacgaacaaaagactatttagtttcgtttggagagtgcatgtctacaaggatttttgcagcatatttgaataaaattggtgttaaggcccgtcaatatgacgcctttgaaattggtttcattaccactgatgacttcacaaatgctgatattttggaagcaacttacccagctgttgcaaaaagattaaatgatgattggatcagtgatcctgcaatcccaattgtcactggattccttggaaaggggtggagatcttctgcaattaccactttaggaaggggtggtagtgatttgacagccacaaccatcggaaaagcatt

SEQ ID NO: 212755 - DNA, 427 bp, Gossypium hirsutum
  unsure (1)..(427): unsure at all n locations
gggaaaagtgaacaagccagtggttgcttgggtcagtggaacttgtgcacgactcttcaagtcagaagtacagtttggtcatgctggagctaagagtggtggtgagatggagtctgcccaggcaaagaatcaggcactaagggatgctggagctgtagttcccacttcatatgaagcttttgaagctgtgatcaaggaaacatttgacaaactggttgaacaagggaagattacacccgtgaaggaagttatgcctncacaaatcccagaagatcttaacaatgcaattaagagcgggaaagttcgtgctccaactcacattatttcaaccatctctgatgacaggggtgaggaaccgtgctatgctggtgtgcccatgtctttcattgtcgagcgaggttatggtgttggtgatgtcatttctctc

SEQ ID NO: 212756 - DNA, 433 bp, Gossypium hirsutum
cgcagtgtggagtgtacagggagcgtccaagccatgatttccgcttttgaatgcgtccatgaggggtggggtgtttgtgtgctggtgggtgtgccaaagaaagacgatgcattcaaaactcatccaatgaatctactaagtgagaggacccttaagggtgctttttatggcaactataaaccacgcactgatattcccatggttgtcgacaaatatttgaacaaggagctggggctggatatggacaagttcatcacacactctgtgccttttgccgatattaacaaggcattcgactacatgctccagggtataggtctgagatgcatgattcatttggatgcttaaggaaatgttgctgctgtatatttgcccatccaaggatcaaaactctaatgttttgtcctactatgtgttatattatgtgcctact

SEQ ID NO: 212757 - DNA, 236 bp, Gossypium hirsutum
gcttcctccgtcttcatagaaattttagatttaacggtcttgaccccaaactagttttggctaatgggacagttagtgtggaaacaggatatcaatgttagcttagctgaaaaaaagcctagagttgtttttgttttgggtggccctggcaatgggaaaggtacccaatgcgcaaatatagtcgaacactttcattacacccatctcagtgctgaagatctttttccagcagaaat

SEQ ID NO: 212758 - DNA, 473 bp, Gossypium hirsutum
  unsure (1)..(473): unsure at all n locations
cgccttcgcggcgggatgcaaattttcgtgaagtccctgactggaaagaccatcaccctggaaggtgagagctcagacacgattgataatgttaaggccaagatccaggataaggaaggaatcccaccagaccagcagaggctgatttttgctgggaagcaacttgaagatgggaggacccttgcagattacaacatccagaaggaatccactttgcacctggtccttcgcctncgcggtggcttttaagtgtggtgccgaacacctgtccagttattggtgatgtgttaagtttgtatgtgtgtgggtcggatgctaatgtgagctggccactaagcttgggaagcttacgaagtaaaataattgcctttatcaacgcttttagttggtctttaagtttcaaggttctatggcattgaataaatatgttnttgcattttgcaatcaagtttctctcttggtcgaatttacat

SEQ ID NO: 212759 - DNA, 400 bp, Gossypium hirsutum
gggaaaaccaatcagctgatgtgttacacgggttgttttccaaaaggaaccttatcggtaggctgatacttcggtcactgtatgtgatattctgcgggtttatggcagcaatgctccctttctttggtgacattagtggggtcgctggtgccatcggcttcatcccgttagatttcatcctgcctatgcttctatataacatgacttataagccttcaaggtcaaccctcacctactggatcaatttgtccatcattatcgtcttcacaggtgtgggaatcatgggttcattttcatctattaggaaattggttcttgatgccaacaagttcaagccttttagcagtgatgtggttgactaaccagtgatcatatcgcttaaaagctcaggaaattctgc

SEQ ID NO: 212760 - DNA, 480 bp, Gossypium hirsutum
ctctactccagaagagctccgagcttttacctttgctcggccccgtacatttaggggggaagaggctgaagtagaggaagaagaagaactagaagagtctgaagaggaaatagaagaagagcctgagaaacgaaaagggacccaagggcttattgagattgagaatccaaatttggctaaacaaaagaatgtcaaagccaaagatgttgatatggggaaaacaactgaactatcaaggcgtgaaagagaggagatagaaaagcaaaaagcacatgaacgatatatgaagctccaggagcaagggaaaactgagcaatcaagaaaagatttagagcgcttagccatgattaggcaacaaagggcagaggctgctaagaagagagaagaggagaaggctgcaaaagaacagaagaaagttgaagctcgcaaataaaaataggtcgaggaactgatatgatcggttaaccatttggttctttt

SEQ ID NO: 212761 - DNA, 464 bp, Gossypium hirsutum
gcaaaaaatgttgacatcccaggggttgagttttcaaagagtgcagttgtgttaccacttgtctggaacatacaagtcagcacctggcttcgtcactatgtttatgagagacttattacaaaggggaagaaacctggttttttccagttgctggctacacagactgtcagtgctgtttggcatggattatatcctgggtacatgcttttctttgttcagtcagctttgatgattgctggttcaagagttatttatcgatgggagcaagcttcaaatgtaggtcttgtgaagaaaacacttgtcttcatcaacttcgcttacacactgttgattctcaactactacgctgtcggatttctggtattaagcttgcatgagtcacttgcgttgtatggtagtgtgtattatgttggaaccattcttccaataacattgattctccttggctatataatacctgcaaa

SEQ ID NO: 212762 - DNA, 468 bp, Gossypium hirsutum
cccacgcgtccgatcggagcagggattataccaatccataccttcctgtcaatccaacgtgcgatggagggactcatgcagcctgtagttggtcctgatggaaaaaagcaagaacctcagagtaatgtgctacttgcttcaattgaaaatatgcagtatgctgtgacagttgatgttcttcactcggtattctctgcatttggcactgtccaaaagattgctatatttgagaagaatggcggaacacaggcactaattcaatatccggatgtcacgactgcagctgtcgccaaagaatccttagagggacactgcatatatgagggtggctattgcttacagtgataaaagtagagattacacaatcttagacctaagcttgcttgcgacacaaggtccaagtatgccttgcactccaaatgcttggcagaatcctcagaatgctccattataccctgggactgacta

SEQ ID NO: 212763 - DNA, 399 bp, Gossypium hirsutum
accttgcaaaatatccaaaaacacttcatggacatggaattcctaaccgagctaaacgaactagggataaccgatcaccaaagacttaccggcggaagaatgggccgaagaaaactcgaagacgacgacgacaacaacaacagcaaggaattcaaatccaaaaaccttcaagccgagagacgtaggagacagaaacttagtgacaggctccttacactgcgctcacttgtcccaatcattacaaatatgaacaaagcaacgataatcgatgatgcaatcacttacattcaagaattacaaaagacatcacaagttctcagtgaacaactgctcgaaatggaaaggtcggctgaagaaagtgtaatgccgatgaaacttggaatcgatgttggacaacat

SEQ ID NO: 212764 - DNA, 481 bp, Gossypium hirsutum
gcggaagatcaagtctttaggggtttagatggttatatctggtgaaggctctgatgagatttttggtgggtatttgtacttccacaaggcaccaaataaggatgaattacaccactaaacctgccgaaagatcaaggcccttcaccagtatgattgtttgagagctaacaaagcaacatctgcatggagattggaggctcgagtcccattcttagacaagcaattcatcaatgatgccatgtatatagaccctgaatcaaagatgataaaacgggatgaaggacgcattgagaagcggattcttaggagggccttcgatgatgaagagcatccctatctgccaaagcatatcctttacagacagaaagaacagtttagtgatggtgtgggttatagttggatagatggtctcaaagcacatgctgaccaacatgtaaccaataagatgatgcgtaacgcatctaacatcttccctcacaac

SEQ ID NO: 212765 - DNA, 401 bp, Gossypium hirsutum
cccacgcgtccgtccacgcgttcgcccacgctttcttccacgcgtccgcctgcgtctctctcgtcatctctctgaaccaaaaagtctttagcttttcgcttcgagagagaccatgttggtttaccaggatctcatctccggtgacgagcttctttctgactcattcccctacaaggaaatcgagaatgggatgctgtgggaagttgagggaaagtgggttgtgcaaggagctgtcgatgttgacattggtgccaatccttcagccgaaggtgctgatgaggatgaaggtgttgatgaccaagctgtgaacgttgttgacattgttgacactttcaggcttcaggagcaaccccctttcgacatgaagcagtttgtcgtgttcatcaagaagttcatcaaga

SEQ ID NO: 212766 - DNA, 454 bp, Gossypium hirsutum
agaaaagcagagccgcatcactttttgctagctatgctactgtgggagttattgttcttcaggacgagcttctgcagtagctaataataacgttatatattatataaattttatacatcctttttaccctacgactccatatataagcaagtaaaaataaatatggctcgctctgtttcttcctttaagttccttggtgcttctgtttttgatgctctttatgtctccatatcaaggagaggttactcaggtgcaccgccggcggcagtgacggctagctttggtaggcctggagcgatggggaaagtggaacgaagatatgcgatgaaagagtcgtcgtcgtcggagacaagggcttattcttcagcttgggcgcctgaccctgttacggggtattaccggccggagaacttgggggctgagatcgatgcggcggatcttcgggagatgatgt

SEQ ID NO: 212767 - DNA, 411 bp, Gossypium hirsutum
ctgccattgtatatacgagtggaaccactagttacccaaaaggcattatgctttcacataagggcgtattgcaccagatagaaaatttgggggttcttggacctgctaaagcgggggatagatttctaagtatgcttcctacttggcacacatatgagcgggcttgttagtatttcgtatgtacgcatggaattgagcaagtatatacaactgatgatttgagaaattataagccaaattacatgatttcagtacctttagtgtatgaaacattctatagtggaattcaaaagcagatatcttccagccccaatgctattaaattaatagtattttcattcataaggatcagcttggcatacacggagttgaagataatttgagaatatggtgacttgtctagcagtcggt

SEQ ID NO: 212768 - DNA, 415 bp, Gossypium hirsutum
aaattcagcatatttttcccattttatttagcattttaagataacatgagcaggccaggagatgggaactgcaggtcatgccaacacctcaacttccaaaggagggacaactgccaacgttgcggtgaatctcgatacggtgttagagtcggctcgacattcgggtttaccgcaggctcggacgttcgacctggtgactggtattgcacggctggaaactgcggcacccacaatttcgccagccggtctacttgtttcaattgcggcgcgttcaaggacgagtcggctggaggtttcgacttggacatgtctcgatcaaaaaggttcggaagtaaccgatccggctggaaatcaagggaatggatatgtaccaggttagggtgcaatgaacataattttgctagcagaatggaat

SEQ ID NO: 212769 - DNA, 447 bp, Gossypium hirsutum
ctgccatagccgtggtgtttaccaccgtgatttgaagccggagaatttgttattagacgaagatgggaacttgaaagtcactgatttcggactcagtgctttctcggaacatttgaaacaagatgggttgttgtacacaacgtgtggaacgccggcgtatgtggcgccggaagttattgctaaaaaaggatacgatggatctaaagctgatatttggtcttgtggggtgattctttatgttcttcttgctgggtttttaccatttcaagatgataatttggtggcaatgtacagaaagatttacagaggagatttcaagtgtccgccatggttttcctctgaagctcgtaggttaatcactaagctattagatcccaaccccagttctcgaatcaccatatcaaagataagggattcttcttggttcaaaaaatccattcccaaaac

SEQ ID NO: 212770 - DNA, 392 bp, Gossypium hirsutum
gcgcccactcgtccgatcacttgtatctctcagtttcttatccgctgccgtagcactacttgttttagtagtttcagtggcagtgcggacccatactacaaatgcacaaagctgcccgaccgagctgacgagcctgaacgtgtgcgcacctttcgtggtgcccggtgcagctgttgctaaccctagcattgactgctgtaacgcactccaatcggtgcaccatgattgcctttgcagcactctaaggatcgcttctcgactcccttctcaatgcaatctcccaccactcacttgtgcttgtaagaaaagcagtggtgctgcatgcttaattgtgtaggaaaatctaaaaacgccatggaatatggataccggcctgatattttccttctttt

SEQ ID NO: 212771 - DNA, 416 bp, Gossypium hirsutum
ctacagagtttgcctcatacttccattattgttgttcactaaggtttgatgataagccagacgatgcttatcttaaaagaatctttcgtgacctctttattcgtgaaggcttccagttcgattatgtctttgattggaccattttgaagtatcagcaatcacagttgaccaatcctccagctcgagcccttggcctcggtgctggaacaagttctcccctgccacctgcaattgcgaatgctgacagacacacagctgcagaggacacacgagcagctggtttgtcatccatggattcttctcggcggagagcatcaggacccttgatgagttctggaaattatgcaaagcagaagagtccagttgcaaatgatcattttattgggcagtcaggtggatcatcttcaagacaagct

SEQ ID NO: 212772 - DNA, 484 bp, Gossypium hirsutum
caatggagttatacttgttgcaacttcaaatcgtgctccagataatctctatgaaggtggattgcagagggatctttttctacccttcattgccactttgaaggaaagatgtattgttcatgaaattggttcagcagtagactaccggaaactgacctcggcagaagaaggtttctacttcattggcaaagatttgtccagcctactaaaaacgacctttcagcagttgattggtgaacatgttgctagtccacaagtggttgaagtagttatgggtaggacgttgcaggttccccttggtgctaatggatgtgcttatttctcgtttgaggaactttgtgacaaacctcttgaggctgcagactactttggattgttcaagaactttcacaccctagcgctggaaggtgttccaaaattcgggctccacaacaggacagcagcatatcgggtagtcactttagttgatgtaatgtatgaggac

SEQ ID NO: 212773 - DNA, 477 bp, Gossypium hirsutum
  unsure (1)..(477): unsure at all n locations
gccttatagaactggctaccactttcagcctcttaaaaattggatgaatgatcctaatggtccagtgtactacaagggagtttaccatctattctatcaatataatccgtatgctgcagtgtggggcaacataacatgggctcactcaatatcatatgatcttgtcaactggattaatcttgatattgcactttctcccggtgatcctttcgatatcaatggttgctggtcaggctcaactacgttcctttccggngagaaacctgtcattttatacactggaagtgataccatgaatcgtcaagttcagaacttggctgagccaaagaacctatctgatcctctgctaagggaatgggtaaaatcatctcataatcctctaatgtcccctggtgatggtattgacccaaagaactttaaggatccaacaactgcttggcaaggccctgatggattatggagagtcttagttggaaa

SEQ ID NO: 212774 - DNA, 423 bp, Gossypium hirsutum
ctgaactctgagactaccctgcggaagaaaatacagaaagcgtgttcaatcttagagttctcggatcctcctttggttcacttcgaaaatgaggcttatcaaaattacctcaatttcctccaagatttaatcaaaaacaatccatccgttgtcgagaagatgaacctagaatcacaactcgtggcagtgtgtgaaaaaatattgcagatatacctcaactgtaccattaaccagaatatggtacagatatcagttaacaagccaacgtcccgttgggtactaccgttgggttcagccaaaagggaagaattggcagcaagaacatctttacttgtgtcagcattgaagactttgagtggtttggagaaggatcgctttagaaaatacattgcaagtttctttcatctgtttgtcgctctgata

SEQ ID NO: 212775 - DNA, 418 bp, Gossypium hirsutum
ggaaaataaaaaagctaatcaaggcactagaatctgccaggggaaatgggaccagcatgatatccctcattatgcctcctcgtgatcaaatatcccgcgtcacaaagatgttaggtgacgaatttggaactgcatcgaacatcaaaagtagggtcaaccgtcagtctgtgttggctgccattacttctgctcaacagaggttgaagctctataacaaggttccccctaacgggctggtgctctacactgggacaattgttactgaagatggcaaggaaaagaaggtgacaattgactttgaacctttcaaacctattaatgcatctttgtacctctgtgataacaagttccatactgaaagcttgaatgagcttttagaggctgatgacaagtttggattatagtcatggatggtaat

SEQ ID NO: 212776 - DNA, 475 bp, Gossypium hirsutum
accactcctacgcgcacacatacagtgaactcatcgaagttacgacttcaccggagttatatcgtggtttgcggataaatgtgatcttattcttgttgtattcgaccctcacaaattagatatacgtgatgaatttaaacgagtaatttcgtgtttacgtggaaacgatgacaagatacgtgtcgacctaaacaaagcacaccaagttgacacccaacaactaatgagagtttatggagctctgatgtggtctcttggaaaagtcctgaatacccctgaagttgctcgtgtttacattggctcttttaacgaaaagcaaattaacgaagctgatgatccattggggcaagacctttttgagaaagaacaagatgatcttctcaaggacttattagacattccaagaaaggcttgtgatcgtcggatcaatgaatttgtgaagcgtgctagagctgcaaaaattaatgcttatata

SEQ ID NO: 212777 - DNA, 418 bp, Gossypium hirsutum
  unsure (1)..(418): unsure at all n locations
cccacgcgtccgcccacgcgtccgagttatttggcttgtttcttgctctgtgtatggcctttggtgtgattagcatatatacaatccggcattttggaacttatagtgtaatagcaacagttaagtctaatattgtgccttgtgatgaagatgaaacgactagtttggatcattggaggaaacctccttcaaatttgcttcattcaatgagtgatgaagagttactatggagggcatcttttatgcctcgtataaaaaagtatccatttaatagggttcccaagattgcttttatgttcttgaccaatggaccattgccactttctcctctttgngagaggttttttgatgggcaccaaggcctttattcggtctatgttcattcattgccttcattcgaagctgagtttcctccgtc

SEQ ID NO: 212778 - DNA, 413 bp, Gossypium hirsutum
ataaagatgtgagagacagctccaattggcttttcaagctttactatgggaaccggatgttggtgggttattgttgtgtggcttgtgaggttctttacatagccttatttcttatctcgagtaaacatactgaaaatttgatggatgttgtagtgacgaccctgaaacagggttcacctctttctcttcttgttgctataagcttattgggatgctcaatcaagcaggtcatcaatattatacagatgaagacagccgcagatgcatgtgtgctttacgacactgaaaaaaagcagaagcgataactgattcgagtttcgaagagcagagttttgtttctggcatcgactgcttaaatattaaggtatagatgttgacactgatgaatcacattcccaataaatattttgttc

SEQ ID NO: 212779 - DNA, 451 bp, Gossypium hirsutum
cggagaacaaaaaaaaaaaaaaaatcattatgtgcacctaacactaacaggattcaccaaaagagcggagaatggcggccaatttctggacttcttctcactttaaacagcttttggacccggaagaggtggatgtggttcatcaacaagataaagataaaggcatcacgcttgaagaatttaagctgattaagatgcatatggcgaactatataatgaaactggctcaaaatgttaaagtgaggcaaagggttgtagcaactgcagttacgtatatgagacgtgtctataccagaaggagcatgagtgaatacgatcctcgtcttgttgctcctacttgcttatatttggcatcaaaggcagaagaaagcacggtgcaggctcgacttcttgattttacattaaaaaattatcttctgatgaaaagtatagatatgaaatcaaagacata

SEQ ID NO: 212780 - DNA, 456 bp, Gossypium hirsutum
  unsure (1)..(456): unsure at all n locations
gttttggcaattggagccacaaaacccagggtccttcctgtaccaggacgagatttatctggtggtcattttgcaatggaattcctacatgcaaatactaaaagcttgcttgatagtgatctccaagatggtaactacatatcagctaagggcaagaaagtagtagtcatcggtggaggtgacactggtacagattgcattgggacatctatccggcatggatgtagcagcattgtaaatcttgagttgcttcctcagccaccgcagacaagagctcctggcaatccttggccacagtggcctcgcatattccgtgtagactatgggcaccaagaagctgctaccaaatttggaaaagacccaagatcctatgaggttttgactaagaggtttataggagatgataatggaactgtgaaaagactngaagtggttcgtgtgcgttgggagaaggat

SEQ ID NO: 212781 - DNA, 471 bp, Gossypium hirsutum
tgaagctgcaatccataataatgcccctctctgagtttgatcatgcagagaaaggggatgcttgatatgcaatggagcttgccttgtctctcgagaaactaacaaacgaaaagctcttgaacttgcacaacgtggctgagcgaaaccatgattcgcagttgaccgatttcatcgaaggcgagttcttagctgagcaggtcgaatccatcaagaaaatatcggaatacgtggctcagctgagaagagttggcaaaggacatggggtgtggcactttgatcaaatgcttctccacgagggagctgttgcatgaaaacttgaccagagaaaccgccgcttgcttctgataccagcgatccttcttttaagttcccgtgttagtagttgttgagagattaagttttgcaagttggatggctagtttagaaaactttgtgttgatgatataagaagattgagagactcaaaaggga

SEQ ID NO: 212782 - DNA, 479 bp, Gossypium hirsutum
atttggaaaaaaaagagagagagagagagagttaaggtgttaaagctttagggttgtgcaggcggaaattggattaaaggaaacaatggaacacgggtctttcactgataatagtgctgccactttttctttaactgatgaggatcataccatagctaacgctgttagattcactttgaatcaagacccaagggttacattctgtggctacagtattcctcatccttctgaggctcgagttaatattagagttcaaaccactggtgatccagcaagagaggtattgaaagatgcatgtcaaaatctgatgttgatgtgtaggcatgtgaggagcacttttgacaaggctattgaagattttaaagcaagcaatgctgtgaaggccatgaaaattgattcacaagacagtagtggtgatgattcagaagagagtgaatgaaaatgatttcctgctatctatctttcacatcttaagacta

SEQ ID NO: 212783 - DNA, 328 bp, Gossypium hirsutum
cggacgcgtgggtgttaagtgaactcaaaagtctggtttatgtcggggaagttagggatcatggggcgatggtctacttgatattaatgtactattattttagcctttcaccgtatcgccaccattaagatgacgggccctatggggctggcggtgggcggacaattggtgcttaattccctacttgcttaccttccatcttttaagcattttgcttaagaggatgtttggagctggagactgtattgtggtgcttattattatttaatattcaagggttttgagaacattaatgttaatagctattattgtacgagatttttttttg

SEQ ID NO: 212784 - DNA, 317 bp, Gossypium hirsutum
gcacgcgtccgcccacgcgtccttgcagcctttaaaggaaatgctctggacatggttgagtctgaacttcttgaccttgttcaggcatcaaaaaacagtcaattgttttctcaattcactaaggacttgtcagtacctgcagagacacgggtcaaagccattaatgagatatgtgggcaagctaaattttcagatcttacaaagaactttttagttatactagctgagaatggaaggctaagacatatagaaagcattgcaaagagatttgtggagttgaccatggctcataaaggagaagtgaaagctattgtcac

SEQ ID NO: 212785 - DNA, 420 bp, Gossypium hirsutum
gctcacaattagagcttagcatcaatgagcacgatgtcttgggaaaggtttctcccgatgagggcggggatcaacctgccgctctaatcacactttcgtcttcaaggtaagttgctaggcctgacatactaatatattctgtacctgcaggcaatctggactaggaagaatgtgttacagtctatggattttctactgctgatacaaatttagttgtgcgagagtttgaaaagtgtggagcgatattgaatcatgttcctggtccaagggattctaactggatgcacattatatatctgaacctatctgatgcttatacagctcttagcaagaatgtaatgctaattaatggagcactaataatcggtgtgaacccagtacatccaatgcatcgcgtggctctaaatgaaagaatgaata

SEQ ID NO: 212786 - DNA, 421 bp, Gossypium hirsutum
acgacatacgaccacgcatacgtacacacgtacgtttacgcttacggactaattttttgaataatggtacggcaacaatggctggacacacagtttacaccctctcagaagtgtctcgatacaaatccaagaacgactgttggcttgtcatcgatggccgagttctgaacgtaacaaagttcctggaagaacatccaggaggagaagaggtgttgttggaatcagcagggaaggatgcgacgaatgaattcaacgatatctgacatagcaagtcggctcagaatttgctcctcaagtatcagattggtgttctccagggtcacactttatagaataatgaacaggttggttcaacctatgagtccaataagaaagagatgagtgcattcgttattaaggatgacctgacgcctaaatatgc

SEQ ID NO: 212787 - DNA, 439 bp, Gossypium hirsutum
gggtgtcttaataaacgccttcgatttactttcggtttccatttacttctttattggtacgggtttgaatttttagtaagcgaaaatgagagagtgcatttcagttcacatcggtcaggctggtatccaagtcggaaatgcctgctgggagctttactgccttgaacatggaatccagcctgatggccagatgccaagtgacaagactgtcggaggaggtgatgatgcttttaacacctttttcagtgaaactggtgctggaaagcacgttcctcgtgctgtctttgtggatcttgagcctactgttattgatgaagtgaggactggtacttaccgtcagcttttccaccctgagcaactcatcatcggcaaggaagacgcttgcaacaactttgtccgtggccactacactattggcaaagagatcgttgacttgtgc

SEQ ID NO: 212788 - DNA, 320 bp, Gossypium hirsutum
gcaggatgttcttgggttggacatttctgccaggatgaacattcctgcaacacagcatgggaactggagttggaggatacctaattccacgagttttgatagcctggaaaaagaagcgttaagattaagagagatgctttccatgtacggtcgaaagtagttcaggaaagcttcatatctttcttttcctcagtcattacacatgattttagtgccacccccaacattatgtgtctaaaaacaatctctctagctttgaataagttcttttaaaaagcttgataccctttcatttctttctcgttaatatcttactttct

SEQ ID NO: 212789 - DNA, 426 bp, Gossypium hirsutum
cccacgcgtccgtccacgcgtccgttcacgcgtccggtctttttttttgttttttggttacggcaacaatggctggacacacagtttacaccctctcagaagtgtctcgatacaaatccaagaacgactgttggcttgtcatcgatggccgagttctgaacgtaacaaagttcctggaagaacatccaggaggagaagaggtgttgttggaatcagcagggaaggatgcgacgaaagaattcaacgatatcggacatagcaagtcggctcagaatttgctcctcaagtatcagattggtgttctccagggtcacactttaaagaataatgaacaggttggttcaaccgaggagcccaaaaagaaagagatgagtgcattcgttatcaaggatgacctgacgcctaaatatgctgcagtcgtcgagt

SEQ ID NO: 212790 - DNA, 429 bp, Gossypium hirsutum
gcaccagatccagatgacagttctctagatgatgcatacataatgaaaccgaacttgattgcccctggaaatttgatatggactgcctggagttcccttgggacagattcagttgaattccaaggtgaaagctttgcaatgatgtctggaacaagcatggcagctactcatattgctgggcttgctgcattgataaagcaaaagtttactcatttcagtcctgcagccatcgcctctgcactatcgacaacagcttctctttatgacaagagtggtggccccataatggctcagcgtgcttatgctaatcctgatgtaaaccagtcttcagcaacaccatttgacatgggcagtggttttgtgaatgctaccgcagctctagatcccggtctgatcttggattcaacttatgaagattatatgtctctt

SEQ ID NO: 212791 - DNA, 440 bp, Gossypium hirsutum
tcttcttgcaagatgtgatcggaaaaacggttaatgggacaacctatgctggattgagagcggggactactggagctccacaaaaccattggtttggaccggctggagatcctagaggagcagggatcggaacaccagaagccataaagcttgtttggtcatgtcacagggaaatcatatatgattttggtccgctgccaaggggttgggaaattccaccctcaacttgaggagtgtattcaaaatcatcccttggggtttcattgatgcttttgacagggcagattgcagctttataaataaaaatgtgagggcaatttttgtggctttagtcctagtcttagggtaatgatacgaatctaagatatcagtatgtggcggagctttttcgtataaataaaagatcgtgcatgcacatagctgaatatgtgtaggacacg

SEQ ID NO: 212792 - DNA, 432 bp, Gossypium hirsutum
cggacgcgtggggtcgatgggaaggcagggcctggtgctttgtttgtgaaggttagcatggatggtgctccgtatttgaggaaagtagacttgaaaaactacactaaatatcaggagctgtcttctgcacttgagaagatgttcagctgttttaccataggtcagtatggatctcatggaacctcgggcagggagctgctgagcgaaagcaagctcaaggatctacttcatggatcagaatatgttcttacttacgaggataaagatggtgactggatgcttgtgggtgatgttccatgggagatgttcactgacacctgcaaaaggttgaggatcatgaaaagctctgatgccattggactcgctccgagggccatggaaaaatgcaagaaccggaactagctaccatcatacatgatcttttcccacaca

SEQ ID NO: 212793 - DNA, 449 bp, Gossypium hirsutum
attctttttctcttagatgagtacaaccatggcgaatcacaaacggttccctaattgcgtatctcttattctcctctctctcgtcgccaccgcttctgctgaagttttcttcgaagaacgcttcgaagatggatgggaaagtcgttgggtaaaatctgactggaagaaagatgagaacatggctggggaatggaattacacttctggaaaatggaatggagatcttaatgacaaaggtattcaaactagtgaagactacaggttttatgctatttcagctgagttcccagaagttaacaacaagggaaagactctagtcttccaattttctgtgaagcacgagcagaagcttgactgtggtggtggctacatgaagttgctcagtggtgatgttgaccagaagaaatttggcggtgacaccccgtacagcatcatgtttggccctgata

SEQ ID NO: 212794 - DNA, 451 bp, Gossypium hirsutum
tggaaattcagtcattgctcgagaaactgcttgaacaggtggaggaacgacttgaattctgtgacaaaggtgttgcacctcgtaaaaacatcgatgtaatgaaatctgcaattgaaagtactcagaacaaagatactgaaatggaagaagtggaacctgaagaagcttccgcaaagaaaagcaagaaaaagaagtcaaaaaccgaagatgctccagctgctgctacaaatggagatgccttggaggacggtaaatcggagaagaaaaagaagaaagagaaacgaaagaaggagcaagaggcgcatgaagaagatgggaaaacaaatggcgtaaacgagcaggatgggacagccaagaaaaagaaaaagaagagtaaagatgaagcagctacaaatgaaaatacgaagaagaagaagaagaataagaagagccatgagtgaaattaatcact

SEQ ID NO: 212795 - DNA, 452 bp, Gossypium hirsutum
ctcatgtctagtcatggaatattgcccagggggggatctacacactttgagacaacggcaacctggaaagcatttcttagagtatgctgcaaggttttacgctgcagaggttctattagcactcgagtatctccacatgcttggtgttgtctatagggacttgaaaccagaaaatgttctagttcgtgatgatggccatataatgctctcagactttgatctttccttaagatgtgcagtgtttcccacactaataaaatcctcagcattcgattctgatccttcaaaacgtggagctgctggtacattctgtgttcaacctgcctgcattgagcctacttcagtttgcattcaacctgcgtgctttatcccacggatattccctcaaaagaacaagaagaaaacccgaaaacctcgaatagaatttggggcgccttttcatacccctccag

SEQ ID NO: 212796 - DNA, 399 bp, Gossypium hirsutum
cccacgcgtccgcacaagggtagctttgagtacaatccacgttcaggatgctgctgggcatgggtttgcaactcgtcttggtaatgtgttcacaattggaaaaggaacgaagccatgggtatcccttcccaagggcaagggtattaagttgtccatcattgaggaagctaggaagaggcttgcagcccaaaatgctgcttgaacattaacacaagatatctagatatgtcttgctgctgtagtttattctggagttactagatttcttgctttcggttatgaagaaaattttgaatatgttaatgaacttacaaggctatattttaaatgaatgcttggacttggaagctttcgtgaatatgttaatgctttgattcattatacaatatctctggggaa

SEQ ID NO: 212797 - DNA, 440 bp, Gossypium hirsutum
gcggagcaaacgaagctggtttctggtttctttgtttccgaattttttccttcacttcaatgcctggatgttgcttcgggtgtgaagtatagagttgaaaagactcatgcagaagctgataggattcttcagagcattgttaatgatcacaaagaaagtagagcaagaggcagaagtaaagatgacagggaagatctggttgatcttcttttaaggcttcaggaagatgacgaattccctttaactgataatagcgtcaaagccatcatattagatattttcactgccggaagtgagacatctgcatcaactgtagaatgggcattgtcggaaatgattaaaaatccaagagttatgacaaaagcacaagcagaggtaaggcaggtattccaaggaaaaggaaatgtggatgaaacaagcattcatcaacttcaatatct

SEQ ID NO: 212798 - DNA, 390 bp, Gossypium hirsutum
agaaaaaggaggtcatagttgaaattactggtggtccgacagagagctatgatgaggtctcggcctcattgccggagagtgactgccgctatgcagtttatgacttcgattttgtgacttccgagaattgtcagaagagcaagatcttttttattgcgtggtctccttctgtttcgaggatccgctccaagatgctttatgcaacatcaaaggacaggttccgaagggaattggagggcatccattacgaaatccaggcaaccgacccgactgaaatggatcttgacgtgattagggagcgtgcacattaagtgtccgttcccagaattcacatgcttaggaaaacttcctagaggtacctttagggttgttatatggttcaattaaatt

SEQ ID NO: 212799 - DNA, 449 bp, Gossypium hirsutum
cccacgcgtccggtctctttagcctttaccctttgtttcgttgatttgtttctaaggattgaatctccaaaccttcttcccatttcttcattacattgttcaagaaaaaagaagcaaaaaaacatggccaaagttctgttgttcattgcactatgtgtgcttccagctttggttagtgctacacgcattctgaataatcaattggtggtagaaggctatgtgtactgtgatacttgccgtgctggttttgaaacccctaagactagaagcctagctgatgccatggttaggttggtatgctccgacaggaagagcggccaagttgtcttcaaaaaggagggatacaccgacaaaaccggaaaataccagattcgtgtatccgaggatcacttggatcagatctgtgatgcagttcttgtgaaaagctcccagcttgttgtgccacaatg

SEQ ID NO: 212800 - DNA, 438 bp, Gossypium hirsutum
ggtgtttgcacgcattgaccacaagttcgatctcatgtactcaaagagagctttcgtgcatgggtatgttggtgagggcatggaagaaggagagttctctgaagctcgtgaggatctggctgctctcgaaaaagattatgaagaagtcggagccgaaggtgtagaggacgaagaggatgccgaagactattgatgttcgtatgctgaaatatttacttttgaatatcagctctgtgtgtaagggtattcctatcttttgctcttgtgtagcactgtcttcctgtgtgctgtatgattgttaaattgtgcccatcatttgcctaagggctttttatgctatcaatgaagtaatatttatagttgtgcttgtcatttcttgctataaatgtgtcttctatttatgaaaggtgttccataaacaacatttatgggtgctgt

SEQ ID NO: 212801 - DNA, 423 bp, Gossypium hirsutum
gcaccctttcttcctactccggcctagccattaccccacgtgagttagcccaagcgcgccgtggaagtcagcctgtcccgtgcccgtaaagtgtcgaactacttgtcgacgagtgtgacggggtacaacaagagggaacgagtcgcactgagtgactgcgtggagcaaatagatgagtcgatggaggagttgagcaagacattaggggagttgaagcacttgagaggggagacgttcgagtttcagatgagtaatgcgcggacatgggtgagtgcggcgctgacgaatgaggacacgtgtcttgatgggttcgaaggagttgacggcaaggttaaatctaatgtgaagaggaagatcacgaatgtggctaaagttaccagtaatgctctgtacatgatcaataggctcaatgaaagtcgtggt

SEQ ID NO: 212802 - DNA, 447 bp, Gossypium hirsutum
cggagaacaaaaaaaaaaaaaaaatcattattagcacctaacactaacaggattcaccaaaggagcagagaatggcggccaatttctggacttcttctcactttaaacagcttttggacccggaagaggtggatgtggttcatcaacaagataaagataaaggcatcacgcttgaagaatttaagctgattaagatgcatatggcgaactatataatgaaactggctcaaaatgttaaagtgaggcaaagggttgtagcaactgcagttacgtatatgagacgtgtctataccagaaggagcatgagtgaatacgatcctcgtcttgttgctcctacttgcttatatttggcatcaaaggcagaagaaagcacggtgcaagctcgacttcttgtattttacattaaaaaattatcttctgatgaaaagtatagatatgaaatcaaag

SEQ ID NO: 212803 - DNA, 438 bp, Gossypium hirsutum
atttcttctcttgtaacactgctaatatttttttttatcgtcgtctccgtcgttcgaagatgataaaaaaccggcgtcgtttcaaatggctacgagaacggatcttgatgggaggccaataaagccgttgacgatatgcatgatcggcgccggaggcttcatcggctcccacctttgcgagaaattgatgtcggagacgccgcacaaggtgctcgccttggacgtttacaatgacaagatcaagcatctgctcgagcctgactctctcccttgggctggccgtattcagatccaccgacttaacattaagcacgattctaggctcgaaggcctcatcaagatggcagatctcacgataaatcttgctggcatatgtactccggcagattataatacgcgtacactagacacgacttacagcaattttattgatgcact

SEQ ID NO: 212804 - DNA, 415 bp, Gossypium hirsutum
cccacgcgtccgcaacaacttgctcggtaaatttgagctctctggcatccctcctgctccgagaggtgtcccacagatcactgtctgctttgatatcgatgctaatggtatcttaaacgtatctgccgaagacaaaaccactggacaaaagaacaaaatcaccatcacaaacgacaagggccgactctccaaagaagaaattgaaaagatggttcaagaagcacagagatacaaatccgaagatgaagaacatataaagaaggtcgaggcaaagaatgcattggaaaactatgcatacaatatgaggaacacagtgaaggacgagaagattggtgctttacttccagcagctgataaaaagaagattgtagatgctattgtacaagccattcaatggctagacagcaaccaactt

SEQ ID NO: 212805 - DNA, 427 bp, Gossypium hirsutum
caacgctttccacatcatttctttgtcacagtgattcgatttgtcacccttgttcgaagagaagaagagagaagaagaggagcttaggttcgccacgacacggccggcaagcagcgtgatatcgagattggaagaggtagccaagtcggtgaagttcaacgtgaagaaaagtgagtcaaaggtgaggttacagggtcaagaatgtggaaggaaaggaaaattagctattgctgctgacatatttgcagtgacgccatcgtttttggttgtggaagttaaaaaagacaacggcgataccttcgaatacaaccagttttgcagtaaacagctccggccggcgcttcaggacatcgtctggacttcaccggccgagaagccgacggttgcttgacggggagtttcaagattattaattatctacatgaaa

SEQ ID NO: 212806 - DNA, 447 bp, Gossypium hirsutum
gctgattcagcctcttggtactgtgcccttgccttattgaccttaatactgatgggttgcgtcaagacaagttccgtatcatcagatgaagctgcgagagggaagcagcttctgaagccaccctgtgacgaaatctatgtggtaggagaaggggagacacttcacaccatcagcgacaagtgcgacgatccttttatcgtggagcgcaaccctcacatccatgatcctgacgacgttttccccggccttgttatcaagatcatcccttctactgctgggaaactctagaggtagccatacgtcttctgaaaatatttgtgttaattcgtcccttatcaaggccccggttggtaaatttgggggggatggtggatccttagttctctcttatccaaattccatgcacacacatatgacatatatatggtgtaaaacgatgcttattga

SEQ ID NO: 212807 - DNA, 342 bp, Gossypium hirsutum
cccacgcgtccgcccacgcgtccgcccacgcgtccgcaaagaacaaatttcttgttagagatgcatgctgtacttatacaaaccgatatgttaactgctaaaggagcccaaagtcaactacagcagcttagaggtagaaactggaccatttaagatgagtttggatcaagttagttgtagtattgtttcgggttaaattggattagtatactatggtgtaagttaaatatcatttcatagttggtaaagatcattatgcttattgttatcattaatttgtaatacttggaaacttttatcggtgtaatcatatactcattatttgtggaagtcatctttagc

SEQ ID NO: 212808 - DNA, 428 bp, Gossypium hirsutum
tcggatccactagtacggccgtcagtctgctggaattagcgcttaacgcactaccaactggcttgctccattggctaacttcatccacgggatgtgttacatcgaagatgatcttatcaccactgatcattcgattactgctacccaaatcaccgtaagacgtccataaatgaaggcttggagaggttgcagatactgcctcattcaatatcattctcagcatcactggagcttccaagaccattatccatgttgtgtcagcatcaaatggcaagctaaatggaatggctttccgagttcccactgtcgctgtctctgtaggatactaaacacttacacttgatatgacttataatgatgaacatattaatgctgtcatcccgatagaatctgtaaccaacttgtatgatattctaaattacgcctat

SEQ ID NO: 212809 - DNA, 434 bp, Gossypium hirsutum
  unsure (1)..(434): unsure at all n locations
ctggagcaccttggattgagggaatatttctcagagatcgactccaatcctagctgtgtcgacgaggaagagaaactaaggatcttgccttatcatgatttcaccaagagttcccatggctgcaatctctgccccccaaatatgtgcaaagggagggtgattgaaaggattcaagcttctttagaagggaagaagaaaatcatataccttgcagatggcagcggagattactgcccaggcttaaagcttggagaggtagactacatgatgccaaggaagaatcatccagtttgggatttaatttgcaggaacccaatgttgatcaaggctgagatctatgaatggaccgatggtgaagagctcgagaaggttttgctgcaactaatcaacatgatttctcttgaagaagacgatgccnattcttcccaattcat

SEQ ID NO: 212810 - DNA, 402 bp, Gossypium hirsutum
ggtttggagagctgatccaagctttacacctcatgaacgtcaaaggggttgttttagtcctgtgtgggttgcattttcaatcctaattggtggtttattgttggatgtgttaatatccgttactcttggtgtctcggcactacctgttaacatcataattggtgttattgttgtcctaggacttggaacagcccttcgacttgccctcgaattctgccatgagtggagtattaggagagccatgcaaagggtagaagtaaatgcgactctccagtatcatcctgctttgtaggtaaatctgtatatagtaaaattcaagcgttatttgtgtatatgacattcagcatgctattcacgaaggaacccattgtttgttactgcttacatctgtacaccatgata

SEQ ID NO: 212811 - DNA, 444 bp, Gossypium hirsutum
cattgctcctggtgttaatatcttggcaggatggactggtgccgctgcaccaactgatttagacattgatccaagaagagttgatttcaacataatttcaggcacttcaatgtcttgtcctcatgttagtggattggcagctctgcttaagaaagcataccccaattggtcacctgctgccataaaatctgctttgatgacaacagcttacaatttagataactcgggacacaccattaatgatcttgctactggggaagaagcatcaccatttatttttggagctggccatgtggatcccaacagagctctaaatccgggattggtatatgataccgatagtagcgactacatcgcgttcctttgctcaatcggctatgattcaaagaggattgaagtatttgtgagggaacctaatagttcagatgtatgtgctacaaaatt

SEQ ID NO: 212812 - DNA, 435 bp, Gossypium hirsutum
cccacgcgtccgggaatgttctgttgttgattgacaggttcttcgagatgccattggtaggagacatggactaaaagttcctcatggttgttattatctagttgatgctggatacacaaattgtgagggatttattgcaccttttagaggacaaaaatatcatttgaatgagtggcgtcaaggttaccagctaagtactccggaagaattattcaatatgaaacatgcttcagcatgtaatgttattgaaagatgctttgggttattaaaacctagatggggaatacttagaagtctatcattttatcctgtaagggtgcataatagaatcattattgcatgttgtttgctctataattttattcgaacctatatgagtattgatcttattgaagctgtgttgggagatggactacctagtaatgagatatgatg

SEQ ID NO: 212813 - DNA, 433 bp, Gossypium hirsutum
cccacgcgtccgcccacgcgtccgcccacgctttcgttcacgcgtccgcccacgcgtctcgggacgcgttcgcctacgcgttcgcccacgcgttcgtccacgcgtccgaccacgcgttcgcccacgcgttcgttgtaaagttattgtcgccaatcgttgctattgtggaaatggatgatgtggtttttttattatttcctaaataaaatattttttaattttaatagaaaaattctatttttttttttgttctattttttctttcactttttttttatgctttatttttcttttagatttttctttattcaattttttggtgtgtataatttgttctttcttttttgggatctctttttttttttcttttttttttttctttttttttcttttattttttttttatatattttttttttttattatgtttttt

SEQ ID NO: 212814 - DNA, 337 bp, Gossypium hirsutum
  unsure (1)..(337): unsure at all n locations
gagaaaatgaagaccatactctcatcagagaccatggatatccccgatggggtcaatatcagagtgaaggctaaaatgatcgaggttgaaggtcccaggggtaagctcactcgtaacttcaagcacctcaacctcgatttccacctcaccaaggacgaggagaccggcaagcgtaagctcaggatcgaggcctggttcggtaccaggaagaccagcgctgccatccgtaccgtcctcagccacatcgagaatctcatcaccggtgtcaccaaaggttaccggtacatgatgaggttcgtctacgctcactttccgatcaacgcctncatcactagcg

SEQ ID NO: 212815 - DNA, 440 bp, Gossypium hirsutum
gtgtgctggaattcgcccttagcgtggtcgcggccgatgtacttttttttttttttttttttttttggggggataagacaatctgatttcattatgatagcaaaccccatatcagttatacaatgaagttctcaacttttactcaaagtatcaaatcttttgcatcacataaacttaccattttacaaattacatgcaacatagtcttaaattttaaccaacacacacatttattctaaagcttaaccggatattgaaccgattttttcacataattgggtaagaagcattcatggcaagaccacattgaccgcgtttaggcttgatatcttctttgatcctcatgtatccacgatctccccattttggaccccatgaattcttgaggatccagtaccttggccgctaccacgctaagggcgatttctgctaatattcat

SEQ ID NO: 212816 - DNA, 457 bp, Gossypium hirsutum
gtggagccttggttgcatgtttgctggaatgatattccggaaggaaccattcttctatggcgcatgacaaccatgatcaattagttaaaattgccaaggtcctagatactgatgagttaaatgcttatctcaacaaataccatttggagcttgatcctcaacttgatgctcaagttggaaggcacagccgcaaaccctggtccaaatttattaatgcagataatcagcatcttgtttctcccgaggctattgattttcttgataagttgcttcggtacgaccatcaggacaggctaactgctagagaggctatggcccatccttactttgcacaagtcagggcagcagagagcagcaggatgcggactcagtaactcaatttccttgggaggatttcatttgtaaatcagaaccagactcatctggggtaagagatttaatgtgttgtttaatgttc

SEQ ID NO: 212817 - DNA, 387 bp, Gossypium hirsutum
cccacgcgtccggtcctactggtacaacagctatggatcagttgttacagttgaccaggatgccaagactcggtacccagttgtggttcgattcaacaaagttaattacgccaatgtatctaccaacaactacgcattggatgagattgaagaagttaaatgagtcactgtttcattttgtaataattttgggtttcaatgatcctatggctaatatatatatcgtcttcccccctctatctggctttgagcttgtttctaccaaaaacgacgtgtacaatactatcatctttctctttatttctctcatttattaatgccttactttcctaaaaaaaaaataaaaatttataataataatatgtaaaaaaaaactatatttttttt

SEQ ID NO: 212818 - DNA, 293 bp, Gossypium hirsutum
ctagtcagcgccaggcatcctgctacacttccgaccatcacttgctcagttcagtctttaccacggtggccataaagatctctcggccgacgaattcagccttgtggacggatttaacatccccatgactgctaccccgcacgaaggcaaaggcctttgccccgtcgttggctgcatgcgctaatattctgaccacgtgtcccggcaagttacagtataagtcacctgctcatactacagctgtgggtcgtaagagcgtacgagctatcttcaatacccacaagctttgatgc

SEQ ID NO: 212819 - DNA, 453 bp, Gossypium hirsutum
ggacaagttggttgatctgactacaggaatgtgctggaaacttattgctcgaaaggttcagactgctatctggatcaaagaggaagatccatcatgccttaagcataatgcagagttgaaactcattgatatttgtgatgccgtagacgagactaaaccatcatggatgactcctctaatgaattgtatacagctagcaggtgcaacaatagctaccaagaagctccctcctaggcctgagcgtctgtcagtgtattcggagagcctcagtagaatcggcatcagcagagaagaatttagttcagactccaacttctggcaagaacaagttcactattactggaagctgatgaatgttagcaggacagagatacgaaatgtgatggacatgaatgccctttttggtggttttgctgcagctttgaatgaataccctgtttggtaatgaatata

SEQ ID NO: 212820 - DNA, 367 bp, Gossypium hirsutum
cccgtaagcaaaccacaaaggaaagcttggagagagacccaaaaacaatgtctaaggaagttagtgaagaaggacagggtcgtaaggactatgtggaccctccaccggcacctctgattgacatggctgaactcaagtcatggtctttttacagagccctcatagctgagttcatagccactctcctcttcctctatgtcactgttgctactgtaattggtcacaagaaacaacaagatgcatgtgatggtgttggtctcttgggtattgcatgggctttcggtggcatgatctttatccttggttactgcacttgccgtatctcaagtggacacattaaccctggcgtgacttttgggttggtttt

SEQ ID NO: 212821 - DNA, 240 bp, Gossypium hirsutum
gacaaaaaaacctccaaaaaaaggggttattttttcaatggtggtattttggcgtttgtggcggcagcctcttgggtgtaatccttatgtcctacatccaagataccttaggttgggtactcggttttgccatccccatgtttgccatggttatatcggtcgtgtttttcacatgcggtaatcggacctacgctcataaaccggaccgaaccatgtacaataaacacttttccaacatgc

SEQ ID NO: 212822 - DNA, 366 bp, Gossypium hirsutum
  unsure (1)..(366): unsure at all n locations
cccacgcgtncgcatggacatgaatgcatcttttggaggttttgcagcagcacttgtatcagatgcagtatgggtgatgaatgttgttcctgctcggaagccattaactcttggtgtaatatatgacagaggccttattggagtataccatgattggtgtgaacctttctcaacatacccacgtacttatgattttattcatgtagctggcattgaatcactaataaagcttcctggttcaagcaaggagcaggtgtaaccttgtggacctaatggtggagatggatcgaatgttgcgttctgaaggaacagctgtgattcgagattcacctgaagcaatcgacaaagtggcacgcatagctcacg

SEQ ID NO: 212823 - DNA, 176 bp, Gossypium hirsutum
ttcaaaagttgatatgtgggcgatgtgtgtgctataatggccgagttgttcaccttacgtgctctttttcctggtgccagtgaagcagatgaaatctacaaaatctgcagtgtattaggtactccaactaagtatacgtggtctgacgggcttaaccttggcagatctataaacta

SEQ ID NO: 212824 - DNA, 203 bp, Gossypium hirsutum
  unsure (1)..(203): unsure at all n locations
cccacgcgtccgcccacgcgtncggctgattcaatatttttccgatttaaggagttgactgcacggccagaagcggtagaagttgctcgacaatatctctctgacttgaaacagactattcgtgggtgggagacagaaaaaccctggctgccgaaagacagaatagatgagttgtcaacccgtatggacaagttgaagacttg

SEQ ID NO: 212825 - DNA, 398 bp, Gossypium hirsutum
cgttgcttacccgacggagctaagattacaagcttttgtccctgattatatggaccggcaattcaatgatttgagacctgggaatgtaacgatagagtatgaggggcattcatctggtgttgcatatgggacagcgtttactattcatttctggcttggacgaaggccaagtaaagacgtggaatatagtgtttatgcgccgccgttcacgacgcattccatttcaatgaatcaaaggttgctgaaactgaggtgccggcacaaaacaagggacggcggtggttcgatgagtgctgttttggaagctccaccgtcgccgaatgtggcaccacctggttactatttgcttactgttgttaataatggcatccctagcttatctcaatggattagattca

SEQ ID NO: 212826 - DNA, 405 bp, Gossypium hirsutum
  unsure (1)..(405): unsure at all n locations
attattttggcaccagattgggcttggctactgtctcctctgagcaacacattccttgtttcntggagctatgcatcggaatcccttttccaatgtttttncctaccgtggtctgaatgtttcccttgtctacgcgatgatcccacttcaaatacaccttaacaaaaggaactccttggtggagagaatatagcatatgctgcttctgtgtggaagctgagtgcatgtgatttatgtgagattgcccgtaattcagtctaccagtctggtttttcacatgctttgaagtcacactggattggaaaggagtattacaagagagggcctaatggaaatgagatacagaggacaaatgtacctcatattcggctggaatttcgtgacaagatctggagagaggagatg

SEQ ID NO: 212827 - DNA, 386 bp, Gossypium hirsutum
cccacgcgtccgcagaagcaagttattgtgtagaagcttggtgagccaaccgagagctatgaggattttactaaatgtcttcccgctgatgaatgtcgttatgctgtgtacgattttgattttctaacggccgagaacgtcccaaagagcagaatctttttcattgcatggtctcccgatacatcaaggatcaggagcaaaatgatatacgctagctccaaagacagattcaagcgagaactggatggaatccaagtggaattgcaagcaacagatccaaccgagatgggtctcgatgtcttcaaaagccgggctaactgaatacagttcttttaggcttttgcaacggggaagctttcttccttcctacaggatgtcttttactt

SEQ ID NO: 212828 - DNA, 391 bp, Gossypium hirsutum
  unsure (1)..(391): unsure at all n locations
cccacgcgttcgcccacgcgtncgtaacatttggatatgcctcctttgattatgaagattgagaataccaacaatctgatttggtaaaacttgatatcctcttaaatgggaagccagttgatgccatggcaacaattgttcactctttgaaggcacaacgagttggtcgtgaactggtggacaagcttaagaaattcatcgacaggcaaatgtttgagataatcatacaagctgcaattggatcaaaggttattgcaagggagacaatctcagcaatgagaaagaatgtcctcgcaaagtgttatggtggggatgttactcgaaagaagaagcttttggagaaacaaaaagaaagaaagaagcgaatgaagcgagttggttctggtgacat

SEQ ID NO: 212829 - DNA, 385 bp, Gossypium hirsutum
cccacgcgtccgcccacgcgtccgcagtggtttgcaggtgcaattgaaagatggtcaatgggttgcgccgccaccatcgccaacttctttcgttgtcatggctggggatgctttgatggcatggagtaatgaccgaataccatcttgtaatcatcaagtaatcatgaaggagaagggaataagatactcattgggcatgtttacattcatggatgggatcatacatatacttgaagaggtaggggacgagactcaccccatcaaatacaagtccttccaccactttgaactccttcagtttatgaattccaatttgaaaaccaaccctaacatgtgctttatcaaagccttttgtggtgtttgagacctacacaacaaggatgct

SEQ ID NO: 212830 - DNA, 393 bp, Gossypium hirsutum
gttgggttcaacgttaaaaacgttgctgttaaggatcttaaacgtggttttgttgcttcaaactccaaggatgatccggccaaggaagctgccaacttcacctctcaggttatcatcatgaaccaccctggccaaattggaaatggttatgccccagtcctcgactgccacacctctcacattgctgtcaaattttccgaactgttgaccaagattgacagacgatctggcaaggaactcgagaaggaacccaagttcttgaagaacggtgatgcacgtatggtaaagatgattcccaccaaacccatggttgttgagactttctctgaatacccaccacttggacgttttgctgtccgtgacatgcgccagacttgtgccgtcggtgtcatc

SEQ ID NO: 212831 - DNA, 345 bp, Gossypium hirsutum
cttgagaatttttcagtcctcaccaatctggcaaatttgcgaagcctatggcttgaaaaaacgtgggttcctcaattgaccaatcccactgttcacatgaaaaacttgcggaaactgtctatggttctttgcaaggttaataacagctttaatccatcagtgatagacctgcccctgatcttccctcgtttattggagctcattattgatcattgtcatgatttgattaagttgccatcgagcatttgtgaggtgaattcactccagaacctgagcataaccaactgccaccgactatgtgaattgcctgctgatttgggtatgctgaagaaactacaggtactt

SEQ ID NO: 212832 - DNA, 345 bp, Gossypium hirsutum
aggaaaatgaggcggatcatgacggttccattttttaccaacaaggttgtgcagcagtacaggtttggatgggaggacgaggctgctcgtgtagtggaggacgtgaggaaaaatcccgaggcagccaccaacggaatcgttttgaggaggagattgcagctgatgatgtacaacaacatgtacagaatcatgttcgacacaagattcgagagtgaggatgatcctttgtttgttaggctcaaggctttgaacggggagaggagccggttggctcagagttttgaatacaattacggggattttattcccatcttaaggcccttcctcagaggatacttgaagatc

SEQ ID NO: 212833 - DNA, 326 bp, Gossypium hirsutum
ggcgaggaaaatgaagatccgatcctcgatttttagtcgaagctgtatcgatttgataaagagagggaatcaatggaaagagagaggtgctggtactgtgaagctgttgaagcacaaagagacaggaaaagttcgccttgttatgaggcaatctaagactctcaagatctgcgccaatcatctagtgttgccgacaatgacggtgcaagagcacgctgggaatgataaatcgtgcttatggcacgcctctgactatgcagatggtgaattgaaagatgaacttttttgcattcggtttgcatcagtggaaaattgctaaaccttta

SEQ ID NO: 212834 - DNA, 456 bp, Gossypium hirsutum
  unsure (1)..(456): unsure at all n locations
gatgggagccgtcgagggctaccgtattgtcggtggaccactcggtgaagtgactgaccgagtgtacccaggtggcagctttgacccattgggtcttgctgatgacccagaggcattcgctgagctcaaggtgaaagagatcaagaacggtaggttggctatgttctcaatgttcgggttcttcgttcaggccatcgtgaccggaaagggaccattggagaacttggctgaccaccttgctgacccagtcaacaacaatgcttgggcctatgccaccaactttgttcccggaaagtgaacttagagagtgagaagggatttggcttgtttatgtttttatttggtggcgtgaatttaaatttgttggccaatcaatgaaagtttaatgtgaattttgtgtgctctntaaataatatttttttttattattttatattttttattttttttttgttt

SEQ ID NO: 212835 - DNA, 416 bp, Gossypium hirsutum
ggtcgccacgcgtccgctcacgcgttggcgagctggatgacactgttgctttcaagaacttcaagaagtggggtaatatcgaattcccaatgccttttggaagagttatgagtgcaaccgaaagctatattcacgggctagacgagaagaccagtgcatcgttgaaatttacggtgttgaaccctaagggacgcatttggacaatggtagctggaggaggtgcaagtgtcatctacgctgatacggttggagatcttggttttgcttctgagctcggaaattatgcagaatacagtggagcacccaacgaagaggaagtattgcagtatgccagagtagttattgattgtgcaaccgcagaccctgatggtcgcaaaagagccctcgtaattggcggaggaatagccaactttact

SEQ ID NO: 212836 - DNA, 298 bp, Gossypium hirsutum
  unsure (1)..(298): unsure at all n locations
tgaagaaaaaacttactgcagtcaggctactcgtttcatcgatgtcaggacagtggaagaagtggagaaaggacatgtggaagcagcnaatattcttaacatcccatacttgttcatcacaccagaaggtagggtgaagaatcctgagttcttgaaggaggtgttatctctctgcaaggaggaagatcgtctcatagtgggctgccaaagtggggcgagatcccttgctgcaaccgctgatctttttaaaattggtcttaagaatgtgcacgacatgggaggaggttatcttgcttgg

SEQ ID NO: 212837 - DNA, 403 bp, Gossypium hirsutum
ctttgaaggaaaagtttgagggtctttttatggtcatcaaggatgtgctgggtgacaaggttgaaaaggttgtggtttctgatcgtgtggttgactcaccttgctgtttagtgactggcgagtatggttggactgcaaacatggagagaatcatgaaggcccaggctttgagggataacagcatggctggttacatgtcaagcaagaagacaatggagatcaacccggagaaccccatcatggaagagctgagaaagagagccgatgcagagaagaatgataaatctgtgaaggaccttgttctccttctcttcgagactgctctcctcacctctggcttcagccttgatgagcctaacacctttggcaacagaatccacaagatgcttgaactcggcttgag

SEQ ID NO: 212838 - DNA, 419 bp, Gossypium hirsutum
agcagcttcaaacgccaccaggtaaggacttactatagagtgagtaacaatggttgagaaaacaagaggaagaaaggaagaggtggtgaccagagagtacaccattaaccttcacaagcgccttcatggctgcacattcaagaagaaagctcccaaggctatcaaggagatcaggaagtttgcagaaaaagccatggggacaaaggatgtgagagttgatgtcaagctgaacaagcacatctggagcagagggatccgaagtgttccgagaaggattagggttcgcatcgctcgcaagagaaatgatgatgaagatgccaaggaggagctgtactctctagtaacggttgctgaaattccagctgaaggattgaagggtttaggcaccaacgtcattgatgacgacgaggaataatttt

SEQ ID NO: 212839 - DNA, 396 bp, Gossypium hirsutum
  unsure (1)..(396): unsure at all n locations
gcgtncgccacgcgttcgaaaaatggttctgctagacaaaatgtgggacgatgtagtagctgggcctcaacctgaacgtggtctcggcaggcttaggaagatcaccacccagcctttgttcatcaaagatgaaggagaaaagaaaaagtaccagaggtcgttgtcgctgccgaatagtccagtgtcaggtccgacacccgtgacaccgacgacttcgacggcgcgtaaggagaacgtgtggaggagtgtgttccatccgggtagcaacctagccaccaaaagtataggttctgatgttttcgacaagccacaacccaactcttctaccgtctatgactggctttacagtggggagaccaggagcaagcatcgctgagagggtggcgactgacaggc

SEQ ID NO: 212840 - DNA, 355 bp, Gossypium hirsutum
catgtattacgtcataagccagctttcatttggttaaacagtgtcacctcacgatttgaatgatggcaagcgaataataccttaccttgggaggagccatgacaagatgaatggtcgggcattcattaatgaccgcgatttagatgcaaatgttactatagagcactacctttaagttgtcaaaacagaggtcgatacaacaaaatcttctgatgaccatagaattatcgaggaatatgagtacacagcgcacagcagtctgtcacatagcgtgtacatacctgatgcgaactttcattctgaggtatctccgatgcacgttgtggtaacagacgactcagaatcgttttcacat

SEQ ID NO: 212841 - DNA, 448 bp, Gossypium hirsutum
gttcaaagaaaatgacgctgttgactttaaaaattgagtgtctcataatatgtttcattgtgttttttgttcattttcgtttggacgtcatttgcttgtcttcatttggttctgacttcttttctgctccgtaagcacccaatctgtttcttatctgcagtccattggttttgttggtcctgcggttgctcttgttggcttaactgcagcaaaaactccttcaactgcatctgcttggcttagtctagctgttggacttaaagcattcagtcattgtggttttcttgtcaaccttcaggagattgctccacattattctggtgttttacacggattgtcaaatactgccggaacattcgctgctattattggaacggttggagctggcttctttgtggagctggtgggatcattccaaggatttttgttgcttacatcgatcttatac

SEQ ID NO: 212842 - DNA, 454 bp, Gossypium hirsutum; identical to SEQ ID NO: 195053

SEQ ID NO: 212843 - DNA, 431 bp, Gossypium hirsutum
gaagatcagctatcggaaaatgtctacgtcaccgtccgtcaccgaactccaggtggagaactttacgttccctccgacggtgaagcctcctggttccaccaaaaccctgttccttggtggagcaggggagagaggattggaaatccaagggaagttcataaagttcaccgcaattggagtttacctggaagatagcgccgtgaattgcctcggcgttaagtggaagggtaagagcgcggtggagttaacggaatccgttgagtttttcagagacgtggttacaggtgattttgagaagttcatacgggtgacaatgatattgccattaacgggtcaacaatactctgagaaagtatcagagaattgcgttgctatttggaaatctcttggaatctacactgatgcagaagcaaaagcccattgaaaattca

SEQ ID NO: 212844 - DNA, 413 bp, Gossypium hirsutum
tgtggagctggtgtagtgaaaggattcgaatgagacagtagatatgagatgttgggtggtggagccaatgttgtgaaccatggctacaccaaaggtgatggtcttggtgctgaaatcattggcacttttgttcttgtctacactgttttctctgctactgatgccaagagaaatgccagagactctcacgttcctattttggctcccctacctatagggtttgcagtgttcttggttcatttggccaccattcccattactggaactggtattaacccaacaaggagtcttggagctgccattatatataacaaagaccatgcatgggatgatcattggattttctgggttggacccttcaatggagctgctcttgctgcaatttaccaccagataatcattagggccatttc

SEQ ID NO: 212845 - DNA, 431 bp, Gossypium hirsutum
atcacaatctggcattaccatggagggtgccatgttgggaaggtggtggaccctaaccacaaagttcttggaaccagaagactccggatcgtggatggctccacatttagtgaatcccctggaactaaccctcaaggcactgtcttgatgatgggcaggtatatgggagtcaagattttgagacgaagactaggcaaagctgctggtgtgtaaggaccggcctttgtttgtggtagtagtgggagtaggaaatgaaatgtgataagtctgtagagaaataggaaatttggtgtttccttttgatttgcgctgtttatttttctgtcatgttgactgtgctctactaatggttggtgccaagattgatgagaagtcaaaaaaaagggaaaaatattttaggacattaggcttagctatgtgtttgcttttga

SEQ ID NO: 212846 - DNA, 443 bp, Gossypium hirsutum
cccttgtattcggaactgcaaaaaccgagttatacaaactggtttgaaagctcacttagaagttttcaagacaagagatcgtggttggggtctacggtcatgggaccctattcgagcaggtacatttatttgtgaatatgcaggtgaagttattgatgaaaccaaggcaaggcaagaaagtggagatggtgaaagcgagtatgtttttcatacgaaccgtctctacgaatccttcaagtataatttcgaagccgaaagtagcgaagatttcgatatcccatctcccgtaatcataagttcaaagaacagtggaaatgtagctagatttatgaaccatagttgcaccccaaatgttttctggcagccagtgatgtatgaacataaccacgaagcgtttctccatattgctttcttcgcaaagaaacacatccctcctatgacag

SEQ ID NO: 212847 - DNA, 439 bp, Gossypium hirsutum
gcagaggcacatggcttcttttcttgctgctattgagaaaggcatcagcaagaagcttagggagaaagatatggaactagagactatgaataacaagaatagggaactggttgagagaataaagcaggtgactgcagaagcacataattggcattatagagcaaaatacaacgagtcggttgttaatgtgttgaagagccaccttcagcaagtaatctcacaaggtgctcaacacgggaaagaaggttttggagatagtgaagttgatgatgcagcctcctatattgatccgaacaactttctcagtattcctcttggggctgcaaaatgtgttttcaagggcatgaaggaacacattatttgcagagcatgcaacgcaaaggaggtgtccatcttgttgatgccatgtaggcacctctgcttatgtaaagactgtgat

SEQ ID NO: 212848 - DNA, 395 bp, Gossypium hirsutum
gagagagagagagagagatgtcgggaggaatagcgcgtggtcgactcgccgaggaacgtaaggcatggaggaagaaccatccccatggttttgttgcgaaaccagagacgttgcctgatggaacggtcaatttgatggtgtggcattgcacgatccctggtaaagcaggaactgattgggagggtggctacttcccgctcacgctccatttcagtgaagattatcccagcaagccttcaaagtgtaaatttccccagggcttttttcacccaaatgtttatccatctggtactgtttgcctttcaatcctaaatgaggatagtggttggagaccagccataactgtgaagcaaattcttattggaattcaagatcttctggatgcttcaaaccct

SEQ ID NO: 212849 - DNA, 419 bp, Gossypium hirsutum
gagaaagtttttggatcagcttctaaattctctgaacaagaaggagatctgggtataggggatgatgttcaaatggaactatatggactccacaaggttgcaacagaagggccttgtcatgaatcacagccataggctttcatggttgcttctcgttccaaatggaatgcttggcaaaagctggggaacatgatttcagacgcggctatagagcagtatgttgcccttgtttcagataaagtttcagagtggacgaaatatacttccgatggtgagcgcaaattagaatctgcagaccaaggcgtagatggttctgtggctcctgatatagattcatttctagataaacatgccatttttattcctgaaaagaatgcagactcgaatactgtttcagctagtggtgtcataactgagag

SEQ ID NO: 212850 - DNA, 407 bp, Gossypium hirsutum
  unsure (1)..(407): unsure at all n locations
cccacgcgttcnctacgcgttcgcccacgcgttcgggaagggatcatagactcggatggtgaagtcatcgcaaggggaaacgtaacgtacaagggtaatcaaaagccacttatggcctatgataaggtgcaaataactgtggatcaaggtttggctactctctttgcacctaaatagagacattgttttgatcttcaaagtttcatatgatgatggtcgcgggtccttttacgacttaagaatccaaaccgatctgattgaatcgatcgaatgcctctcgtttcataatcagtttcaatttaaacaatggaaatttcagtgtagccttcaatattttaactaataatcgcaccccatatatcaaccttactccggctgtcaatttgtattaatattaatggtgattc

SEQ ID NO: 212851 - DNA, 347 bp, Gossypium hirsutum
ggcgatgtcgggagtttcagtgccattcatgagagcaatattggacggctatgatgggttgaaaggcgtgaagagattagttgatgtgggaggcagcgcgggggattgcctccgaatgattttgcagaaatatccccatgttgagggaatcaactttgatttgcctgaggtcgttgccaaagcacctagtattccgggcgtgactcacgttgggggtgacatgtttgagtcgattccagtagctgatgcaatcttcatgaagtgggtgttgacaacatggacagatgatgaatgtaaggcgataatggagaactgctacaaggcactttctgtgggagggaaattga

SEQ ID NO: 212852 - DNA, 367 bp, Gossypium hirsutum
  unsure (1)..(367): unsure at all n locations
cgcgtccgatttcataaaaaccccaaatttctaagaactctcttgattcttctttggtttaatagatggaatggagaccaagtctcgcactctagagatcacggttttatcagcagaagacctgagaagcgacaacaaaccggtgaaaaagaacgcctacgtcgtcgtttcggtcgaccctttcaacaacaaggcgaccaaggtcgacggagaaggaggcagctacccttcgtggaacgacaagctggtgatggaaatgccgttacagacgcggtttgtaaccctcctagtcaaatgcaaggggtccagaggggaaaaaacggtggggttagcgaggataccggtgatggatntcgtcggagggtat

SEQ ID NO: 212853 - DNA, 348 bp, Gossypium hirsutum
ctcgaggttgatctctacagcattgaacctgtcagcaccgtaactgttaaatggagtggagagccagtcttcatcaggcgccgaactgacgaggatatcaagttagcgaacagtgttgatctagggtctcttcgtgatccacaggaggatgcagcaagggttaagaatccagagtggttaattgttgttggggtttgcacacatctgggttgcattaccttgccaaatgctggtgattatggcggatggttttgcccttgccatggttcccattaagaagactctagcaagagtcccaagggtccggcaccatacaacctggaaagtcccacttacaccttcttggat

SEQ ID NO: 212854 - DNA, 276 bp, Gossypium hirsutum
acccttatggtgcctggtccaccgagacccacctagttccctgtgtgtgggcactccaagctgtgcaacatgattgcctctgcagcactctcaggattgctgctcaacttccttctcaatgcaatctcccacctctctattgtgccacctgacatatatgcatgcatgcaagcaaactggtagaatatatatatattttatttttcttttgtaacgtgtggcatcatatgtgacaaagcaaatgcaatggagatcaaagttataattagtacttgg

SEQ ID NO: 212855 - DNA, 288 bp, Gossypium hirsutum
  unsure (1)..(288): unsure at all n locations
gaccgacccgcgcgaaaggaaggaaaaaggaaaatccaggggcttagatctaatcgggggagncctgatcttatctccggaccacgtgaaacagggaggatgtatgaagcaaatgttgatgatgtggggtacaggttggttgctatttatactccggtcagggaggatggcattgagggacaacctgtttctgcatcaactgagccaattgcagtcgagcatgatgtttataaagaagtaaaacagaagcttgatattggatctgtaaagtttgaggtattatgtgac

SEQ ID NO: 212856 - DNA, 448 bp, Gossypium hirsutum
cccacgcgtccgccgtcttcttcattttactatacgtgcgcatggtacgaaccctgactcgagccacggcttcaaagactgacagcggtccccggaagccgcgtggcataatgaagccccgccctgtgtcgcctgagatgcaagctctcgtgggagtcccggaaatccctcgaactgaagttcttaagcagatttgggcttatattaaagagcacaatcttcaggaccccaataacaagaggtttataatttgcgttgacaagctgaagaagatattttgaggcatatatcgggtcgaatttcttgaatatggtcgggtttgattattccttattttcttttatggattttatagtatgctatagtgtgtaattttatgtttcgatttatgtcatattacttttgttttattgtatcctattttttttatgttgttattttttttttt

SEQ ID NO: 212857 - DNA, 388 bp, Gossypium hirsutum
cttgtcttaaacactaaacacctttgcgctttctcacacttttcctcttacgcataaggctgctctaactcagacacctccattgttacctcaacctcagcttttagctttagtttctcccttcgttaccctaatttgttctcatcaaccatggctgctactttactgttttcactgctcattcttgccatcactgcaggccactcaagtggtgcgacgggcaaatggtgtgtttgcaaagatggtgtgggtgatggaaacttgcagaagacgttggactatgcttgtggaaacggtgctgactgtaaccctatccgttcaaatggacctttgtacaaccccaacactgttaaagcacattgcaattatgctggtaacagctattttc

SEQ ID NO: 212858 - DNA, 420 bp, Gossypium hirsutum
cccacgcgtccgctcaaatcacttgtatctctcagttcccgatccgctgccgtagcactacttgtgttggtggtttcagtggcagtgcagacccatactacaaatgcacaaagctgcccgaccgagctgacgagcctgaacgtgtgcgcacctttcgtggtgcccggtgcagctgtggctaaccctagcattgactgctgtaacgcactccaatcggtgcaccatgattgcctttgcagcactctaaggatcgcttctcgactcccttctcaatgcaatcttccaccactcacttgtgcttgaaacaaaaacaatggtgctgcctgcttaatgggtaggaaaatataataacgccatggaatatcgatacctccctgtttttttctttcttttttaatgggtaataataagcaatggtgg

SEQ ID NO: 212859 - DNA, 373 bp, Gossypium hirsutum
gcgtcgcgtgcactgttagaatatgaaaagtataagagagagaatggtgagattcaacttcctgcttcttcactccctcatgcaagtggtgaaaaggagtcaagtggtttcctagccttggggtcaggtagggcacgcatggatgctgccgctcgtgccatgcaaggttggcatgctcaacgttctgttggatatggtgagattaccgagcccattgtgaaggagaaaatcatgggttctgcttcaaaacgtgaaagacatctaaaagtattggttggcaaacagaaatgccatagcgcaagttgataatctgcacatgataagcaactgattactgaaattgttgatgttggaacccctgctgattggggtg

SEQ ID NO: 212860 - DNA, 404 bp, Gossypium hirsutum
attttgttttctctccctccaattaagatgcagatcttcgttaagaccctgaccggcaagaccatcaccctcgaagtcgagagttccgacacgatcgacaacgttaaggcgaaaatccaagacaaggaagggatcccaccagaccaacaacgtctcatcttcgccggaaaacagctcgaagatggccggaccttggccgattacaacatccagaaggagtccaccctccatctcgtcctccgtctacgtggtggcatgcagatcttcgtcaaaaccctgaccggcaagaccataactttggaagtcgaaagctctgacaccattgacaacgtctaggcaaagatccaagacaaggaaggcattccaccagaccagcaaaggctcatatttgccgggaaacaact

SEQ ID NO: 212861 - DNA, 395 bp, Gossypium hirsutum
  unsure (1)..(395): unsure at all n locations
ggaaggtgaagaatgatcaactcaaggcagaggctaaagcaaagggtgaggtcattaccacaaaaaggcagtcagaaagggcctagacctggtttcatggtggatggtgctacacttgaaactgttacgcccatcccatacgatgtcgttaatgatctcaagggcggntactaaatctactctgtttnttgtttgcggtatttgtttggtttccttttttttttttggcaaaacatcagtggtgaactgaattaaacatttggaagtgctgttttctttagtatattttgaagaggtactgaatcttcagagattttaaatgtatgatatcattttagaagatatggatatgcctatgataaagtgtaatatttggttttaaaaataaatttata

SEQ ID NO: 212862 - DNA, 411 bp, Gossypium hirsutum
aaatggacctaaaaacgatgagattatagttgatcacagggtctcttttgaattgagcggcgaagatgttgcacgctgtctgaaaaacaaatcattggtatcaagcagaaccatgccggattatgaatatccaaaggacttggtggcgcaaggcaggatagaaaaagatgaaaaggtttcaggagaagctgaagaggaccattgttatcaaaagcatcgttcagttactcttgggtcaattaaagaattcaactttgacaacagaaaaggagaagcttccgagaagcccaccgtcaggtccgagtggtgggctaacgaaaaggttgccggaaaggaagctaggccaggtaacaattgtactttcttccctatgttacagccggaggtcagttgattttttaactatgcaac

SEQ ID NO: 212863 - DNA, 419 bp, Gossypium hirsutum
  unsure (1)..(419): unsure at all n locations
gctacttacatacggccggagaatcccgtatgctgaattatttgctaggatcgatgctgttgatccagccgccattaaacgagttgcaaaccgatttttctatgatagggatatggtgattgctgcgattggcccagtccaagatttgccagactacaactggttcagacgccgcacctactggaaccgatagtagattatcttgctttagtttgataatggtacagcatctttcgtgggcaatcgaaaccaaaggttggcattttttttattcaatttttaggatcctttagctntattgttatttaataaaaacatgtttcagcgtttttgttgaaaattacaagaaatttttgatgttgataatgtttgggttgcatttgtatatttggatcttacctctaaatggcatttttttc

SEQ ID NO: 212864 - DNA, 411 bp, Gossypium hirsutum
cccacgcgttcgcccacgcgttcgcccacgcgttcgactggatcctgaggcatggcaaaagcatcccaaacgagaaaggtcttattgtttcttcattggaaaatggcattcgccttgaataccaattagcatctgaaggtgttgagcaggctgagttggctggaaagttattcctcaaggaactgaaggaaaatgacataccacttgaaaatgtgcgcatgtgttactcaccatttgcaaggacaagacatacggcagaggttgttgcatccactttgaatcttccatttgagggccctcaatgcaaggtcatggaagatcttcgagaacgttactttggtccttcgtttgaacttctgtctcatgacaaatatacagatatatgggcaatggatgaaaaagatccattca

SEQ ID NO: 212865 - DNA, 411 bp, Gossypium hirsutum
  unsure (1)..(411): unsure at all n locations
tcttatatgacatcttctgggtttttgtttcaaagaagttgttccatgaaagcgtgatgatcgtggttgctcgtggtgataaaagtgggcaggacggaattccgatgttactgaagatcccacgaatgtttgatccatggggtggttatagcataataggatttggtgatatccttttacctggattgcttgtagcattttcactcaggtatgattggctggcaaacaagtctcttcgagctggctactttgtttgggcaatgattgcttatggcttangtcttcttgttacgtacgttgcactaaatttgatggatggacatggtcaaccagcactcctttacatttgtccctttacacttggaaccttttgaccctaggagaaagagaggtgatctagaaattctctga

SEQ ID NO: 212866 - DNA, 421 bp, Gossypium hirsutum
  unsure (1)..(421): unsure at all n locations
gctacaactgcaagaatggaaaggtataaaattttggaggagcttggagatggtacatgtggtagtgtgttcaaagccttcaatatagaaacatttgagattacggagaaagcatttctcaaacaacccaaggtgtttttaagaatgtgaaaagccaatgaagcaaggagttctcactcctggacgtgttcgtcttttgcttcacaaaggtctgtggactttgaaatatttttcagaggtattaatttttctctttttcttttcttctttgctgagtttttgaattcttcctgtcttttcttttctgtgaatctgatggaatgcaagtggtattggtcatgtaattacgattagaaatatntcttgtgaatnggatattgaggtgatttttctctggttttttatagctgaaagtttggat

SEQ ID NO: 212867 - DNA, 414 bp, Gossypium hirsutum
caaaaatatcttcactgttcgtttgttccttgtttgaaaatcgcagtaagccattcccaaaaattttggtgcatgatatttgtgatccaagacagatttaataactgccagacttcggtgcttataggacattgcctgaagatgtgataacaatcttcttccctgtagctacaacaagggcaactggcatttttcactattcttctacatctgagattacccaaagtaggaatgtaattccaagagatgcaccagattatgattgtaatcttagatggtagctgtaggatccatagctttccaaaaaatttcttaatttcgggttgtaataaataattactaggatccagattagcattgtgtaatagtttataggcactacgaactgagtattcaccagtcggttcgcccttt

SEQ ID NO: 212868 - DNA, 422 bp, Gossypium hirsutum
ggttacctctaagagttatagctcttgcaaggtatggttagttggagatgacttgaccgaagaagagcaaagaaaggcaaataaaggaacactatttattcccttttcgcaacttccaccaaaaaaattgcgcaaggactgcttctatcacacaacaccagcgatgcatactccgacggcccttgagaatgtggattcttgcgagaactggttgccaaggagagtgatgagcgtatggcgcatagctgggatactgcatgctctggaaggatgggaagagcacgaatgtggttacaccatgtctaacattgacaaagtttgggaagcatgtctcaagcatggatttcagcctctgaaggtcccaactcaatcaaagtcctagaagatatttggcgatttatctaattaatctacttgatatc

SEQ ID NO: 212869 - DNA, 372 bp, Gossypium hirsutum
  unsure (1)..(372): unsure at all n locations
tcgtccacgcgtncgcgggataaaaagaatgcttccatcagagggggaggaattgcaattttttaataacatttacgagttagtaggagtgccagttgttaccgtgcaacttagatacaacggctgggtgacagagttgcgggatctggagcagtcaaagttgtccttaaactcattaaaaggaaactgaggcaagctgttggccttgataatctcctgtacactccggatgcagatttctcctgctttgcagacttagctctcacttctccagaagattactacatcgagggacaaggttcattgctccaatgtgtcttgacaccaggtgacccttacatgccattgccgaatgatgaaatcataaagaga

SEQ ID NO: 212870 - DNA, 408 bp, Gossypium hirsutum
  unsure (1)..(408): unsure at all n locations
ccacgcgttcgccagaaaccgagtttcgacctcccatgtctgaggttgtgcaagctttagtgaggttagtgcaaagagcaagcgtggtcaaaaggagatcgagtgatgaatgcggattttcatatagaactccagatcatgagattatcgacttgtcattttgagtgagttgaaaccagaagagaatcaaactcaagaaatggaaaaaaggaaaaagtgaaaggaaaaagaggttctgtaattatatctcacattgtcagaaagttcatagtttacactgcaaatatatagctgtattattggaacattatgatgcatattcacgttttgcatcttcttaataataattaaaaaaaggttttactttatnaaaaaaaannnnnannnaaaaaaaaaaaaaaaataaaa

SEQ ID NO: 212871 - DNA, 425 bp, Gossypium hirsutum
gtggatattcgcttatctcccaacctcacttttttcgctaggataaactacgatttactcggttcgacttatctcccgatctcgcctcccttatgataacttcctaatgttgtcaagcctagggtttaggaacgtttaatctataccaactaatcctattatgaactcttgttcttttgttaattaactgacgtaataaattaattagttcaataaacaaatcatgcacgatatgaataaagtgctagatttattctaacattcatacaaatattagttgatcatgctaacgaaatataaataaaagaataaaatagaagagtaaagagaatgctcatgaatatatattggctcgtatcgctgatcatccatttttgttcaagctcttccattaaagcttggaatgattatttttgcagggggga

SEQ ID NO: 212872 - DNA, 411 bp, Gossypium hirsutum
atttagcagcaataggaattctcaatatgaaatgtcatggactgatgcctcctgcacgataacaatggactgaagctctttaccgctgtgaaagcattgtaaaacagggaatgctacattcacgtggtgaattacttctaatgctagatgccgatggggcttccaaggttactgacctagaaaaacttgaaaaccaggtttgtaaaagactctgaccacagtcactgaagacatactgtgtgataaaaattatctaattttttgtacttcagatccatgcaattgtgagaaaagattatcaccctggtgattcagtagccggagaggcaacttttagaatttctgatatcccaatagttgcatttggatctcgtgcccatcatgaggagaaagctctagctacgaggaagt

SEQ ID NO: 212873 - DNA, 421 bp, Gossypium hirsutum
gtcctatcttaaaggagctgctgaaatgtttgaaaacggagttctagctgttgtggatgtgaagtttttagctgacgttcatattcgagctttcgaagattcatctaccatcggacgatacttttgcttcaatcaaatagtgcatactgaggaagaagctgttaaacttgtagaaaccctgagccctttgttatcttcacaacccaagtgagtctattgtaactctgttattgtcattaaaaagaaaataaaaatagtgacgtcctcaatttatcatgcctcttaaatgcagatatgaatgccaagggagcgaggcctatgctgagaggttgagaaccaagaaattgaacatattggttgaaggcactgcataattgtgaaacttgattttacctttttttcctatcgattatagcttctt

SEQ ID NO: 212874 - DNA, 422 bp, Gossypium hirsutum
cccacgcgtccggttcctttgaaccttcaaaatagacctgcttggtacaaggaaaaagtttaccctgaaaacaaggtgccgtccttggaacataatggcaaagtcattggggagagtcttgatttgattaaatatgttgatagcaacttcgaagggccgtctcttctacctgatgatgctgacaaaaaggagtactttaagacgttgttatcacacatggacgaatttccagggatggtgtatgctacatttaaaggagactcaacaaaggatgctgatgctgcttttgatctcttggaaactgctcttgcaaaatatgatggtccattccttctatgcaacgagtttactctggcggacattgccttcattccttttgtcgaaaggttccagatctacttatcagaggtgtttaattatga

SEQ ID NO: 212875 - DNA, 348 bp, Gossypium hirsutum
cggacgcgtgggttcggaactcgggtttactcccacttcagctcgctccaaggtaatggtgaaggacagcactgtattggcacagggtgccgtgggggttgctgttgccgccgcagtggtgatcctaagctacttttacgaggtccgcaaaagaatgaagtgaaagccatattactcttttctataacagaacatccgttacaaatttagcagaacttaggtcaatcatctggctaatagttatgtagttcatgttttctcctacatgatatcgggtcctacaaaccgtattggcagttaaagatcgacacaatactcttagctcatctatttgaagtaaataacatg

SEQ ID NO: 212876 - DNA, 386 bp, Gossypium hirsutum
tctagatcgcgagcggccgccccacgcgtccgatctgaaaccgcatgttgcaatcttggacggcataacaatgggatgtggaggtggaatatctctccctgggatgtttcatttagtgaccgataaaactgtttttgctcatccagaggctcaattggggttccatcctgattcaggggcttcattttatctttctcgcctacctggttacttaggggaatgcttagctctaacgggagaaaaattgaatggtgtcgaaatgattgcctgtggcctggctacccattattgcttaaatgctcgactttcttgggtcgaagaatgccttggtaacatgatgaatgatgatcccactgtcatagaatcttctcttgcacaatatggtg

SEQ ID NO: 212877 - DNA, 410 bp, Gossypium hirsutum
cccacgcgtccgcggacgcgtgggtggtgatttacctagctctggtcaggtctttgcagttcctgttgctccaggagatgttatcattgctggcacagatggactgttcgataacttgtacaataacgaaattactgcagtggtggttcatgcagtgagagctggtttggggcctcaagtgactgctcagaagatagcagcattggcaaggcaacgagcacaggatagagaccgacaaacacctttctccactgctgctcaagatgctggattccgttattatggtggaaagcttgatgacattactgttgttgtgtcatacattaccagctccgaagaaaagaacaagtctagatgaaattagtgaagctggtatggcctgggatccaaatttcggttataagttgatc

SEQ ID NO: 212878 - DNA, 425 bp, Gossypium hirsutum
caaaaaccctagggttctagccatttgcttcttcttctttttcactgtaggctttctgttctaaatgctattgcttttatatccaaaattcaacctttcaaaagtagtaacttaaaagaaaacaagatttggtaaaagctagaaactgaaaggcaatggagggtagattggcgaattcttggcgattgacagtgaacgacaagaatttcatcaaaactgcgttgctttctgaaattcgaatcgatggtcgaaagccctttgaattccgtaagatttcaatcaagtttggcagagaggatgggtcatcagaggtgcagctaggccagactcgtgttatgggaatggttactgctcaattggttcaaccttatagagaccggcctaaggaagggattctttcaatcttcacaagattttctccaatg

SEQ ID NO: 212879 - DNA, 423 bp, Gossypium hirsutum
atttatctcttgactgatcagaacccaattcaagtcattgttgatgctattatcaacagtgggccacgtgaagatgctactcgaattggttctgctggtgttgtcaggcgtcaggctgttgatatttctcctcttcgtcgcgtgaatcaggccatctatcttttgaccactggtgcacgtgagtctgcattcaggaacattaaaacaattgcagagtgtttggctgatgagcttattaatgctgctaagggatcatctaacagctatgccatcaagaagaaggatgaaattgagagagttgctaaggctaatcgttgaggaattggaagaagattaaacaccatgggagtagaattttgttgttttagtcagtactttataagccgtttttgtattctggacatgctatgaatgtctcgtttt

SEQ ID NO: 212880 - DNA, 382 bp, Gossypium hirsutum
atcgaattaaagtagaatcagaagcaaaaatcgccgcggaaaacaagatgtcggggcagcaagaagaagataagaaacccggcgatcagtccgccgctcacatcaacctcaaagtcaaaggccaggacgggaatgaagtcttcttcaggatcaaaagaagcacacaattgaagaagctcatgaatgcatattgcgaccgacaatctgtggatttcaactcgattgccttcttgttcgatggtcgccgcctgcgaggtgagcaaactccggacgagcttgagatggaggatggtgatgagatcgatgctatgcttcaccaaaccggtggtactgtgtgaagcgagtactactttgccgcatttagtatctgatgaggtagtta

SEQ ID NO: 212881 - DNA, 323 bp, Gossypium hirsutum
aatgtttgaaggatgctaaaatggacaagagcacttgccatgatgttgttcttgttggtggttccactagaattccaaaggtccaacaacttttacaagatttcttcaatgggaaggagctttgcaagagcatcaaccctgatgaggccgttgcatgtggtgctgcagtccaagctgctatattgagtggtgaaggtaatgagaaagtgcaagatctcttgctcttggatgtcactccattgtcttccggtttggaaaccgctggtggtgttatgaccgttttgattcaaagaacaccaccattccaaccaaaaaagaacaag

SEQ ID NO: 212882 - DNA, 406 bp, Gossypium hirsutum
gttctctgctatttcttttaaaattttcaggatgcaacaagcaattccatacaaatcctggcctctgccatgcatcgacgcaacttcccatcgtgcccgttcaacaacaacacttggccacaacggacgcgggaaagacgtgcttaatatagtgtcggagaacgcggtgatagtgttggccaggaagggttgttgtatgagccatgtagtgaggcgtttgctgctgacactgggcgtaaaccctgcggttcatgagattgatgaggaggatgaggctggtgttttgaatgaattggggacgatttgcaaaggtaccgaaaacaataaaatggttcagcttccggctgtgtttataggtgggaggttgttggggggattggataaagcatggctacgcatattaacg

SEQ ID NO: 212883 - DNA, 384 bp, Gossypium hirsutum
aggctagccactgattttattgctgaacctttgggttacacaaacaaaattcgacctttccttaacaagagattgagaccagttgatatcttgcatggtgttagtttcgcatcagctgcttctggttatgatgagctcactgccaatctctcacatgtcctgccggtttccaagcagctagagtatttcagggaatataagatgcggctgaggcaactggttggagcgaggaaagcagaaaatattataaaaaatgcggtagctgtgatgagtatgggcacaaatgactttcttcaaaactactatttagaacccattcgccccaagcagtatactttggaagagtaccaaaattacttggcttcttgcatgtctgacgatgtt

SEQ ID NO: 212884 - DNA, 421 bp, Gossypium hirsutum
cccacgcgtccggacccacgcgtccgcccacgcgtccgggggattgctggagttccgttcgattcagtgatgaagaaaacaaagacattagaagacaattgggtgccttgttggaacgaggaattcgaattccatctaactgtcccagaactggctctacttcgggtagaagtgcatgaatacgacatgtctgaaaaggatgactttggaggccaaacatgcctaccaatttcggagctaagaagtggtatccgagcagttcccctcaacagccgcaagggcgagaagtacagctctgtaaagctcctcatgcgcttcgaattcatcgatccataggcacccaaagttgagttctgggccatactttcaaaccaaccttcaatctgtttgacgggatgtgagcttgtgtgcaagtttacct

SEQ ID NO: 212885 - DNA, 320 bp, Gossypium hirsutum
  unsure (1)..(320): unsure at all n locations
atgtggtatcgtgtgacagctcaaaaagatacaaaaaaaacccgcctgtcaacattggtgcaaaaaaatgggtggatattggactttggaaactctcccaaagagtgtttcaaaatcttaaaatcacgtggttatcggattgctacaacacacgtaggaatggatgccgtatccatatacgacatggattggtcaaagccaactgcaattgtagttgggaatgaaaataggggaataagtgatgaggcgctggaactgtcaaatttgcattgtagtattccgatgaaaggcatggntgactcttttaatgtttcaatggc

SEQ ID NO: 212886 - DNA, 367 bp, Gossypium hirsutum
gaaatgagaaggttcaggatctattgcttttggatgtcactcctttgtcccttggactcgaaactgctggtggtgttatgactgttttgattccgagaaacactaccattcccaccaagaaggagcaggtgttttcaacttactctgataaccaacccggtgtcttgatccaagtttatgagggtgagagagctcgaacccgggacaataatttgttgggtaaattcgagctctctggcattccaccagcacccagaggcgttccccaaattacagtttgcttcgacattgatgctaatggcatcttgaatgtctttgccgaggacaagactactggccagatgaacatgattaccattacaaatga

SEQ ID NO: 212887 - DNA, 393 bp, Gossypium hirsutum
gaaggtatactcaagcctgtgggatgcagatgaatgggcgacaagaggcgggctggtgaaaaccgattggtcgaaagctcctttcaaggcgtattataggaattttaatgcctattcatggaactccgtcggaaccgatgtttggcgaactcgggcactggatgctactggaagaagatggctccgatgggcacagaaataccacatggtttacaattattgtgctgatttgaagcgatttcctcatggtcgtccctttagtgtaggcgctctaggttcctttaaccgcccaaaaagaatgttgcttcaatctaggatttaattttgtctattgctactgtaaatttgttctatttatgggttaaatttggaaattcacccattttatttttt

SEQ ID NO: 212888 - DNA, 418 bp, Gossypium hirsutum
agattagtgaaaagaaggtatcgactcctattgaggttctttgtaagtcatatccgtctgagtttgtgtcttattttcatcactgccgatctttgcggtttgaagataaacctgattattcatatttgaagaggcttttccgagacttgtttataagagaaggttatcagtttgactatgtctttgactggactgtattgaagtacccaaagattggtggcagctccagagggcggcattccagtggaagggcaggtttagctgctggaccaaccattgaaaaacccgaaagaatctcagtgggaagagagattcgggatagattctccggtgctgttgaagcattttccaaaagaaatatttcaagttccagtccctatcttgatcattctagacacaagactgttgatgatggggc

SEQ ID NO: 212889 - DNA, 423 bp, Gossypium hirsutum
  unsure (1)..(423): unsure at all n locations
attgtcgatgaatatccccggatctgattcttctgcaggtgatgctcaaatgtctgaggcaactaatgacgaccaggaattcgccttggcacttcagatgtccatgcaggatggatcaaaagattcgtcagctcaatcagatgtcagcaaggtgttgggggatcagtattttatgtcatccattctttcatcgcttccgggagttgacccgaacgatccaaaagtaaaagatttgctagcatctttgcccagccaatctgagccgcaagaaaagaaagaagaagatgaacaacccaaagatgacaagtgaagatctacattccttctaacaatcgatgtgtgagccgatttctagccgagttaagttcttttttctccagagactngagaaatgtgtcaaaactgtgctgaattgtgggctcg

SEQ ID NO: 212890 - DNA, 264 bp, Gossypium hirsutum
  unsure (1)..(264): unsure at all n locations
cgatatctgaagatcattgaaaaaaagggctaccaggctcttccatgggtacgatatatcacaatggcaggcgagtatgaactaagacttatttaatgccaattcctttaatattgagagatccagttcacctcatttttcgagagttagaatggacataaggatacaaggaaagcggttgataaacaaaagcccttgtgaagagcatgaaagagtggttcctnctaaaaaaaaaaaagcacttttctgcttcgtatttataat

SEQ ID NO: 212891 - DNA, 414 bp, Gossypium hirsutum
gtttattattaggtgttatgaggtggggattaacaaaactgccactattgaaaccattgctaatctcttgcaggaggttggaggtaaccatgctcaaaatgttggattttcaagagatgggtttgctaccagtcccactatgcgaaaattgcatctcatatgggtgaccgcacgcatgcatattgaagtatacaagtaccctgcttggagtgacgtgatcgaaatagaaacgtggtgccaaaacgagggaagaatcggaaccagaagggattggatcctaaaggatgtcgctactggtgaagttataggaagagctacaagcaagtgggtgatgatgaacgaggacacgagacggttgcagaaagttagcgatgatgtcaaagaagaatatcttgtcttctgtccacgagaacc

SEQ ID NO: 212892 - DNA, 405 bp, Gossypium hirsutum
  unsure (1)..(405): unsure at all n locations
ggtggatgcagttcggtaatgactatgtgttgggttattggccttccttcttattctcctacttggcggacagtgcttcgatgatcgagtggngaggtgaggttgtgaattcagaaccagatggacatcacacttccactcatatgggcagtggccgtttccccgaagaaggttttggcaaatctagttatttcaggaacatacaggttgttgatgactccaataatctcaaggctcccaaagggcttggcacctttacagaacaatcaaactgctatgatgtacaaacagggagcaacggtgattgtggccattacttttattatgggggccctggtaaaaaacccaattgtccttaagagcaagagggaaaagcacctttttctttttggcggtgtgttttct

SEQ ID NO: 212893 - DNA, 426 bp, Gossypium hirsutum
gctgaactcaaccctcacctttcagactcgggcttggcgacgtttattccaaatgcagatgaggtactaaatcgtgacgatgtggggtctggacacagtgcacctgaggttactatgtccggacagtactctcttaagagtgatgtttatggttttggagtggttatgttggaacttctcactggacgtaagccatttgacagcacaaggcctagactggagcaatctttggttcgatgggcaacacctcaactccatgatatcgatgctctatccaagatggttgacccggcacttaaagggctttaccccgttaaatctctctcacgttttgccgatgtgatcgctctttgtgtccagcccgagcctgagtttcggccacccatgtcagaagtttttgaagcattggttcgactagtgcagcga

SEQ ID NO: 212894 - DNA, 420 bp, Gossypium hirsutum
cggacgcgtgggcggacgcgtgggcggacgcgtgggcggacgcgtgggaaagaagttgaaacatttgaatttaagaccgtcttcgtaacaagaattactcccatctgatcctgaaccaccaggcctgccatcgatttgaaatcccttcggttaaaagtagcatcaaagtgaatcgtcatcccagaactcgtatctctctgaatggccctcgtagtcgtacacaaggacccatatgccacagcatagcaatcgaccttttgagagttctcttttggaacatccaagtaagccagccccagaacctctgaaccaaaaagttattaacccaaggaagatctaacattttccaaacttctattactacatgacagttccgaaagacatgtgataaatcttcttccccagatctacatcgagaac

SEQ ID NO: 212895 - DNA, 421 bp, Gossypium hirsutum
gttgattaatgggttgtgtggtgaagggagaattgaagaggcggctaagttgaaggatgagatggataattcaaaagtgttaccagatgttgttacttataatacattgattgatggatattttaaacatgggagtagtgaggagggctttaggttggttgaggaaatgagggagaaagggatggagctgaatgcagttactaacaatattttggttaaatggtactgcaaagaatggaagatggatgaaacgagtgaaagagttaggatgatggaggaaagtgggtttccaccggataaggttacctacaattctctgattaatggatattgcaaggctgggaaattgggtgaagcttttgagatgatggatttgatgggaaggaaaggttttaagatggatactatcacacttaatacc

SEQ ID NO: 212896 - DNA, 421 bp, Gossypium hirsutum
gggaccgtggtccaggaccctgaattaggacaggtgattcaacttcaaggtgaccagcgtaagaatgtatcaaccttccttgttcaggctggcatagtgaagaaggaaaacatcaaaatccacggtttctaagcctgcgcggtggaagcaggaaatactatctgattaggacatatcttatgttggttggatgacaaagtatgcatgttgtgttacatgtgctttccagttcagtggatgattatgatatgtttggaagtttgtttggctatgttgcttatgttagacctttatatgtgttgaaatattctgtggtttggtgcttattttggcaattagtatgggtgaagaaaaatgagatatagtaattagagatgtaattagccgagctggatctctacaatcacaaagctgatactgg

SEQ ID NO: 212897 - DNA, 410 bp, Gossypium hirsutum
cccacgcgtccgcttgaaccatttgctaagaaggcttcttttagggctgccattgactatatagtttctgagagaagtgatgttttcatgccatcccatggtggaaatatgggccacgctattcagggacagagagcgttttcaggacacaaaaagtatataactccaaataaaagacatatgcttccttattttctgaactcctcaatgcccgaagcagagttcaacaggatcataaaagaattacaccatgaatctttgggacaaccagaactcatgaccagcaaagctggaagggatgtaaccaagtatccggttccagaatgtatgtgcaatgatgcacattcccacttcatttgatacagaaagcttccaacccgatagctaacattgcaagagtcttcatcgag

SEQ ID NO: 212898 - DNA, 390 bp, Gossypium hirsutum
cccacgcgtccgggaaaattgcttgaaggttaccaatggagtggatcatgttttcaaccttgccgctgatatgggtggcatgggcttcatccagtccaaccactctgtcattatgtacaacaacacaatgatcagtttcaacatgctcgaggctgctcgaatcagtggagttaagaggtttttttacgcctccagtgcttgtatctatcctgaatttaagcaattggaaactaatgtgagcttgaaagaatccgatgcctggcctgctgagccacaagatgcttacggcttggagaagcttgcaacagaggagttgtgcaagcattacaccaaagactttggaattgaatgtcgcattggaaggttccacaacatttacggcccttttgg

SEQ ID NO: 212899 - DNA, 369 bp, Gossypium hirsutum
ccgaaagttggctgtgaacctgatcccgttcccacgtcttcacttctttatggttggttttgcaccacttacatctcgtggttctcagcagtacgtttctctcactgtcccagagctaactcagcagatgtgggatgcgaagaacatgatgtgtgctgctgaccctcgccatggtcgctacctgacagcgtcagccatgttccgaggcaagatgagcaccaaagaggttgatgaacagatgatgaatgtccagaacaagaattcatcttacttcgtggagtggattcccaataatgtgaaatccagtgtttgtgatatcccaccaaagggtctgaagatgtcctctactttcatagggaactccacgtc

SEQ ID NO: 212900 - DNA, 410 bp, Gossypium hirsutum
gttaagtcaaggcttaaacaattttcaatgatgaacagattcaaaagaaaagccctacgggttattgctgagttcttatctgttgaagaagttgaagatatcaaagttatgttcaataaaatggacactgacaatgatggcattgtttcggtcgaagagctgaaagccggatttaaaaattatggttcacagcttgcagagcctgaagtgcagatgctcattgaagctgttgatgctaatgggaagggaacattggactatggggaatttcttgctgtttctctccatctgcaaagaatggccaatgatgagcatcttcggaaggccttttcttactttgataaagatggcaatggttttattgagcccgatgagcttcgggatgcattgatggaggatggagcaaatga

SEQ ID NO: 212901 - DNA, 337 bp, Gossypium hirsutum
cccacgcgtccggacccacgcgtccgcctgcatccaagacgttggctgaaaaggcagcttggaaatttgctgaagaaaacaacattgatctcattacagttatcccttctctcatgactggtccttccctcaccccaattgtccccagcagcataggccttgctacatctttgatttcaggcaatgaattcctcataaatgctttgaaaggaatgcagatgctgtcaggttcgatctctatcacacatgtggaagacgtatgccgagcccatgtttttctggctgaaaaagaatctgcatcgggtcgatatatatgcagtgctgtcaataccagtgt

SEQ ID NO: 212902 - DNA, 371 bp, Gossypium hirsutum
ccggaatggtacagctgttgctagtacgccaaaggcatcaattactcatgatcagccggttttgtgctcaacctggaaggatgatgggatgacagtcttttctggaggctgtgacaagcaggtcaaaatgtggcctttattatctggtggtcaaccaatgacagttgccatgcatgatgcccctattaaagaagttgcttggatcccagaaatgaacctgttagctacaggaagctgggacaagacattaaaatattgggatacaaggcagtcaaacccagtgcatactcaacaacttcctgatcgctgctatgcactcacagtgaaatatccattgatggttgttggtactgcagataggaatctgatag

SEQ ID NO: 212903 - DNA, 397 bp, Gossypium hirsutum
  unsure (1)..(397): unsure at all n locations
cccacgcgtccgggccccgacttcgaatcatgccttacggattacggtctcacgttattccgagaccccgagtcaccagaagagctaggtgccgccacttttttctatagggcacccgaatgtcgggacatccgaaaatcatcgactcaaccggccgatgtttatagcttcggagttctcctacttgaactcctaacgggcaaaacacccttccaagaccttgttcaagaacacggctcggatatccctcaatgggtaagatcggttcgagaggaagagaccgaatccggggacgaacctacgtcaggtaacgaaacgtccgaggggaagcttcaatcccttttgaacatagcaatggcttgcattgcccngcgcccgagaaccgtccatgatgcgg

SEQ ID NO: 212904 - DNA, 389 bp, Gossypium hirsutum
atcgggggtcgaccagcttgttgagattattaaggtcttgggcactccaacccgagaagaaattaagtgcatgaatcctaattatacagagttcaaattccctcagattaaggctcacccatggcacaagatattccacaggcgtatgcctcctgaagctgttgatttggtgtcaagattactccaatactccccgaatctccgatgttctgctctagatgccttgatccatcctttctttgacgagttgcgcgatccaaatgcccgcttgccaaatggccgtttcctgccgccattgtttaacttcaaacctcacgaactgaaaggcgttccggaggagataacggcaaaactgataccggagcatgcaagaaagcaatgtccatcac

SEQ ID NO: 212905 - DNA, 389 bp, Gossypium hirsutum
cgttgaaaagggcgaggcagaatctgttaagcaaacaccaaattttcatcgtcgaaggggatttgaacgacggcccgttgttgacgaagctgttcgacgtcgtcccgttcactcatgtgcttcacttagcggcacaggccggtgtacggtacgccatgcaaaacccacagtcgtacgttaagtcgaacattgctgggtttgtgaacttacttgaagtagccaaagcggtgaatccacaaccggcgatcgtttgggcttcgtcgagctccgtttatggactcaacactgaaaacccattctccgaacgtgatagaactgaccgtccggcgagtctttacgccgcaacgaaaaaagccggtgaggaaatcgctcatacttataaccatata

SEQ ID NO: 212906 - DNA, 415 bp, Gossypium hirsutum
cccacgcgttcgcttgacgactgtccaagggttgaagaaagaattcagctacaacatgatactcagagacctcaagaaggagttttgctgcaatggtactgtcgtccaggaccctgaattaaggcaggttattcaactgctaggtgaccagcgcaagaatgtgtcaaccttccttgttcatgctggcattgtgaagaaggaaaacatcaaaatccatggtttctaaattgcaactgcttatggttttctgctaagtcacctgtgcctcgtgtcgaagcaggaaacacaacttgattacaatttgattagagtataatctatatagtgctatggcttctttatgatggtttaataaaaaacaaaaagcactcttatatattgtgtttttcaggcaataggatgctgtattggtgga

SEQ ID NO: 212907 - DNA, 378 bp, Gossypium hirsutum
cttaaagaggctttcagggtgtttgacaaggaccagaatggtttcatatctgctgctgagcttcgccatgtcatgacaaatctcggtgagaagcttacagatgaggaagttgatgagatgatccgtgaagctgatgttgatggtgatgggcagataaactatgaggagttcgtcaaagtcatgatggccaagtaaggataaaaaatgggtaaaaaggggaacagggcagataagtttgctaagacctctatttatatcaatagggcatctatgtttttatgttactacctttcgttggattgttgactgtttctttgtatgcattatttcgtggactataccctaatatctacctgtttgctctggtttttgttcatt

SEQ ID NO: 212908 - DNA, 378 bp, Gossypium hirsutum
cccacgcgtccgcccacgcgtccgcaattattatcagttctaaccccatttttcgagcagctttgttaagtttaagataacacaggcacggcagcaacatagatgcagtgacactcaagaacgatcctataaaggccatcacgtagccaaaaaatgggatggttaaggcaacaatcactgtgctgctcactagtgcagttctaatgaggatgcttagtgacctgctgttgcaaaagagggatgtttcttcgatcgcagtcgtaattggagcggttatgatagcatatttcgtcaggggattgattagagtagtataaattgctatttttgtggtcatcttttttatgggaagatttaatgtcacttgagacttcagat

SEQ ID NO: 212909 - DNA, 431 bp, Gossypium hirsutum
gcagaaaaagcttaacttaccggtccttcccaccacaaccattggatccttccctcaaaccttggaactcaggagagttcgtcgtgaattcaaggctaacaagatctctgaggacaattacattaaagccattaaggaggaaattaagaaggttgttgaccttcaagaagagctcgacattgatgtcctggttcacggagagcctgagagaaacgatatggttgagtatttcggtgagcagttgtctggttttgctttcactgttaacgggtgggtccaatcttacggatctcgctgtgttaagccaccaatcatctatggtgatgttagccgtcccaagccaatgactgttttctggtcatcaactgctcaaagcatgactcaacgcccaatgaagggaatgcttactggccctgttaccattcttaact

SEQ ID NO: 212910 - DNA, 406 bp, Gossypium hirsutum
gaaaaagctagcggagcttgatgtggaactgaccgtataagagcggaacctgctctctgttgggtacaaaaacgtgatcggtgctcgaagagcatcgtggaggatcctgtcttcgattgagcaaaaggaagagagcaaagggaatgagcaaaatgttaagaaaatcaaaacgtctaggcagaaagtagaatcggagttgtccaatatttgtaaagatattatgggtgtcattaatgagcatctcattccttcttgctcgggtggagagtctactgggttttattataaaatgaaaggagattattataggtacttggcggagtttaagatgggtgatgagaggaaagaggccgctgatcagtccatgaaagcatatcagtctgcaacaactacagcagaagctgag

SEQ ID NO: 212911 - DNA, 363 bp, Gossypium hirsutum
cccacgcgtccgaaagaaatggcctatattccattggacgaggacaccaaggttaaagggaaggctgccattgatgttgtctgcaacccgttggggaagtccgggggtgctctgatccagcagttcatgatcttgacctttggatcacttgcaaattctaccccataccttggagggatacttatggtgattgtttttgcatggctgtcggcagccaggtctttggatgtccaattcactgcattgcgtagggaagaagaacttgagaaggagatggaaagagcagctgttaagataccaatcgtgtccgaaagtggaagtgtctctccaagtggttcatcagtagactcagtaacgggtgac

SEQ ID NO: 212912 - DNA, 459 bp, Gossypium hirsutum
gttttggtatcaagaacttaccagggaacatgttttgctgggccccgtatggaaaacggaaatatctgtgcatggtggatggttgacattggcaaagatcatcagcttatgtgcaactactacacattgagacaggacggctccagggcatacataaggaattggaaatttcagggttgtatggatggaaagacttggatagatttgagagtgcacgagaatgaccaaacaatgtgcaagccaggtcagtttgcatcatggcctgtaactggaccaaatgctctgcttccatttagattcttcagggttctactcactggtctgaccacggatgcctcaaacccctggaacttatgcatttgcttcctggagctgtatggttacttccgttgaatgtgaaattaatatgtgcatctattctggcgttttccaatagcaagtccttttcaagtttttttt

SEQ ID NO: 212913 - DNA, 423 bp, Gossypium hirsutum
ggcaaagaagcagccaccaaggccattaaggagtggggccagcccaagtccaagatcacccaccttgtcttttgcaccactagcggtgtggacatgcctggggctgactaccagctcaccaagcttttaggcctccgcccctccgttaagcgcctcatgatgtaccaacaaggttgcttcgcaggggggacggtgctccgagtggctaaggacttagctgagaacaacaaaggtgctcgtgtacttgttgtgtgctcggagattactgctgttacctttcgtggacctagtgacactcacctagacagtcttgtgggccaagcattgtttggtgatggtgccgcaactgttataatcggggcagaccccgtgcccgaaatcgagaagcccatgtttgaactaatctcagcagcccaaacgatc

SEQ ID NO: 212914 - DNA, 438 bp, Gossypium hirsutum
tacctttcttgtcccaaaaaggtatatacacccattgaggaaaaagaatcgaatttagtaagtactgcacaagcaatgatgagtttaattgttagtggccaggctgagagggatcctacacctctacatcgagctgcaaaattgttgataaattctcagttgccaaacggtggttttcctcagcagggactggctggtgtcttcatgaggaactgtatgttacactatgcaatatatagaaatgtttttccactgtgggcgcttgctgagtatcgggaccatgtttggccttcaaaatatatatgcttttgaattataagaatggatcagagaattatatacaatagattgggtaacctacgatctgagtaaaaataatgatgtaataaagttattgaaatcttgcattaaaattagatgtagctttcggtggaatct

SEQ ID NO: 212915 - DNA, 450 bp, Gossypium hirsutum
ctttgtagtgaaccagatcaaagaactggtggtcctacagcaaattctggtgttgcacctgatgcagctgaaatacagcttaaaagtccaaattggctatttggccaaagaaagtttgaagaagttggctcaggccccaaagtctctgtgcgcgaaattaaaaatggaggggccaatggtgaaatgaaacttgacgatttctgtgacttaaattggctttcttcctatgttgatgatgaacaggatattttccagaggtacctctcaatgacgtctgttgatgaagccaatggttggtatggtggaacacttcttggtgatcaagatgaaagcagtgagatatataggcattacgctgaattatgtcaggggctagccatggagcctttccaacatgatctggaaagggagaagcattacactgatgttctacaaatgaacacgatcgat

SEQ ID NO: 212916 - DNA, 449 bp, Gossypium hirsutum
agaaattgctgttcctaaggtcttgaaggcgaacggtgatagcagacatcttagtagctcttattcggctgcttgtgaaatactgaagcctactgtgggatctgatgagcctgctccttcagcttcggcctcaaaaatctttgaaatcccagaatctgaattctacaattttgatgccgacaaaaccaaggaaaagtttcttgttggtcaggtctgggcattgtatggtgatgatgatggcttaccaaagtactatggtgagattaagaacatcgagtcccacccggttttcaaaatacacgtgacgtggcttcttccttgccaatcagaaagaagaaccaagtggtacgatacaagcatgcctacttgttgcggaagatttagtagaaagggttcccaagtctacacctccactgactccttttctcataagttaaaggcagagtcta

SEQ ID NO: 212917 - DNA, 427 bp, Gossypium hirsutum
ccttaagggccaaacgtgggtgcctgttaagcctattccaaatgcactcgtcatcaacatcggtgacactctagaagtacttacaaatggaaaatacaagagtgtggagcatagagcagtaactcacaaagagagagaccgcctttcaatcgtcactttctatgctccaagctatgaaatagaacttggtccaatggcagaactggtggatgagaagaatccatgcagatacagaagttacaatcatggagagtacagtaaacattacgtaaccaacaagttgcaaggcaaaagaaccctggatttcgcaaagatccaatccaagacctcgaattaacaaggattccactttggtctccccccccccactagatcactattcttgtactatttaactgtaagaaatgagcttctgtcatggtggact

SEQ ID NO: 212918 - DNA, 446 bp, Gossypium hirsutum
  unsure (1)..(446): unsure at all n locations
cccacgcgtccgcaggatagtttcttcgctagctttgctcttggttggctcatcacaaatggtgctggccttgcatcttacccaattgacactgttcgtagaagaatgatgatgacttctggtgaagctgtcaaatacaagagctcgctcgatgccttctctcagatcttgaaaaacgaaggtgccaagtctctattcaagggtgctggagctaacatccttcgtgccattgccggtgctggtgtgctcgctggatacgacaagttgcagctcattgttttcggaaagaagtacggatctggtggtgcttaaatttagggtggtactatctcccttcttttgttatgttttaggttttaaagatggcgatgaaaagctcgacacattgagaaatttatttcggcaaaaaaattcattaataattcaaatttanggggggaaattac

SEQ ID NO: 212919 - DNA, 393 bp, Gossypium hirsutum
gtcagaagaacagctccgacaacaagggtgagaaaaccggctgtggcaacaccattaacactgccgtacccgcggcgtttgttaaggtcagcatggatggtgcaccctatctacgcaaggtggacttgaaattatacaagagttaccaagaactatcggatgccttaggcaaaatgtttagctccttcactattggtaactgtgggggttcacaaggaatgaaagatttcatgaatgaaggcaaattaatagatctcttgaatgggtctgaatatgttcctacttatgaagacaaagatggagattggatgcttattggtgatgtcccatgggagatgtttgtcgattcatgcaagcgtttacgaatcatgaaaggatcataagccatcggac

SEQ ID NO: 212920 - DNA, 442 bp, Gossypium hirsutum
agaaagagttgagcgttgataagttagagatatctaccagcattagagagccaaagaaacgagctaaaaaccgaaaggtcttagacagacttgcttctgatgctcataaattgatggctcttcaaacctctgtcaaacaactgaaaaagagaatggaaatcaagaagaggaagaaggcattcgatttagaatacggacaagtcaaagaacaattgcaagaggtggaggatgcaatcaaggagttgtgcaacgtcaatggtgaattgaccaaggatgtcgaagggagttcatctttagacggaacaaactcaatggaattggaaggacctggaaagggcaacttgaaaaacgtacgtgagcaggcacaaaaagggtctgaaaagatcggaaggttgcagttcgaggtgcagagcattgagtacgttatgctgaaactagaaga

SEQ ID NO: 212921 - DNA, 323 bp, Gossypium hirsutum
cccacgcgttcgcccacgcgtccgcggaagagcttccttttttttctctcctttgccacgcgccgtcgatctcgatccttatcctcgttttcaaacaagctcgaaaaagatggccaacgctgcatcgggaatggctgtgcatgatgattgcaagttgaagttcttggagctcaaggcaaaaagaacccaccgcttcattgttttcaaaattgaggagaagcaaaagcaagttattgtggagaagcttggtgaaccaaccgaaagctatgaggattttactaaatgtctccccgctgatgaatgtcgatatgctgtgtacgatt

SEQ ID NO: 212922 - DNA, 437 bp, Gossypium hirsutum
cccacgcgttcgagaaaccaaggcaatggcttctcttgcaaccttagctggtgtgcaaccaacgaccatcaagggccttggtggcagctctctcaatggaaccaagctcttggtgaagtcaactcgccagagtttcaaacccaaaaactacagggctggtgctgtggtagcaaagtatggtgataagagtatatactttgatttggaggatattggcaacacaactgggcaatgggacttgtatggatccgatgcaccttcaccgtacaacccactccagagcaagttctttgagacatttgcagctccatttaccaagagaggattgttgctcaagttcctgatctttggaggcggttccctctgtctttaccttagtgccactgcttttcgatgaccttttaccgatcaagatagggtcgcaactcccacccaag

SEQ ID NO: 212923 - DNA, 359 bp, Gossypium hirsutum
ggaacttgttcctcgcttgaatgcagaagaagtaagaggcctttttgctccaccaccatggggtgatgatgtgccgccatcagcattttgcatgacgaatgtgggagaatgggacaaatttaggactatagatatggataaagaggctaatattattggcgccttaaataattcatctatgaagaagaaatttcatgctgacgctgataaggcagctttcttgagtgcatggcgaagagttgattgccgaacaagagaagcacttcgccgtagctttctttcagatcttattgcgagctatgaggactgcatacggaccttcatccaggaacgtggacatggggatgtccttgctttac

SEQ ID NO: 212924 - DNA, 430 bp, Gossypium hirsutum
cggacgcgtgggcggacgcgtgggcgctcatcgaacttccgatttgctttttgaaacgcaagaaagaagagaaatctcaatggcgccgaaagccgagaagaagcccgctgagaagaagcctgccgagaagccaacggaggagaaaaagtccaccgtcggcgagaaagccccagcggagaagaagccaaaggccggcaagaagcttcccaaggaaggtccaggggccggagataagaagaagaagaaagccaagaagagtgttgagacctacaagatctacatcttcaaggtcctgaagcaagtccatccagatatcggtatctcaagcaaagctatgggaatcatgaacagtttcatcaacgacatcttcgagaagctggctcaagaatcttcaagactggcaaggtataacaagaagcccaccatcact

SEQ ID NO: 212925 - DNA, 396 bp, Gossypium hirsutum
cccacgcgtccgcagtcatatctctgcaaatggtcaaagagtgctaccaagtggaggcatcagtgcagatggacctccaaccactctcagtggtactggcgttgatcgcatggcatttctgcaggccaatatcacccgtgataataccaagtttataaatggtgctatagttggtgagaggaatgtgttccaggtggaccaaggacttgggattggcagcaagtttccattctttaaccgccatcaactaactctcacacgatttctccaacttagacaagtggaagaaggtgttggtaagcctccgccacctgttctagtccttcatggacattacggaggttgtgttggtgaccttccaagttatgatgcttttacccttggaggcccatattc

SEQ ID NO: 212926 - DNA, 410 bp, Gossypium hirsutum
  unsure (1)..(410): unsure at all n locations
cgaaccctgnggaggttgtgaagcctgattcttgcaaggcaatcaatgatgaggggatgccattataccagaggccattcatgaagggcaaattgtacattcagttcactgttgaattccctgattcccttggccctgatcaggttaaggcacttgaggccatcctgcctccaaaaccaacctctcagttgagtgatatggagctagacgagtgtgaggagactacgctatatgatgtgaacattgaagaggagatgaggaggaagcagcagcaggcagcgcaggaagcttatgaggaagatgaagatatgcatggcggtgcccagagggtgcagtgtgcccagcaatgatgatgaagcaaaaaagaaaaaagaaagtgatatatggtttcaaaagtattctcgaggata

SEQ ID NO: 212927 - DNA, 414 bp, Gossypium hirsutum
cggacgcgtgggggagtttggaaatggtgagttcaccgaggctgaattgaagaaaattatggcaaatgagaagcttgctgagattgctatgactgatccaaagcgcgcaaagaggattttggccaatcgtcagtctgctgctcgttccaaagaacggaagatgcggtacatttcagagttggaacacaaggttcagactctgcagactgaagctaccacattgtctgctcagctaacacttttacagagagattctgttgggcttacaaatcagaacaatgagttgaagtttcgtcttcaagccatggagcaacaagcacaactccgtgatgctctaaacgaagcattaactgcggaggtccaacgattaaaactcgctactcaacagctaggtggtgattccgacccttcaaa

SEQ ID NO: 212928 - DNA, 299 bp, Gossypium hirsutum
gcttgtacttcccggtgagcttgcgaaacacgccgtttctgaagggaccaaggccgttaccaagtttacatcttcttgaaaaatgtgatttgtggttagggttagggttttcattttaaaagtagatcgcgttgtttttctcttccgttgtgaatcattctgctcttctgttatatgattccgtgtgtatcttgaagatggatctgctcgatcctgatttgaacatgttataattgaatgcaattaaatactaaaatttagcgtattttcttgctttttataataattaatatataaaa

SEQ ID NO: 212929 - DNA, 319 bp, Gossypium hirsutum
gcactgaagagcagagaaccaactgagtctatcaacctcaataaagaaactgaaggctcttgcagttacagaagtgagaacagctcatatgtaaagttggatatctcaagaacaccagcaattgacagccccttatctactcatccaacaagcagaaccttctttccaacatccattatgccaacaggtggtgctgcacaactattccaaacctcatcgtcaaggcctgatcaccatcatccatgttaaaagatggatcaaatggttaaagaagaaagcctcatcaacatgttctgcaccattgaagatcaaactgggt

SEQ ID NO: 212930 - DNA, 236 bp, Gossypium hirsutum
tcgcccacgcgttcggaaggactttggctgattacaatattcaaaaggagtccactcttcaccttgttcttcgtcttcgtggtgggttctaagccttaaggtcttccttaatgtgggttttctggttttacgtgaaggattgtgccctttgatggccttttaaataatttctagtctttgtttaccggttgcatctatgtatggtttctctttgaatggaatttgcatatttacct

SEQ ID NO: 212931 - DNA, 427 bp, Gossypium hirsutum
tcgcccacgcgttcgcccacgcgtccgcaacatcagtatacccatcagattagcttagcagtagcgggttcatggctctccaagcagcttcatcgctcccacccaccatctccattcacaaagaggccaaatctaatgcttgtcttaaagagacaactctgtttggtgttccattttcaacccatttcagctttcctcttcatttaactcaagaactcaggaaaaagggagtagctgccggaattgttcgagcacaaacagctgctacaactccggcagtcgatcgggctgctccacaagggaagaagaccttgagaaagggtaatgtgataataaccggtgcgtcgtccggtttaagcttagcgacggccaaggctcttgccgagacaggggaatggcatgtaatcatggcgtgtagaaattttct

SEQ ID NO: 212932 - DNA, 388 bp, Gossypium hirsutum
cttatttgtattttccgtggcaggcaagacttatgacgacgcatggcgagaccgctgcaacgagcacgctcgatgcgcacatgcatcgggcgtgctcgttgcaggaagggatagcggagttctacgaccagtcgtctgggctttgggaagacatttggggtgaccatatgcatcatggtttttacgatccagattccaatgtttcaggctccgatcatccagctgcccagatccgaatgattgaagaatcgctccgtttcgctggaataaccgatgatccagcaaagcagcccaagacaatagttgatgtcggatgtgggataggaggcagctctagatatttagcaaggaaatttggagcagaatgtcgaggcattactttgagccc

SEQ ID NO: 212933 - DNA, 417 bp, Gossypium hirsutum
cccacgcgtccgtttacatgtaaaatgttttaattttaactggctgatccatgaggcatagctcaataatacatttaagctgccttttacatatctacattctatatgggagttaataacttctcaatttctttcagaagtcgtatttgtcaaagctttccttaatatttccacatcaccacaagaacagatgccatccttgaaatggtggaattcttcagtatccctaacagaaatctcccgtcgtacaatcttagagatgaatttaatggtactgtgacagctttggcacatatagagattcttggttacccaaataggcgttccatgaacagtattaatgagaccaaatgcaacagctagtctctcactgtgcccacagaagatctcagcttttgaaatttcaacttcatccat

SEQ ID NO: 212934 - DNA, 352 bp, Gossypium hirsutum
  unsure (1)..(352): unsure at all n locations
agtggacaaaatcgatggaacatctttttcttgaaattctagtagaagaggcctagagaggaaataagccttctaatactttaaaagcaatttctattaatcaagttgccgaagttatttctgaaagatttcaagtccaatgcgatgcgaagcatgtggaaaatcatttgaggactgtaaaaaaccagtggcagattatatgcataattcanggtgaaagtggttttggatgggatgataacatgaaaatgatcacatgtgatagagcgacatatgatgcagtagtgatggcacacaagaagtatgaaccatttttgaataaaagcattgatcattatgatgaaatggcttt

SEQ ID NO: 212935 - DNA, 384 bp, Gossypium hirsutum
cccacgcgtccgatcaagggtgaggtgcaatgactttgtggaccatacactagttggaagcttcaccatggctggtattaaggatatgatcaagttggcattgaaatgcatgagttttcccggggaaaggcggccagatatgaacaccgtttcgattgaactcgaacggatccgtgaaaacgagatggaaatgacaacagtcaaaggtgaaggtactgcaaaaatcgctctatgtagtgagctatttgcttcaaaataaggatccatcccaatgtagttttattaaagcttggggccaaagcttatgataaaaaatgaagtgtttataaagtaagggtagtgaagctgctatcattaaataatgggaaatggggatatttaatt

SEQ ID NO: 212936 - DNA, 460 bp, Gossypium hirsutum
  unsure (1)..(460): unsure at all n locations
cccacgcgtccgtttggatcaggtcaatttaccaggaagaagatgaacaaggtttcaaaggtcttaaagtcagcaaagacctaacggaaatcggcggcgacgccctcaaaaccaacatcacaacattgggtccactcgtcctccccttctccgaacaactcttcttcttcgccacccttatttggcgccatttcttcggcggcgataaatccaagacctccctatcaccgtcgtcgaagccatacatccccgactacaagctcgccttcgaacacttctgcgtccacgccgcaagcaagacggtgctagacgagctgcaaaagaacttggaactcagcgaaaacaacatggaagcatcgaggatgaccttacaccgattcggcaacacatcgagcagcagcatatggtacgaattggcttnattggaagctaaagaaagggttaaaaagagggataggat

SEQ ID NO: 212937 - DNA, 440 bp, Gossypium hirsutum
  unsure (1)..(440): unsure at all n locations
ataggatgatcttcgaaaggttcttccctcagaactcagcacgattgaccgtcccgggaggagcaagtgtagcatgcagcacggccaaagctgtcgaatgggatgccacttggaagaacaaccttgacccgtcgggcagagcagcacttggagtgcatctctcagcttacgacgcggagacacctttcgataacaagccgtccaagattgttgagtcaataccgttgatgatggagattcctggagttgccatacatggttaagtgccatgaaaattgaagcaaaatgtgtgaaatttaatgattgattagtataatttgtgccatattatccatggaacttcagtatgctataatgtataatatgggtaatatataaaaccactatatatatatatatgtatgcatgnatgtatggaaggatggatggatggatgtata

SEQ ID NO: 212938 - DNA, 310 bp, Gossypium hirsutum
catacctattcgcggcaaagaaatgctggacccggctcaagacaggaaaaacgacgcttacaaatggctgcttcatcatgcaaagaggtatagattggctgaaggcataatggtgaacagtttcgtggagttggaagcaggagcaacgaatgcgttgcaagagaaagaacccgataagcccccagtttacccggttggtccacttgttaacgttgatgcgagtaacaaaggcaaagctgatgggacggattgcctgaagtggctagataagcagccacatggctcggttttgtatgtgtcttttgggagc

SEQ ID NO: 212939 - DNA, 395 bp, Gossypium hirsutum
gttttgtatttcatactcatttagcccctttcattagcatcgaaatcactccagttttctttatcactgaaaaatgtcttgctgtggtggaaactgtggctgcggttctggctgcaagtgtggcagtggctgtggaggatgcaagatgtacccagacctgaacgttgccgagatgaccacaactgagactctggttcttggtgtagcaccccagaaagcacactttgagggagctgagatggaattcggggctgagaacggctgcaagtgtggagacaactgcacctgcaacccttgcaattgtaaatgattagagaccaaagccaaagctccctggaagcagagacgcctttgtctttaagaaataatatgttttgttggttatgtgtttttag

SEQ ID NO: 212940 - DNA, 401 bp, Gossypium hirsutum
gggagttattcatcccgctattgccgggttagctgtgacgtatggactcaatctgaatatattgcaagcttcgatggtttggaatatttgcaaaacggagaataagattatatctgctgagagaatacttcagtattgtagtattcctagtgagcctgcccttgtggtggaaacgaatcgctcagaccattgttggccgtaccacggagaagttcagattcttgatctgcatgtacgatatgccccacacatgccacttgtgttgcgaggtctgacctgcacattttctggagggttgaaaaccggaattgttgggagaacaggcagtggtaaatcaactctcatacaaacacttttcctgatcggtgaaccttcaacagggtcttatcataatcgattgg

SEQ ID NO: 212941 - DNA, 458 bp, Gossypium hirsutum
cccacgcgtccggaagaacacatacctaaaccctatttggcaagggcatttgctaatccagatgtggaacatccacatggaacaccaggacgtgacaactatggaatgagtgctcttcagcaacacgcttccttttttgatcaagataaagatggaattgtttatccttgggagacctacagaggtatgagaaatattggtttcaatccaatttcgagccttgttattgcaattaccatcaatgtggcattgagttattggactctccctggatggctaccaaatctatattttcccatatgcatagatagaatacataaatgcaagcatggaagtgactcttcaacatatgacactgaaggaaggtatatgccaatgaactttgagagtatttttagcaagtacgctcgaactgtgccggacaagttaacactgggggaactatggcacatgactga

SEQ ID NO: 212942 - DNA, 401 bp, Gossypium hirsutum
cccacgcgtccgctccgttcttttgccgtcgtattttttttccagagatttgttcttttcgcttctttcgttatggggaagatcaagatcggaatcaacggatttggaaggatcgggcgtttggttgccagagttgctctccaaagtgaagatgttgagctcgttgctgttaacgatcctttcatcaccaccgattacatgacctacatgtttaagtatgacagtgttcacggtcaatggaagcaccatgagcttaaggtgaaggactcaaaaacccttctctttggtgaaaagcctgtcactgttttcggcatcagataccctgaagaaatcccttgtggtgagactggagctgattatgtcgttgagtctactggtgttttcactgacaaggacaaagc

SEQ ID NO: 212943 - DNA, 228 bp, Gossypium hirsutum
  unsure (1)..(228): unsure at all n locations
cacggaggnggcggcgaattctagaactagacggatccgtcgggctgtaggtattcagcgcgcgcacattatatttgttggtttgatcgtcatgatcgatatgctaatcaaattgtggtcttttttgatatcaacatgttgggattagacgtactccaaggccctgtatatgtaggcacagggtgtgttttcaacaggcaggcattagtatggctacgatccgccggt

SEQ ID NO: 212944 - DNA, 408 bp, Gossypium hirsutum
tgtgagttcctcatctctttccctgttcttttcatggactgggaaggagagggagtgatcgggtactgtcggaaactcattggagcaacagatcctcaaaaatcagagcctggaaccatcagaggtgatctagccgtggttgtcggaaggaatataattcatgggagtgatggtcctgagactgccaagcatgaaatcaacttgtggttcaagccacaagagttggttaactatacaagcaacgctgagaaatgggtctatggaaacaactgatgagggcatgttttttcaagttaatcagtagtagttcaggaaaatttagtcccacatcaggtgtgggttagaggcataattttttagaataaatgcgttttatggaggtgaggagcattgagccaaatgctttga

SEQ ID NO: 212945 - DNA, 309 bp, Gossypium hirsutum
attcaggaaatgttccttagagtaagtgagcagttcctgccatgtttcgcaggaaggctttcttgcactggtatactggggagggaatggatgagatggagtttacggaggctgagagcaacatgaacgatctggtttcagagtaccaacaatatcaagatgcaacagctgatgaggagtatgattatgaggaggaggatgcggaggaggatctccaggaatagtagtagtgtgtgtttcttactgtttgctttcttaacgatttggattttttttttctgttctttcaacctgaattcctggtttggg

SEQ ID NO: 212946 - DNA, 306 bp, Gossypium hirsutum
cccacgcgtccgcgccttttcaatatgataaatgccttccgacaatatttgaagttgtgacaggggcaactaagaaacagacaaaggagaaatcgtcagtttcaaatcatagcagcaacaaatctaaatcaaactctaagcgaggttctgaatctcagcccaagtattcgaaggcagcagcatcaaaggatgaggttgaagatggcatggaagacgaaaacgatgaggagcatggagagacgttatgtggggcttgtggagagaattatgctgctgatgaattctggatttgctgtgatatctgtg

SEQ ID NO: 212947 - DNA, 308 bp, Gossypium hirsutum
gtccttttattattttttaaccctacggttctcgttttggggttatctcaatacagagtgtggtggtctgtttggaggattttaatcttactgagtgcatctgttgcagttaggtgcagggaaaagagcgatggcggcagttcccggacagttgatttgggaggtagtgaagaagaacaattgctttttggtgaggcagtttggaagaggaactgctagccttcagttcagcaaagaacccaacaatctctacaaccttcactcctacaaacactctgggttggcaaacaagaaaacagtcaccattc

SEQ ID NO: 212948 - DNA, 411 bp, Gossypium hirsutum
tgtgaattcctcagctcgggccctgttcttgccatggtctgggaaggagagggagtgatcagatacggccggaaactcattggagcaacagatcctcaaaaatcagagcctggaaccatcagaggtgatctagccgtggttgtcggaaggaatataattcatgggagtgatggtcctgagactgccaagcatgaaatcaacttgtggttcaagccacaagagttggttaactatacaagcaacgctgagaaatgggtctatggaaacaactgatgagggcatgttttttcaagttaatcagtagtagttcaggaaaatttagtcccacatcaggtgtgggttagaggcataattttttagaataaatgcgttttatggaggtgaggagcattgagccaaaagctttgattt

SEQ ID NO: 212949 - DNA, 316 bp, Gossypium hirsutum
acccgtccgacacgttgatgttaacgatttgacgcgtggatgtgtgcatgcagctccaaggatgaccctgctaaggaggctgccaacttcacttctcaggtcatcattatgaaccaccctggacaaattggaaatggatatgccccagtccttgactgccacacgtcacacattgctgttaagtttgctgagcttttgaccaagattgacaggcgatctgttaaggagcttgagaaggaacccaagttcttgaagaacggtgatgctggtatgattaagatgattcctaccaagcccatggttgtggagaccttct

SEQ ID NO: 212950 - DNA, 307 bp, Gossypium hirsutum
cccacgcgtccggaaagctggtatcgtcggactgatagaaccgcagcatgcgagttaggtgtgcacgggattcgtgtgaactgcatttctcctcatggtgtacctacagatatgctcattagtggttatagaattttccgggggaacgaaacaacacccgaagaagtgaagaaactggtcggtgatcaagggagtctattacgtgggaaagctgcaactgttgaagatgtggcccaagctgcagtgtttcttgcctcagatgacaccggattcataacagcacataacctcattatcgatggtggat

SEQ ID NO: 212951 - DNA, 299 bp, Gossypium hirsutum
cccacgcgtccgcccacgcgtccgctgcttttcccccttttatctttcttcttctttttctccttacttcagccgaatttttccggcgaaacggtgtcagatctttgtgatctatagccggaaatttcatttcgagttcgacgatctcacccttcgatctttctattttcttcagcctaccatgaatcccgaatatgactatcttttcaagctacttcttattggagattcaggtgttggaaaatcttgccttcttttgagatttgctgatgattcatatgtagaaagttacataagca

SEQ ID NO: 212952 - DNA, 303 bp, Gossypium hirsutum
gcacagttttttgtgttcgttggggaccctaactggataaaatagtagtaaaagattgtgagccttctatcttcaaggcaatgctcttgtttatttataccgacaagcttcctgatgtacaagaaattgtagactccacatctatgtgtacatctaccaacatggttcagcatcttttggctgctgctgatctgtacaatttagatagactcaaagtgttgtgtgaggcaaaattgtgtgaagaacttaatgctgatacggtggcaacaacccttgcacttgctgagcagcaccattgtgcac

SEQ ID NO: 212953 - DNA, 306 bp, Gossypium hirsutum
cccacgcgtccgcccacgcgtccggagatgctgtgtactaaccgaagccgtcgaccagaccttgcttcagaggtgtacaaggtgcttattagaaatactattggacccttatcaacaatccatgcagggtctgaacagcttcgtcagcctcctgattctttcttttgtcccatttcaaagaaaatcatgatggacccacatgtggcagccgatgggttcacctatgagttaagagagatacggagatggctggatggtgggcacgatacctctccttgcacgaatattccacttgctcatcgcatt

SEQ ID NO: 212954 - DNA, 278 bp, Gossypium hirsutum
gggaggaatcggcgggtccgaccccgcctcccacacgttgatctattctttcgagcatgctgagatctacgggccctcgttgactacacgcgtgctaaaggagtgcaccatgcacttggtgcaaatactattgggcggtattcaactattcatgcagactctgaacagatagaccagtcctttggaggttgatagtgcacaatccattaacaatgtatggggtaccacccaggacaaggcgggtgttccacctaaccaacaaaggatgaacttagacg

SEQ ID NO: 212955 - DNA, 303 bp, Gossypium hirsutum
gactagttctaaatcgtattgtacagctccaacaggtatgatgggctgtggggctgctgcggggacacaagatagtaggagaggggaggaagggatagaaggacaggcggaggacgccgagtcggcttacgtggaccctgaacggatggtttcttcgggaccatcttgcaaggcgtgtcggacacgcgtcgcctcggtggtgctgcttccgtgtcggcatctttgcctttgtacagagagtgaccgagtggcgcaagcctgcccgttttgccttgccgttcggaattctagcgttgaggtttt

SEQ ID NO: 212956 - DNA, 306 bp, Gossypium hirsutum
cccacgcgtccgggactcgatacaaatgacttggcctcctatccggggctcacaccatcggcatagctcactgcccagcattttcacgccgattgtacaattcgaccggccctgggggagtagacccaacgcttgacagtgaatacgcagctaacctcaaaacaaacaagtgtacaacacccaatgataacaccacaatagttgagatggaccctggaagccgtaagacctttgatcttagctactacacattgttaaccaaaagaaggggtcttttcaattccgatgctgctttaactacggact

SEQ ID NO: 212957 - DNA, 437 bp, Gossypium hirsutum
  unsure (1)..(437): unsure at all n locations
ggaaaaangggccgacccagcgnccgcccacgcgtccaagaaagttttgtagggcttataatcccagcggggttacattggtgaaatgggtgatgttgaggatgagaccttcaaccctgttgttagtagatcaagtcaaacatgtagaattgatctactcgaagagatcattgaagatgctaaagataacaagaaaattttgtttcaggccatgcaatcaattatggacttgatgaaagaagttgaacttcaagaggcagctgccgaacaagcaaaagaggaagccgcaagggggggcatggatattctcgtcaaggtggaggaacttaaacagatgctgccacatgcaaaggaagcaaatgacatgcatgctggagaagtatatggcgagaaagcaatcctagtcactgaagtaaaagagcttgaaaatcgcttgc

SEQ ID NO: 212958 - DNA, 306 bp, Gossypium hirsutum
gactagttctaaatcgcaagcacagctccaacaggtatgattggctgtggggctgctgcggtgacacaagatagtaggagaggggaggaagggatagaaggacaggcggaggacgccgagtcggcttacgtggaccctgaacggatggtttcttcgggaccatcttgcaaggcgtgtcggacacgcgtcgcctcggtggtgctgcttccgtgtcggcatctttgcctttgtacagagtgtgaccgagtggcgcaagcctgcccgctttgcctcgccgttcggaattctagcgttgaggttttcctt

SEQ ID NO: 212959 - DNA, 238 bp, Gossypium hirsutum
gtttcggtgtcctgaaatattattccacccgaacttggttggtatagatcaagtgggtttagacgaaatgactggggtctcgatcagaaggttgccatccaaggacaaggcacttgagaacaggttgaccagttcggtctttatgactggtgggtgcagtctctttcctggcataaatgaacgtttggaagctggaattcggatgcttcgaccatgtggatcggcaattaagggggca

SEQ ID NO: 212960 - DNA, 304 bp, Gossypium hirsutum
gataaataagcgtttgtctcagatttttgaagtggcccgtgccaagcagacagcccgtaagtcgactggtgggaaggctccaaggaagcaacttgctaccaaggctgcccgtaaatctgccccaaccaccggtggtgtgaagaagcctcatcgctaccgtcctggaactgttgctcttcgtgaaattcgaaagtaccaaaagagtactgagcttcttatcaggaaattgcctttccagaggcttgttcgtgaaattgcccaggacttcaagactgatttgcgtttccagagccatgctgttcta

SEQ ID NO: 212961 - DNA, 305 bp, Gossypium hirsutum
gaagaaaggaaagttgataccaaagagtttgagccatgcaacaactttcaagtaagaagagcaacgatgacatttttatcaaactgggttctgaaaaggacaagcgcaaggatgctgataaagaagaaagagtaaaaaagtctgttagcatcaatgagtttctgaagccagctgaaggggagaggtactacggacctgggcgtggtcgaggccgtggccgtggtcctagaggtggatatggaggcaatacagctagcagtgtgttagctccctcaatcgaagatcctgggcacttcccttcattg

SEQ ID NO: 212962 - DNA, 287 bp, Gossypium hirsutum
ggaggcaccaaagacttttcagcacgaaattgaggagtccgggacgacgccctgcgattgggtctccacggcgttaagagcgacctcgtcggatctcaccctctccaatctgcttacgaatcatcaaagaaaacgcaggaagagatgaagagaaaagttctggccaatacttatgggacagcaatgccactcaaaatggatctcgataggcaaattctctggcggtttcagaggccattgctaccatcttcgatgctagggttggaagctgtgacaggaactttata

SEQ ID NO: 212963 - DNA, 301 bp, Gossypium hirsutum
gttactgcattgttttttgccatctcatacccacatttgcagctgtaccacacatgttcatcaatggctacaagaatgtcttggctgttgcagttgcaacagagtattctttccgtcaggccgataaagtgaaagagtatttggcggatccaagcaaatttgccgttgctactgcccctgttgctgctgctggtggtgctgctccggctgctgctgtccctgcagaggagaaaaaaccagaaccagaagaagagtctgatgatgatatgggattcagtctctttgactaagtttgtcttta

SEQ ID NO: 212964 - DNA, 391 bp, Gossypium hirsutum
gcttggaagtcctgaacaccgttcgatcagttggccaacctcttgtcgatgactggagatgcgctcaagaaaatggtgaggactttcgaaacacattgtgtatcactagcccagtacgggatgaaacacatgcgatcccttgcaaacatctgcaatgccgggattcacacagaacagatggctgaggcatcggcacaagcttgtgtcagcgttcctactggtcgttggagctctcttcagaaaggttttagtgcataaaaataccactggaattggcaaatattatcggccaaagcttggattatgtttgtacttgctgtgttttcttatatcccgaatggtccgaatgctgctgcattttgatgattattcatgcgatttcttatttctg

SEQ ID NO: 212965 - DNA, 307 bp, Gossypium hirsutum
aaaacaacttgaggatggccgaactcttgccgactcaacatccaaaaggagtccaccctccacctagtccttcgtctaaggggtggcatgcagatatttgtgaaaacccttactggcaagaccatcaccctcgagttggaaagttctgatacgattgataatgtcaaggccaagatccaagacaaggaagggatccctccagaccaacagaggcttatctttgcaggtaaacagcttgaagatggccgaactcttgcggattacaacatccagaaagagtctaccctccaccttgtccttcgtctta

SEQ ID NO: 212966 - DNA, 305 bp, Gossypium hirsutum
ggagttggtggaaggcagcctttaaatctacaactcgctactactgttaggatttgctagacttgcttctacattgagtctagactatcaggtacatgtgggggaatatggagtcaactggaatttctttttcacacttgctggtgtatctatccttacatccattttaaatgttcccgcagaatattctggaattcttggttcagtaattttagttgggtaccaaagttggttgactaatgggctaaatgtttatcttctttctaatgaaaggggtacggatgtcataagcagaaacaaggagg

SEQ ID NO: 212967 - DNA, 354 bp, Gossypium hirsutum
gttccaggtatattggtaccagaggccttattgttaggaaactgggtaaaagctcaagaatgggcagcaattccagggggccgagccacttacttagggaacccagtcccatggggtacccttcccaccatcttggtcattgaattcctatctatcgccttcgttgagcaccaacgaagcatggagaaggacaccgagaagaacaagtaccccgtcggtgctttcgacctcttgcgattctacaaggaccccaaaaagttcgaagaatacaacgtgaaagagatcaagaacggtcgtctagcattgttggcattttgtgggatcttgtgtttaacaatcatgtttacccagtca

SEQ ID NO: 212968 - DNA, 336 bp, Gossypium hirsutum
ggcgggagttccaggcagacccacgcgtcgcgctgcttgctctcccttcgatcaagaggcagatctcgataagaccctgaccggcaagaccatcaccctcgaagtcgagagttccgacacgatcgacaacggtaaggcgaaaatccaagacaaggaagggatcccaccagaccaacaacgtctcatatttgccgggaaacaactcgaggacggtcgcaccttggccgattacaacatccagaaggagtccaccctccatttggtattgaggcttcgtggtgggatgcagattttcgtcaagacgttgactgggaaaaccataactttggaggtggg

SEQ ID NO: 212969 - DNA, 301 bp, Gossypium hirsutum
gggacaggaaggggcgcgtgagcttctgcctgcaggtgacagccgaagctctccgcttttactgttggagttgggtgtccctactgcataccttgccagagagatgcagtacggtctgctgaggatagcgctggagtgcgacgacaagagcaaagagagatgcggcctttataacgtccccgtttggtccatgtactgcaatggaagaaaggtggggtttgccattaagaggaagatgagcgacaatgatgcggtggtgcttaagctcatgcagtccgtgtcggtgggagccggagttttg

SEQ ID NO: 212970 - DNA, 304 bp, Gossypium hirsutum
cggacgcgtgggcactgtcaatgttattcgttattccctactcaggccttgaactttgccttcaaggattacttcaagaggcttttcaacttcaagaaagacagagatggttactggaaatggtttgctgggaacttggcttctggtggtgcagctggtgcttcttcccttctctttgtctactccttggattatgctcgaactcgtcttgcaaatgatgcaaaggctgcaaagaagggaggagagagacaattcaatggtcttgttgatgtctacaggaaaaccctaaaatctgatggtattg

SEQ ID NO: 212971 - DNA, 291 bp, Gossypium hirsutum
gttgttgtgtgatatttttcacattagtggctcgttgctgctcaggaggcaaacaatcgtttcgtgttctgtgacattgtcacaaccaccacccacatgagcttgaggggtcctaaggctggtatgattttctaccgcaagggaccaaagccaccaaagaagggccaacctgaagatgcatgtgtatgactttgaagacaagatcaactttgcagcttccccttcccttcagggtggtcctcacaatcaccagattggtgccctggctgttgccttgaaacagttcatgac

SEQ ID NO: 212972 - DNA, 303 bp, Gossypium hirsutum
cggacgcgtggggtaccgtggggatgttgtacgaaggacgtaaatgccgctgttgctaccatcaaaactaagcgggcagttcagtttgtagactggtgccctactggtttcaagtgcggcatcaactatcagccaccaacggtggtaccagggggtgatcttgctaaagtacaacgtgcagtgtgtatgatcagcaataacaccgctgtggccgaggtttttgctcgaatcgaccacaaatttgatctcatgtatgccaagagagcattcgttcactggtatgtaggtgaaggaatggaggaa

SEQ ID NO: 212973 - DNA, 305 bp, Gossypium hirsutum
cccacgcgtccgcccacgcgtacggtggtttcgagaccatgtataatgggcacacaggcaggcggcttactgctatgatattcttgggacccacgtattaccaacgactaaagcacatggtcgacgataagatccattcacgtggtcggggtcctgttcaaattctaacgaggcaacctgcagagggacgttctcgtgatggtggtctgcgttttggagagatggaacgagattgcatgattgcacatggtgctgcccatttccttaaggaaagattatttgaccaaagtgatgcatacagagtc

SEQ ID NO: 212974 - DNA, 307 bp, Gossypium hirsutum
gcagacaacaagtatagaccaaggggacggggcaatgttattttggttcaggcaatgatatcatggacggttttaatgaattgaacaggggacctagggctaaggggcctaagagccaaaagggtgcaacacctatcacagcatctactaaggggcaaaatattccctcagatggaaccaaggatgaggaaaaggcatgtgttgttccagaccgtgaacagtataacctagtagaattccctgtggattatgacgatgccaagttctttgttattaaatcatacagcgaggatgatgttcataaaag

SEQ ID NO: 212975 - DNA, 304 bp, Gossypium hirsutum
aattacagttgccttttttccctaaatttaccattatttagttcctttcatccaaaattttgatcctagaagaagtcgaatggcgtcaagaacagttgccaaagatataataactcttcgaggctcagcggcaattgtcagcgagttttttggatatgcagcgaacagcattttgtacaatcgaggagtttatccagaagaaagttttgccaaagtgaagaaatacgggctcccaatgttgcttactcaagatgaaggtgttaaatcgttcattaccaatctaacagctcagctttctgaatgg

SEQ ID NO: 212976 - DNA, 356 bp, Gossypium hirsutum
ggattggagggtataagtttgttgacatcctctaaagagctggttgatcttataaagaacgtagatgtggtttttcattctaaacaagctgtatcaagaaaatcagcactcaatagcttgtatagaattgttccttcaattcgtgaacaattgaaggattgggaggatggattatgtgaaagtgatgctgatggatctttcttgcatgaaaactggaacaaagatctaaaactctttagtgatggggaagatggaggacaacgactacttcagttgtttatattgcgtgcagaagctgagttgcaaggtggtgatattgcacacgcgcacagcctgcagatcatagattcattaaa

SEQ ID NO: 212977 - DNA, 333 bp, Gossypium hirsutum
ggatcctactggtgaaatcaagttggcagactttggcatggcaaaacatatatcagcttgtggtaaaatgctttcgttcaagggaagtccttattggatggcaccagaaggtggtatgaatacaaatggctacaaccttgcagtggacatctggagcttgggctgtactatacttgaaatggcaacatcaaaaccaccatggagtcagtatgaaggggtggctgcaatatttaagattggaaacagcaaagatgttccggagattcctgatcgcctttctaatgaagcaaaaagtttcattaggctttgcttgcaacgagacccatcagcacg

SEQ ID NO: 212978 - DNA, 373 bp, Gossypium hirsutum
cccacgcgtccgaggattcttgggtcgatttatttgtacgcggacgcgtgggtttagaggttgacaaggcccttcttgatggtgctaataccccttcaaactatggtttcgtagaatcaaccataggctgttagcgcacagggactgtaaagacaactgaattcttatgcaatgcacatacactgtgaacttgtgccaatgccttccatgatgtgtgttgggacagtgttcatgcatcgcaggctgctaataaggtccttgattatacatttttttttcaaggcattccccttctttaattcgtcaggacacctagtatacttgtcctttttaaactgaactaatatctgagactacttacttgttctattat

SEQ ID NO: 212979 - DNA, 394 bp, Gossypium hirsutum
cttcggccacgcgtccgcccacgcgtccggatctgcagaacttgaaaaatctgcaaagataggcaaaaatggaatcaggtatattgagaattctatctctttcacgcctaaagatttcggatctgctctgtgggacatgattaggggaaaaggaacaggttactctatgaaaggtcacatcaacgttgacactccgtttggagcaatgaaattacccatcagcaaggagggtggcacaacccgccttaagaagaatagggaagacggtggtgatgatgatgatgatgatgatgaggattaaagcaaaagatcaacagggatggtccccttgagcttcttttgttttgttacagagttcattgcaataatatactaatggggtgtggaatttaat

SEQ ID NO: 212980 - DNA, 375 bp, Gossypium hirsutum
gtgtgttttgcttttcatactcatttagcccctttcattagcatcaaaatcactccagttttctttatcactgaaaaatgtcttgctgtggtggaaactgtggctgcggtactggctgcaagtgtggcagtggctgtggaggatgcaagatgtatccagacctgaacgctgccgagatgaccacaactgagactctggttcttggtgtcgcaccccagaaagcacactttgagggagctgagatggaattcggggctgagaacggctgcctgtgtggagacaactgcacctgctacccttgcaattgtaaatgattagagaccaaagccaaagctcccttgaagcagaggcgcctttgtctttaagaaacaatat

SEQ ID NO: 212981 - DNA, 401 bp, Gossypium hirsutum
cacaaatcacaactaccaagccactatcttttttgggtcatggaattaccgacattgagattcactttttgcaaatcaagttcacagcaattggggtttaccttgaaccagaagttgtaggacatttgcaacaatggaaggggaagcctgggaacgtgctagctgaagatgatgacttcttcgaggctcttattaatgctccagtggagaagtttctgagagttgtggtgattaaggagatcaaaggttcccaatatggagtgcagcttgagagtgctgtgagggaccgattggcagctgacgacaaatacgaagaggaagaggaagaagccttggaaaaagttgttgaattctttcagtctaaatattttaagaaggattcagtcatcacttaccatttt

SEQ ID NO: 212982 - DNA, 389 bp, Gossypium hirsutum
ctttacgccgcaacgaaaaaagccggtgaggaaatcgctcacacttataaccatatatacggcctttccctcaccggacttagatttttcaccgtttatggtccatggggaagacccgatatggcttacttctttttcactaaagatattcttcaagggaaacccattgatatctacagaacccaagatcaaaaagcggtggcgcgtgacttcacttacatcgacgacgttgtgaaaggttgtttaggagcgttagacacggcggaaaaaagcaccggtagcggcggaaaaaagaaaggaccggctcaattaagggtttacaacttgggaaatacttcccctgttcccgtcggccgattagtctcgattttagaaagattgctcaacac

SEQ ID NO: 212983 - DNA, 185 bp, Gossypium hirsutum
accagacgagtggattttaacatcatttcaggaacttcaatgtcttgcccacatgttagtggccttgcagggttgctgaaggcggctcacccagattggagtccagcagctattagatcagctcttatgactacagcttatacggaatacaaaaacaagcagaaaatgcaagatgttgcaacggg

SEQ ID NO: 212984 - DNA, 423 bp, Gossypium hirsutum
  unsure (1)..(423): unsure at all n locations
ccggcncgaatcccgggcggaccacgcgtccggcttttgccaaaagacagctaaagacgccactttgaaaaccggaaatgtcggacgaggagcatcatttcgagtccaaggccgacgccggcgcttccaaaacctaccctcagcaggccggcaccatccgcaagaacggttacatcgtcatcaaaaatcgcccctgcaaggttgttgaagtttccacctccaagaccgggaagcatggtcatgcaaagtgtcactttgttggaatcgatatcttcactgccaagaagctcgaagatattgttccttcttcccacaattgtgatgttccgcatgtcaatcgtactgactaccagttgattgacatttctgaggatggatttgtgagtttgctgactgatagtggagacactaaggatgatctga

SEQ ID NO: 212985 - DNA, 339 bp, Gossypium hirsutum
gcttttgccaaaagacatgttttagacgccttcttttaaaaccggaaatgtcggacgaggagcgtgatttttagtccaaggccgacgccggcgcttccaaaacctaccctcagcaggccggcaccatccgtaagaacggttacatcgccatcaaaaatcgcccctgcaaggttgttgaagtttccaccttcaagtctgtgaagcatggtcatgcaaagtgtcactttgttggaatcgttttcttcatttccaacaagctcgaagatattgttccatttttaccacaattgagatgttccgcatgtcaatctttactgactaccaattgattgacaattc

SEQ ID NO: 212986 - DNA, 405 bp, Gossypium hirsutum
tgatatcaaaagtacatatgatgacatttagcctggcagcatcattccatataggctgaaagttgatctcattgttgatgttcctgtttttgggaggttaactttacctcttgagaaaactggagagatccctataccttacaagccggatatcgatatggagaagatacactttgagagattctcttgggaggaaactatagcagttcttcatttgaaattggagaatatgaatgactttgacttgggactcaatgcccttgactatgaggtctggctatctgaggtcagcattggatctgcagaacttgaaaaatctgcaaagataggcaaaaacggaatcagttatattgagattcctattattttcaggcctaaggatttcggatctgctctgtgggacat

SEQ ID NO: 212987 - DNA, 315 bp, Gossypium hirsutum
atccaagaaaaaagctacaaatttatatccaaccttatgtgaaatagaaggtttaactgtggatgagcagtttcgagcattaagtaaaattccagatcatccaactcaaatgctcgttttctttagtttaccttctaatgtacaattggaatgggtcagaagatttcttgctgaccattaaaaattatggttttgttgatgacattttcgtaactttttctgtttgtaatatttgggatggtatgtcattacaatgttctaactttttggtgtggcaaaactgtataacatatggattgtgacatagaatttcat

SEQ ID NO: 212988 - DNA, 405 bp, Gossypium hirsutum
gaacaacaagaacagctgcacaagcagcagcaatacgatccaagcaatgggcaagacttaaatttggagctgtcgattgggattgtttcagctgactcatctcgggtatcaagtgccaactcggccgagtcgaaaccaaaggtagataacaacaatttccagtttcttgaacaagctatggtggctaaggcggtatgtttgtgttggcaattaggttttggaacaagtgaaatttgtaggaactgtcaaaattcaaattcaaatggcttctatagttattgtagacccttggattcatagggtcatctttttcttctttctttctgtttttaggagataaattaatgcttaattattatctttttgcctgcccactgtaatcaaagcaaaattataaaacaaact

SEQ ID NO: 212989 - DNA, 406 bp, Gossypium hirsutum
cccacgcgtccggagggttttctggatgaacaattcacccaacttcagtcactccaagatgaaaataacccagattttgttgtggaagtagtgtctcttttctttgaagattctgaaagacttcttaatgaactgagtaaagcactagagcagcagatcatagatttcaaaaggatggatgctcaggttcaccagttgaaaggtagcagctccagcattggtgctcacagagttcagaaactctgcatcgtcttccggaactattgcgaagctcacaacgtggaaggatgtcttaaatgtctgcaacaagtgaagcatgagtatggcattattaaaaccaagcttgaatctatgttccagcttgaacaacaaatcttgaatgctggtggctcaatccctgtgtaat

SEQ ID NO: 212990 - DNA, 167 bp, Gossypium hirsutum
gcgtcttgttcaatctcccaattccttctttatggatgtcaaatgtcaaggctgcttcaacataacaaccgtatttagccactctcaaactgtggtggtgtgtggaaactgccagaccgttctgggccagccgttcggcagttgacctagtctcactgaggtctgtt

SEQ ID NO: 212991 - DNA, 400 bp, Gossypium hirsutum
cacactcatttgtttgtttactctgaaggggtgctctgagatcacatagaaaaatggtgaaagcagtggctgtccttagcagcagtgaaggtgttagtggaactgttttcttcactcaagagggagatggcccaactacagtgacgggcaacatttctggtcttaagcctggcctccatgggttccatgttcatgccctaggggacacaacaaatggttgcatgtcaacaggacctcacttcaatcctgctggaaaagagcatggtgctcctgaagatgtgaatcgccatgctggtgatctaggaaatgtcactgttggtgctgatggctctgcgagtttctctattgtcgacatacagattcctctcttcgggccacactccattattggaagagcggt

SEQ ID NO: 212992 - DNA, 344 bp, Gossypium hirsutum
ctcatcctcctaatgttgctgctgtttaccgaaacattgacaagctatttgcacttcctgtaggttatgacctggtatggaggaattgtctagatgactacaccacaccggtctctatttggtatccgcgagcacctgatggattcttctccctgggatgtgtagctgttgcgggttttgaagagccagaagctgatttggtacgttgtgtggcagaaacagttgcagaggagacaacatttgaggagcagaaggtatggtgtgctccagaatcatatccgtggggttgtcatgtataccaagttcaaagtgacgccctttattttgttgctctaagagaaact

SEQ ID NO: 212993 - DNA, 293 bp, Gossypium hirsutum
cccacgcgtccgaattatgggacctccattgatgtttggtcggtaggatgcatctttgcggagattcttggtcggaaaccaatctttcctggaacggaatgcctcaaccagcttaagctgattatcaatgttcttggaagtcaacaagaggctgacattcagtttattgataaccccaaagctcgacggtacatcaagtcacttccgtactctaggggtacccccttttcccttttatacccacaagccgatccattagccatagatttgttgcaaaggatgcttgtttttga

SEQ ID NO: 212994 - DNA, 402 bp, Gossypium hirsutum
gaagaagcttaatgaaagactttattcccttcgatctctggttcccaaaatctctaagttggatagagcttcaatccttggagatgcgattgagtttgtgaaggaactggaaaaccaaaagaaagaactccaagatgagcttgaagaacattcagataacgataatggtgctaagaaaacaggaatgaacggagtccacaaaaagttccaatctgagattttcttacaaaatgatcaaatccctgtgtattttaaccctgaacatgacaagggaccaaatggctttcctgttggaggtaatggcagcgtctcaagggcacaaaatcaagaagtggacacttgtgcagacaagacacagcagatggaggtacaagttgaagttgctcaaatcgatggaaacca

SEQ ID NO: 212995 - DNA, 402 bp, Gossypium hirsutum
gaagcagattcacgatcagtttttgttggcaatgttgattatgcatgcacacctgaagaagtgcagcagcattttcaatcttgtggcactgtaaacagagtaactattctgacggacaagtatggtcaaccgaaaggatttgcttatgtagagtttctggaagcagaagctgttcaagaggctcttgtgctgaatgaatctgaattacatggccgccagttgaaggttatgccaaaaaggactaatgttcctgggatgaagcagtaccgtccaaggcgattcaatccttacatgggctaccggtccaggaggccctatataccgccttatttctattctccttatggattcgggaagattcctagattcaggaggccgatgcggtatatgccctactactag

SEQ ID NO: 212996 - DNA, 357 bp, Gossypium hirsutum
cccacgcgtccgctgctatgtatggtatttctgttgctgcccttggaatgctgagcacgatagctactggactggctattgatgcttatggtcctatcagtgacaatgctggaggtattgctgagatggctggcatgagccacagaatacgagagagaacggatgctcttgatgctgctggaaacaccactgctgctattggaaagggtttcgccattggttcagctgctcttgtgtcccttgccctctttggtgcttttgtgagctcggctgctattttaacagttgatgtattgaccccttaagtttttattggcttgcttggtggggcattgtttctttactgtttttctgttt

SEQ ID NO: 212997 - DNA, 308 bp, Gossypium hirsutum
aaggttcttcacattcaacaacaaggggaagtctctcctgttggtgaaaggaacccaaacacatgggataagaatttgagctctcgtgttcaccaagcgagtttattgatcttttcagctcccctgatgtggtcaagcagatcacatctatcaccattgaacctggtgttgaggtggaggttactattgcagattcttaaatatgcctcacttatatgcttctttggcaacctttagttttagtcaattagaagactcccatcttgatatacccctctaatgcctaaacaatcttttaagctttgagt

SEQ ID NO: 212998 - DNA, 335 bp, Gossypium hirsutum
cccacgcgtccgctccccatcgtctgccttcaagagaagacagagaggtctcctcacaaccaccgtaatgggtcgtgtcattcgagctcaacgtaagggtgccggttcggtcttcaaggcccatacccaccaccggaagggtcccgcccgtttccgcagcctcgacttcggtgaacggaacggttaccttaaaggtgtcgtcaccgacgtcattcacgaccctggacgtggggcttctttagcccgcgtcgttttccggcaccctttcctttacaagaaacagattgaattgttcgtcttcgtcgagggtatgtacactgtgcagtttgtgtatt

SEQ ID NO: 212999 - DNA, 397 bp, Gossypium hirsutum
cccacgcgtccgcgtttttgctggatctggttcaggcatggcttttaataagctgaccgacggcggtgcaacaactccggctggtctcgttgccgcctctctagctcacggatttgcgcttttcgtcgctgtctcagtcggtgctaacatctccggtggccatgtgaatcccgccgttacattcggtgctttcgttggcgggaacattactcttttacgtggtatcctttattggattgctcaactccttggctcaaccgtcgcttgcctgttacttaagttcgccactagtggcctgggagtaccagctttcggactatcatccggcgtgggagcattaaaccgcgtccgtttcgagatcgtgatgaccttcggactggggtacaccggttacgcc

SEQ ID NO: 213000 - DNA, 352 bp, Gossypium hirsutum
cccacgcgtccggtttcttcagttccagtgttacaacaggttcgtgacattcaacataatctcaggaacatcaatgtcttgtcctcatgtttctggtgcagctgcctacgttaaatcatttcatcccacatggactcctgctgctattcaatctgcccttatgaccacagccgcccccatgagctctggcatcaacatggaagctgaattttcattcggttcaggccatttgaatcttttaaaagctgcatattcaggtctagtttacgatgcttatgaaaccgaatatataaacttcttatgcggactaggttacgccactctgctaatacaattattatccaaagacaac

SEQ ID NO: 213001 - DNA, 406 bp, Gossypium hirsutum
caacagaatccggatcacttgatactgttggtacagtagggattttggagctttacccgggagcaatcaatagcatccctagtaaagctcaccttgaaattgatgtacgagatatcgaggaaagctttaggaatgctgttattaataaaatccataaagctgcaaaatcaattgccaaaaagcgcaaggtcaccttatcagaattcaagatcataaatcaggacccaccagctcattctaacggatcagtaatcaaagcagtggtagacgcctcggatgagctgaacctaacgtataagtatatgatcagcagagcttaccatgactcactgtttatggcaaggatagctccaatgggcatgatatttattccatgttacaaaggatatagtcataagccagaaga

SEQ ID NO: 213002 - DNA, 401 bp, Gossypium hirsutum
tacaaactcaaaaaccccaagttctcactttcaaaaaacttcccacattcaccatgtctgacaggtgcggcaactgtgactgcgctgaccgcagccaatgcacgaagggaaacagcaacaccatgatcattgagactgagaagagctacatcaacactgctgtgatggatgctccagctgagaacgatggcaagtgcaagtgcggtactggctgcagctgcacagactgcacctgtggccactaagccaacatacaatggtcatgcttcaggtcatggcatatatagggatctaaataatgaatttaaggttgaataatttgtctgttgtagtttgtgtggtgacttatatctgtcagttaacctttgtatcctttactatgatgtaatggctatgcttat

SEQ ID NO: 213003 - DNA, 392 bp, Gossypium hirsutum
gcctacaaaaaaaagagcaaaaaatggcagaaagaggcggcggagagcgtggcgcttttaggcgcggcttcggtggaggaaggggtgaccgtggtccaagaggcaggcgccgtggccgcaaggacgaagaggagaaatgggtacccgtcacgaaactcggccgtttagtcaaatccgggaaaatcacgtccctcgaacaaatttacctccactctctccctatcaaagagtaccaaatcatcgaccagctcgtcggcccttccttgaaagacgaagtcatgaagatcactcccgtccagaaacaaacacgtgcaggccagcgcacgcgtttcaaggccttcgtcgtcgtcggagacggaaacggacacgtcggattgggtgtcaagtgcagc

SEQ ID NO: 213004 - DNA, 394 bp, Gossypium hirsutum
gcttgcctctgttcccagcggtggtggtgttgctgtggcggcatctgcacccggagccgccgccgccgccgctcctgctgcagctgagactaagaaggaagagaaagttgaggagaaagaggaatccgatgatgatatgggcttcagtctcttcgactaaaactaccacgcaccgccagcaacctatcaatgaaatacggatggttttttggtttctacggaggatttcttttgaatttaaggctgccctaggtttttaaagttagttatccagagccatgtatgtctttctttttggattcattatatttgttttgctgaacccttttgttggaatggaatattcttcccacttaattttaaataaaatttttttatattgatatttatatta

SEQ ID NO: 213005 - DNA, 403 bp, Gossypium hirsutum
gaacaacataccatataatgtcctcatctccgattgtggaaagcggatctttctccttccacagtgttatgctgagaaacaagctctcggggaagtgagtccggagcttctggacacccaggtgaacccagctgtgtgggaaattagtgggcatatggtgttaaaaaggaggaaggactatgatgaggcgtctgatgaaaatgcttggaggctcctggctgaggtttctctctctgatgagaggttccgggaagtgaatgcactcatctttgaagtcattgccagtggcgaagatggcattgaacatgatgctaagagtctgcctaaggagcccgatcctaaagctgaatccactgaagaagaaagcaccatcaccaaaacctcccaccgcgctatggtgggt

SEQ ID NO: 213006 - DNA, 403 bp, Gossypium hirsutum
  unsure (1)..(403): unsure at all n locations
aaggaataccccaatgcattcattagaatcattgggttcgacaacgttcgtcaagtgcagtgcattagtttcattgcctacaagcctaaaggctactaagttgtttacttccctcctaggaattccatttgtttcaaagttgtacttaaattaagcccctcaaaccccccccccctttttctttttcttttttaattgaggtatttggcttggggtctttctctttgttttgttttggatttccaatggaacggctgagaactaatgaataaaaaggtagtttcttgccatatttcttggaaaaaaaatantattaattatattaaaattttataaatatataatatattntttattttttttttttttatttatttatatanttatttaaatttatattttt

SEQ ID NO: 213007 - DNA, 392 bp, Gossypium hirsutum
cccacgcgtccgaaaagagttggagctaatcttaaggagtctgaaatttatgatcttatgcaagcagctgatgttgataatagtggcacaattgactacggggagtttgtagctgctacgctgcacctaaacaaaatcgagaaagaagatcatctatttgctgccttctcctactttgataaggatggtagtggttatattactccagatgagctccaaaaagcttgcgaggagtttggcatataagatgttcgccttgaagaaatgatccgagaagttgatcaggataatgacggacgcattgattacaatgagtttgtggcgatgatgcatgggggaaatgtttccggtgctggtaagaaaggcctgcaaaatagttctagcatcaagtt

SEQ ID NO: 213008 - DNA, 401 bp, Gossypium hirsutum
ggatggggttgcaaaagcttggccaacagattcctgatgcagatttgcagatcctagtggaagctgctgatgttgatggtgatggaactctgaattatggggagtttgtagcagtttcagttcacctcaggaaaatggcgaacgatgagcacttgcataaagcttttgccttctttgatctaaatcaaagtggtttcctagagatagaagatctgcgagattccttaaacgatgaagttgataccagtgaggaagttatcaatgccattatgcatgatgttgatactgacaaggatgggcgcataagttacgaggagtttgttgcaatgatgaaagctggtactgattggagaaaagcatccagacaatattcacgcgaaagattcaacagtctaagcttg

SEQ ID NO: 213009 - DNA, 396 bp, Gossypium hirsutum
gaaggaaagaccctttttcaatggcctgtgcgaattcctcagctctggtcctgttcttgccatggtctgggaaggagagggggtgatcaaatacggccggaaactcatcggagcaacagatcctcaaaaatcagagcctggaaccatcagaggtgatctagccgtggttgtcggaaggaatataattcatgggagtgatggtcctgagactgccaagcatgaaatcaacttgtggttcaagccacaagagttggttaactatacaagcaacgctgagaaatgggtctatggaaacaactgatgagggcatcttttttcaagttaatcagtagtagttcaggaaaatttagtcccacatcaggtgtgggttagaggcataatttttagaataaatgc

SEQ ID NO: 213010 - DNA, 347 bp, Gossypium hirsutum
ggaccaacaaaaacaaaaactcataaaattaagatagaataactgaacaccgtattgaaatgcagagcaatttaaaatctgacggtctaaaaagcagtaaatctaggccgggaccaagccaaaaaaaaattttaactcagccgtgggtattaaaagcttcccacaacaaattctttggggcagggttagttaagtctcgagcttgcaaggcggcagtcctcagagtcctaatcgtcgatttattcgcctcccagaaagacagactccggtaaggcaatttgtgcttcttgcagagttccctcaccagaggggaaaccttccttaaatggcaccggggcaacctgggg

SEQ ID NO: 213011 - DNA, 360 bp, Gossypium hirsutum
gcacttggcatagccttgaagttaactttttcaggaatgaatcagcttgtatatccacaaacatgggcctttactttagttgtggttacttgtgtggttactcaaatgaattatttaaacaaggcacttgatgctttcaacacagctgttgtttctcccatatactatgttatgttcacgacactgaccattttggcgagtgtaatcatgtttaaggattgggacaggcaaaaccctacgcagattataacagagatgtgtggatttgtgactatcctttcaggaacttttcttcttcacaaaaccaaagatatgggtgatggtacaagtttgacatctatgtcaatgcgacaattaaag

SEQ ID NO: 213012 - DNA, 430 bp, Gossypium hirsutum
cccacgcgtccggttctagatcgcgagcggccgcccgcgatctagaaccccacgcgtccggaaagaatatatcaggcctcaagaagagcttacaagcataggtaacgtgtttgaagaagagaaaaaagaggaagggcctcaggttccgaccatcgatttgacagaaatcgagtcggaggacaaagaggtccgggaaagatgtcagcaggagctgaaaaaggctgccatggaatggggtgtgatgcaccttgttaaccatggcatctccgaggagctcatggatcgtgttaggaaagttgggcagaaattctttgaactccctgtggaggagaaagagaagtatgccaacgaccagagctctgggaatggtcagggctatggtagcaagcttgtaacaatgctagtgggcagcttgagtgggaggactact

SEQ ID NO: 213013 - DNA, 434 bp, Gossypium hirsutum
attagtttctgcatctttcgttttatttttcgtatattaatgacgggtcggggtaagactgtgggatccggagcctcgaagaaggcaacatcaaggagtagcaaggctgggcttcagtttccggagggtcgaattgctcggtttcttaaagctgggaaatatgctgagcgggtcggagctggagctccggtttacctcgccgccgttcttgaatatcttgccgctgaggttcttgaactagcagggaatgcagccagggactacaagaaaacccgaatcgtgccacgtcacatgcaacttgccgtaaggaacgactaagagctgagcaagctgctctgcgatttgacgatcgccaatggtggtgtgatgcctaacatccacaaccttcttctccccaagaaaaccggaaccttcaaaactttcggtgccgatga

SEQ ID NO: 213014 - DNA, 436 bp, Gossypium hirsutum
gtccgactgcaagggctattcatgacttggccaccgattgtttggaaagtgccaagactgctccattctgagagaatttggttcaaaaagaccttgaggttctctatttagatgagcctatcgaagaggttgccattcagaaccttcagacctacaaagagaagaaatttgttgatattagcaaggaagacttggaacttggtgatgaagatgaggtaaaagagagagaaactaaacaagagttcaatcttctctgtgattggataaagcaacaactgggagacatagtggccaaagtccaaatttctaagcgactaagttcatcaccttgcgtgcttgtctctggcaagtttggatggtcagctaacatggaaaggttgatgaaagcacatgcgcttggagatacagcaaggttgggagttcatgaggggaagga

SEQ ID NO: 213015 - DNA, 437 bp, Gossypium hirsutum
cccacgcgtccgcccacgcgtccgaaaaagttctgagagaacaaattgctgacggacagcccaggacacatatgccatggaagaagataattgttgtcgtggagggtatttatagtatggaaggggaactttgtaagcttcctgagattgttgccatatgcaagaagtacaaggcttatgtttatttggatgaggctcacagcattggggctgtgggaaaaactggaagaggcgtatgtgaactcttaggagtggacactgctgatgtggatatcatgatgggaacttttacaaaatctttttggtcttgtggtggttatattgctgggtccaatgaacttatacaatatcttaaggacacatgtcctgcttatctatatgcaacatcaatatcaccttcagctgcacagcaaattatatcttcaataataggttat

SEQ ID NO: 213016 - DNA, 353 bp, Gossypium hirsutum
ccggacgcgtgggcggacgcgtgggcggacgcttgggtccgagggcaattcgtacgacaaactgtgaacaccaatgaccccttatctgaagccaattcatccgacaaatagcaaagaggaaaacactagaagagtccagctgataaggtaacaagatttgatccactcctctgataagataccttgttgtaatattatttgggaatgttaaaaagatttgatgaactccatttttattggtatatttagtgttataagctttaaagaacgtgccttaaaggggaactgaaagaaggtagaaaaacttctataataattatccattttgtgtcctaaaaaaacataatgaaaaa

SEQ ID NO: 213017 - DNA, 444 bp, Gossypium hirsutum
cccacgcgtccgcccacgcgtccgcccacgcgtccgggtgacgcaacggttcgggaatctagatttcaagctaaaatttgtggaggtaccttcgtgatccatttacactgtaatttgaatgtcaagcaaaaaaggatggcgtgttagagcttcatgtgaccacaaatcttgggaatcttaaatttgactttcacctggtttattgcagcacaacattcgtttccttcaagaagttatccaaaatagacggtcagatctcttggaatggtgtatcattttcttgttgaccatcgagaatgtaatagcaatatacgagattgtccgcgaatcaagcggcgtttctctgtgatttggctagctgatgaggaagtgaggatatacaaacttgattacaggtacaaaaggtaaaagtagtttattacccagaaaaaaaggaaatttcag

SEQ ID NO: 213018 - DNA, 429 bp, Gossypium hirsutum
cccacgcgtccgcccacgcgtccgcaacgacattacttctatcgcaagcaatggcggtagagagcaatgcatgcaagtgtggcctgctactggaaagaacaagttcgagactctctcatacctccccgatcttacacccgtgcagttggctaaagaagaggattaccttcttcgctcaaaaagggtgccttgcttggaattctaattagaggagggattcgtgcaccgtaaatacttgagcctacccacgtactacgatggacgctgctggaccatgtggaagctgcctatgttcaggtgcaccgactcggctcaggtattgaaggagcttgaggaatgcaatatggaatacccctatgcattcattagaatcatgggcttcgacaacgtgcgtcaagcgcagtgcattagtttcattgcctacaagcc

SEQ ID NO: 213019 - DNA, 442 bp, Gossypium hirsutum
ctttcgacaagaagcagtttgtcgtgttcatgaagaagttcatcaagaacttgacaccgaaactggatgcggaaaagcaagagtccttcaagaaaaacattgagggagcaaccaagtttttgctttcaaaattgaaggaccttcaatttttcatcggagagagcatgcacgatgatggatgtttggtatttgcttactacaaggatggtgctgttgacccgacatttttgtactttgcgtatgcattgaaggaggtcaagtgctgaagtttgaagcaaagaaaaaaaaagtggttgctgaagaatttagtcctttttattatagcttttggctcttattttcagtactctgctaaagacataaattatttatggtttttgatggttttgaattaattggttggtggtttatcatggaatgagttctatttttatgggttgac

SEQ ID NO: 213020 - DNA, 435 bp, Gossypium hirsutum
cccacgcgtccggatgttcgtccaatattttggtctaaccgtcctaagagttacataaccaggactattggttgggatcagtacccatatgggcgatggggtgattctcgaaatccgtcctatggtgcactaacagaccatcagttcatgaggcctcgagcacgtgacaagaaacttcaagaagaatgggcttccccattgaaaagcattgatgatattcaagagaaatttaaaagttattgtctgggaaagttgagaagtagtccttggtccgaactggattcacttcagcctgagacaaagatcatacatgaacagctgggaaagatcaatttgaagggtttccttactatcaatagccaacctgctgtcaatggtgaacgctctgattctccatctgtcggttggggtggccctggagggtatgtttaccag

SEQ ID NO: 213021 - DNA, 386 bp, Gossypium hirsutum
cccacgcgtccgcggacgcgtgggcacgagtccccttcttagacaaagaatttatcaatgttgccatgtctatagaccctgaagcgaagatgataaaaaatgatgaaggacgcatcgagaagtgggttctaagaagggcatttgatgaggaagaacatccctatctgccaaagcatatcctctacagacaaaaagaacagttcagtgatggtgttggttatagttggatcgatggtctcaaagcccatactgcccgacatgtgaccgataagatgatgtccaatgcttctttcatatttcctcacaacacaccaactacaaaagaagcatattactacagaatgattttcgagaggttcttccctcagaactcagctagattgact

SEQ ID NO: 213022 - DNA, 448 bp, Gossypium hirsutum
caccactacatatacgggattccaatgtaccgtttctgaagaaacctcggaaaagttcaagggattgcccggggttctttgggtgttaccggattcatacatagacgtcaaaaacaaagattatggaggtgataaatatgtcaacggggaaataattccatgcaaataccctacttatcaaccaaaggcaagaaaagaatccaaatatgtgagcaaaaaatacgagagacgaaaagacggccctcctgcaggacagttccgaccaaagcaagcagcaagtcagtcggaatcatcgtcttgacaaggtaccagaaatgctgtttcgagactactcatacttatggaggtctaaagtccaggttttcatcatgcaacttagttgctctcgtttgttattcatcaatgtttcactgctaggaccggtaaataatattcgagctgatatcaa

SEQ ID NO: 213023 - DNA, 433 bp, Gossypium hirsutum
ggttgttttcgatttttgtattaagagtctccctttggtgtttttctaattcaatcagtgaggtgaagaaaaatgtcttgctgtggtggaaactgcggttgcggctccggttgcaagtgcggcggcggcggcggctgcggctgcggcggttgcaagatgtaccctgagatgaactttgctgagcaaaccacaactgagacacttgttcttggcgtggcaccccggaaagtgaactttgatggagctgaaatggaaactggggctgaaaatggctgcaaatgtggagataactgcacttgcaacccttgcaattgtaaatgaggggaaaaaaaaaaccgaagcatattatggaagctgatctaaataatatatgatgtatttgggtttttattattagaataaagcagccatggttcattaggtggtttgcttc

SEQ ID NO: 213024 - DNA, 429 bp, Gossypium hirsutum
  unsure (1)..(429): unsure at all n locations
cgtaaagcaacatctgaagatgcccctgctcctgcagaggataagaaacttgctacttggggaactgaggttcctgaggacctggttcttgatgaaaaacttcttactgaggcacttaagaaagaggatgagaggagaagagaggagaaagatgaaagaaaacgcaagtataacgtcagatggaatgatgaggttactgctgaggaaatggaggcatataggatgaaaaaggtacaccacgatgaccccatgaaggatttcttgaattgaaaaggtaaatgtaagagcaaagaaaatggataatgccaatcagctttgtggttgtcattgagttgatgaaaatcatgtcgntgttttgtttgtataatacactaaaagtattaaattaggttccagtgacagatggtcttggcttcttgtaaattatga

SEQ ID NO: 213025 - DNA, 416 bp, Gossypium hirsutum
caagtattgaacattgaactggatcaagttattgaggcttgcaaatttcttgatgagagttggaaccccaagtttgtggtcattgtggcacagaaaaaccatcatactaagtttttccagcagggatctcctgacaatgtcccgcctggaaccgttatagacaacaaaatctgtcatcctaagaacaatgacttctatctttgtgcccatgctggaatgattggaaccacgaggcctactcattatcatgttctcttagatcagattgggttttcagctgatgatctgcaggaactagtccattctctgtcgtatgtgtatcaaaagagcaccactgccatatctgtaggtgctcctatttgctatgcacatttggcagcctcacaggtgggtacattcatgaagtttgaagatac

SEQ ID NO: 213026 - DNA, 332 bp, Gossypium hirsutum
ggaaatctgttggaagtagcacacgtagttcctgccttcaatcaaggggaacttcaccctgtatggcagcagcctaagctgcacgaatattgtcattccaagggaattcacttgtctggatattcaccattgggtagccaagctggagaaaatatcaagagaagagttcaggaaaacccggttcttaaaatggtcgcagagcgattggggaaatctccggcacaagtggctctccggtggggacttcaaaggggccacagggtactgcctcatagcactagtgaggcaaggcttgaagaaaaccctgatgtttttaactggtctattccaaa

SEQ ID NO: 213027 - DNA, 431 bp, Gossypium hirsutum
cccacgcgtccgtacagcttcaacatcaccctttgagaaccaaggcaattacggctgcggttttgtcagggattagtgacactgtttctcagaagctttctggaatacccaaacttcagctgagacggattcttctcaaaatgctctttggatttgcttatcttgggccatttggtcattacatgtatatgctactggataaaatcttcaaggggaagagagactccaaaactgttgccaagaaggtggtgctggaacagttgacaacttctccttgcaacaacttgcttttcatgatttactatggggtggttgttgagggaagaccctggatgcatgtgaaaactaggatcaagcaggagtatccgaaagtacagatgactgcatggacgttctggcctgttgtgggatggataaatcaccagtacatg

SEQ ID NO: 213028 - DNA, 435 bp, Gossypium hirsutum
agaacatcaaaagttgtattaaagctctttgcaatttcaatgctgccaaaggcttcgaaataggaaaggataccactttaccagtaacgtatatacgttccatggaggctcctttggaaaatcttggaggaaagcctccttcagagaggaacattctggccttctttgctggggggatgcacggttatcttcgaccgatcttactacagtattggcagaataaagaatctgatatgaaaatctttggaccaatgcctcgtgatgttgaaggtaaaagaaagtacagggagcatatgaagagtagtaagtattgcatatgtgccaagggttatgaagttcatacaccaagagtggttgagtcgaattactatgaatgcgtgccggttatcatatcaaataactacgtgccaccattctttgaggtgttgaattggg

SEQ ID NO: 213029 - DNA, 422 bp, Gossypium hirsutum
gtgccgacatgagcatatactacccttacaccgaggtgaagaagaggttgaagcatttccattgcgagatcgaacaacttctttacagcaaagttgaaaatgaagagcactggtgtgtgctaaacgaccacaacaagccaattctatttacaatggcaaggctggatcgtgttaagaatttaagtggacttgttgaatggtacgggaagaatgctaagttgcgtgaattggttaaccttgtagttgtcggcggagatcggagaaaagagtccaaggatttggaagagaaggctgagatgaagaagatgttcgagctcattgagaagtacaagctgaacggtcagttcagatggttatcatcccaaatgaacagagttaggaacggggaactttaccgttacattggtgacacatagggtgcc

SEQ ID NO: 213030 - DNA, 331 bp, Gossypium hirsutum
cggacgcgtgggtttaggttgatcttggttgatagcaggatccaccgactcgcccgctattacaagaagacaaagaagctgccaccagtgtggaaatacgagtctaccactgccagcactcttgtggcctagataaatcaaattttgaactgtcctcccgtgcttcaattgatattcttccggatgggctagcaggagttggactttttgtatttacattctattaatgccgtaaaagaactagtccacttaatttgaagttgagatacttaatgtgttaaatcttatgtttagtatattggaataattcattttcatttcattttttcaa

SEQ ID NO: 213031 - DNA, 342 bp, Gossypium hirsutum
cgaagaaccacgataagggagttgaggactttttatcagaggaagagattcgcgtaagaagtaatgaaatgctcgagaatgaagaaatgcagcaccttctccgtcttttcaatatgggaggtaatgcttccattaatatgacagaagacagtgggtacgggttcccaaattacataccatccccaatgccaaactttgtagacgaagaccgttcacgttctggcaaagctgttgtagggtggttgaagattaaggccgcaatgagatggggattctttatccgaaagaaagctgctgagagacgggcacagatagttgagctagaagaagaagaagaagaag

SEQ ID NO: 213032 - DNA, 122 bp, Gossypium hirsutum
ggaaatcaaccggtggtaaagctccacgtaagcaactggccacgaaggcggctcggaagtcggctccggcaaccggaggagtgaagaagcctcatcgttttaagcccggaactgttgctctg

SEQ ID NO: 213033 - DNA, 332 bp, Gossypium hirsutum
gtttcattggcaagcaacaatcatgggaccctcagatagcccttatgctggaggtgtgtttttagttactatccatttccctccagattatcctttcaagcctcctaaggttgcatttaggaccaaggtcttccatcccaacatcaacagcaatggaagcatttgtcttgatatcctcaaagaacaatggagccctgcactaaccatttccaaggttctgctctcaatctgctcactgctgaccgatccaaaccctgatgaccctcttgttccggagattgctcacatgtataagaccgatcgggccaagtatgaagccactgctcgtagct

SEQ ID NO: 213034 - DNA, 322 bp, Gossypium hirsutum
aaacacttctccagtgaccaaaaaagcttcattgtctcttctatcgaaaaccccatggctgctcttaagctagtttgtgctctagtgttgtgcatgttggtggttgagcccattgccacaaccaccataacatgcggcgatgtgacaagcaaagtggccggttgcttatcatacttgcagaacggagggaacgtgccgaatgcttgctgcgacgggatccggtccctgaacaacatggctcgaaccacccctgaccgccaaaccgtgtgtgggtgcttgcaagctgccgctaaggctgtcaaaattaaaggcaacttggctg

SEQ ID NO: 213035 - DNA, 333 bp, Gossypium hirsutum
cggacgcgtgggtggaatatctccattatgattgtgatcccggtatagttcatcgagacatcaagccggaaaacatcctcctcgactccgatatggaaccgcatatctccgattttggaagtgctaagctcctcgacgagtctgtggcttcagaaccgtcgatggtagttgcgggcacggttggacatatagctccagaaaatgcattcagaacaacatggagcaaagaagcggatgtgtatagctatggggtggttttgctcgagctgataaccgggaagagggcattggatccatcatttatgggggagaccgatatcgtggggtgggtca

SEQ ID NO: 213036 - DNA, 346 bp, Gossypium hirsutum
aaaaggaaaatataggtgaagacaagcaaaatccagctgaggaagacgaagaaatatcaactttagatctcaacagcaatacatggggttcttgttctgatcatcaagaaactgtgaaaaatgcattatcaagagacaagaacagtacagaagagggcctgctgactattggattaggacattcaaaactaaaagctggccgaactggatttaaaccttacaaaaggtgttctgtggaagccaaagaaaacagagtgatgaacactggcagtcaaggtgaagagaaatgtcccaagagggtacgcttggaaggggaaccttcaacttgacttttacacaattgcat

SEQ ID NO: 213037 - DNA, 352 bp, Gossypium hirsutum
gaacttgaagttactgatgggcctttgcttccaacaaaaggctcagatgaattcaagccgtttattcgtaggctacctgagtttaagttctggtactccatgaccaaggctttctgcatagcatttgtcatgactttcttttcggtatttgatgttcctgtcttttggcctatattgctttgttattggattgttctctttgtccttacaatgaggcgtcagattgcacacatgatcaaatataagtatattccattcagctttgggaagcagaaatatactggtaagaaagcttccccaagtagcaatggctcccgtgtggattgaagcttggctggttcacaggtatgca

SEQ ID NO: 213038 - DNA, 338 bp, Gossypium hirsutum
gtcgatacatcaactatcccaactaagaccaagtacacccctcccaagcagcctcactatgagcaggacaagacctcggactttgttataaagcttctccaattcctcgttcccctgctgatcttgggattggccttcggagtccgcttctataccaaatcacctgcttaagcatcaagaccacaacccagaatggaaaaacttctcaatattattattatgttagtttaaacgtttgtttggaactgttacatattgagggatggttcgaaatactatatttactcgttctgtttattgaccagttcccggtgccccattttcaatgtaatatctaa

SEQ ID NO: 213039 - DNA, 333 bp, Gossypium hirsutum
caggatgttacaacttgctttgttctggttttgtccaaaccaacaacaaggttgccattggagcagcaatctcaccaaggtcctcttacaatggcagacagttcgatatcggattaatggtttggaaggatccaaaacatggacattggtggttagaattcggaccaggattattggtgggatactggcctgcctttctttttagtcacttgagaagccatgccaacatggtacaatttggaggagaaattgtgaacactagatcctcaggattccacacatcaacacaaatgggcagtggtcattttgcagaagaaggctttagaaaagcag

SEQ ID NO: 213040 - DNA, 343 bp, Gossypium hirsutum
gactggccaagcttggatcagacaaagcaggcggacatgtttcaactcgagtattgggcacccagggatacgttgctcctgaatatgctttaactggacatctaactacaaaatcagatgtgtatagttatggtgttgttcttttggagttgcttacaggcagagtaccagttgatgcaaagagacctcatggggaaggtgttcttgtatcatgggctttgcctcagttaacagatagggagaaggtcgtccagataatggatccaacactagaaggtcaatactcaatgaaagaagtgattcacgttgcagctattgctgctatgtgtgtgcaaccagaagc

SEQ ID NO: 213041 - DNA, 340 bp, Gossypium hirsutum
ggaatctatacggcattcaagaatcataatgagagttcaatacctaatctctacagcgtgcattcttggcttgggattggaatcattaccctttatggcattcagtggatatatgggtttctcatattcttctaccctggagggtcgaccggattaagaagcgaatcacttccatggcatgtactgttggggctgtttgtatacatcttggcagttggcaatgccaccttagggttcctggagaagcttacattccttgagaactcagggcttgataaatatggtgccgaggcataccttgtaaacttcacagctattgtcacaatattgtatggagcct

SEQ ID NO: 213042 - DNA, 302 bp, Gossypium hirsutum
cccacgcgtccgctttattatgaagtgtgatgtggatatcaggaaggatctctacggtaacattgtgctcagagggggttcaaccatgttctctggtattgcagaccgaatgagcaatgagatcactgcacttgctccaagcagcatgaagattaaagtcgttgcaccaccagagagaaagtacagtgtctggattggaggatctatcttggcatcactcatcacctttccatcatacgttgatttccaagggtgacgcataatgaattcggtccatccattgtccacatgaagtgcttcta

SEQ ID NO: 213043 - DNA, 341 bp, Gossypium hirsutum
tgtcactgccatccacgatgatgaaggagcccaagccttcagcgagaaacgtggccataacttggttattacagccaattggagtgatgtaagtgtttatgattacgattgccttgttgtgccgggtgggaggtccccagagttgctggtaatgaacgacaaagcagtcactctagtgaaggaattcgctgagaaaaacagggtcattgctggtgttgggcaagggcaatggctccttgctgctgctggtgttctaaaggggaagagatgtgcatgcggggatggaatgaaggtaatggtgaagattggtggaggggaattggaagagtctaaagggtgtg

SEQ ID NO: 213044 - DNA, 346 bp, Gossypium hirsutum
gtatacccggggcatggtattcaatttgttcgcaacgatgccaagattttccgtttctgtagatcgaaatgccacaagaacttcaagatgaagaggaatccccgtaaagtaaaatggaccaaggcctataggcgtttgcatggaaaggacatgacacaggattcaacatttgagtttgagagaaaacgtaataggccggagagatatgatagaaaccttgcagagaatactctgaaggccattaaaaagattgataaaatcagatcagacagggcatctgaccacatcaaaaacaggcttaagacaggcaaagtccagaggcagaaagaagcaaggaagcaattgg

SEQ ID NO: 213045 - DNA, 255 bp, Gossypium hirsutum
gtaaaatgaaagtctataaccctaagatgggtatggatgctcttcaagttttccctgttagtcgtgctgctgctgaccagcgcgcaagtcgtgctggtagaactgggccaggcacatgttataggttggatacagagagggcatacttaaatgaaatgctgccagcttctgtgcccgaaatacaaaagaccaaccttggcaatgggggggtgctggtcaaggcttttaaaataaaaaacttggttaaatttgatt

SEQ ID NO: 213046 - DNA, 109 bp, Gossypium hirsutum
cgttactttaccattatattgtattctttgagacattattatttttttaccttttgaggacactctttttttgtatttgaaggaatttattgtttattttgtttggaat

SEQ ID NO: 213047 - DNA, 330 bp, Gossypium hirsutum
ggacaactgaggaggttaaaaagatcattacaacattgaatgaagctgaagttccttctgaggatgttgtggaggttgttgtgagccctccatttgttttccttacctttgtgaaaagtctgttgcggtctgatttccatgttgctgctcagaactgttgggttcgcaaaggtggtgcttttaccggagaaattagtgctgagatgcttgttaatctgagcattccatgggttatcatcggtcactctgaaagaagggctctcttgaatgagtccaatgagtttgttggagacaaagtagcgtatgcactttctcaaggcttgaaggtta

SEQ ID NO: 213048 - DNA, 345 bp, Gossypium hirsutum
aaaacacgtatcatatatggagggtctgttaatggaagcaactgtgctgagcttgcaaagcaggaagatatcgacgggtttctcgtaggtggcgcttccttgaaggggccggagtttgctacaattgtcaactccgtaacatccaaaaaggtggctgcctaaatatatatgaagctgattgaaagtaagaaataaaggacctaaatgaagaagctatttgaggttgaagcttcacgtgacatatttagtgttatataccccatggagttttttgattacttattgagttccattttcccggaaaatgataggaaaaaaagaattgtggtgttgtgaaataagttg

SEQ ID NO: 213049 - DNA, 329 bp, Gossypium hirsutum
caacgactctcaccgtcttgccactcttcagctcgtggcagaacttcataattggcgttcttgctttgttgcgtatttatgttcacaaaagtcatacattgaagctcttagtggatggcttgcgaagttcgttgcacccgaagtagaattatgctccaagaagaggtcttcggcccctacgttaagagtcaatggaccaccgttattggcaacttgtcatgaatggttggctaccttagagaagttgccaaaagaagctgtaagttgtgcattaaaaagctttggaaaggatatgcgtgcgctttgggttcaacaaggtgaagagcaaa

SEQ ID NO: 213050 - DNA, 274 bp, Gossypium hirsutum
cccacgcgtccggtgaattgactccaatggatggatgggccccggttaccattttgaattggcaattcattccatttggagagaaactggatatggaaatgtcagctctccgtacatgataagagaatatcctggaaatgaggaagagaagatgagaggtgcaatatggaagtttggattgtcagggaaagcgcaagtgatgccgatgaagaacctatctgatggacagaggagtcgagtcatcttcgcgtggttagcatttcgacaaccccac

SEQ ID NO: 213051 - DNA, 345 bp, Gossypium hirsutum
cccacgcgtccgcgactgccacacctctcacattgctgtcaaattttccgaactgttgaccaagattgacagacgatctggcaaggaactcgagaaggaacccaagttcttgaagaacggtgatgcaggtatggtaaagatgattcccaccaaacccatggttgttgagactttctctgaatacccaccacttggacgttttgctgtccgtgacatgcgccagactgttgccgtcggtgtcatcaagagtgttgagaagaaggacccaactggtgctaaggtcaccaaatctgctgccaagaagaaatgagagattatttgagagagaattatatcagttttcat

SEQ ID NO: 213052 - DNA, 342 bp, Gossypium hirsutum
cttgccatctcatacccaactcttgctgctgcaccacacatgttcatcaatgcatacaagaacgtcttgtctgtcgcagttgcaacagagtattctttccctcacgctgataaagtgaaggagtacttggcggatccaagtaagtttgcggttgctgttcccgctgttgctactgatgcgggtgcagccccagctgctgctgctgcggcagccgaggagaagaaaccagaacccgaagaagagtcggatgatgatatgggattcagtctctttgactaaggttgtattattatttgtttgggttgcaagacatatcagttacaatggtgtggttagattatt

SEQ ID NO: 213053 - DNA, 339 bp, Gossypium hirsutum
cccacgcgtccgcccacgcgtccgcccacgcgtccgcccacgcgtccgcccacgcgtccgcccaattgaccaccatgtttaaattaatcaacatcctaaccatccttgtgctacttacatttagttcggaaattgcagatgccgcacctccgtgccaggaggttatcgtgtcgattaccccttgcttgagcttcataaaaggccaacccgatccggcaccaggatgttgttcgggtgctaaagggcttgctaagcaagctaacaccaaactagataggcaaggaatatgcgagtgccttaaaggtgtattgccaaaaataggaccatatgaccctaaaa

SEQ ID NO: 213054 - DNA, 341 bp, Gossypium hirsutum
aattacgcttacaacatgagaaacacagtgaaagatgaaaagattggttcaaagctctcaccagatgataagaaaaagattgaagatgctattgaagaagctattcaatggttggatagtaaccagttggctgaagctgatgaatttgaagataaaatgaaggaattggagagtgtttgtaaccctatcattgctaaaatgtaccaaggtgctggtggtgatatgggtggtagtatggatgaggatgctcctccgtctggtggaagcggtgctggccctaagattgaagaagttgactaagtaattggtcaaggctctattttaaattagattcgcttaaa

SEQ ID NO: 213055 - DNA, 334 bp, Gossypium hirsutum
ctggaggaagcaatactaagaatttgtcttattcttccacttctggacaatctcctgcccaagcaaagagatctaaacccaattgtcagggcatacatgttccgcgttgccaagttgaagactgtaactttgacctctcctcagcgaaggattaccatcggaaacacagaatttgtgaaagtcattcaaagagtccaaaggtcattgtacgtggtcaggaacgccggttctgccaacagtgtagcaagttccatggcctgtcggagtttgatgaaaagaagagaagttgtcgccggcgcctttctgaccacaatgcaagacgccgcaaaccaca

SEQ ID NO: 213056 - DNA, 336 bp, Gossypium hirsutum
ggtggtttaagatatccgtatgcctccgcatataatggggttgaaggtgaatcagctcagaggtgtaaagccagattggagagatatcaacgaacagctgaacgtgcagctaaagctctcgaagaaaagaacatgcgcgatcttattgctcaaagagagcaagctgaaagaaatagattagcggaatctcttgatgcggatgtcaagaggtggtcgagtgggaaagaagggaaccttcgtgcattgctttcaactttgcaatacgtatgtactattatccaaattctctccaatcaagcttttataatcatttcctttgtttactgggtcgtttaa

SEQ ID NO: 213057 - DNA, 335 bp, Gossypium hirsutum
aaagaagtaaaacagaagcttgatattggatctgtaaagtttgaggtattatgtgacaaggatcgcaacccaaagaaggtcccaggagaagggtgccttgagagaagaatcctggaaattaatagaaaacgagttaaggttgtaaagccgggttcaaagacttcttttcctgctaccgaaatacgtggaacctttgctcctccttttcatgtggaggttttccgtaatgaccaacgccgacttaggattgtgttggacagcgagaacgaagtagacctcatggtgcattcgcgatacatcagggatgttattgttcttgtgatccgtggtcttgc

SEQ ID NO: 213058 - DNA, 340 bp, Gossypium hirsutum
cggacgcgtgggcggacgcgtgggattgtagaacatggtgataaacaaaatgattagtgcaagatgtttgttatcgtcttgctggcaaattttgttccaatgcaaggatgaaatttattgttctactttggggggcgaaatcacgcctggccaacaatgaaacactcggtgtacctgtattcagttataaggagatggtgaagttaggaagagaaaattgtgctgtccttattgattctcttgatgctagaaaaggttgcagatatgaagtgatcggctgacatgatattgctgccattgtatatacgagtggaaccactagtaacccaaaaggcattat

SEQ ID NO: 213059 - DNA, 345 bp, Gossypium hirsutum
cttggatgatccaactcctggctgtcacttgtctctctttggctgcaaaagttgaagagacacaagtgcctctgctcctagacctacaagtggaggagacgaagtatgttttcgaggccaaaactatacaaagaatggagcttttggtgctctccacactgaaatggaagatgcatccaattacacccctttcatttctagatcacatcataagaagacttgggttgaaaacccacctccattgggagtttcttaagcgatgtgagcatctcctcctctgtgtaatcactgattcaagacccatccattatcttccctctgtattggctactgcaaccatgatgc

SEQ ID NO: 213060 - DNA, 314 bp, Gossypium hirsutum
cggacgcgtgggcggaaggaacaaaacacagtgaaaaaatggtggtcaccagtggagctgaagttcatgatgattccaacaactacgacagagaaaaagaactgaaagcattcgacaattcaaaagccggtgtcaaaggtctggtagatgctggaatcactaaggttcctcgtatgttcatccgttcagacatttcatcgaacactttagagacaaccaagaaaacccaatacaatattccagttattgatctacaagggatcgaagatgatccacggcggcataaagagatcagtgaccaagtcaggcatgca

SEQ ID NO: 213061 - DNA, 317 bp, Gossypium hirsutum
cccacgcgtccgtgcatgttacaagggaaaccaaaagttttttggtttatggtgcatcatggcttgtgattgttctaatattgtttgtaatgaagactgtatctgttggaaggcggaggttcagtgcaagctatcagcttgttttccggctcatcaagggattaatattcttgacatttgtgtccattctggttattttggtcacacttgctcatatgacaattcaagacattatagtgtgtatttttatcttcatgcctacggattggggaatgctcctgattgctcacgctttgacgcctgttgttaacaaagct

SEQ ID NO: 213062 - DNA, 333 bp, Gossypium hirsutum
cagaaagccaaagcctcttgctgcatatctcttcagtgatgatgaaaagattaagaggaagtttgtgcaaaatatttacgccggaggaatggctattaatgacaccattctacaagtcacagttcccactctacctttcggaggagtcggggagagtggaatggggtcataccatgggaaattctcttttgatgcttttagccataagaaggcagttttatacagaagttttgcaggggattcgccgactaggtacccaccatacacaccgggaaagaaaaagcaaataaaagccttactcagtggcaagttacttaacattatgcttgcttt

SEQ ID NO: 213063 - DNA, 324 bp, Gossypium hirsutum
cccacgcgtccgtcgaaatccactgcagaagagcttttagataaggagctccctttgaagtttgtagaggttgacgaggaacagtccaggcttgtcttcagtaaccgcaaggccatggctgatagccaagcacagctcggaattggatcggttgtcctcggaactgttcagagcctgaaaccatatggtgctttcatcgacattggtggaattaacggccttcttcatgtcagtcaaatcagtcatgatcgtgtttcagatattgctacggttcttcaacctggtgacactctgaaggtcatgatattgagccatgaccgtgaa

SEQ ID NO: 213064 - DNA, 336 bp, Gossypium hirsutum
cccacgcgtccggttcggtttcaaaatatatcctccatgacgaaaaccttataggaagcctgactttgactttcgacgaggcaacgtccggtgttgcttgtgatctcaattctcgtggattccatgtattgtgcaaagcaactgaagaggctgttggacatgtgaaaccttactcaattaccggaagtttgccactcattcgggagctacaagatgaaggttttgatgttcaaactgctggctacggtttaatggccacgtaccacgccaagaacgagtactgccttctttccgatatgtgccaaggttatcacgtatttaccggcatcatcgctc

SEQ ID NO: 213065 - DNA, 344 bp, Gossypium hirsutum
aattaaccttcccccagggacggttcctccagtaactaagccaccaagtgggaaaccctgcccaacaccaccaaccaaggacacttgccccattgacacactgaaattgggtgcttgtgtggatctgctgggagggttggtgcacattggactaggtgacccggttgtgaaccaatgttgtccggttctttcaggactcgccgagctcgaagctgcggtctgcttgtgcaccaccctcaaacttaaggttctcaaccttaaaatttatgtgccactggctcttcaactccttgtcacatgtgggaaaacaccccctcctggttacacttgctctctctaaaacc

SEQ ID NO: 213066 - DNA, 333 bp, Gossypium hirsutum
cttttacgagcttatggaatagctcggtatggtgaagatgctctaaatgtgtataaagagatgaaagataagggattggagttgactgttgttctttacaatacccttttagcaatgtgtgctgatgttggttttgcagatgaagctgctgaaatttttgaagacatgaaaaattccggggcttgcaaacctgacagttggacgttttcatctttgatcaccatatattcttgtagcgggaaagtttcggaggctgaggggattttgaacatgatgcttgaagctggctttgagcccaacatttttgttctgacatcccttatgcaatgctac

SEQ ID NO: 213067 - DNA, 335 bp, Gossypium hirsutum
cccacgcgtccgtccacgcgttcgcacgaatacctagcccctgaaataatcaaaggagaaggccatggaagtgctgttgattggtggacctttgggattttcttgcatgaactgctatatggtaaaaccccctttaaaggttcaggaaaccgcgctacactattcaatgttgtagggcaacagctgaaatttccggattcaccagcaaccagttatgctagccgcgacttaatccgtgggttgctggtaaaagagccacaacaccgattaggggtgaagaggggtgcaaccgagatcaagcaacatccattctttgaaggtgtgaattgggctct

SEQ ID NO: 213068 - DNA, 381 bp, Gossypium hirsutum
aaccgcgccggactggcccggacgacccacgcggtacccacgcgtccgcccacgcgttcgcccacgcgtccgctctctaatggcttcccttgctggttcatcaatctctatgcaacctcgccagaccctggctacaagcagggtttctgggttgaaattggtttcatttgtgaaccggggaagaagcagcctctcctttaggttgcgtccagatcgcttgcggatttcatgtgctgccaaaccagagacagtggataaggtatgtgaaatagtaaggaaacaactagccctaccaagtgacaaaccagtcacaggtgaatcaaaatttgctgaacttggagccgattctcttgatacggtcgagattgtaatggggcttga

SEQ ID NO: 213069 - DNA, 342 bp, Gossypium hirsutum
cggacgcgtgggcaagtcgggagtttacaaacatttgactggcgatgttatgggaggccatgcagttaagctgatcgggtggggaacttcagatgatggagaggattactggcttcttgcaaaccaatggaatagaggctggggtgatgatggttacttcaagatcaaaaggggtgtagacgagtgcggtatcgaatccgatgtcgtagccggattgccttccaccaaaaaccttgttcgagaggttacagatacaggaattgtcgaagatgcttcattctaagagaagatcatctagacaggcttacctaatatcatagtttatcaatgaaggaactgtta

SEQ ID NO: 213070 - DNA, 346 bp, Gossypium hirsutum
cccacgcgtccgcccacgcgtccgcccacgcgtcccccacttccttgttattattgaaaaaaaaaaaatgaaaaattggtttcacaaaaaaaccagaagggttggtgaaagaatcatgggagggtttgaagccagatattccttactccagcttgcgtttcttttcactgatattggagatagcaccaggtgcgaagaacatgttcagtttcttgagggagtcagaggagattcctcaaaataatccaaagctcaaagctcatgctgtcaaggttttcaagatgacatgtgagtcagccatacaactgagagagaaaggggaagtggtagtggctgatactacttt

SEQ ID NO: 213071 - DNA, 327 bp, Gossypium hirsutum
aaggaatagctttaggagatttcaacggctcaggcccgggcggagcgggccacaacagagaatctgatcctgtgggaaaattcaaatgacgataaaggattacttggctatttgcaaaccaagggaatagaggcggggctgatgatgggtactaaaagatcacaaggggagaagacgagtgcggattcgaactcgatgtcgtaaccggattgccttccaccaaaaacctagatcgaggaggtgcagatactggaattggcgaagatgcttgattttaagaaaagatcatggaaacagggggacttaaaatgagagtttataaatgaa

SEQ ID NO: 213072 - DNA, 340 bp, Gossypium hirsutum
gagctgtagcaggggtggtaaccgccggagctttctttttagctctatttgccggtgctttaatctgggtttactctaaaaagttcaaacatgagaacaaattaggccaatcttttgcatcggagataatcaaatcgccaaaagaattcacttacaaagagcttaaagccgccacgagatgcttcgatgccaatagaatcatcggccatggtgcttttgggactgtttataaaggtattttgccggaaaatggtgacattgtagccgtcaaaagatgtagtcataacagtcaagggaagaacgagtttttagctgagttattaataatcggaactctaag

SEQ ID NO: 213073 - DNA, 342 bp, Gossypium hirsutum
  unsure (1)..(342): unsure at all n locations
gcccaatactagagtagatggcaaaggagtcttcattagaccattttgtgttgaatgtctcgaattttgcttcatgacatttaatgtcggaatctggtcatcaagagttaatagaaacatgaccaagatgattgggtttcttcttagaaaacaatggaaacgtaaattgtttttctgttgggaccggaaactgtgtacaattacaaaattcaaaaccctcgagaatgatgagaaaccgcttgttttgaaggaacttataaaattatgggataggtgtttacccgagcttccttggaggaagggtgactatgatgnaatcaacacactattgttggatgattc

SEQ ID NO: 213074 - DNA, 336 bp, Gossypium hirsutum
cccacacgtttgagttattaaatcagtggcatctctcaggtcccaagcagcagcaatacttgtgctgctgactgtaaaagcaatgcaaacccagacgggtaaggcacaaagctgcagtactgagctcaccaacttgaatgtgtgcgcaccatttgtggtccctggtgccactcagaccaaccctagccctgactgctgtgctgcactccaatcagtgcaacatgactgcctatgcaacactcttagtattgcctctcgactcccttctcagtgcaatctgcctactctgacttgtggtaatcgatgatatgcagattagcgcatgattcttatgca

SEQ ID NO: 213075 - DNA, 348 bp, Gossypium hirsutum
tctttctctcgctcactcactcacattgggggagaaaagatttgatcttttagtgaagttttaggagggaaaatccaaatcaaagaagaaagaaacgaaaaccttccttaaagtgtccgattcattactggactgacccataagtgaaaaaaagagggaccccaatataataacctctttgtctttggtggtttagccattgaagaaacgaagcagaagagaaaaagaaaattaacagagttggaagaaagaatgttcgcagcggagaatggactcaaaggggacccgaggctacaagccatatctgacgccattagagtggttcctcacttcccaaaaccagggatt

SEQ ID NO: 213076 - DNA, 335 bp, Gossypium hirsutum
ggtcggtccgggaagtcctgtcggctccgatggtgcaaccaactgtctccgcaagttgagcatcgggccttcacccccgaggaagacgagaccatcatcagagctcatgcccgatttggtaacaagtgggccacaatagcccgactcctcaacggtcgtacggacaacgccattaaaaaccactggaactcaacgctaaaacgtaagtgcttgtcggttggggaagagagtaatttcattacacatggtgggtatgacggtaatttgggaggggaagggaagcaacaaccgttgaaaagatcagttagtgctgggctttacatgagcccggggag

SEQ ID NO: 213077 - DNA, 334 bp, Gossypium hirsutum
tgatctcatggcacaagtttcccagctacaaaatgaaaatcaccagattttaacaacggtgagtatcaccacacagcgttacttgaacgtggaggctgagaactcggtgcttagagctcaagccaacgagcttagccacaggttacagtccctcaatgatatcattgattccttaaatggatgcaataacaatattggtggtgctgacggtggtggtgattgtggtggttttaatgttgcaacgattggtttcaatgagatggttgatcatagctttattaaccctttcaatttggcttacttgaatcaacctatcatggcttctgcagataat

SEQ ID NO: 213078 - DNA, 337 bp, Gossypium hirsutum
aatagaggcagcagtggcttgacgttcccctttgctcccttcttccagaagccaaaagtttgagttaagaacaatggcttatgctacaatgaagccgaccaaacctggtttggaggagtcccaggagcagattcacaagatcaggatcactctctcctccaagaatgtgaaaaaccttgagaaagtttgtgctgatttggttcgtggtgccaaggataagagactgagggttaaggggccagtgagaatgcccaccaaggttcttcacatcacaacgaggaagtctccctgtggtgaaggaacaaacacatgggatagatttgagctccgtgttcac

SEQ ID NO: 213079 - DNA, 335 bp, Gossypium hirsutum
gaagatgttctttgtaggctgtacaagctagttacgatgaattaccatccatcatgtacaaggcctgaccttgctttaggtcttattccacattcagatggaagggccattactgtgtagcagcaaggtaatgatagctcattcggtcttcaaatccttaaaggccaaacgtgcgtgcctgttaagcctattgcaagtgcactcgtcatcaacatcggtgacactctagaagttcttgacagagctgctgactaaatggactatctttacacattacctcacattgagagagacacgctttcaatcgtcactttctatgctccaagctattaaat

SEQ ID NO: 213080 - DNA, 362 bp, Gossypium hirsutum
cccacgcgtccgaacattgtttgcacttgttattgccataaccaaggatcttccagatgtagaaggagatcgcaaatttcaaatatcaacattagcaacaaagcttggagttagaaatattgcatttcttggttccggacttctactggtgaattatgttgctgctgtgttggctgcaatatacatgcctcaggctttcaggcgtagtttaatgatacctgctcatatctttttggcggtctgcttgatttttcagacatgggtgttggaacaagcaaattacaaaaaggaagcaatctcggggttctatcgtttcatatggaatctcttctatgcagagtatgcgattttccccttcgtgt

SEQ ID NO: 213081 - DNA, 342 bp, Gossypium hirsutum
gccaatcaaccgtggaggctaatcatttgcttctggctgcacgctggtgttattcatcttcttgcaaacatgttgagcttgatcttcattggaattcgccttgaacaacaatttggattcagtacgttatctgttcccttttgcagtggtagcgtactatcgtctcttttcattcaacgtagcatttctgttggtgcctctggtgctttatttggccttcttggagcaatgttgtcagagctgctgactaattggactatctatacaaataaggctgcagctctgatcacactcacggtcatcattgtcattaacttagcagtgaggattcttgctcacgtc

SEQ ID NO: 213082 - DNA, 345 bp, Gossypium hirsutum
cccacgcgttcggagatcgagaaacatatcagataaaagcgaaatgagaaaaactccttcactggtagacctttgtgttagaacagtgatagataatgtaaggtaccttggagatgttggtgagacagattcacatcttcttgaacgtattctaccgcattgtacagtcgatcaattattgcatgtggaaacaagtacaaagggaagggatctctgttcagtaactgataaactatggaagaatttctatgagctgcagtttggccgtgagagtatgaaaatagtaattgagaggatgaagctaaagaaagtaatcgttagatggagacagttgtatgaggcaaa

SEQ ID NO: 213083 - DNA, 256 bp, Gossypium hirsutum
gaccgccgcactgtcatggcggcggacgctgtcgccggacactccgatgatccattctggtacctctctcaccaccaagaaatcgtacgtgcaacaaatggtgacgtgcagtgccagtggaagtactcaggcggtgaatttggcttcggggacttccgtccgaccgactagcatattagtggttggttccaccggaactcttggaagacaaatcgtgagacgtgcactcgatgaatgttacgatgttaggtgcctt

SEQ ID NO: 213084 - DNA, 334 bp, Gossypium hirsutum
gtgaattaccagaacctgatgcccaccccctacaccctcgacgtggatttgaaagacgtggtcaacgccgatgctcttcagaccaaggacaagaaagtggcggcttgtaaggccactaaagagaggtttcaagagaggttcaagacggggaagaacaggtggttctttactaaacttaggttttgaatggttcattctaatggtgttaaagctttttatgtagtttctttaacattttggatttgaattttgagtctgttgtgcaatgagatattttctgggtttcttattgatttttctcgtttctgttacaaattcatataattatctgagt

SEQ ID NO: 213085 - DNA, 400 bp, Gossypium hirsutum
  unsure (1)..(400): unsure at all n locations
gaagcacctaaccaatcaaaaagctgttgatatagttcagaatcattcacgaagtggaattgcaaggaggctggtgaaaactgctctacaagaagcagcaaagaaaagagaaatgaggtattctgacttgaagaaaattgaccgtggtgtccgtcgccatttccatgacgacatcaccgtaattgtggtgtttcttaactcaaacctcgtgagcaaggcctcctctgttaagggtcctaatctatctgttcgagggggaggagttaccttacctcctcgtactctggctccttgtgccatgccagtctaatctggcagtacctgatcatatgccgtattgcatgtttttcatgttgtatcattttcttatgtgaataccaggtagcttncaaaagcgatg

SEQ ID NO: 213086 - DNA, 384 bp, Gossypium hirsutum
acgcccacgcgttcgacaccagaccagcagaggttaatttttgctgggaaacaactcgaagatggcagaacccttgcagactataacattcaaaaggaatctaccctccatttggtgttgcgtcttcgaggcggtatgcaagtttttgtgaagaccctcacaggaaagactattaccttggaagttgagagttctgatacgattgacaatgtgaaagctaagatccaggacacggaaggtattacaccggatcaacagatgctgattattgctggcaagcagctggaggatgggaggaccctcgctgattataatattcagaaagagtcaaccctgcacttggtgcttctgctgcgaggtggaatgcatatatttgaaaaactt

SEQ ID NO: 213087 - DNA, 297 bp, Gossypium hirsutum
cccacgcgttcgatcttaacaaagtggtggatggttgtgttgctcgcattgctgctaagcttgaaatcatggaaccctgttctagtgtcaaagacaggattggttatagcatgatcttagatgctgagaaaaaggatcttattacccctggaaagagtgtcctcatcgaacctacaagcggaaacactgggatagggttagcgtttatggctgccgcaaagcaatacaggcttatcattacgatgcctgcttcgatgagtctcgaaagaaggatcattctccgagcatttggagctg

SEQ ID NO: 213088 - DNA, 299 bp, Gossypium hirsutum
acgcccacgcgttcggcagctggcacgctctcatcattttactacgggaccgtcagtcttgccaaacaccttctgtccgagaaaaaaaaagctcaagagagaagaccatggccgaacaacttaccggcgagcagaaatctgggttttaagaggggtttgtgccctttgtcccagggatggaggggggtgttttactaatgaactggggactgggatgcggtcacttggtcagaaccctactgaggcagaacgtcaagatatgagcaaagaagatgatgctgctggaaatgggaccattg

SEQ ID NO: 213089 - DNA, 304 bp, Gossypium hirsutum
agaacacatttatccaggatgggaaggacatggcatcagtgctttatacttatcacagctttgtcaaagcacttcctcagggggtatgttggaattcacagtttgggattcagaaacttgctgctaaaaccggagctgcttcgatctattgtggattctggttttgaacatccttcctaaggcaaagttttaaactcatgtctgatgttaacattcgtgaattccatgaattaagtcattttgtttttcttgcttttagtgacttataatggtgggcagtatacaagtttggtgcttaataatt

SEQ ID NO: 213090 - DNA, 359 bp, Gossypium hirsutum
gggaatagcagctcctggacggttgattttaatcctgttcttttatttcctaacctgattaagcatgttcagtattcactaagctcaagcaggggcagctcatttcctagccatgccctgagaaatgtgtctgaaaatcaagttgtgattgagtctgatctcgctgtgctggctaatgttttcgtcacggtggatcaagcttaagcaccatgacctgacttattattattattattattattatcatcatcagcagcagcagcatcattatcagcatcatcatctgatggagagttaagatcctttgacaattgtgaatatggggtgaaagactagtattggcttttttctctgaaagt

SEQ ID NO: 213091 - DNA, 406 bp, Gossypium hirsutum
  unsure (1)..(406): unsure at all n locations
cgtccaaaaaaagtgcgtcgtgagtccaaggctaaaaagatcactgaatatgattatgtcaatgccatgaaggaggaaattagcaaagttgtcaggctccaggaagagcttggcattgatgttttggtgcatggtgaaccagagagaaatgacatggtcgagtactttggtgagcaattatccggttttgccttcactgtgaatggttgggttcagtcatatggatcccgttgtgtcaagcctcctattatttatggtgatgtgagccgccccagagccatgactgtcttttggtcttcaacagcccagagtatgactagacgacctatgaaaggaatgcttactggcccagntacgattctgaactgggtccttgtgagaaacgaccagatangcatgaacatgc

SEQ ID NO: 213092 - DNA, 365 bp, Gossypium hirsutum
gggttccggaattccaccactaccattggtgatggcggaagcggtttggatttgtgggactccatggtacaggttcaaaacgcctcaggggagccctttaactatcgtgtggagggttctattattggcattgaagaagaaaaaacagccttatccttcccaccccagcctcttgaacgattacgacaaccgaaaggttccctacacgccaagattcaagtttctggacaaggctgcaatgctagacgacaactgtgctgtcaacgcagaaaaaaaataacccatggctagtatcaactgtgacccatgtggaagaagtaaaaatggtgataaaattactccccatatggtctacgtgcatactc

SEQ ID NO: 213093 - DNA, 301 bp, Gossypium hirsutum
ttcagtcttctagctctcaattcctttttctttttgaccttctaatttcatagatccagggtgctcttcttcttagttcacattgacatagataaaggactgtacggtcagatctaaaccgcattctagcaatgtcgtttaccggtactcagcagaaatgcaaggcttgtgagaagaccagttatccggtcgaacttttgtcggctgatgggatcccttaccataagtcttgcttcaaatgcagtcattgcaaagggacactaaaagtgggtaattactcctcgatggaaggtgtcgttta

SEQ ID NO: 213094 - DNA, 395 bp, Gossypium hirsutum
cccacgcgtccgggacggcggtgcttcctataacccacgtacagtcgaagaagtctttcgagatttcaagggtcgtcgagctgccatgattaaagccctcaccactgatgtggaagagttctacaagcagtgcgatccagaaaaggagaatctttgcctttatggatatcccagtgagcagtgggaggtgaatttacctgctgaagaggtgcctccagagcttccggagcctgcactgggtattaactttgccagagatgggatgcaagaaaaggactggttgtctttggttgctgtacacagtgacgcgtggttacttgctgcggctttctattttggtgctaggtttggattcgataaagctgataggaaacgccctttcaaatatgataatg

SEQ ID NO: 213095 - DNA, 280 bp, Gossypium hirsutum
acgcccacgcgttcgaccatatatgggtaatatttggaatgtcctatctatgcgcctccaaaacaaccgtacagttaagtttcagaagtctctggtgattttcatgtcactcttcttaatcaagcatggggctacaaatctagtggacacaatgaatgcagttcaggacaacattttcttggttattttggagcagttctggattcccaatcttaagctgattactggagccattgagcttaagttaacggcagttgcttcaaccagactcatatgtgaa

SEQ ID NO: 213096 - DNA, 339 bp, Gossypium hirsutum
tttttccgcctttcggcctcactactcacccctcaatccccaatctcatctctctcctttgttttcccttttgtctctctctctctttttccaaccctaaccctacctcaccaaccaggattcaacatgaagggaggaaaatccaagtcagatactaagagtgccaagctatccgtgaaatccaaagctggaaagaaatcggggaaggctgccaaggatccaaacaagccaaagaggcctgctagtgccttctttgttttcatggaagagttccgtgagcaatacaagaaggatcaccctaaaaacaaatccgttgcggctgtcggcaaaagctgtgga

SEQ ID NO: 213097 - DNA, 361 bp, Gossypium hirsutum
taccgatgccgaatctgctccggtgcgacccacgcgtacgcccacgcgttctacagcgcgtgcgcaggatgttgtaacctcaagacgtttcctgtgatcccaagacactttcctattttagaattaagtgattcaaatatagaagaagtgcctgattcaattgagcatctggtcagacttataaagttgtgcttgaaaaactccaaggtctatattgtatcaagcaatcttgcaaagttggaatcacttcatgatctggaccttagtcattgcccaatagccggatttccaaaaatcccaagaagcttgacagaattaaacttatctgaaactcaaattgaaaatgtgtgcttgtgtagct

SEQ ID NO: 213098 - DNA, 333 bp, Gossypium hirsutum
ctttgcttcagttgctcccccaattattttcaagggcaaatcccttgcaggtattttgcctgcgattgatctcattggccacaatgctttggtggggatattctacttcattggttttggatttttctgcattgaatcattgctcagtgtctgggttattcagcaagtttacatgtatttcagaggtagcggtaaagctgacgagatgaagcgtgaggcggcaagaagaaccgtggctgcagcactctgataatgataaggaggccgtagcagaagatggtatttgcttgtattggacttagatcatgtcggataagataccatgtactcaaa

SEQ ID NO: 213099 - DNA, 299 bp, Gossypium hirsutum
acgcgcagttcaagctgatcccgcggaagaggtacgtattatatgcatcgtaaacgcacgtgccaggtttaatcctccattaccttcggggtactatgggaatgcattcgcgttcccagtggcagaagcacaagcagggaaactttgtcaaaacccattagggtattcattagagctagtgaaacaagcaaagaatgatgtaacacaagactacatgaaatcattagcagatttaacggtgattaagggtcgaccacatttcacgggtattcgatcttacctggtgtttgatgtgacac

SEQ ID NO: 213100 - DNA, 367 bp, Gossypium hirsutum
  unsure (1)..(367): unsure at all n locations
aaaccagggggttacccaattgaagttccagcgcagcaggcggtctgttgcagaggagcgagctggtcgaaaattaggaggtctcagagttgttaactcatactggatcaacgaggattctacttacaagtactttgaggttatccttgttgatgttgcacacaatgcgatccgcaacgacccgagaattaactggatctgcaatcccgttcacaagcacagggaacttcgaggactcacatctgcaggtaagaaaaacaggggtctgcatggaaagggtcacttgcaccacaggaatcggccgtctcgaagggctacctggaagagaaacaacaccctttcccttcgtcgntannncgtgagttag

SEQ ID NO: 213101 - DNA, 308 bp, Gossypium hirsutum
cttggggaagggggcttcggacccggcttttaagggtaacttggccaagatggtccgggtcggccttaattttttgcttgtcgttggtcaaggccctcaccagggaggcccttcagggtcaccgtgaatggcttactgaggtcaacttcctcggccagctcaggcatcccaatctggtaaagctgatcggttattgttgtgaggatgatcacaggctacttgcatacgaattcatgttacgtggtagtcttgagaaccacctatttcgaaaggcaactgtacctatatcctgagcgaaaaagatgatg

SEQ ID NO: 213102 - DNA, 292 bp, Gossypium hirsutum
ctattataatgctagctgattctatgaaggctccaaccgtacgagcacgaacctgcggaaggtctactaaggtatatattgacttaccactaataaatttaaaaaggcaacacaactatttgagtgttaaatctcaaccttcacaactcacaagctttttccttatcatacatttatattcaattcccggcttaccaacatcatatggaccgatcgagcttcccaacaacaaaacgtcctaaatgctcatgagatctcgactttcatcagaaaaatacccactctttcagaa

SEQ ID NO: 213103 - DNA, 309 bp, Gossypium hirsutum
aaaagagtactgagctccttatcaggaaattgcctttccagaggctcgttcgcgaaatcgcccaggacttcaagactgatttgcgtctccagagccatgctgctctagctctccaggaagctgtataggcatacctcagtgggtctctctgaagacaccaacctttgtgcgatccacgccaagcgtgtaacaattatgcccaatgacatccagttggctcgtacgatcagaggagagcgagcataatctccatgtgtgtggatcagacccttagaaagacgcacctattgattattctcacgctaatgt

SEQ ID NO: 213104 - DNA, 331 bp, Gossypium hirsutum
agccttcggccaacccgtccggtttctcctcttcctttgaacgccggcctctcaaactccaaccaaggaagcaccaagcatttatttgagtttcttcctctggtttcatcatcgatccatttttttttcgctttataatggcaactaggctacagtttgaaaattcatgtgaagttggagtgttttccaagctgaccaatgcttattgcttggttgcaattggagggtctgaaaacttctacagtgcttttgagtctgagttagcggatgtcattcctgtcattaagacctctcttggcggcactagaataataggacggctctgtgctgg

SEQ ID NO: 213105 - DNA, 357 bp, Gossypium hirsutum
ccgttaaatatgaaccttttgaggctttgttcaaggaaccatttgacaaattggttgaacaagggaagattacacccttgaaggaagttatgcctccacacatcccataagatctcaacagtgcaattgtgagcgggaaagttcgtgctccaactcacattattgcaaccatctgtgatgactggcttgaggaaccatgctatgctgatgtgctcatgtcttacattgtacgagcgaggttatggtgtagatgatgtcatttatctattgagggtcaaacgtagccttaccagatactgtactcatcttatcgagatatgcatcatgctctgttcctaccatggtacatgtgtctct

SEQ ID NO: 213106 - DNA, 280 bp, Gossypium hirsutum
tccaattactcgggccgtgtggcgccctgggttgggggttccccagactctgctcaatactccctacttcctctcacctcaagacgagttgtcctcagtctccccattttgttcatatagaacggtcgcaatctagtacccaatcagcagataagaccgttcaggctgtgaaaatggacgggaatagcagcattgttccaagcatcgacgcctatgttactgctcctaacagagaagcaggtaggaagttggctggaagcatcgtgaaagagaaacttgc

SEQ ID NO: 213107 - DNA, 310 bp, Gossypium hirsutum
acgcaaggactctaagaaagatgcactaaggattgattccatccctaaaacctcactagatggcattaaggaatggctcgatacaacacacatcacgtattacgagagcaagctgaatctgtactggcggaagattctgaagacaatcactgatgatccacagagcttcatactgaatgggcgctgacaattccagaacttggaagctagagatacatattctgagcagaccgaggaatcatatcaaggttatgagccatctgatgtggagcctgaatctgagtcagaggatgatgattcctatcgtgag

SEQ ID NO: 213108 - DNA, 313 bp, Gossypium hirsutum
atttcatatcttaacagcggcatccagggtttaggaattttgaatatgagctctacgggtggatcaacgaaaggagggagagggaaaccgaatgcatcaaagtcggtttcgaggtcgcacaatgccggtcttcaatttcctgtcgggaggatcgccaggttcttgaaagctggaaaatatgccgagcgtgtaggtgccggagctaccgtctatctctctgccgagcttgagtaccttgctgctgaggttctagaacttgctgggaatgcatcgagagacaacaatcagacccgaattgttccaagacacattc

SEQ ID NO: 213109 - DNA, 249 bp, Gossypium hirsutum
gcactttctcctatcaccggcaacgaagctcattattcgatcataaaacatggccaattcattcatttggatgacttgtgcagagctcatatctttctattcgagaatccagaagcggaaggtcgctacatttgcgcctctcaccatgctaccattatcgatcttgcgaaaatgctcagtgaaaaataccctgcatataatcgctccaccaagttcaaagatgtggatgagaacctgaagagtgtggag

SEQ ID NO: 213110 - DNA, 310 bp, Gossypium hirsutum
gcaggatgtatcggcccaagccgagaccggccagttcgtgaacctaagggaagtattgggtgcgtttccgatgaacaacgtgactaggatgttactagggaggcaatatttcggggccgtatccgccggcccaagtgaagccatggagttcatgcacataacacatgaattgttttggctcttaggtgtgatctatttgggggattatttgcccatttggaggtgggtggatccttatggatgtgagaaaaggatgagggaagtggagaaaagagtggatgattttcataaaaggatcattgcagaacat

SEQ ID NO: 213111 - DNA, 273 bp, Gossypium hirsutum
aggagaatatattggaagggcaatttgcaattaggggtcccagggattctgaatttgagggagggatttatcatggaaggatccaattgcctgctgagtatccattcaagcccccttcatttatgttgctgactccaaatgggcgttttgaaacccagacgaaaatttgcttaagtatatcgaatcaccacccggagcattggcagccatcttggagtgtgcggaccgctctagtggcactgatagctgtcatgcccaccaacccaaatggtg

SEQ ID NO: 213112 - DNA, 355 bp, Gossypium hirsutum
aacgattcgaaaccgcccaaaaccttgttgaggtccaccattccggagtggtgaagggcgcctcgacattggcaaaatcagtcttcaccgtggtcgagccaacagttgaaaaatgtgctgtttcgatttggcagacactgaacaaaatccctctctttccacaagtagcttcggtagttgttccgacagccgcctttttcaccgaaaagtataaccagacggtggcaaccggtgccgagaagggttacaaggttgcctcgattttgccagtggttcctacccagaagatcgccaaggtgttcagtgtaaggaaatctgattagtttacatgatgattatatgggaatatataata

SEQ ID NO: 213113 - DNA, 220 bp, Gossypium hirsutum
acgctgaatacctgtatagcactggcgctctttagtatattgtgttaacccggcctgatgtggcatatgctgttaatagggtgtgccaatttatgcatgctcctactaatctacatatggtagcgttaaaacgcattcttaggtatttacgtggcactctttcttatggcttgcttttccggacatctgaacggctttcgctggtcggttatgccgatgc

SEQ ID NO: 213114 - DNA, 354 bp, Gossypium hirsutum
attcaaaaaggttaactggggaaggagttaatggaacttcaaaataagaaggttcatctgagacaaagtggtgggcttctattttctagggctgaaccgagacacaagcaagagatagtgagattgctaaaggaagatggagaggtggttgctatgactggtgatggagtaaatgatgcacctgccttgaaactagctgatattggaattgctatgggcattgctggaacggaggtagcaaaggaagcttctgacatggtgttggcagatgacaatttcagtacaattgtttctgccgttggtgaacgaagatccatttacgacaacatgaaaagctttatcaagtacatgatc

SEQ ID NO: 213115 - DNA, 383 bp, Gossypium hirsutum
caacagatccgttgatgaatttcaaagttgtttgttacaggaaatggctggtggaacagctccccctagaggaagtgcagcagcagccgcaagcatgcgtaggcggagaaccacaagtggtgcagcctcaggaggggctgctgggaccatgctataattttacacggctgatgcaccaggtctcaagatctcgccgaatgatgcgcttgacatgagcatcggtttcattgcttatgttgccgatctacatgttatgggcaagctgtattttgctcgtagagaggctacgaaggaatttgtcggccagaaaaagaaaatgtcaacaggatttatttaggagtcttgagtgccaagcaaaactgtttctttttaataataaaaac

SEQ ID NO: 213116 - DNA, 347 bp, Gossypium hirsutum
cttccccgaccccttggccgaccccttggccggccccgtggggaaaaccgttaccaaggctgctccctctggaagtccatggtacggtcctgaccgagtcttgtacttgggtccactatctggtgagcctccatcttacttgaccggagaattccctggtgactacggttgggacactgctggactctcggcggacccagagacatttgccaggaaccgtgagctcgaagtcatccactgtaggtgggctatgttgggtgctcttgggtgtgttttccctgagcttttggctaggaatggagtcaaattcggtgaggctgtgtggttcaaggccggatctcagatct

SEQ ID NO: 213117 - DNA, 333 bp, Gossypium hirsutum
tcgaaggagaccgaccaaattcctggaggtcatttttttggcaccaaagccgggagagctcatccatgaaccagtcctggccattaattatgatgcatcaagtgaggacatcgctcgagtgtgccatgcacatcctacaatgagtgaggcattgaaggaagctgcaatggccacctatgacaagccaattcacatctagaaatatggatttttacatgtcattcttcatttcgatttatgtttgaaaattttcgagattgattcggcagcagtcagcacaaactgtacattttcttgtttgcccttactcgaaacagatggcgtgcttgaata

SEQ ID NO: 213118 - DNA, 395 bp, Gossypium hirsutum
aattcgggggacgaccgacgtcccggttagaaaaacttgaagctttggaaagtcagagacgggccgacatggcattactcgaggctaagaagatagcatcacagtaccaaaaggaagcagacaagtgcaattcaggtatggaaacatgtgaagaagcaagggagaaagctgaagcagcactggtagctcagaagaaattgacagcaatgtgggaaacacgagctcgtcaaaaagggtggagagaaggggttgccaaatctcatacagactcgtaaggtaaaaattcaagctgtctaaatgatctgtcattgcctcgtaaaagaatttcaaacaagaattccagagttaatcctataggtagtctttaagtatagttacccttgttttctatggag

SEQ ID NO: 213119 - DNA, 311 bp, Gossypium hirsutum
cgaagctgtgaaaaatgccatcgtcgaaggaaagaccaaagtgttatacttcgagtcgatgtcgaatcccacgctcaccgttgccaacattccggcactaagcagaatcgggcacgagaaaggaacgacggtggtcgtggacaacacgtacgcccccatggatatttctccggcaaggctgggtgctgatgtggctctacatagtatctgtaagctcatgagcggcggggccgatgttattgcatgtgctgtttgtggccctgcaagcctggtgaactcaatgatggatctttatcaaagcgcgatgatgc

SEQ ID NO: 213120 - DNA, 364 bp, Gossypium hirsutum
  unsure (1)..(364): unsure at all n locations
ggcggatgggttggtcccactttatctttgtgtcaccctagggaccacttccaccacggctgttgacccaatcgaactgctcgctggtgtggcgaaggaacatggcatgtgggttcacgtggatgctgcttatgccggaagtgcatgtatatgcccggagttccgccatcaccttaatggggtagagctagttgactcgttgagtttgagtccccacaagtggctactcagtggcttagattgttgctgcttgtgggtgaaaaaccccaccgcacttgtcagagctctaagcaccaacccccgatacttgagaaacanacaaagcgaaatcgattccgtcgtcgatttcaaggactggcaagtc

SEQ ID NO: 213121 - DNA, 371 bp, Gossypium hirsutum
tgacaaacctggctcgttccggtgtccttaaggtggtttacatgattctcatggtgtgcatgacgatgatgagtgcgcccaaggcagccaaagccgccatcacgtgcatcgacgtggtgaaccacttgatcccgtgcttgtcctacgtacaaaacggctgtacacccgctgttgcatgctgtattggagtaaaagcactctacggtgaggaacatccctacatgggccacaaaaggggtgcaaccgcaaaaaacctgctgtgaactgaattccgaacaccaccaataagccaaatgtcgtagacaacctagctgctaaatgtggtgtccaactcctttacagtatcaaacccttcacttgactgtatcaag

SEQ ID NO: 213122 - DNA, 437 bp, Gossypium hirsutum
acgggaaagtgtggaaccagcaagtgtatctattggattctcaacggtagagagtgtgacggatgtgattgagatgcaggctatgggtgcgggagctgttgaaaggagagttagatttgcgattgatgatgatgactccgaatctgatgtgcaaaccaaaatgtatgttcagttggaagaagagctgagggatctgatgacagcccaagaagcagggactgcattcatactaggacacacacatgtggaagcaaagcaaggatcttcaattttaaagagattggccattaattttgggtacaatttcttgagaaggaattgccgcggaccagatgttgcactcaaggtgcccccagtatctttattagaggttggcatggtttatgtggtgtaagcttcccatctcatgtaactagtttttgtagcttatatattta

SEQ ID NO: 213123 - DNA, 385 bp, Gossypium hirsutum
aacaaaatcaacaaagggactttcatcaccagttacaaggcagatatgccttccggatgggttttgtcagaaaagagactgaattccatggataggaccataattcatcatcaaaacaagatgattagatagctggaaagactaagcaagctttgtcatgataatctcgtacatcctattggtgtcgtcatctatgaagatatcgctcttatgttacatcattatttaccaaatggaacacttgcacaactccttcacgaatcgtcaaagcagtcagagtatcaatcagactggcccagaacactatcaatagccattggagtaccagaaggattggcttttctccatcatgtggctgttatccaccttgatatatcttcgagca

SEQ ID NO: 213124 - DNA, 305 bp, Gossypium hirsutum
gtgctttgggtcacttttcatagcggatattatttcgggtatttgcttaaactatggggctgcaagagatagcccgatactcaaactggcttcttcaaactgatcaaaatgtattttgcgatggtatacgatatcaaacatatgatgaagttctgcaatggcctacatggtggtttaaacaagctggccgagttgttagaagtggaaagagttggtgtatgccatcaagctggttcggatagtttgctcacatcatgcacatttaggaagttgagggataactttttcaaatcagtacagaaata

SEQ ID NO: 213125 - DNA, 434 bp, Gossypium hirsutum
  unsure (1)..(434): unsure at all n locations
cggacgcgtgggcggacgcgtgggggagaattaagatactttcttgggattgaaattttaaggtctccagaaggcattttgctaaatcagctaaagtatgcacaagaactcatccaagacactggtctaagtgacgcaaaggttgctcttacaccacttgagcagaatcaaaaactaacaacagcagaatttgatgaagtcactcagcagcattaaaaagataagttgttagaagataaaacagtttatcagaaactcattggaagattgatctatttaacccatacaagaccagaaatcacctttgctgttactcatcttagtcagtttatgcaaaatccaaaacaatcgcatatagaaacagtattgagagtagtgagatatataaagagggatccagggctnggaatttttttgaaggctaacaataaaca

SEQ ID NO: 213126 - DNA, 411 bp, Gossypium hirsutum
gaaagcaataacatgtgcgaactgcttaggatcaactgcgaccgaggtgttatgcttgctgatgggaaaaccagattttccatcaacggcaagcctatctaccactttgttggaacctcgacctttagccaatatactgtcgtccatgttggccaggttgccaagatcagtccaaccgcccctcttgataaagtctgtcccattagctgtgggatatgtacaggttttggggccactgtgaatgttgctaaacccaaaaagggtcaaactgttgcagtttttggactgggtgccgttggtcttgccgccgctgaaggtgcaagggtttgtggggcttctcggatcatcgctgttgatgtgaaccccagaagatttgaagaagctaagaggtttgggattacagaatttgtg

SEQ ID NO: 213127 - DNA, 427 bp, Gossypium hirsutum
  unsure (1)..(427): unsure at all n locations
atttaaaatggctttcttcgatccctcgagagctcaagacttcctcttcatatcaggcaccaagatgcgggctcttgcgaagaacaaagagaaccctccggatggattcatgtgccctggcggttggaaagtgttggtcaaatactacgacagcttgacaccatctgacaatggaaggatccatgaagccgttccggcttagacaaatgatcgataaagatactccatatgattggaaggagcatatttaacactgtttgatttccaatgtgtgtgtgatgcagaatctctttaataaaaccatgagaggcactggtacagagacaatgaaaaaagcttgcctctccctgtaattaggttgcccccattatggtgtctgccattggtgctcgctttgcttgtgggcaacatngnactatatatgtct

SEQ ID NO: 213128 - DNA, 430 bp, Gossypium hirsutum
cccacacgttctagaactcaaggcctgggatgctgattttgtcaaggtagaccaaggggccctctttgatctcatactggcagcgaactatctgaatatgaggagcttgctggacttgacctgccaaactgtggctgctatgatgcagggaaagacacccgcggagattcgcacgaccttcaacatcaataacgatttcaccccaaacgaagaagaagaggttaggagggagaatcaatgggcattcgagtgataggaaagcctttaaatctaatgccgatattattatagctaatatgctcctctggttaggttgtcaagaaaggggaaaaaaattaagaacattggctatctttcggctgattttgttatatgcattaatgacgcctcatttagaggatatttaatatgaacgctctccattctctat

SEQ ID NO: 213129 - DNA, 435 bp, Gossypium hirsutum
  unsure (1)..(435): unsure at all n locations
caatagtagaggaagtgtgcgtgttgtattgtaaatgagctgtagttaagactcgatagccactcttaacagtgtattctcctaaacctttgtgtttccaaaccagcatatcctccgagctacttccagaaatcggaatagaaaagattcgagctgttatatcttcatcaactaaataatgaaccagctctctattccaggtagccaaagatcattccaaatattgatgcgagcaccactgccaaccctccacacaatctcttccacaatcaactccctagcactgcaaatacttctccaggtaaaagaaggaagatggcaaggagatgtgttcgaggaaaatccttgttgaaccttangaatagattaggataaaagtgacatgtcactaggatgggtgagcattcgaactcgttgaagtgagtccgagttcac

SEQ ID NO: 213130 - DNA, 383 bp, Gossypium hirsutum
atatttgaacaaggagctggggctggatatggacaagttcatcacacactctgtgccttttgccgatattaacaaggcattcgactacatgctccagggtataggtctgagatgcatgattcatttggatgcttaaggaaatgttgctgctgtatatttgcccatccaaggatcaaaactctaatgttttgtcctactatgtgttatattatgtgcctacttaagctacctttcccggttatcaagagtgcctatatagaactctctctctctcaaaaaaaaaaaaaagagaaaagagttctttatatggagttttatattatatgctgagagaataaattatcttgtaaaagcttgctttgttaatgaaataaatttctatt

SEQ ID NO: 213131 - DNA, 433 bp, Gossypium hirsutum
gtttttgagccctgaaagatcaaatctcccatctcccccctccccttgtgtttcgtggtgatcaacagtttagggtttttgttctctttctgaacaacaaaaatggtggggactactgagggagtggattcctctgcctccaacagcaagaagaatcgtatccaagtctccaatacccagaaaccccttttcttctacgttaacctcgccaagaggtatatgcagcaatacaatgaggtggaactctctgctcttggaatggctattgctactgttgttaccattgctgagatattgaagaacaacgggctggctgttgagaaaaaaatcatgacttctaccattgacatgagagaggaatcagggggacgaccagtacaaaaagcaaaaattgaaatactgctggggaagtcagagaagtttgatgagttga

SEQ ID NO: 213132 - DNA, 368 bp, Gossypium hirsutum
tgtaaatatggtgcccaatggcctatagatacctcggctgagggatcgtgtagtcaaaattattactgattacagaactgaaacttatctcagacatggctgcaacgatatacttaaggctgattgtgttaacctgtcggtaaaatactacaatgaagcgaaacgagcagtttgcttgagtaatgaagaagatgatgcacgatccaagagggatgccagtagagcttatcaaatcataacacctagtgtgagaaacatggaggtttagtctaaaacaaggggaagtggaagatgttgcatgtgttttgatcctttctcgatacaaaacgtatcagtcaacgtgttcttttgctgccatgcttatcaca

SEQ ID NO: 213133 - DNA, 440 bp, Gossypium hirsutum
acgcccacgcgttctgaacctgtctccataatgtcggttgtgaaaagcccaatgggtctcatggtgggatttatgctggtggtggtgtttttaatgcccaaattagtggaaaacatggatcctgaagaaatgagacgagcacaagaagaaatgagaaaccagggagttccctccttagctagtttgttaccaggaggtgggaggaattaagtgttcgattgaggagcaggaacttcgagataatggtttggcaaaatcaaggggcagttcaaacgtcgagctcgattggtcttctaccctgatattcatcttttgattgcagaaagaagggatgataccttttgaattcctgggggcatctcaaaggttatgtagtgttttacttgatagttgcagattttcagaacttattatgggattcaacttctcataacatctat

SEQ ID NO: 213134 - DNA, 427 bp, Gossypium hirsutum
cccacgcgttcgaccacgcgtccgaagaaatttgccataaatgtggtatactctttggtgagcaagaattgcagggaacctgatgtggtattgaatgtgcctcatacttctttgctagaagtaggtatgatctatcatgtctaactctaactccatttatctcaatcataagagaaatgtaaattatacaaagggaaatagggtcccttaaatttacatatgatgtgtatacaaagagacggggcacaaaataacttccaatttaacaggaggctgtcctacacgttaagaaccacttgacatgaaaatcccttcaatggttttttattttcttgctatggtagcaatgatctgatatcatcatattccaaaataaaatcacaaggtgaatatatatatatatatacatgtctactaggttcgtggg

SEQ ID NO: 213135 - DNA, 319 bp, Gossypium hirsutum
gacccacgcgtccgaaaagtatgccttcaagtgccatcgaaaatctgaggctggacgggacattgtatatccagtaaatgccattgcattccatcctgtatatggtacatttgcaactggaggttgtgatggttttgttaatgtgtgggatggaaacaataagaagaggctgtatcagtattcaaagtacccaacaagcgttgccgctctttcattcagcagagatgggcgactattggccgttgcttcgagttacacattcgaagagggagataaagcacatgaaccagatgcaatctttgtacgtagcgtaaatgaa

SEQ ID NO: 213136 - DNA, 225 bp, Gossypium hirsutum
  unsure (1)..(225): unsure at all n locations
acgcccacacgttctaccacgcgtncgcttttatcactgtggctttgacttattttcaaggtgctgctgaagaccatgcagggaggttgaaggtctttctttggggaggggctaccgggctggtcatatacacctactgtttgtgttattacaatgcgcggtcaaacatgtcaagctttatgcaaacttcgatcttctttgggtacatggaccgcatttgctatg

SEQ ID NO: 213137 - DNA, 392 bp, Gossypium hirsutum
gtttttagttactatccatttcccttcagattatcctttcaagcctcctaaggtcgcgtttaggaccaaggtcttacatgccaacatcaacagcaatggaagcattcgacttgatatcctcaaagaacaatggagccctgcactaaccatttgcaaggttctgctctcaatctgctcgttgctgaccgatccaaaccctgatgaccctcttgtttcggagattgctcacatgtataagactgatcgggcaaagtatgaagccactgctcgtaactggacccagaagcatgccatggtatgacagctgttggtgtgtaatatgtatcacctttcttatgtagccaactgtgtcaaaccattatatgttttcttttggcgaaaggagagggtgt

SEQ ID NO: 213138 - DNA, 307 bp, Gossypium hirsutum
acttattgttgatccttttgatctgtgtgccataactgaaataaagtctcatatactataagttttacgcttatggtcctaattaataaatgccgttttatgtgttaaaaaaaaaaaaaaaaaaaaaaaaaaaaaaaaaaaaaaaaaaaaaaaaaaaaaaaaaaaaaagaaagaaaaaataaaaaaaaaaaggggccgtgcgtctacgggataaccgctttagatacgctatcttgcgaccaaaattaatattatatggaacacttaaataaaattaattgggcgaaatttttaaacgtactcactt

SEQ ID NO: 213139 - DNA, 353 bp, Gossypium hirsutum
ccaatgtcctattcaagggaccgtcttgctgaacattttttgtcttcagattagaggaggttggctaggtcttactctagtgacccttcacctggccagtccttaatgagtgcctatcctagggcacaaaaccagtggccagctggttatggcgcacaacctcaaacttggccttttactacacaggcacaaacatggacccctggctacagccaacaggctgcatatggtgcgtatggtagttatggtagcacttatgctactccacaagtacccacatcagtttcacaaagtgctgggtctggtgcttatgcgactacatattctgttcagacctttgcttaacaaagtta

SEQ ID NO: 213140 - DNA, 404 bp, Gossypium hirsutum
gatttattcaatgggaaggagcttttcaagagcatcaaccctgatgaggccgttgcatgtggtgctgcagtccaagctgctatattgagtggtgaaggttatgagaaagtgcacgatctcttgctcttggatgtcactccattgtcttacggtttggaaaccgctggtggtgttatgaccgttttgatttcaaggaacaccaccattccaaccaaaaaagaacaagtcttctcaacctacttcgacaaccaacctcgtgtgttgatccaagtttacgaaggtgaaagaacatggaccagagacaacaacttgctcggtaaatttgaactttatggcatacctgctgctactagaggtgtcccacatatcacttgctgctaagatatcgatgctaatggaatttt

SEQ ID NO: 213141 - DNA, 363 bp, Gossypium hirsutum
acgccacgcgttcgaaacgctacaaatttatggaaggaacttagagaagcttcagctgatgttgtaccaaagcatcaaaacgacgttgcatatttaataaatagttacaaaagtttatacccaaaatgggcttttgatctcagattttcttgtttgtatgtttatgcagaggttcggtgtcaagcaaaaggagaagattgcatcttttaagacttcagttgatgttcttactttctatgcagcacctatacccagaacgctttatttatctatgactggtttacgtgatgccagtgggacgaccatcctgcaatcatggctgtgggtgttgtagatggaacttaataagtcatttttcagaca

SEQ ID NO: 213142 - DNA, 330 bp, Gossypium hirsutum
acgcacactgaccctaaaaggttccatgctctcataaaattgctttcagtaaaagagctggtgtgttagttgactctccaaacaaaatacaatcatctttaaataacaaatgcgatacttgtgggccccttctgctagccttaaccccttacaaaagtccttctcttagtgtcagtctcataaggcatgataagccctctccacatatcaaaaataaaaataggcttaagggatcaccttgtcttagtcctctcgttggacgaaagttctctccaatgggaccattaaaagacgactgaattaagatgttttggattacaccatgtcata

SEQ ID NO: 213143 - DNA, 425 bp, Gossypium hirsutum
taaaacagagaaaggaaagcagcgaaatgggtgaagaagtgaaggtttttggatattgggcaagcccttacagctacagggcagagcttgctttgaagttgaaaggtgtttcttatgagtacataaatgaggatatctttggcaacaagagcgatttacttttgaaatacaatccggttcataagaaagtcccagttcttcttcacaacggaaaatcaattgtagagtctgttgttattcttgaatacattgaggaaacttggaagcataatctttatttgccacaagatccttatgacaaagctaccgctcgattctggatcaagttcatcgacgaaaagtgctttcctaccctttggctagctgcatggagccccgagaatgagcgagaaaaagtgacgaacgaagctggcgagtatatgaaa

SEQ ID NO: 213144 - DNA, 396 bp, Gossypium hirsutum
cggacgcgtgggcggacgcgtgggtttggccattaacagtttacttcccgatcgagatgcacattgcgcaagcaaaaataccaaagtattcattcaggtgggtatggttgaaaatactaagctgggtttgcttgataatatcacttatagcagcagctggatctgttgaaggactaattcaaagccttaagacatataagccatttcagactcggaatgaggagtaatccttgcttaaaggttaggttttatgaaatacttaacattgttcaataagacagagtttgcagtaaatgtaatttattgttgtcttcacttatgtattccatatgcaaatctgcttgttgtagtgtggctccttttgaaagagaatagagtaaccaattttaatttgat

SEQ ID NO: 213145 - DNA, 413 bp, Gossypium hirsutum
acgccacgcgtccgcccacgcgtgcgcagcaattgctcttctctcgtatggtttcttcaataaaggccttgtacctggtctatgtttcggtgctgggcttggtataacgatgtttggaatggcatacatgttcgtccacgatggtctcgtccataagagattccccgtaggccctatcgctaacgtgccttacttcaggaaggttgctgcggctcaccagctccatcattcagaaaaattcaatggtgttccatatgggctgtttctagggccgaaggaagtggaggatgtgggaagacatgaagaattggagaaagaaatcaacaggagaatcaaatcaagcaaaggttcctgaatatataataagattaatttaactgttttcaaggaacccccattttttgagaaacgat

SEQ ID NO: 213146 - DNA, 401 bp, Gossypium hirsutum
acgcttgaatgctgaaaagaaggcgggcttttatgtccatgaggtaggtttgggatgtgacggtcactatgttcttggcagaggggaacaaaaattgggggggaaacgtgctgccaaattgaaggacccattcagctggagggttcttaacgtatggaccgatgcacctgggatgcaattatacactggtaaacacgtgaatggaggtgcccggaaaggaggtgctgtttataataagcatgcagggttatgcttggaaacccagggattttcaaatgcgatataccaacctaacttcccatcaactgttgctcaacctgttcgcaagcaccagcacaccatgtagcatgagttgttaggtgagtaagtttgtaaagtctatttgataaagatttgggaat

SEQ ID NO: 213147 - DNA, 420 bp, Gossypium hirsutum
cccacgcgttcgcaaccatgggtgttgtgatggtcctaaaactggcagactcagggtattggataatgcaccaaagctctttgattatttggcagagggttagtgaagcacaggatatagccacaaaattaggtggacaagtcattggtcacacatggcttttagaatcaattgcagcatgactgagcaatgcttcctttacagatctgggaggcttctttcagctgtacatcatggttttcatctggtgctaggaatttgattaagcgtattcttgatccaagccctcttacccgtataactattcctgaaattctacaagatgaatggttcaagaaaaggttcaagccaccaaaatttgagcaagatgaggatgtaaatcttgatgataatatcttatattatacatggttatgaatt

SEQ ID NO: 213148 - DNA, 406 bp, Gossypium hirsutum
acgctgacgcgttgtcgaacgcgcgggctgactcgtggggtgggaccattcattggggcagcactagcagcactctaccacgttgttgtgatcagagccattcctttcaaatcaaagtgatgagattaagatcaagagtcatgattccatgattatgagcttaagttaaacaaaaaaaaaaaaaaggagaaacccaacaacccttttaagtttctttgtatttttcttttgtttgtatgcttgtgtttttgtatgtaaagaagatacaatcatatgcctctgttttttatttattaaacttgaaaaaggggggttggtaatgagcaatgacccatctaaaaagtaagtgggcattcgtatttgtatggctatgatttgtgaatgagaaatgtcattttcatgccct

SEQ ID NO: 213149 - DNA, 407 bp, Gossypium hirsutum
ccgaaaactgaaacgacccgtcgttggagtcggctgcgcttccactggtgacacatcagctgccttatccgcttattgcgctgccgcgggtattccttccattgtctttttacctgcgaataagatctccattgcacaattagttcaaccaattgcgaacggcgcgttcgttttgagcattgacaccgatttcgacggttgcatgaagttaatccgggaagttaccgccgagctaccaatttaccttgccaattcattgaacagtttaagactcgaagggcagaaaacggctgcgattgagattttacagcagtttgattgggaagctccagattgggttattgttcctggcggtaatttgggtaatatttatgctttttacaaagggtttaaaatgtgtcaagaac

SEQ ID NO: 213150 - DNA, 256 bp, Gossypium hirsutum
cccactcgttctaaaatatgcaagcgagaaattgctgattaattggattcaaccatgggtggctggcgaaccttatattgtcataggatgtagggattatgcagggcgacttgcacgcactgagtgactaagatccaaagacatcacccatcgagcgaaaattaataatttctggctgggtgtagtcctcctggcatttgttgatgaggtgctgtgctggctttacagaacaggcaaagagtattacgactacata

SEQ ID NO: 213151 - DNA, 263 bp, Gossypium hirsutum
cggacgcgtgggtttccttggggggtatcagtaaggaattggaatgtaataatattgattcatataggaggaaaaggttctctattgattcaaatgctgtacctatgggatagggatagagaaagaggaaaaaccgaagatttcacatagtgcttttgatcgaaaaatcaatctgatttatttcgtacccctcgctcaatgagaaaatgggtcagattctataggatcaaacctatgggacttagggaatgatggaagggaat

SEQ ID NO: 213152 - DNA, 424 bp, Gossypium hirsutum
acggtgctatctcggaatatgcgcaacgagtgtatcaactacagcttcacttacgaatcgccgcttcctgttgggagactcgccttccagctcgccgataaagcacaggtttgcacccaacgctcttggaaacgaccttatggtgttggcctgttggtggctggcttggatgaatctggggctcatctttactataactgtccaagtgggaattacttcgaataccatgcttttgccattggatcacggtcacaagctgcaaagacatacttggaacggaggtttgagaactttacagactcctctagggatgatctggtgaaagatgctattacggcaataatggagaccctgcaaggagaaactctgaaaagctcaatatgtacaattgctgtggtaggggttggagaaccgttccatgtat

SEQ ID NO: 213153 - DNA, 399 bp, Gossypium hirsutum
cccacgcgtccgcaactttccctgaaaaactagagataaaatcaatcatggctcgagggaagatccagatcaagctgatagagaactcgaccaacaggcaagtcacttattcgaagagaagaaacggtcttttcaagaaagctaatgaacttacagttctttgcgatgctagagtttcgatcatcatgttttccactactggtaaactccatgagtttatcagcccttccaccacaacgaagcaagtaattgatcagtaccagaaaaccttggggatcgatatctggaacacccactatgagaaaatgcaagagcagttgaagcagctgaaagaggttaacaggaacctgcgcaaagagattaggagaaggatgggcgactgtttgaatgatttgagca

SEQ ID NO: 213154 - DNA, 408 bp, Gossypium hirsutum
ctcacggacaaagaattgatctctgactgtttgaaatgttgcacagaatactcaggggaggctacaagtaagattacttattcaggtgcaatactggaagtttgcatgaggaaactagtattctatccagaaattggcggtttcattgaagaagagaaggacaagtttccaacagttaaagttcaatatcttttcaattctcctcccaagatgatcatgttggatgatgaaggccaacataaggaaaccataaaaattgacaattggaaacctgaacacatgctgcaattcctgcttaagaaagttcagccctattctgcaagctcataaacaggaattcacattcctgttatcgcacgataaaagaaaacccgaactccacaagaatgaactatttattcatgttag

SEQ ID NO: 213155 - DNA, 377 bp, Gossypium hirsutum
agaaaatttgtgggctgatggatgtgaagaaattgacaatggaagcatctatgcgtgctgcacagaacgatagacttccgctacgagttgtagttcaagttctcttcttcgaacaggttaaggctgcaactagagctcaatcacgtaactccgatgcccgcgctacttgcgtttccaagatgagccccgatgaagaatgggacaagaccatgggtgaagattgtcggtccctcaaaaaaaagatgagtgaagtcgatacaaatgaggatggaggccagaaaaacagtaaaatgggcaagaagaagagcagaaacagtaagagtggggtgcagctgctgccatcacggtctagaagaatatttcacaagctgtgggta

SEQ ID NO: 213156 - DNA, 360 bp, Gossypium hirsutum
ccgggtgcgacccacgcgtacggtgtactccattaaagcgacctgcctttctcctaaactggaagaagtgtacgcggagggggtccttttgctgaaaccgggatctctatacgtgtcttacgagtgggtgacgactgacaggtacagaggtgataaccctgaacacgtggaggttattcaaggtatcaaaagaagcgatgctttgcccggtcttaggaactacaaggacataacggaggttgcaaaaaaggtaggctttctaggttgttaaagaaaaagatctatccaagccaaccgccttaccctggtggaccaagcttaagatggggagaatcgcctactggaggaaccacttttttg

SEQ ID NO: 213157 - DNA, 171 bp, Gossypium hirsutum
cccacgcgttcggaactgccttcagacagctttggtgcctatataatctcaatggctacagccccatctgatgtgcttgctggtgagcttttacaacgtgaatgccatgtaaagcaaccattacgggtagttccattgtttgaaaaactcgctgatcttgaagctgctcct

SEQ ID NO: 213158 - DNA, 297 bp, Gossypium hirsutum
acgaaactattatcctattctttcttgctttcagtttcttcactcactggcccaagtctctggggtgaacggagatggcatgaaaaggtggaaaggggcttttggcggccaaaacaacctcatctaacaaggacacggacacggataaggacaagaagcgtccggtttctcgatcatctcgtgccggaatttaattcccagtgggttctatccaccgtcatctcaagtttaaggcatctgctaatgtgagagttggggccacacccgccgtttacttggactttattattgaatacc

SEQ ID NO: 213159 - DNA, 378 bp, Gossypium hirsutum
cgagcaattagaatcatccatggtgttttgggagaacgccatacacgattttggtcgagcgcaacgtgtttgatgaatcaacgagttgttctgaaagtccatctatatcttccatacaactcagcattgaaactcaacctaaatcccctcagatcgacatgaattccgagccatccactgtagttaccccagagcccgttacatcaatggaacaacctgctccttcaccagctggggttaatgatggattctgggaacaattattgaccgaaaatccacgtttaacagatattctagaagttcttgccgaaagaaaagatcctgatacgagaaaagactaataacaaccccaagggcaaaacatattttggcggaaca

SEQ ID NO: 213160 - DNA, 308 bp, Gossypium hirsutum
gctaagagtcccttcaccgtcctttatttttccaactaaggttaggctttaaactttaaaacattatgggtttagcagcagccctcctcttcctcctcctagcagctccggcggcttttgccgagcaatacaccgtacgagacagcagcggttggacctcgaccggagattaccaaagttgggttcaagggaaaacattcaccgtaggcgacacacttttgtttacctactgtggcagccactcggtggaggaagtatgcaagagcgactacgataattgcaacaccggcaatgctattaaattctac

SEQ ID NO: 213161 - DNA, 292 bp, Gossypium hirsutum
cgacccacgcgtacggttgacaaatggatgtccagcgatatgtaacggttcatttctcgactcctggatacgaatcccgttacaaggatctcacttgatgagatccttaaggatccatggatcaggaagggttacaaagagcccaagttccactaggagcaacccaaggatgacgctcacgcctcaagctcgaagctgaatgcattcgaatggatatccttctgctcgggtttgaacttgtctgagatgttggatgagtctcacgattactgcgaacggatcatattgagag

SEQ ID NO: 213162 - DNA, 345 bp, Gossypium hirsutum
aacggagggccgaccgcgcgtccgagaaagtcaactagagcggcctctgtttctgctccaactcaaaggttactagtaccaatgctttcggatgcgagattcatcgaggaatacattaagaccaataaaaggaggctacaaaatatgcatgccttatttgaagctggtctgaaaggattaaatattagatgtgcacatagtaatgctggcttgtctttgagggctgatatgagcaaattaatctcctcatacagtgagaaaggagaacatgagctaagggatatgctattaaatgcgggtaagaacaatgtaactccgtgttcagcttgccattgcattgaaccg

SEQ ID NO: 213163 - DNA, 282 bp, Gossypium hirsutum
acgcccacgcgtccgacaacgcgtgcggattgataaggcgtaccctactgattacatgcaaagagggacagtgagggtccagttgaaaaaggaagatgggactatatggaatccatccattatttcaaggaagcagctgatgctacaagttgcagagttggcacctagacacccgggaaggactatgaagcaggaagcttcatcaacatcaaaagctgctgacagatcttacaagcacacgaagggcggaagaaaaaagcgatagttgcgcaaccttcctaa

SEQ ID NO: 213164 - DNA, 356 bp, Gossypium hirsutum
cgacccacgcgtacgggaggtcttgacccgacgaaattacttcaacacctttggtgggaaccctgtatgtacggctgcaggattagccgttttgaacgtaatcgaaaaagaaaagcttcaagacaatgccttcgtcgtaggatcttacttgaaagagagactaattgcactaaaagataaacatgaccttatcggggatgtgagaagacgtggattgatgctcggagtcgaacttgtcactgatcacgagctcaagacaccggcaaagcttgaaacacttcatgtattggaccaaatgaaagagatcggtgtattggttgggaaaggtggattttatggcaatgtatatagaatta

SEQ ID NO: 213165 - DNA, 243 bp, Gossypium hirsutum
acgcccacgcgttcgaccacgcgtgcggtcctatccattttcgtgctcctgctaagatcctatggcgtaccattcgtggaatgattcctcataagactaagcgcggagcagcagcacttgctcgtttgaaggcttacgaagggattccagctccgtatgataagataaagaggatgggtattcccgatgctctcaaggtttttgggcttcagaaaggacacaagtgttggttggtgggcaagc

SEQ ID NO: 213166 - DNA, 365 bp, Gossypium hirsutum
ggcgcgacccacgcgaacgggaacatatcgaagatgtgcgcgtgcaacgagataaaggttttggttttgtgagatacagtttgcatactgaagcagctttagctatacagatgggaaatgctagaattctgtgcggaaaaccaattaagtgttcatggggtagcaagcctactgcaccaggaacaagctctgcccctttgcctccaccggctgctgcacatatgcctggtttttcagctgctgatctggctgcctatgaacgacatatggcaatgagtgaatatggcggtgcacaggtaaatgagtatgatgcatccacagggacaagcaatctatgatggtggataccaaaacgttgcaacaac

SEQ ID NO: 213167 - DNA, 226 bp, Gossypium hirsutum
  unsure (1)..(226): unsure at all n locations
atnggacatggtccacaagncgcacggggaaagaaggngccgncnnnngagaangnncaganatataacttggtaacttcgattctcaagttagagggtgctcctaataatggttcttcagcatttgctgagtctgttcttttgcctagtcagtcattttatctcctaagcatgttcagagtgatcttagctgctgaaatatgggagtagaagtgggcatgatgtc

SEQ ID NO: 213168 - DNA, 288 bp, Gossypium hirsutum
  unsure (1)..(288): unsure at all n locations
gatcgagccgnngagagggacagaggaaaagatatatcngacgacgcaaggatagaagcaaggggatgcatcatgggcccacctatagcattggctattggggcaaagattgttcctatgaggaaacccaataaatagccgggggaggcattatcggaggagtattctacggagtatggaaaggacacaatggagatgcatgacgatgctgacaaagcaggagaacgcgctttgataatagatgatcttgttgccactggtggaaccttgtctgctgcaatcaagcta

SEQ ID NO: 213169 - DNA, 359 bp, Gossypium hirsutum
cgacgaaccgccaagttaccttttgtaagaggcgcaatggtttgctcaaaaaggcttatgagctatcggttctttgtgatgctgaggttgctttgattgtcttctccaaccgtggtcgactctatgagtatgccaacaatagtgttaaagcaacaattgagaggtacaaaaaggcttctgattcctccaatactgggtcagttgctgaagttaatgctcagttctatcagcaagaagctgacaaactccgaaatcaaatccggaatttgcagaatacaaacaggcacatgctgggggagtccgtacggggattgcctatgaaagagcttaagaacttggagactcgtgtagaaaaggat

SEQ ID NO: 213170 - DNA, 303 bp, Gossypium hirsutum
cccacgcgtccgaccacgcgtgcggctcgatgcccctttgagcaagttactgcaactctcttaaattttgtgaggttgtttcggaaagcacacgaagagaatatgaagcaggttgacttggagaagaagaaagctgagaaggagaaggctaagggaattaaccttacaaaaaagggtgcaaattagtctgaagatcagtttctcttttcatacaagataatatgctcctaccaagcagcagatgtttgtgcccaagagttcgattgaatgacaatgatgctgctttttggggatgtccagata

SEQ ID NO: 213171 - DNA, 324 bp, Gossypium hirsutum
cccacgcgtccgcggacgcgtgggggcaaagaagatgcacccggaattgttgatcttcaggagtggtggggtgtggattttgagataaaaaaccatgccttgaagatctatcaactgggcccgggattcaaagcttttattacacatttgtatcgaggaaaggttggtcttgatgatgctgatgcacaacacctaatggatggtctcgactgacaaggcgctgcaaaggatatctgtgcttcggttgattggcttaaagctaatggttcaaaaaaagcttgagtgaccggattttgcatggggggtgctctctatattgcagag

SEQ ID NO: 213172 - DNA, 345 bp, Gossypium hirsutum
cggcgcgacccacgcgtacgctttgttcaacatgatgacattcaaggtgatgaccacctttatgtcccctcctcctgaagccacgttcttggcatttcatccacaagacaataatattatcgcgattggcatggaagactccacaattcaaatttacaatgttcgagtcgatgaggtcaaaaccaaactcaagggccaccaaaatcggataaccggacttgccttttcacaaactttgaattctctggtgtcttcaggggctgatgcacagttatgtgtttggagcatagatggatgggagaaaaaaaaatcgaagttcatacaagctccggctggtcgtcaatc

SEQ ID NO: 213173 - DNA, 303 bp, Gossypium hirsutum
cccacgcgtccggaaggaactagactaccttgttggtgctgtttcaagccccaaaaggccttttgctgccattgtgggtggctcaaaggtctcttccaagattggagtcattgaatcactccttgagaaatgtgacattctccttcttggtggtggtatgattttcacattttacaaggcacaaggcctatcagtcggttcatccctggtagaggaggataagcttgaacttgcaacatcacttcttgtaaaggccaaggcaaaaagagtgtctcttttgttacccactgatgtggttatcgc

SEQ ID NO: 213174 - DNA, 377 bp, Gossypium hirsutum
tagtttcgctaaacccataatctctttacaagtcaaagcaaattctcctgctctttcagatgaactgccactggatgcttccccttctcaatcttcttctggtaaagagaagcttggagtggtggtgaagccattagagaagccacgggtagtattgaagttcatatggatggaaaaagatatagggatggctcttgatcaagtgataccaaggccatggttcaatccctttgagtccatattacttttggcctagaaaagatgcttgggaagagctcaaggttttgcttgaaagcaagccatggatatctcacatgcaaaggattcaccttctcaaccaagctactgatatcatcaatttatggcagacaagtggt

SEQ ID NO: 213175 - DNA, 373 bp, Gossypium hirsutum
ccggcgcgacccacgcgtacgtacattttcatacttgccaagggatctgaatttcattgatcatacaagcaatattgggtggaaagagtttcatagagctaagccaattattatagatccagggttgtacagtttgaaaaaagctgatgtgttttgggttactcaaaggagaagcgtgcctactgcattcaaactctttacaggttctgcttggatggcactttctcgatcttttatcgattactgcatttggggatgggacaacctacctcgaacagttctcatgtactacgctaactttttatcttctacagaaggttacttccacaccgtgatttgtaatgctcaagaattgcgtaacactaccgtgaac

SEQ ID NO: 213176 - DNA, 319 bp, Gossypium hirsutum
aacgcgacaaagacctgatctcatacatgatattttaacaactttaaggaggaacatagacactccagtaacatgcaagatccgacttttaaaaacatcccaggatacagtagaacttgcaaggagaattgagaagactggtgtttctgctcttgctgtccatggaaggcaagttgcagataggccaagggatcctgcaaagtggaatgagattgctgatgttgtatcagcattaactattccagctattgcaaatggtgatgtttttgaatatgatgacattcagcgcattaaaggtgcaacaagtgcttcataagta

SEQ ID NO: 213177 - DNA, 364 bp, Gossypium hirsutum
gacccacgcgtacggatgagtacatcacacacaatgtgacccttggagatattaacaaggcatttgatctgatgcatgaagggggttgcctccgatgtgtgcttaagatgaatggatgaggctaatatgggtgaactaaaggggtgatctgtgaagaactacgtgcctatcttctacaaccgggtttgtacttccactgccaacttatgagtataaagtagagtctgttggaacaaactttttctatgaagcctagtagtttaaccttgtgaaaaatgtttggtttatgatgttaaaagaaaaccaacgatggaagtgtgtgcatgaatgaataaaataattaatctccaaattatctgaatta

SEQ ID NO: 213178 - DNA, 156 bp, Gossypium hirsutum
  unsure (1)..(156): unsure at all n locations
tccccacactcaccagntgaagatatgtgattanggtagtgcaaaaatgttggtaccaggtgaacctaacatatcatatatatgctcaagatattatagggcttcagaacttatatttggggcgacggtgtataacactgctattgatatgtggtc

SEQ ID NO: 213179 - DNA, 276 bp, Gossypium hirsutum; identical to SEQ ID NO: 196263

SEQ ID NO: 213180 - DNA, 223 bp, Gossypium hirsutum
  unsure (1)..(223): unsure at all n locations
gacccacgcgaacgcggacgcgtggggntntgggattnggaaaatggagcgnnatgagatactgaaagatattggatcagggaactttggggttgctaagctggttagggataaaaggactggtgagctttatgctgacaagtatattgaaagaggccccaagattgatgagcatgtgcaaagggagattatgaaccataggtctttgaagcatccaaatata

SEQ ID NO: 213181 - DNA, 332 bp, Gossypium hirsutum
agaaccggggcgacccaacccgtccgtttgcatcctgcaggtgacaccccttcatcttgccgactatttgatgctattgtgagccattgtgttccagtgattgtcagtgataagattgagcttccctatgaggatgaaattgactactctgaattctcaatattcttttctatgaaagaggcattagaaccaggttatttggtcaatcagttgcgtcagtttcccaaggatcgatgggttgaaatgtggaagcaacttaagaatatttctcatcatttcgaattccagtaccctccaaagaaagaagatggcgtcaatatgttatggagaca

SEQ ID NO: 213182 - DNA, 409 bp, Gossypium hirsutum
tcgcaccatttcagagattgccgacattttccaagggattccaaccttgaacctgttggaggatcaataaatttaactcgttattcaggttatgatgagctcaaacaagatttggctcgtaggtttggaattgaggggcagctggaagaccgagggagagtaggctggaaactagtctatgtggatcacgagaatgatgttctgctagtaggagatgacccatgggaggagtttatcaactgtgtcagatgcatcaaaatactctcccctcaggaagtccagcagatgagcgtggatggagagtttgggaactctgtcctgcctaatcaagcctgtagcagctctggcaatgggaatgcataaactagtatggttacaagctaaggtccatcagtagttcggggctcat

SEQ ID NO: 213183 - DNA, 438 bp, Gossypium hirsutum
cttcggccaaaccagggatcctcctaaggacaactcaaataaagaagtctctattttggagaatgtttgttggaaagaacttggactcctttgtttcgtttggattgcattccttgtactgcagattaccaagaataatacaactacttgttcagcattgtattgggtgttgaacttgctgcagatcccagtttcagttggggtatctctatatgaggcagttagtctctataaaggatatagagttattgcatccaagggagaacatggcacaagttttcgagtagcccagcttgttacctactgtgcttttggagtactagctggagttgtcggccgtctgcttggcctaggaggaggatttatcatgggtccactattcttggagtttggtgtccctcctcagtatcaagtgctacagctacctttgccatgaca

SEQ ID NO: 213184 - DNA, 272 bp, Gossypium hirsutum
aaggaagctcgtcaagtacacgagcgttcagctaaggctcaaaaggcgctgggtattaagggtaagatgattgcgaagaaaaattatgctgaaaaggccctcatgaaaaaaacattggctatgcatgaggaatcatcaactaggcgtaaggttgatgacgaagtccaagatggagctattcctgcctatcttatggatcgtgaaaataccacacgtgctaaggttcttagcaataccataaagcaaaagaggaaagagaaagccggaaaatg

SEQ ID NO: 213185 - DNA, 369 bp, Gossypium hirsutum
gaccaagccgtccgccaacgcgtccgcccacgcgtccgcacacatgtctactatcaggagtatacatagggaatgtgaaggtgctagtgcgattgcaatttggaattgatggtccaaaggatgtagctatgaaacttgctgttagatctgaggacgaagctgttagtgatgccattcatgagattgtagctagcggctaggtaggttgtcgattttttgtttgtttgtactttttttaattaatttttttttgcatatagtccggcttttatactatttgtggctttatatgagacacgggaggcttatggctacacaacacgttaaaaatgaaaaatataagctagtaggaaggattgattgcttctt

SEQ ID NO: 213186 - DNA, 309 bp, Gossypium hirsutum
  unsure (1)..(309): unsure at all n locations
acaatcctttcgcccacccttcagacttttcttccggtggccgtcgattgggaatggggtgaagaagatgaaggggatgatttggataacacgaagcttgtccccatttttgcgcacacggtttctttccaaaagagacaggcgttagtgacatatctagagcacaacagagctaggaatgcagggtacggtgtcatggtccacagaactgtgaaccgcaccatatatctgatctagactaactntactgctttggctactcaacangacaatagtaaacttgacatgaacaccatatatgacggacag

SEQ ID NO: 213187 - DNA, 436 bp, Gossypium hirsutum
  unsure (1)..(436): unsure at all n locations
gcttatgcgaattactgaaatggttgagtcaaagctgaaggagacgactgtcaggttggagcagcagttagcagaggagcaggcagcacggctgaaggcggaagagttggcgcagttagctcaaatgaaatcaaatgatgaaatccggaagcttcgagagaatctagaaagagcacagaaagagacagaggagctccgcaagcaagctgctcggtgtgccatcctgtgactgccgctacaatgagaagatgcctctcttatgctattatatttattttcaatgttttaaattgctataatgcttttaaatcctgcgtaaatgattttaagcttttccaaagtcaactgtcttatcttcatgcctctntgtaaatattgaagtgtataagagatttcaacacactggttttattggtgtgatatatctctttcttat

SEQ ID NO: 213188 - DNA, 398 bp, Gossypium hirsutum
agccgtcggccaacgcgtccgcccacgcgtccgcccacgcgtccggccaaatggtgacacaaggaatgtgggagcgagactctatgcttctacagctcccatacttcactaaggaattagccaagagatgccaagagaaccctgggaagaacattgagaccatttttgatctggtggagatggaagatgacgagaggcgtgagctgttacagatgtctgatttgcagcttctggacattgcaaagttctgcaatcgtttccccaacatcgatttatcatacgaggtgattgatagtgacaatgtaagggctggggaatatgtcaccttgcaggttaccctcgagagggatctagaagggaagacagaggttggaccggttgatgctcccaagtacccg

SEQ ID NO: 213189 - DNA, 335 bp, Gossypium hirsutum
ctgagagagaaaaaaagggaaagaaaagtttttatggctccccaagacaaaaatgcgagcaaaatcttgaagaaagctaacgttactggaagtacgagcagccaagaggtgcatttcaggggagtaaggaagaggccatggggtaggtacgctgccgaaatcagagatcccggaaagaaaagccgtgtttggcttggtactttcgatacggctgaggaagctgccagagcctacgacgcggcggcgcgtgagtttcgtggacctaatgctaagaccaacttccctttacctgatgaaaccaacttgtacaagggccagaaccagcagagccctag

SEQ ID NO: 213190 - DNA, 425 bp, Gossypium hirsutum
gaccaagccgtccgccaacccgtccgcccacgcgtccggtcactccaagtggtgcagttcactttacggcctcaaataatgactgtggagtcagagattttgatatggagaaatatcagctttccaagcattttcattttctttggcctgtcaatcatacttctctgagccctgatgggaaacttctaataatagttggagacaaccctgatattatgttggtagactctgatacagggaagactgttatgcccttgcgtggacacttggacttttcatttgcgtcagcatggcatcctgatggtgtcacttttgcaactgggaaccaagacaaaacatgccgaatttgggatgttcgaaacttgtcaaagtcaattgctgttctaaagggaaaccttggagcaatacggtccattcgctacaca

SEQ ID NO: 213191 - DNA, 396 bp, Gossypium hirsutum
atggaggcagtgactgccttacttggaggtagaatccatgttggggtactccttcaagagaagaaagtgagagatgacagtcgaactctattacaaaccggtatttcatctgaagataatttggatgctctgggtttcactttggagcctggtcccgtgataggtcctcgacctatattctccgaagaaccccctctacagttgccgcgtggctctgcccctcaaaatttaacaagctctttagtagtcacaccagccttagataccggggattccagctgccacacctgacccacctttactgaccaattcagcaaaacctgtggatagtaattatgaacacgtttcgtcccaaactgacatgctaaccgatcaaaatctgtcagagtctagagc

SEQ ID NO: 213192 - DNA, 401 bp, Gossypium hirsutum
agcaagacaaacatggtgatggtgtttggtgagatcactaccaaagccaacgtagactacgagaagatcgtgcgtgacacctgccgtggcatcggtttcacatctgacgatgtgggtctggatgctgacaactgcaaagtgctggttaacatagagcaacaaagccctgatattgcccaaggtgtccatggccatctcagtaagcgtcccgaggaaatcggtgctggtgaccagggccatatgtttggttacgccacagatgaaacccctgaattgatgcctttgacgcatgttttggcaaccaggcttggtgctcgcctcactgaagttcgcaagaacggaacttgcccttggctcaagcctgatggcaagactcaagtcaccgtcgagtattacaacga

SEQ ID NO: 213193 - DNA, 375 bp, Gossypium hirsutum
cggacgcgtgggcggacgcgtgggcggacgcgtgggcggacgcgtgggcggacgcgtgggtcatattaaaaatcttcgaaatctccctctaacatcttaacatacgattttggttgtgtgggagagagagatggacgcccttgacaacgtggtagatcctctgagagacttcgccaaggacagcgtccgcctcgtcaagcgttgtcacaaacccgatcgtaaagagttcacgaaggtggctttccgtacagcgatcggtttcgtagtgatgggattcgtcggattcttcgtcaagctcatctttattcctattaacaacatcatcgttggctccgcttaggaattgcaagctcgtagaaattggtgggggatatg

SEQ ID NO: 213194 - DNA, 361 bp, Gossypium hirsutum
cccacgcgtccgcggacgcgtgggttcatcccttgttttccttcaacccaaacaaaacctaatctttttgaaaaaatggcaccaaaagctgaaaaaaagccagccgagaagaagccagccgaggagaagaaagccgtagctgagaaagccccggcagagaagaagcctaaggctggtaaaaagcttcccaaggaaggcggagcggctgccggagacaagaagaagaagagagttaagaagagcgtcgagacctacaagatctacatcttcaaggtcctgaagcaagttcaccctgacatcgggatctctagcaaagctatggggatcatgaacagtttcatcaacgatatcttcgagaagc

SEQ ID NO: 213195 - DNA, 365 bp, Gossypium hirsutum
cccacgcgtccgcccacgcgtccgcggacgcgtgggatgatggccaagtgtgatcctcgccatggcaagtatatggcttgctgtttgatgtaccgtggtgatgttgtgcccaaggatgtcaatgctgctgttgccaccatcaagaccaagagaactattcaattcgttgactggtgcccaactggattcaagtgtggtatcaactaccagccaccgactgtcgttcctggtggtgatcttgctaaggtccagagagccgtttgcatgatttccaactcaaccagcgttgctgaggtgttctcccgcattgaccacaagtttgatctcatgtatgccaagcgtgcctttgttcaactgtacgtggg

SEQ ID NO: 213196 - DNA, 401 bp, Gossypium hirsutum
tcagattagggttgagcagatatggccaagtcaaagaaccacaccgctcacaatcagtcttacaaggctcacaagaatggcatcaagaagcccaagaggcaacgccatacttccaccaaagggatggatccaaagtttttgaggaaccagaggtatgcaaggaagcacaacaagaagaatggggaatctgccgctgaggaagagtaaatttaaatgaaaaagaaattacccttcattaaggtttttctagttagggctgttttactatattctatggaatttggtgttaattttacactccttttgtttttgtattggtgttttatgggattattgattatatttgttagaaaagatctgaagttgtgagcttattaatatcatgaacatgttttgatctt

SEQ ID NO: 213197 - DNA, 431 bp, Gossypium hirsutum
gttaacactgtgcttggttcaaatgcaccacctctaacagtgaagcttgtgggggtttttacttctggttcaaaggctgcatctctagttgaaagccaagaactactgtttgatgatggaactggaatgtataacttgaaaaacttgcccaagagtatagatgttggaagttacacatttgtttttgagattgtgcttcatgaacttgagcatgaaaagatttacatcacgggaggccaaaaaaaggtacctatatttgtctcaggacttatcaaaatcgaaaatgctgaaattgcagtacttgacagtgatcttgggagcatagaaacacagaaaaagttagatttagctggacaaaaatgctgtgtcattatcagcaaaccatctacagaagctgcgtgtatcttttaagttgacaactcctcatggac

SEQ ID NO: 213198 - DNA, 357 bp, Gossypium hirsutum
tcgaaacaattccgctggaaacttttggccctatttatggaaggagaggtcactttggcatggctgaagctgctggttggtttcttaaccatgaaataggaagatatgaaagtgcttgaaggaatatgaggttaaggttggcggagcattctcttcgagctgcattagcttcttgataattcctcatgagaagtaaaaaatggagcgagggtttagcctcaacattgtctctactgtaatttcacagtctactccaacttgcgtttccaaagaacttgctgaaaggtgttctggttttgttacgacaatcgtaatgcaaattgtgcccataaagaaggaatcaactttggccccctg

SEQ ID NO: 213199 - DNA, 424 bp, Gossypium hirsutum
cttcgcaatgacccccttggaaggcctaatggtttttttggagaagaatgaatcagagatttctccttccactttgtatgctattgcttgtgttcttgaaaatgttcctttcatcaatggcagcccacaaaacacctttgttccagggttgattgatttggctattcaaaggaactgtctgattggaggagatgacttcaagagtggccagaccaagatgaaatctgtcctcgtggatttccttgttggggctgggatcaagccaacatcgatagtgagttacaaccatctgggaaataatgatggcatgaatctatcggcaccccaaaccttccgttccaaggagatctcaaagagcaatgttggtgatgacatggtttcaagcaatggaatcctgtatgagcctggtgaacatcctgatcat

SEQ ID NO: 213200 - DNA, 234 bp, Gossypium hirsutum
cggacgcgtgggcggacgcgtgggcggacgcgtgggcggacgcgtgggtttttacaacaaaacaaaaaccttataaaccctagcctctgccaggccttcaactcagccaccgccgctgccattcaaggccgatttatggcctcagtcatcccagtctccgatcgcgacggagatgggatgaaacgcgacgaagctaggtaagtttcttttcttctctttgtattattattttac

SEQ ID NO: 213201 - DNA, 431 bp, Gossypium hirsutum
agccttcggccacagccttcggccaagccttccggcaccattgtgatcctcctaaaaggcgattccctttagagaaagggttcccccaccatggtggcctactggaaatgaagaatggtggccacaactaggattgcccgaagatcaaggccctcctccctataagaaacctcatgacttgaagaaggcttggaaagtgggggttctcacagctgtgatcaagcatatatctcctgatattgccaagattcgcaagcttgtaaggcagtccaagtgcttacaggacaaaatgacagcaaaggagagttcaacttggcttgccatcattaaccaggaggaagccttggcccgagaactttaccctggatttctgccacctttgtcctcaggtggtggaaaatgtatctttggttataaatgactgcagtgag

SEQ ID NO: 213202 - DNA, 406 bp, Gossypium hirsutum
ggaacgtggaggttcgcacgacggagaacgtaaaagggtcaaagcagaacataaagatcggaagcgttaaaggaatcaacggtgggaaagtaacgaaatcggtttcttgccatcagagtttgtacccgtatttgctttactattgccactcggtccccgaggtccgggtctatgaagcggatattctggatccgaagtcactggagaagatcaatcatggtgttgccatctgtcatttggacacatccagttggagttcgaatcatggagcgttcttggcattgggttcgggtccgggtcggatcgaggtgtgccactggattttcgagaatgacatgacttggaccatctctgattcttaaactagaaaagcttctggatgggtaaatttagtaaattttaccca

SEQ ID NO: 213203 - DNA, 368 bp, Gossypium hirsutum
aaggattaacctttggttggacccaacaaaagaataccactcctactctgtcctctggaacatgtatcagatagtgttctttgtggacgacataccaatcagagtgttcaaaaactgcaaagatttgggagtgaggttcccattcaaccaaccaatgaagatatactccagcttatggaacgccgatgactgggccacaaggggtggtctcgaaaagaccgactggtccaaagccccattcattgccacatacaagagcttccacatcgacggctgcgagtcgtcggtggaagccaagttctgcgccacacagggcaagcggtggtgggaccaaaaggcattccaggacctcgacgcctatcagtggc

SEQ ID NO: 213204 - DNA, 346 bp, Gossypium hirsutum
ccaaccgggtcgttttttttttaagggccacccttcgtttgttgaacgagggaaattacttgcatagtggagccgtagcgacatttgtagacttggtttcctccgcagcaatatacactgctggaggtaccttcgttggaacttcagttgagatcaatatttctttcatggatgctgctcatgctgatgaggatattgagatagaagcaaaggctttacatgttgggaaggctgttgctgtcctcagtgctgagtttaagaagaaaagtaatggtaaaattatagctcaaggtcgtcatactatgtatctacctctaccaaagtaaatgtagataacatattaatg

SEQ ID NO: 213205 - DNA, 365 bp, Gossypium hirsutum
tctggccaagtccatttgggatgagatccacgattgctttggctgagaaagggataccatacgagtacagagaagaagatttgaggaacaagagtgatttgttgctgcagatgaaccctgttcacaagaaaatccctgttcttatccataatggtaaacccgtttgtgagtctgtcattcaggttcagtatattgatgaggtctggcatgataaagctcctttgatcccttctgatccttatcaaagagctgttgccagattctgggttgatttcgttgacaagaagatatatgacctggggagcaaaatatggaagacaaagggagaagaacaagcaaatgcaaagaaaggatttaattgagtg

SEQ ID NO: 213206 - DNA, 420 bp, Gossypium hirsutum
tcggccaagccttccgccaacccttccggtgcttgacagattcatttgatccaaataactcagaacatcagaaaattaaggctgaaattgagattggtgatggtcttccggatatcaggttgactggacagtgcctggaagctctaaaagaggctggttttgagataatttgggagaaagatcttgctgttggctctccactcccttggtacttgcctttggatacaagccacttctcattgagtagcttccgtctaacatctgttggacgcttcatcaccagaaatatggtaaaggctctagaatttgtgggattagctcccaaaggaagtcaaagagttcaagattttctagagaaagctgcaaaagggttggttgaaagtggtaggaaagagatatttacgcctatgtatttctttt

SEQ ID NO: 213207 - DNA, 431 bp, Gossypium hirsutum
ggatcacccacctcaaatgctaatggttcgtgggaagcatttccttcaaatggagagccagaggtgacttctgcatggcaaacaccagctgctgagcctggtaaagcggattgggaattggcgttggttgagtcagctagtaatttatcgaagcagaaagctggattagcaggtggttttgatccgttgttactgaatggcatgtatgatcagggggcagtgaggcagcatgtgagctccagtcagctaagtggtgggagtgcaagtagtgttgcgatgcctggccctggcaaggctgcttctcaagtgctggctttgcctgcaccggatggtacagtgcagccagtaggacagcaagatccttttgccgcatcgcttacagtgccaccgccttcgtatgtgcagatagcggacatggagcagaagcagca

SEQ ID NO: 213208 - DNA, 372 bp, Gossypium hirsutum
ggtttttgaagaggggggaatctccaatttgcttaagggatctgccagctcctttgagggttggaattgcatacataccactgtacagggaatgtgttgaggtggggggtcgtctgttatcgcaaaggctgagggggcagcttgttgaagctgttcgaatgcttggaggtgggtcattagaagaggtaagtcaaggcagagagcttctagctactttggaacatcaccttcctccatttttggttcgtgcccccagtgttggttagacctcttggattttcgcatgcccttgaccctatattatcccatgtgccatacgtaataatatcattttagcagttggtacgtcacaaagcttctaagtttgtcaaa

SEQ ID NO: 213209 - DNA, 434 bp, Gossypium hirsutum
gggtcgacaccacgcgtgcgggataaccgacttggagggctaacgcggggttggaagcggtgagaaacccgctgtgccaaccgtgacttctgtgaggggatcaccagctgccgcctcctaaaaccggcgctggaatttgtttcccctcaacctgtttctggcgctgatatcctggcaccagctgttagagactctgtcgtaatatcagggggtccaagttgggaagtgcagatggggagaaaagacagcttgggtgctagcaaagaagcagcaacaaacaatattccaggtccaaattcaacggtgccaatgcttgttgccaagatccaaaacgttggactctcattcaatgacatgattgcactttctggtgcacacacgttgtgaatggctcgatgttcgacatttagttcacggcttcaaggctcaaatgg

SEQ ID NO: 213210 - DNA, 405 bp, Gossypium hirsutum
cccacgcgtccgcccacgcgtccggaaccacttgatttctgccaccatgagtggtgtgacatgctgccttcgtttccctggtcaattaaactcagatctacgcaagcttgccgtcaatctcattccattccctcgcctgcatttctttatggttggctttgctccccttacttctcgagggtcacagcaatacagggctcttactgttcccgagctcactcaacaaatgtgggatgccaaaaacatgatgtgtgctgctgatcctcgccatgggcgatacttgactgcttcagccatgttccgtggcaagatgagcaccaaggaagttgatgaacaaatgattaatgtccagaataagaactcatcttactttgtggagtggatccccaataatgtgaagtctac

SEQ ID NO: 213211 - DNA, 229 bp, Gossypium hirsutum
cataactctagaggcacaggtggacgtgttggcggaggtggaggaggtggtggtggtggtggacggtctggtggaactgatttgaagcgctatgaatgtggagagcctggacattttgctcgggaatgccaaacacctggttgttctggatgacgtcacaaacgccaacctagatatcgtaagaacccaaactatcgtctcagaagctacaatgctcatggactgtccc

SEQ ID NO: 213212 - DNA, 374 bp, Gossypium hirsutum
  unsure (1)..(374): unsure at all n locations
ggctggtgtaatctggctatacagagtggtgactattatcccactggattttatcaaagttgcaatccgctatgttcttagtggaaaggcttgggataaccttttggagaacaagactgccttcactacgaagaaagattacgggaaagaggaaagggaagcacaatgggcagctgcgcagaggactctgcatggccttcaaccacctgaaaccacaagcattttcaatgaaaggagcagttacagggaactttcagaaatcgcatagcangccaagcgcaaggctgaggttgcaaggctgaaggagctgaatacactgaaggggcatgttgaatcaatcgctaagctcaaggggcttgatatccataacattc

SEQ ID NO: 213213 - DNA, 401 bp, Gossypium hirsutum
cccacgcgtccgcccacgcgtccggaaaggactgttacaggttattgaacaccaaccaggtttctcctatctcgatgaccccatgaatcctttatatacccttttgcctaaactacgacaagtgcttgttgaaagggctctcaaggattgtaaaggcgatgaaaatgggttttcaatattcaaaaggatcccagttttcatagaggaactcaaggaaagactggaagaagagttaccgaaagcaagaacgaaatttggaaatggagagtttgggattgctaataagatcgaaaaatgcaggagttatccgatatatggatttgtaaggactgaaattggaactcagcttcttattggtgaaaaaagggtgagtccaggagaggatatagagaaaatttatg

SEQ ID NO: 213214 - DNA, 320 bp, Gossypium hirsutum
taccaagggttggaaggcgagttgaaaaatttccacaaaggatgggatgtacttttgacaaagatgatgaaagagcatgaggaaacagcttatgaacgcaaggggaagccggattttcttgatataattatggagaacagagaaaactctgcaggggaaaggcttagtttgaccaatgtcaaggcgcttctgttgaatctattcacagctggcaccgacacatcctcaagcataatcgaatgggcattagctgaaatcctgaagaacccaaaaatactgaacaaagctcacgaggagatggataaggtgattggcagaaa

SEQ ID NO: 213215 - DNA, 452 bp, Gossypium hirsutum
cggggcgacccaagccgtcggccaacccttccgccaacgcgtccggttaactggaaatcaaaatatgaggctgctgggatatggtatgaacaccgtctcattgatgatatggtggcatatgctctaaagagtgaaggtggttatgtttgggcatgcaagaactatgatggtgatgtccagagtgatttcttagcccaaggttttggatctcttggattgatgacatctgtgctggtttgcccagatgggaaaacaatagaagcagaagctgctcatggtactgttacacggcatttcagagttcaccaaaagggtggtgagaccagcacgaacagcatagcatctatctttgcttggacacgtgggcttgcacacagggcaaaattggatgacaatcctaaactcttagatttcattgagaaactagaggcagcttgtattgcaactgtgga

SEQ ID NO: 213216 - DNA, 421 bp, Gossypium hirsutum
  unsure (1)..(421): unsure at all n locations
cgaagaattcggggtaagaaagcaaaggtgaacttccctgatgagatgccacgcacctctccaaaacgtgtgattaagacaaatgatgagaaaccacttcccatgtcaaatttgagccctgttgaaccaaatatctaccagaatttcaattgcttgaacaaaccagagcaggtcttctatgataccgtgggtttcgttgaagagaaggcaccaatggatccatttgcttatgtggacactgttggattgaaaccctttggccaatctgacaatacccccttgtatttcagctcagacaggggaagtacttcctttgactgttctgacttcggctggggagaacatggtgcanagactccnganatatcatctgctcttgaagctactatggagggtgatgatttttggaagatgcaaccct

SEQ ID NO: 213217 - DNA, 391 bp, Gossypium hirsutum
aacgtttggtttaaaacttaaaagaatggcccgacccaaccaaactgcccgtaagtcgactggtgggaaggctccaaggaagcaacttgctaccaaggtgattcattgctgcccgtaaatctgccccaaccaccggtggtgtgaagaagcctcatcgctaccgtcctggaactgttgctcttcgtgaaattcgaaagtaccagaagagtactgagcttcttatcaggaaattgcctttccagaggcttgttcgtgaaattgcccaggacttcaagactgatttgcgtttccagagccatgccgttcttgctcttcaggaagctgcagaagcataccttgtgggtctctttgaagacaccaacctgtgtgcgatccacgccaagcgtgttac

SEQ ID NO: 213218 - DNA, 414 bp, Gossypium hirsutum
agccttccgcagccaaagaagattgagatgacgactatacgccgattttgctgcaatgatcttcgtttcgcatccgtcaatctcgaccacttaacggaaacctttaacatgtcattttacatgacatatttagctcgatggccccattactttcatgtagctgaaggccccggcaatcgaataatgggttacattatggggaaagttgaggggcaaggtgagtcttggcatggccatgtaacggcagtcactgtagcgccagaatatcgtaggcagcagctggctaagaaactgatgaaccttttggaagatatcagtgataagatagacaaggcatattttgtggatctgtttgtgagagcttctaatacaccagctataaagatgtatgagaagcttggatatgtaatatac

SEQ ID NO: 213219 - DNA, 273 bp, Gossypium hirsutum
  unsure (1)..(273): unsure at all n locations
aggcggcggcaaacgcggtgctttaaggcgtggcttcggcggcgggagatccgaccgtgggccaagaggtcggcgccgtggccgcaaggatgaggaggagaaatgggttcctgttacaaaacttggccgtttagtcaaatcnggaaaatcacatccctcgaacaaaattacctncactccctccncatcaaggagtaccaaatcatcgaccaactcgttggcccttcacttgaagacgaggtgatgaagatcactcccgtccagaaacaaaca

SEQ ID NO: 213220 - DNA, 337 bp, Gossypium hirsutum
ctggcatcaaaatcaatgcaacaaagtcgatgatagggcactgtctgggtgcagcgggcggtttagaagccattgccagtgtgaagccattaccacgggatggctgcatccctccataaaccaatttaatccagagccatcagttgagtttgacactgttgccaacaaaaagcagcagcacgaggttaatgttgcaatctcaaattcatttggatttggaggacacaactcggttgtggcattttcagccttcaagccatgaaagtctgttactacatgttctgcatttgttaggaaagatgatgatagagaaatatgatccttaaaagagcgagtc

SEQ ID NO: 213221 - DNA, 303 bp, Gossypium hirsutum
aagacattggtctccatcaaagatgtaaaagctgctttcataggccacgatcatactggggacttttgcgggaatttagagggaatatggtttcgttatggtggaggctttgggtaccatggctatggaagaattgtcttggcacggagagctagagtcatattgcctgaacttatgaagggcgataatgaatggatggtagtggagaggatcaaaacatgggagcgtattgatgacgagaatctcatcaagattgatgagcatgtgctgtgcgagttgtcaccatctatatgattctctttt

SEQ ID NO: 213222 - DNA, 267 bp, Gossypium hirsutum
ccacgcgtccgtggaaatatatggtatccgtggtccctcttaccagttcttcaatataggtgccatcaactggcgaaaatgatatcgaaaagtgcttaacatgggaagtttatagtcagcttgcaagaggaatgactatacagttcctcgacactgctgccaaagaattaggatgtaatatttccatataacatcgattaactttcggattatcagtataaataccctttttctttttttaaaaaaaaaaacctaaaaataataact

SEQ ID NO: 213223 - DNA, 372 bp, Gossypium hirsutum
cccacgcgtccgctgttggtgcatatggaggaaggagggagatcatggagatggtggcaccagcagggccaatgtaccaggctgggaccttgagtgggaacccattggcgatgacagccgggatacagacccttaagcggttgaaagagccaggaacatatgaatacttggataagatcaccggacaacttgttcaaggcattttagatgctggaaaaaagacaggacacgcaatctgtggagggtatatcaatgggatgtttggatttttcttcacagaaagacctgtttataactttgacgatgcaaagaagagtgatacaacaaaatttgccacgttttataggggaatgctggacgaaggtgtatact

SEQ ID NO: 213224 - DNA, 378 bp, Gossypium hirsutum
ctccttggtgtggtcactgtaagaagcttgctcctgagtacgagaagcttgggtcaagtttgaagaaggctaaatccgtcttgattggaaaggtggactgtgatgagcataagagtgtctgcagcaaatacggtgttcagggctacccaactattcagtggttcccaaaaggctctttggaacctaaaaaatatgaaggaccacgaactgcagaggcccttgctgagtttgtcaacactgaaggagggaccaatgtgaagatagccacattaccatccagtgttgtagtgctaaatgctgataattttgatgaggttgtccttgatgagaccaaagatgtgttggttgagtttatgcaccttggtggggcattgcaaa

SEQ ID NO: 213225 - DNA, 384 bp, Gossypium hirsutum
caaggaaggcatcccaccagaccagcaaaggctcatctttgccgggaaacaactcgaggacggtcgcaccttggccgattacaacatccagaaggagtcgaccctccatttggtattgaggcttcgtggtgggatgcagattttcgtcaagacgttgactgggaaaaccataactttggaggtggagagttccgatacgatcgacaatgttaaggcgaagattcaggacaaagaagggattccaccagatcagcaaaggttgattttcgctgggaaacagttggaagatggaaggactttggctgattacaatattcagaaggaatccactctccaccttgtcttgcgtcttcgtggtggtttctaagctctcctatgaaaatg

SEQ ID NO: 213226 - DNA, 346 bp, Gossypium hirsutum
cccacgcgtccggatctggactaaagaagctgatatttcttgtggaaggtgatccggggacttcagaagctgctgaaagcatcaaaacagcgtgcttcacaacagagatcctggaggggtttgatgttcagagaacaagtagtttacatgataccctgaggaagtatgcgtgtcttactcgagcaatagctcaatattataagctgcatctgcctgagggccattctaaattgtctggggtctgtcctccctttaatgaatttatcataaggtgccaagaagctggataaaaatgaccaggcagtgatggatattgccattctactttatggcccgtacccccagg

SEQ ID NO: 213227 - DNA, 418 bp, Gossypium hirsutum
acgaaaacatcattttttttccactcaatggaatggctacatctcagttaacagcatcaggaatgacagtatcagtaaggaatttggcttcatttgaaggattaaggccatcatccattgtgaaattctcttcctttggatctttaaagcctgggtctttgactcaaaggtcctttaagggtttggttgtaaaagcggctaccgttgttgctcccaagtacacctcgattaaacccttgggtgatagagcgttggtgaagatcaaagaaacagaagagaagactgagggtggaattttgctaccaacaacagctcaatcaaagcctcaacgtggtgaactggttgccatctgcgaggggaagacaattggtaagaccaaattggaatgttctgataaaactggtgctcatgttatata

SEQ ID NO: 213228 - DNA, 317 bp, Gossypium hirsutum
ggtacctttgttttatcagaacacgtccaccttggaagcattcttggagccattatcatagtctcagggattgcgtattacgtgcaacgagtggtgatccgggaacgaggaccggtgttccttacgtcattcagccctctatgcatgataatcactgctgctctcggtacctttgttttatcagaacacgtccaccttggaagcattcttggagccattatcatagtctcagggctttacactgtggtgtggggtaaaagcaaagatgggaaaagcccaaaaggtgatgaaaaaagcaaaggcttgcaagaatggcc

SEQ ID NO: 213229 - DNA, 452 bp, Gossypium hirsutum
agtacctgagctcacccagcaaatgtgggacgcaaagaacatgatgtgtgctgctgatcctcgtcacggtcgatacttgactgcatctgctatgttccgtggtaaaatgagcaccaaggaagtggatgagcagatgttgaatgtccagaacaagaactcctcatactttgttgagtggatcccgaacaatgtgaaatcgaccgtttgtgacatcccacccactgggctgaagatggcatcaacatttattggcaattcaacatccatacaggagatgttcaggcgtgtgagtgagcagttcacagctatgtttaggaggaaggccttcttgcattggtacacaggggaaggcatggatgagatggagttcactgaagctgagagcaacatgaatgatctggtctccgagtatcagcagtaccaagatgcaacagctgatgatgaagagtacg

SEQ ID NO: 213230 - DNA, 337 bp, Gossypium hirsutum
cttcggcacgaatcttaaaatttggccggccgttccttttttccataacaggaatggcgacggaagttgaaccccccgccaccaccgcacccaaagaccccacccaacctcaccttgaagtaaaactcttcaatcgctggagcttcgaggaagttcacgttgctgatatctccttgagtgattacattggtgtccaagcttcgaagcatgctacctatgtgccacacactgctgggaggtactcaattaagcgtttcaggaaggcccagtgcccaattgttgaaaggcttacaaactcacttatgatgcatggccgaaacaatgggaagaagcttat

SEQ ID NO: 213231 - DNA, 340 bp, Gossypium hirsutum
acgctgacgcgtggttgaacatcttgactagttgagggagctgggttctggtacatttgggactgtatatcatggcaaatggaggggatcagatgttgtcatcaagagaataaaaaaaagctgcttcacaagtcgatcatctgagcacgaaagattgaccaatgaattatggcgggaagcttacatcctgtcaaaactttatcattcaaatgcggtcgcattatatggtgtggcgcaagatggaactggaggaacaatggctacttgtacacatttcatgtgttatggttcccttaagcatgttttactctccaaggattggcagcttgatcgtatgaag

SEQ ID NO: 213232 - DNA, 445 bp, Gossypium hirsutum
  unsure (1)..(445): unsure at all n locations
cttcggccaacccgtccaattttactcctactatggttctgcatctcggttccactcaccttagtcggaggatacttcggagccaaggcacctcacattgaataccctgtccgaaccaaccagatccctcgagaaatcccagctcaaaaatacccatcatggctgttagttcttggtgctgggactctacctttcggtaccctttttatcgagcttttcttcatcatgtcaagcatatggatgggacgcgtgtactacgtcttcggctttcttctcatcgctatggtcctcctcgttgtggtttgtgccgaagtatcattggtgttaacttacatgcatctctgcgtagaagactggaaatggtggtggaaatccttcttcgcttctggttcagtcgccatctacatcttcttatactccgtanactacctcatattcgatctca

SEQ ID NO: 213233 - DNA, 388 bp, Gossypium hirsutum
acggctgatgcaatggctagggccaaggttttcgacattgatctgcaaaagcaactgagaccctacatggaatccatggtcccactccctggaatctacgatcctgatttcattgctgctaaccaaggtgaacgtgccaataatgtcatgaaggggaccaagaaagaacaagttcagcaggtcatcaaagacatcagggagttcaaagagaaaaacaaggtggacaaggttgttgtactctggactgcaaacactgagaggtacagcaatgtcattgtggggctaaatgacaccgtggaaagccttatggcttctttggagaagaatgaatcagagatttctccttccactttgaatgctattgcttgtgttcttgaaaatgttcctt

SEQ ID NO: 213234 - DNA, 393 bp, Gossypium hirsutum
gcttatttcgaagaatatagaaaagagcctggtagaagcatttcaaccattgggcatatccgattggaactcccttttttggattgctcatcctggtggtccagcaatattagatcaagtagaagccaaattagcactgaagccagagaagctacgagccacaaggcacgttctttcagagtatggtaacatgtcaagtgcttgtgttctatttattttggatgagatgaggaagaaatcaagggaagatgggcttcagaccacaggagaaggattggagtggggagtgctctttgggtttggacctggcctcactgttgagactgatgtgctacataatgttgctgcttaaagttaaacaaacatgccttttaagtaattggtcgtgctcca

SEQ ID NO: 213235 - DNA, 428 bp, Gossypium hirsutum
cgacatggatgctgatgtgataaccatcgagaactcacgttcagatgaaaagctcctttctgtattccgtgaaggagtgaagtatggtgctggaatcggccctggtgtctatgacatccactctcccagaataccatcaaccgaagagattgctgaccgaattaacaagatgcttgctgtgcttgagacaaacatcttgtgggttaacccagactgtggtctcaagactcgcaagtatgccgaggtgaagccagccctgaacaacatggttgcagctgccaagctgctccgcacccaacttgcgagtgccaagtgagaagcatatccaaagtcggacatcatcctttatatcgaaaatgatccagaggaaatttggcttaaatcatttgaataactgtgtgttggaagtattgttaggcgtatcatat

SEQ ID NO: 213236 - DNA, 413 bp, Gossypium hirsutum
cttccggtcaatggtgattttaatggatccctgggtagggagctgctgaccgaaagcaagctgaaggatcttctgcatggatcagaatatgttctcacttatgaggataaagatggtgattggatgcttgtgggtgatgtcccatgggagatgtttactgatacctgcaaaaggctgaggatcatgaaaagctctgatgctattggactcgctccaagggccgtggaaaaatgccggaaccggaactagctagtttgatacatgatttttgctatccgatgcagttctttctgaagaaataagaggatgttggagcgggcaagagatcacagggtatctgcttttcacatggtgctactttttatcttctatttgcatgggaatttatatcatgtacgctttgttttatctac

SEQ ID NO: 213237 - DNA, 316 bp, Gossypium hirsutum
acgataccctactctagaaaaatccgactccttttgatgttatattcaaaatgggagcatacaaggtcttttccgagttatgccgcacgttcagatcgttaactatacgagaaaccaagctatacttgaagcacttgaggattccgaccgaatccacatggaggattacgatataggtttacgagctcaatgggcttattgtatgcatgaacttcctatgaggagcaaaggagttcgaacgtcattgacaatgacagctcatgttttcatttagacataccatactatcgaactcatgattataagggaaaatctt

SEQ ID NO: 213238 - DNA, 431 bp, Gossypium hirsutum
cacgcgttcgaggacgcgtggggtcgtgactcagcaacctcgttagctcctggcttccggttccaccccaccgacgaagaactcgttcgttactatctaaaacggaaaatcttgaacaggccttcctttgatgccatttctgttatcgatatttatagatccgagccttgggatctccctgataagtcaaagctgaagagcagggacttggagtggtactttttcagtgcactggacaagaaatatggaaatgggtcgaggaccaatagggcaactgagagaggctactggaagacaactggaaaggaccgtgcaattcgctttaaggaaagagtggttggcatgaagaaaactcttgtttaccataaaggtcgtgccccacgtggcgaaaggactaactgggtaatgcatgagtaccgtcttactgatga

SEQ ID NO: 213239 - DNA, 414 bp, Gossypium hirsutum
acgagaaggtttaattttaccaaccttgcttggttctggtgtccttaagtgggtttcaatgattctcatggtgtgcatgacaatgatgagtgcacccaaggcagccaaagccgccatcacgtgcagcgacgtggtgaaccacttgatcccgtgcttgtcctacgtacaaaacggtggtacacccgctgctgcatgctgcagtggggtaaaagcactctacggcgaggttcagacctatccggaccgtcaaaacgtgtgcaagtgcatgaaatcagcggtgaacggaattccgtacaccagcaataacactaatctcgcagccggcctacctgctaaatgtggtgtacaacttccttacaggataagcccctacactgactgcaacaaggtgcaacgacgttgatgatgatgata

SEQ ID NO: 213240 - DNA, 368 bp, Gossypium hirsutum
gaaaacttcatcaaacaaggaaaaaacttgaagtaaaacaattgagagaagatgtcgcggcaagcgtatgtcgatgatcacttgatgtgtgatatcgagggcaaccatctctctgccgccgctatcattggccaagacggcagcgttcgggcccagagctccaatttccctcagttcaagccagaagaaatcactggcatcatgaatgactgtgaacctggatcgcttgctccgactggattgtaccttggtggcacaaaatacatggtgatccaaggtgaacccggagctgttattcgagggaaaaagggccctcgaggtgttactgttaaaaagaccaacctggccttgatcattgggatctatga

SEQ ID NO: 213241 - DNA, 348 bp, Gossypium hirsutum
agcacttgcaaatgctactccagaacagcaaagaacgatgctgggggagaatctctatccactcgttgagcagctggaacccgatgcagcagccaaagtaacagggatgcttctggagatggaccagacggaggttttacacttgctcgagtcaccagaagctctaaaagccaaagttgcagaagcaatggaggttctgaggactgtagcacagcaacagcagcaagctggtggagctgctgatcagctggcttcattgtctttaaatgacaaccttgtttcatgagttggtagtagtgttggcctttaatgtgctgaaaatgagtttgattggttagaatgatgata

SEQ ID NO: 213242 - DNA, 383 bp, Gossypium hirsutum
acgcttgtttaaaatataacaaaaaaaatcatacgcaatgagcactgctggtcaggttattcgttgcaaagctgcggtggcatgggaggcggcgaagccactatcgatagaagaagtggaagtggcaccaccccaaaagcatgaagtccgtattaagattctcttcactgctttatgtcacactgatgtatactactgggagtgtaagggttacactcctctgtttcctcgtatacttgggcatgaagcctcacggatcgtggacagagtgggtgaaggagtgaatgatatgaaacctgaagatcatgtgctaactatcttcaccggagaatgcaatgaatgtgggcactgtatgtcagaagaaagcaataacatgtgcgaac

SEQ ID NO: 213243 - DNA, 440 bp, Gossypium hirsutum
acgctaccaaggtatgtatcaaacttgatgattttgatgatgagaagaaaaagaaggaagctttgaaggaaaagtttgagggtctttgcaaggtcatcaaggatgtgctgcgtgacaaggttgaaaaggttgtggttactgatcgtgtggttgactcaccttgttgtttactgactggcgagtatgggtggactgcaaacatggagagaatcatgaaggcccaggctatgagggataacagcatggataaatacatgtcaagcaagaagacgatggagatcaacccggagaaccccatcatggaagagctgagaaagatagccgatgcagacaagaatgatcaatctgtgaaggaccttgatatccttctctacgagactggtctcctgacctctggacttagccttgattaccctgacacctttcgcaacaggatccac

SEQ ID NO: 213244 - DNA, 447 bp, Gossypium hirsutum
  unsure (1)..(447): unsure at all n locations
ctaccggttaatattccaaaactgctgggggtaaccattggttatacaattacagcatcaattagtatggtggctgtgaaaaggtcaaattgttttcacacgcatggtcatcacgtgaagtgccaaacatcaaacaatcctttcatgatcatctttgcttgtattcaaattgttcttagccaaatcccaaattttcacaagctttcatggctttcaatccttgctgctgtcatgtcttttacttatgcttgcattggtcttggactctccattgctaaagctgcaagtgggggagaacatgtaaggacaagcttaactggtgtacaagtaggggttgacgtgtcacgctctgaaaacgtttggagaacattccaagctattgnggacattgactttgattatgcttactacaccgtcctcattgagattcacgatacaatacaagcg

SEQ ID NO: 213245 - DNA, 379 bp, Gossypium hirsutum
  unsure (1)..(379): unsure at all n locations
ctacgcttatttcgtgtacctgggccgacctgaatggggtctaactgaaaactgcggggtcccgatcgagaagatagacattgttgctgctgccatgggacatgcattggcnacagacggaggattctgcactggatgtgctcgtgtcattgatcatcaacggatgagcagttctggctacgtcttctctgcatctctacccccatatttggctagcgctgcaattactgctattgacatcttagagcaaaatcctgatctgacatcaaagctgaaagaaaacattgccattttatggacaggactctatgatattcggaggctctcaatagcaagcaatccagaatcaccgattgacttcttgtgcttgaaaatcaac

SEQ ID NO: 213246 - DNA, 425 bp, Gossypium hirsutum
acggagaaccaaaatacatatggcactatagatgaaaacaaaaggtttgaacatgctttaggtatatatggtgacgatgtacctgatagatggataaaagttgcagagatgatacctggtaaaactgttttagatgttattaaacagtacagggaattagaagaagatgtttacgatatcgaagccggtcgaattacgatccccggttattccacctcatattttacattagaattggtcgataaccatgattttgatggttataggaaaagacctaatggagctaaaggccatgatcatgaaaggaaaaaaggtgtcccatggactgaagatgaacacaggaggtttctaatgggacttgtaaagtatggtaaaggcgattggagaaatatttgatggaactttgtggtttaaagacacctaca

SEQ ID NO: 213247 - DNA, 395 bp, Gossypium hirsutum
acggactagttctacccacgcgtccgatttgctgcttgttgaacacgccgattgacttcactatcgctcaacactcgtcttacactttttttttttgaatctgcatcttttacaggccatattggagatgctttttcccaaatacacacgcaatcatttatgtggttgatgcaagtgacactgattgaattggaatagccaaggacgaatttcatgccattttagagagggacccatggcctcaggtttctgacaatgctaaggacctggtcaagaaaatgcttaatactgatccatagcagcatcttacaatacacgaagcccttggaaaccttctgatgcatactatatctatggcgatatatatctgctatgcatgaaatatcatgccaact

SEQ ID NO: 213248 - DNA, 379 bp, Gossypium hirsutum
  unsure (1)..(379): unsure at all n locations
ttccgggccggttcttcaagtacttaacccaccaagggggaaaccttgcccacaaccaccaaccaaggccactggcccaatggccacactgaaattgggtgcttgtgtggatctgctgggagggttggtgcacattggactaggtgacccggttttgaatcaatgttgtccnggtctttcaggacttgccgagctcgaagctgcggtctgcttgtgcaccaccctcaaactgaggttctcaaccttaaaatntatgtgccactggctcttcaactccttgtcacatgtgggaaaacacccnctgctggttacacttgctctctctaaaaccaangttgctaggttgatggaatggacatgagaggatgtcgagcttttc

SEQ ID NO: 213249 - DNA, 360 bp, Gossypium hirsutum
acggtcaacgagtgatgccgaagcgaacgttttgggcacatgggcgagtccattcgtgaggagggtaaggattgccatgaacatcaagtctgtggcctatgaataacatcaagagaggttatgggaaggcaaaagcgagcttctcctcaaatcaaacccagttcacagaaacggtccctgtcctcattcatggcgatgacaccatctgtgagtctctcattattgtccaatacatcgatgacgataggccttctgctcccattcttccttctgatccccatgaacgtgccaccgaccgttaatgggctgcttatcttgacgacaagaggatcccttacttgagaactattggtatggctg

SEQ ID NO: 213250 - DNA, 430 bp, Gossypium hirsutum
gatagctcacgctaacatcaccgataatttcttttccccgtccccatttggaagcttgtatgcaatgaatgatcccctcactgtagggccagatctaacatccacggtcattggaaacgcccaagggatgtacatagcattaagtcacgaccctgccaagttcactgcagttttttatgctgattttggatttaccactggcaggttcaatgggagctccttcagtttgttctcacgatatccccccacagattatgttcctagccccgacaccattcgtgaaatggcaatagtgggagggagaggtgcgtttaggatggctaaagggtttgctatattgcgggccacttcttcgaatgccacgacacggaatgctagtctcgagttcaatgttactctgtatcattactaaacccaatcgcagaatact

SEQ ID NO: 213251 - DNA, 402 bp, Gossypium hirsutum
  unsure (1)..(402): unsure at all n locations
cgtcgaatggaaaatgtggaaaatgaaagcaatggcaaatcgtctggaattcttcatagtgctatgtgccctgcttgcgagatggcagttgtgtggatgcagaaccaactgatggagaatcagactcaagaccgcatattggactatgccaatcagctntgtgatcgggtgccaaacccaatgggagaatctactgtcgactgtggaagtctttcttccatgccaaccatttccttcactattggtggcaaagcttttgagcttacaccagacgagtacattctgaaggtgggtgaaggtgctgaagctcaatgcatcagtggctctactgctttggatgtccctgctcctcgtggaccactctggattttgggagatgtgttcatgggtcgctaccacact

SEQ ID NO: 213252 - DNA, 389 bp, Gossypium hirsutum
acgcccttgtgaaacctacaatcaagtcgccaccggttgttcctccaatagttaaaccacccattgacctcccttcggttacggtccctacaattaaccttaccccagggacggctcctacagttactaaaccaccaagtgggaaaccctgcccaacaccaccaaccaaggacacttgcccgattgacacactgaaattgggtgctagcgtggatctgctgggagggtagatgcacattggactaagtgacccggttgtgaaccaatgttgcacggatctttcaagactcgccgagctcgaagctgcggtctgctagcgcaccaccctcaaacttaaagatctcaaccttaaaatttatgtgccactggctctataactccttgtcaca

SEQ ID NO: 213253 - DNA, 381 bp, Gossypium hirsutum
ctacgacaatttggtttgaaaaccaaagccagttcgagtccggttgttggagtttacacgagtcaggtccgtatggtacttttgttggtgtatatgatggacacgttggcccggagacgtcccggtacatcaacgatcatgtctttcaacatctcaaacgattcacttcggagcaacaagggatgtcggttgatgtgatacgtaaagcatatcaagcaacagaagagggttttttgtcactcgttaccaaacaatggcctatgaaaccacaaattgcaactgttggatcttgctgtctggtcggtgttatctgtaacggaactctttatgttgctaacctcggtgattctcgtgctgttttggagagagctgtgaaggcaa

SEQ ID NO: 213254 - DNA, 442 bp, Gossypium hirsutum
acgcccacgcgttcgaaaaaggaaaaagaaaaaagaaaaacaattgctgattcggacccccgaaaaccggatttcgaaaccctaatcggatctcccaaatagctccgttgaagaaagaagatgacgggagtaaccaatcaagaggaggacaagaaacccgctgatcaaacggctcacatcaatcttaaagtcaaaggcctggacgggaatgaagtgttctttaggattaaaagaagtactcaactaaagaaacttatgaatgcttattgtgatcggcaatccgtggatttcaactctattgccttccttttcaatggtcgccgtctgcggggcgagcagactccggatgagttggaaatggaggatggggatgagatcgatgcaatgctgcatcaaactggtggtaccatggcctaactagctagctaattataggttacta

SEQ ID NO: 213255 - DNA, 380 bp, Gossypium hirsutum
acgcccacgcgttcgatcaaattaccaaagtacatggtttagaattgacaatggtaactaatagatgtagtttctgatggtgactagaaaatgaaaattttaactttgattcagctcgaaactttttctctcttttttttgatgcgagtgtaggatgctagctgcaaagtttatttcatgaaacaaaccgtgggaaatgcttgtggaacgattgggcttcttcacggcgttggaaatgtcacttctgaaatcaagcttcaagagggatcgtatttagataggttttttaagtctactgccagcatggatccattggagcgcgcggcatttcttgagaaagaaagagaaatggaagttgctcactccgtgacagctacagc

SEQ ID NO: 213256 - DNA, 418 bp, Gossypium hirsutum
  unsure (1)..(418): unsure at all n locations
acggggacagtatcttgagcatgtctgagcctgaactatcaaaaaccacgatcacagcttccgttgagggaccttacgggcatgaaatgccataccacttgatgtatgagaacctgattttagttgcaggtggcattgggatttcgccattcttagcgatcttaagtgatatcctccaccgcattaacgatggaaaaccatgtctaccaagaaagattttggttgtttgggccgttaaaaagtcggatgaacttccgcttctttcaagtatcgacatggaatcaatttgcccatttttctccaacaaaataaatctcgagattgatatttatgtcactcgangaatccggccttcaatggaagaaggtaggttcatgtggcatcgagctctttctgccctttctcgggccgcaacatg

SEQ ID NO: 213257 - DNA, 367 bp, Gossypium hirsutum
tctaaagcagggaacgtgcttttttatggttggccagaattgttgggtaagcggactaatattggatcaaagagaatgggtgagcttgatccaaaggctctgcatgacactagtgagtcgcgattcccttctgatgaagcggaaattcaagccactactctatgctcatcatggcaagtgaatctgaaaaatccagattggcattcattcaaagttatcgtgcggggagggaatactaaggaaattctaaatgaggaagatgagatactgacacatctgacgctggaatggggcgaagagatttataatgcagtggtaacagctttgaaagaactaaacgagtataatcccaagggggagatatgta

SEQ ID NO: 213258 - DNA, 196 bp, Gossypium hirsutum
ttcacacgttcaaaaatggacggggggaatttctttttaatccttattgagaactcgccgaacaggcatgtcacgtctccaaagagaaaaaccggttttttcaagaaggctaaggaccttacagttttttgcgatcctggagtgaaaatcttcatgttttccactactggaaacctccatgagttcatcacccctt

SEQ ID NO: 213259 - DNA, 313 bp, Gossypium hirsutum
acgcccacgcgttctaccgatgcatcactttttatttatgagaggtaaactattcattcgggggactgttgactaccctgactcgttgaccccagaccaatgcaaggcactggaggctgtgctttctacaaggcataggatcagctgactgacatggagctggttgagtgcgaggaaacaaccatgcatgatgtttacattgatgaagagatgcgtaggaaacaggctcaagctcaacatgaagcttatgatgaagatgaggacatgcatggtggtgcgcatagagtatcaatgcgctcaccaatgattaaaa

SEQ ID NO: 213260 - DNA, 387 bp, Gossypium hirsutum
acgaccacgcgtacgaccaagggaagcttagttgattaaaaggtgcaaaggaagggtatttgcattgcaagatgaacctgaagtatgtacagtatggttgccattagacgatgcaccagggctagccatggctcaagcgtttggagattattgcttgaaggaatacagggtcatcttcatgcctgaatttttccatcgtttacttacataaaatgatcaattctttgatctagcatcagatggggtatgcgatgtatagatcaatgaagatgtagttgtgattgcatcatcggcttcatcccgcacatcattagccaggatgttgtgtctctaatctgcactagaatggaaactgaagtacactacttaaaagatggatgattgcgc

SEQ ID NO: 213261 - DNA, 443 bp, Gossypium hirsutum
acggcctaataaaggctgttgggtacgatatggcatacatgtttgcttacagcatgagggagaaaacccatgcccatagaaactacattgatgatgttccggaagaagtcaagcaaaggaggcttactgaactgattgaagctttccgtgagagtacaggtcagcgatatgattctcaggttggaaccatccaacttgtgttggttgaaggaccaaacaggagagctccagataaagagcttatcggcaaaagcgataaaggccatagagttgcatttgttaatcatcctttgctggatcgggagaagcaaacagataacaaaaggaatcctgttgtcggtgattacgtagaagtccatataacaaagtcttcgagagcatcactttttggcgaaacagttgctataactaaattaagcgcattttacgacaatgtggatgaa

SEQ ID NO: 213262 - DNA, 259 bp, Gossypium hirsutum
ttctgctattggggcaggctatattattttgccctggtgggccggcacaagcattgcttgggacacttacaccagacatagcagttctcacactctagtacaggataaatgggctgggtgtcgccatagttaatgactataaaagtagcgaaggagacaaagctctaggattgcaggcacttcaccgagcctctggagctgaaacagctaaatggatcagtgtcggtgctattgacatacctcaaatgtctatacgctg

SEQ ID NO: 213263 - DNA, 303 bp, Gossypium hirsutum
acgctggcatcttatcaagcggaatggtttcttacctgttaagtggcatgttataaaagacatgcctaacaaggagctctttcacatcatcctagaaaacaatgagaacaaacctgtgactcatagtagggacactcaagagattggtctcaagcaaggcttagaactgctcaagatttttaaaggctattcagaaaaatcatcattgttacatgactttggattttatgaaaatcgagagaagacacttgatgcgaaaaaagaatacaagcctgctactctagaatacatggaaagatgatt

SEQ ID NO: 213264 - DNA, 397 bp, Gossypium hirsutum
acggtggggaactagaaaaggaagacatgaaataagcgagggaaagaggctggaaaggaaaagttacaaaacctggtcgagttatacgccctggagcaatcaggattaatggaaaatgcccattgactcctttagaggttggattgatgcttagaggaatgggatttgataataatacatatatctttttggcttctggaaagatatacaattctgagaaaacaatggctcctttactggaaatgtttcccaacttgcaaacaaaagagatgctggcatctgaggaagaacttgttccatataagagattttcattcaggatggctgccatagactatactgtttgccttcatagcgaggtatttttgactactcaaggtgggaatttgtcttattt

SEQ ID NO: 213265 - DNA, 387 bp, Gossypium hirsutum
gagattcattcatcaatggctttgattcatacactgtctcccaaaagaacgaactttgtggtgtttcctctgttcttgatgatgatgtcttctcccagatccaacaacaacaacaagaaatcgagcgtttcattgctgaacacacagagaaagtgaggtttgaacttgaagaaagaagaaaaaggcaatcgacaatgttgattactgcaatccaagaaggggcaatgaagaaactgatggaaaaagaagaagagatgcagagaatggggaaactgaactggattcttcaagaaagggttaaaagcctgtacgtagagaaccaactgtggagagacctggcacaaacaaacgaagccactgccaagtccctgcgtaccaatttagagc

SEQ ID NO: 213266 - DNA, 297 bp, Gossypium hirsutum
  unsure (1)..(297): unsure at all n locations
aagggagaaaatgtttattttcgcagagagagtggggtggaaaatccaaaaccaggaggaggcggtggtgcaccagttctgccaagagattggggtgaagagaagagtcctcaaggtgtggatgcacaacaacaagcacaacctagccagganaaacccttgtaattccaccgccaacgccactgctgctgctcctactaccactgctgcatgactatgatgatcaaagtcaaaacgccaatttaatcagtatctctcctctttcagcctttctagtaatttgtgtctcatttcatt

SEQ ID NO: 213267 - DNA, 359 bp, Gossypium hirsutum
  unsure (1)..(359): unsure at all n locations
caaggagatcatggattcaaccaaatccgcggttgaactcgtgaaactaaacccgacgagtgaatacgcgcccggtttagaagacaccctcatcttgaccatgaagggaatcgctgccggcttgcaaaacaccggttaaaccccacttcggctaactcttaagtcgatttagtcccgagaataagaattacacatcgaanaatattgacgacgggttaaaagatgtggatgatgctatttaaattcctagttacagtgttcattgttgcaccaaaacttattatattatatggcttttaattattatgtaagcaatctggccaatatatatatataatgtaagcaaagtacttatcttg

SEQ ID NO: 213268 - DNA, 308 bp, Gossypium hirsutum
ctcccaagctgctcccgctgaagcaccagttgtctccaaacctgcccctgctcctgaagcagtagatatttccaagcaaattccggctggtattaacagtatttccgcaaacaattacatgcgtgctgatggtcagaatactggcaatttccttacggatcgaccttccaccaaggttcattctgcccctggaggcggatcttctctggactacctatttggtggacctggaggtagtaaatgaaattgtgccttaataacatctttgataagggagaagtattgttttgtggattttgggggaaagc

SEQ ID NO: 213269 - DNA, 334 bp, Gossypium hirsutum
cccacgcgtccgcccacgcgtccgcccacgcgttcgcccacgcgtccgcccacgcgtgcgggcgaagattctctcaatcgggtatagaggagaagcaaagccgtgcatcaaccgagagttaaatgtaagctgtacttttgctaaggtctagatttgcagcttttatcccatgcttaggttgttttcaataaattcgaaataacctatatctgtcataattaccagttttttgcttttattttcgaagtacatgtattttgattttacttgaccttttcttgtataacaataagatgcattttgtttcttaaagtccgcctaatattctggtttt

SEQ ID NO: 213270 - DNA, 405 bp, Gossypium hirsutum
  unsure (1)..(405): unsure at all n locations
cggacgcgtgggtttgttgataagcccgcggcagccgagacctcggcagctgctcctggagctggaaagggagcctatgttccaccaagcatgagagccggtgcagagagaacaaccggatcggatatgagacgtaggaacgatgaaaactctgtgagggtaacaaacttatctgaggacactcgggaggctgacttgcatgaacttttccgaccatttggtgctgtgacgcgtgtgtatgtcgctatggatcagaagacaggcacaagtagagggttcggttttgtcaactttgtgaacagagaggatgctcanagagctattaacaagctgaacggatatgggtacgacaatctcatcctgcgagtcgaatggccacaccaagacanactagaacatatcatc

SEQ ID NO: 213271 - DNA, 303 bp, Gossypium hirsutum
atatatgtataaggggtagttttataatccatatggaatttccctaaggcaataagataaaattaaaaatggttaaaaggtaaagcttagtgtacaattggataattgggtgggtgacaggtgtatccgacccactcctgaagagctggagaattttggtactccggacttcactatatacaatgctgggcagtttccgtgtaatcgttatacacaactacatgacatcctttactagcatagatcttaatcttgctaggagggaaatggtcatcctctgtactcaatacgcccgggaaaatg

SEQ ID NO: 213272 - DNA, 362 bp, Gossypium hirsutum
  unsure (1)..(362): unsure at all n locations
atgcccacctggaggacaagngtaacatcaggataatcaaccccacgagcagatacatctgatgttacaagaataagtccttttgacttccggaattcatcagatacccttgttctgtaactctgtgattttcttgaatggatctctctaacattcaggttcatttcacgaagaacatctgctaccaacttcgttaccatagcaagagtgcagaatacgagaaccttatagtcaacatcatctgcaatatgttctttcagaagaacatacagtagggaaaactgcttatctagtggagcaaccatgtgcacttgtcggaccagtgaatgttattcttagtgccttttttgattttttttttt

SEQ ID NO: 213273 - DNA, 343 bp, Gossypium hirsutum
cccacgcgtccgcaaaaacatagcagccatggcagtccgtatgcttcttgggttaggtgtcctgctactctgccttgcaaaggtttcatctgatctgaaggcagaagaagttataaccaatgtcggtgaggtgggttctttggttaccagaggcggaaacagaagactgatgctagagattgattgtggaggattatgcaagaaaagatgcagtcaacactcgaggccaaacagatgcaacaaggcgtgtgggacttgctgcttgaggtgcaagtgcgtgccaccggggacttcaaggaacaaggaggtctgcgggacctgctatactggcatgaccacccat

SEQ ID NO: 213274 - DNA, 307 bp, Gossypium hirsutum
ggcaggaacaatgataggtaccactggctttttggaagagttgatgatgctatcaatgcgagcgtgcatcgtattggcacatctcacgtggaatctgctctagtttctcatcctcagtgtgcataagctgctgtggttggtgttgagcaccaggttaaagggcagggcatatatgcctttgttactccaatggaatgcttttcttacagtgaataactcataaagagccttatactcaccgtgcgaactcatattggagcattcgcagcacctgacaaaattcatttggctccctgtcctttcaaaa

SEQ ID NO: 213275 - DNA, 406 bp, Gossypium hirsutum
cttcggaatggccgttcagaaggtttgttgaaatcgggagggtggctctcgttaactacggcaaagactacggaaaattggttgtcatcgttgatgttgttgaccagaacagagctcttgttgacgccccagatatggtcagaggccaaatgaacttcaagaggcttactttgacagatatcacaattgacattccccgagttccaaagaagaaaacattgattgaagccatggagaaggctgatgttaagaacaagtgggagaatagctcatggggtagaaagctgattgtccagaagagaagggcagcgctcaccgacttcgataggttcaagcttatgttagctaagatcaagaaaggctgagtcgtcaggcaagagcttgcaaagctaaaaaagagaatgca

SEQ ID NO: 213276 - DNA, 388 bp, Gossypium hirsutum
  unsure (1)..(388): unsure at all n locations
ggttttggttcttttggggggttggggggttgggggtccctccaccgaaaaccaaatcgtattcgtgaaccaaatcaggaaaaagaaggattattatgagattttggggttagagaaatcgtgttccgttgatgatattcgaaaagcttatcggaaactgtctttgaaagttcatcccgataagaacaaagctcccggtgctgaggaagcttntaaggcggtttcgaaagcgtttcagtgcctaagcaatgaagaaagtaggaaaaagtacgatcttgttggatcagatgaacctgtttatgaaaggagagcttcaccgttccgtggcgggggcaatgggattcagcggcttttacgatactgatttttgatgctgatgaagatatta

SEQ ID NO: 213277 - DNA, 370 bp, Gossypium hirsutum
aaagcgtttgtcttagatctcagaagatggcccgtaccaagcaaactgcgcgtaagtcgactggtgggaaggctccaaggaagcaacttgctaccaaggctgcccgtaaatctgccccaaccaccggtggtgtgaagaagcctcatcgctaccgtcctggaactgttgctcttcgtgaaattcgaaagtaccagaagagtactgagcttcttatcaggaaattgcctttccagaggcttgttcgtgaaattgcccaggacttcaagactgatttgcgtttccagagccatgccgttcttgctcttcaggaagctgcagaagcataccttgtgggtctctttgaagacaccaacctgtgtgcgatccacgc

SEQ ID NO: 213278 - DNA, 411 bp, Gossypium hirsutum
gctcatgggatttgttgaaggatacagagttggtgggggaccactcggtgaaggactggacccaatttacccaggtggtgctttcgacccacttggactggctgatgatcctgacgcgttcgcagaattgaaggttaaggagatcaagaatggccgccttgcaatgttctccatgtttggattctttgtccaggctattgtcacaggaaagggtcccattgagaacctctttgaccaccttgccgatccggtggccaacaacgcatgggcttatgccactaactttgtccccggaaaatgaacttagattatagatatgtctctgaaagctgtaacaattaattgctatgtaacatctgttgctgtgtactgatgtaattcactgctagtcttttgagctgttgtttcatt

SEQ ID NO: 213279 - DNA, 270 bp, Gossypium hirsutum
cggggccgttacctcggttttggagttacataaatggttggctcggcctggtgccatcgacaaagtcttttctgtggtgaaacaaatgaagcctgaacttgttaccatcgttgagcaagaagcgaaccacaacggtcctgttttcttagaccggttcactgagtcattacatttttactcgacgctttttgattcgttggaggggtcggtgagcagtcaagataaggttatgtcggaggtgtatttggggaaacagatatgcaatgtggt

SEQ ID NO: 213280 - DNA, 383 bp, Gossypium hirsutum
atgccctaccatatgcacataaaccttgagcttctggaggctgtgcatttgatatgtgctatgcttcttgaggttcctaacatggcagccaactcacttgatgccaaacgcaaggtgataagtaagacattcaggcggttgcttgaggtgagtgagaggcagccatttataggtcccccggaaaatgtccgagaccatgtaatggctgcaacccgggccctctgcaagggagatttccagaaggccttcgacgttattaattctcttgatgtttggaagcttcttaggaatcgagagagcgtgcttgaaatgctgaaagctaagatcaaggaagaggcttctgaggacttaccttttacctactgttcttcctatgatacact

SEQ ID NO: 213281 - DNA, 436 bp, Gossypium hirsutum
attctttccgttttcatctgtcaaagctgtagaatactgtgggaattgaagcataatttgtatcaatttatttggccagttatcacattttttcagagaataaaatggaagagaagtatgaaactctgaagattcagcaagaatcgccaaattctggagtttttaacctaatcataaaccgcccatctgtcagtaatgcacttggactcaatttctttagtgaattccccaaagttcttaatgcgctcgaccaaaaccctaccgtcgctgtcatcgttctatccgggtccggcaaccacttctgcggaggtatcgaccttaaaagcctcgcagctatggccgatgataactcgggagatcaaagccgcaccagcgaacggttacggagaaaaatcaagttcctgcaagatgcgatcaccgtcatggagcggtgccc

SEQ ID NO: 213282 - DNA, 280 bp, Gossypium hirsutum
  unsure (1)..(280): unsure at all n locations
cccnaccanangcacataaaccnngagcnaanggaggctgagcatttgatatgggggaggctttttgagggtcctaacatggcaaccaactcacttgatgccaaacgcaaggtgataagtaagacattcaggcggttgcttgaggtgagtgagaggcattcatttataggtcccccggaaaatgttcgagaccatgtaatggctgcaacccgggccctctgcaagggagatttctagaaggcctttgacgatattaattctcttgatgtatggaagcttt

SEQ ID NO: 213283 - DNA, 358 bp, Gossypium hirsutum
  unsure (1)..(358): unsure at all n locations
aagattccttaaaagtcaaatggaggctctcagcttaccgtacttgaccagggatggatcatcaggaaatatgaggcagcagcaacagtctctgttgaatgaaaaatgcatgaagaagaggaaaggtagtcctgctgatcttcaggattctaatgaagaaccaaagaaaaacctaaagagtagagggctatgcttggttccgatatcatgtacacttcaagtcngaagcgacaatggagccgattattgggctcctccgtctttattagggtttntgggaaaggctatagcaaagcacacttaaaagggaaaaaaaaagcaacaaaaaaaagtagtcctaggtagagatgatcaaatg

SEQ ID NO: 213284 - DNA, 436 bp, Gossypium hirsutum
ggcccgcccgcgtgcggaaaagattttgttggaggtttggcatctaccgtcaccgaggttgactttaagaactactttgatcaatttggtaaaattactgatgttgtggtgatgtatgatcataatacacaaaggccgagagggtttggcttcatcacctatgattcggaagaagcagtagacaaagtcctacataaaacatttcacgaactcaatgggaaattggttgaggtcaagagagcagttcctaaagaactatctccaggtgttaccaaccgcaatgttattggatataattatggtttaaatagggctttcaactttcttaatagttatgcgcaaggatttaatctaagttccattcgaggcatttgaattagggatgatggtaagtttaaatcctcttgctaataagcaaaacgggttttttttcatt

SEQ ID NO: 213285 - DNA, 79 bp, Gossypium hirsutum
ttaaaacctcctttgatcaattgggtaaaattactgatgttgtggtgatgtatgatcataatacacaaaggccgagagg

SEQ ID NO: 213286 - DNA, 285 bp, Gossypium hirsutum
tccgccattttttcggaccaggggttggcccacacatcgggtggttcccaaggagccaaaatgctctaatcgccaccattaaaaccaaccgcaccataaagttcgtcgatgggtgtcctactggattcaagtgcgggatcaactaccaaccacccactgttgtacgtggtggtgatctctccaaggtacagagagctgtttgcatgattgctaacttcaccagtgatgctgaagtcttacctagcattgaccatatgttagatcttatgtactccaaacgtgtct

SEQ ID NO: 213287 - DNA, 267 bp, Gossypium hirsutum
atgaaaattccgcctagaacaatgttcatggcacagatcgtgggaaccctcattgcttgctttgtgtacctgggaactgcctggtggctgatggagaacatccctgatatttgcgacacaacggcctccaacagcgtgtggacatgtccaagtgataccgtgttttatgatgcttctgtcatctggggtttaatagcaccccgcagaattttcggtgacttgggaacttacgaggcagtcaattggttcttccttgcaagaacagtg

SEQ ID NO: 213288 - DNA, 350 bp, Gossypium hirsutum
  unsure (1)..(350): unsure at all n locations
ctgttaagaagaccaatttggccttgatcatcggaatctatgatgaaccaatgacacccggccaatgcaacatgatcgtcgagaggctcggcgattatctcctcgatcagggttattgattctcttcggtgtgtgtccttatttgaatgcatttcttcttgggtttttctctatacgaaaaaaaagaaacatgcatcgaagcgtctccgtattactcgtatttacatggaaaaagtttgtaatgggtatgttttatgatctctttgctttgcttttatgtattttgattagatggatactatgaangttgtggagtgaggaactttttggttttcttcttttacatttac

SEQ ID NO: 213289 - DNA, 422 bp, Gossypium hirsutum
aagagttctgtagtgtaggtgatgattcctgcctcatactatgggatgcacgagttggcagtggccccactgtcaaggttgaaaaggcacataatgctgatctccattgtgttgattggaacccccatgatgacaatcttatcctgactgggtctgcagatcatactgtacgtatgtttgatcgaagaaatctgacttctaatggaattggatcacccatttacaagtttgagggtcataaagctgctgttctatgcgtgcagaggtctccagacaagtcatctgtatttggcagctctgctgaggatgggctcttgaacattcgggactatgacaaggttggcaagaaggtggaacgtgcttcaagatctcctagtgcttctgcgggactgttttttcaacacgctggacacagggacaaa

SEQ ID NO: 213290 - DNA, 268 bp, Gossypium hirsutum
acgcccacgcgtccgctcaaactgaagggtatcacctcttcatccaggatgctaatgaatatgggagaagggttcgccagcaagccatgcaatacccacctctggtctagtctgttattaaaaaatactaactaaaactttccatgaaattgctggtaaatgccggctgggatggctgcttgcctcatgaataatgctagactctgcttttgctaagagaaaatatgctgccttgggtatttggtaatctatatcaactgtatgaacc

SEQ ID NO: 213291 - DNA, 404 bp, Gossypium hirsutum
gcagatgatggaacatattcgccatcaactaactacttggtttaccaatcgtcgtgaaatgggaatgagatggacctcaattcttgttccatctgctgagaagcgaatttcggaggcaattgcagatgctcgttgctaccaagtacttagagcaaatgaagtggagtttgagattgtctcaaccgagaggactaatatagtggatattaggaatcgtgtgtgttcctgtcggcgatggcagctgtatggtttaccatgtgcacatgctgcagctgcccttatttcttgtgggcagaatgctcatctgtttgccgaaccttgtttcacagtgggaagctaccttgagacctattcacagatgatacatcctattccagataagagcgtttggaaggagctgggtg

SEQ ID NO: 213292 - DNA, 407 bp, Gossypium hirsutum
acgctacaagcttgttttcactggatcaaccgaaacgggaaaaattgtccttgagttggctgcggaaagcaaccttaagcccgtaacattggagctcggaggaaaatcgccttttattgtatgcaaggatgctgatgtcgacaaggcggttgagcttgcccactttgctttgttcttcaatcagggacaatgttgctgtgctggctctcgtacatacgtacatgagagtgtgtatgatgaatttttagagaaggcaaaggcacgtgcattgaaacgtagtgttggcgatccatttgtagcaggcattgaacaaggccctcagattgattcagaacagtttgaaaagatcatgaggtacataagatcatgtgttgaaagtggagcaactttatagaccggaggggaga

SEQ ID NO: 213293 - DNA, 416 bp, Gossypium hirsutum
ggaactttcgtgtaaagtttgatgatttctttgtgagtggagtcatagctgaaattgaagtaggaatgggtccatgtggggagctaccctatccgtcgtatcctgtaaagcatggttggaaatatcctggtattggtgaatttcagttcagtgttatgataaatatttgatgaaaagactaaagaaagcagcagagattagaggacacactttctggggtagagcaccatataattctggttcttataactctgcacctcatgagactggattctttcgtgatggaggtgattatgacagctactacggcaggttctttcttaattggtattctcaaattttggttgatcatggtgatcgtgtgcttgctctggccaacttggcttttgaaagcacttgcattgctgcaaagctat

SEQ ID NO: 213294 - DNA, 410 bp, Gossypium hirsutum
ctggtatttaaaatcaatttggactgtcatatacgattgttgttagggaggtaatggagcttaacgacaaagtgaccatttcgtaacaaaacgataacgtgactaaaacataacatttcaaacataaatgactaaaatgtaatctgaggcaaataaaagcgactatttttatagtttatctttatatatatatacactagtgtattgacccatgcaaggtacgagatttaatgttttatattttcatttttctaaattggtgcaatatcattaatatttatcagttattaaaattcaataatagaaatattaaaatataacatatttaaattgcaaatattataatgatgtttgataatattttttttgtaatattatgaaactttaatatatgtgaaatatgaattact

SEQ ID NO: 213295 - DNA, 392 bp, Gossypium hirsutum
cccacgcgttcgggaaaatggcgggaggttcaccagcaggatccatttgcctgaaaaagtgtacaagactgaccagattaaggctgagatgaaaaacggtgtgctcaaagtggttgttccaaagatgaaggaggaggagaggaatgatgtgattcaggttcaaattgactgagttaactggttgcatacggatgaggctaagtgggttttctttggtttggggctttgggtcttgtacgtatttagttttgataataagggcttcgagtataatacgagaaaatattaatgtagaactttcattttgtgttaacagaaaaccttgttaattttggatctatataacaaaatttgataataaattttttgttaaaaaaaaaaaccttcaaaaa

SEQ ID NO: 213296 - DNA, 440 bp, Gossypium hirsutum
tgcggttcaggaatcttttggtactgataaatggcgcttcacgggcttttatgggttgctagatgtgcgatttcatgcggaggcttggagtttcttgcgatctttggaacaagatcagagttttccttagctggtttgtggtgattttaatgaaatacttttttcttttgagaaaagaggtggggttgttagggacgagcggtgtatgaaggagtttaggaatgccttgtcggcttttcttttggaagatttgggttttaagggttcatggtttactttggaaaggggcagattggtttattctaatattcgagaacggcttgaccggagggatgcaaattttgcttggtgggatcgatttccttctttctctttgaaacacttgcctcatttgatttcggatcatcgcgggcaaaaacggcatttgtgcactaaactta

SEQ ID NO: 213297 - DNA, 413 bp, Gossypium hirsutum
caagtgttcgttgctgcttacaacaaacgacttcttaagcttcctgcagagggacaggaatgtggagttttctatgatcctcctttaaaggaatacgtgctgtcaaagctacccctcacctaccagttcaggttcttgaacaaagccgcgattacaaccaagaatgatttagaagacgatggttcccctaaaaaatggcggttgcgcagcatccaatatgtagaagaggtcaaatgccttatcacaatcatccctatatgggcttctggtatcattagcttcaccgccatggcacaacatggaacattcaccttatcacaagctttgaaaatgaacatgcatcttggtcccaagttccaaatcccagctggttccatgggtgtcatatcgacgctcacaattgggattttcct

SEQ ID NO: 213298 - DNA, 308 bp, Gossypium hirsutum
gcggtggcgcgtgacttcacttacatcgacgacgttgtgaaaggttgtttaggagcgttagacacggcggaaaaaagcaccggtggcggcggaaaaaaagaaaggaccggctcaattaaaggtttacaacttgggaaatacttcccctgttcccgtcggccgattagtctcgattttagaaggattgctcaacacaaaagccaagaaacatgtgatttcgttgcccagaaatggtgatgtcccctacacacatgccaatgtcacgttagcttacaaggattttgggtataaacccaccacggatttag

SEQ ID NO: 213299 - DNA, 401 bp, Gossypium hirsutum
ccttgaaatcaccgaaagaccattcctttgggttgtaagagaagatattacaaaaggaaaacaccataactaccctaaagggtttaatgaaagagttggcaatcaatgtaggatagtaagttgggcaccacaagcagcagttttgggtcattcttccattgcatgctttataagtcactgtgggtggaattccaccatggaaggtgtaagcaatggggtgcctttcttgtgttggccttactttgctgatcagttcctgaatgaaagctacatttctgatatttggaagcttggattaaaactccaaaaggatgaaggaggtatcattagaaaagaagaaattaaaagcaaagtggaacaattggttggtgatgaaaatttcaaaacatgagctattgaac

SEQ ID NO: 213300 - DNA, 426 bp, Gossypium hirsutum
cccacgcgttctgaggaaagcatacacctagtgacatggttcaagagaatgcacatcaacgaggagtcgttccgcaaagccatcgaccccacaatcgacctcaatgaggaaacgctagccagcatcagcacagttgccgagttggctggtcattgctgtgcaagggaaccttatcagaggcctgatatgggtcatgctgtaaatgtgttatcttctctagtggagctctggaaaccaaccgatcaatgttccgaaaacatatatggcattgaccttgaaatgtcattgccacaagcactaaagaagtggcaagcttatgaaggccaaagcaatttggaatcttcatcatcttcacttcttcccagcttagacaacactcaaaccagcattcctacgcgaccgtacggattttgtgagtcatttaca

SEQ ID NO: 213301 - DNA, 344 bp, Gossypium hirsutum
cgacgccttgcccgtaggggaggagtgaagcgtttcatcggcttaatctacgaggaaacgcgcggggttctcaagatcttcttggagaacgtcattcgcgatgcggtcacatacaccgaacacgccaggagaaagacggtgactgccatggatgtggtttatgcactgaagaggcagggtaggactttgtatggatttggtggttagttgatttaggttctaggttataaaataggggagaattgtaggactcacttaaagttacaaggtgggttttgttgttcgctgttataaattgtaattcgcatcatcaattgcatattttattgaattttgaaggtcat

SEQ ID NO: 213302 - DNA, 275 bp, Gossypium hirsutum
acgagcggggaacatatacgtggcatcatttgtttggtcgtgcagcggagtgtgtaagtggggggagaagatgaaatacgtgcacaactcttgtggagaaggcgattctagtatttggaaatcagatttttaagttgccttcctacctccttaccggctttttattatccattttcaaatttattattaagtagtaaaattacttcaagaactttcaacactttgcatactccttttattattattattattattattattattatcatgtattt

SEQ ID NO: 213303 - DNA, 416 bp, Gossypium hirsutum
acggtcgcaatcacatcaactggcattattatttgtgaattgcttttggctgatgtaagcggggagctgaataacaataacatcacaaccaatgtcaaagttgacactaagtctactctttttgccactgttaccgttgatgaacctgcacctggattgaagacaatctttagttttattgtccctgatcaaaggtctggcaaggtggaactgcaataccagcatgaatatgctggcataagcactagcattggtttcaatgctaatccccttgttaacttctctggggtggttggaaacaattgtgtcttactggggactgatctctcatttgacaccgccagttgaaactttaccaaattgaatgcttggctgaatttcacccattctgacctcattgctttcctaacattaaa

SEQ ID NO: 213304 - DNA, 395 bp, Gossypium hirsutum
acgcaaaaaggcttttgattcctccaatactgtgtcagttgctgaagttaatgctcaagcacgtgctgggggagtccgtacggggattgcctatgaaagagcttaagagcttggagagtcgtttagaaaaaagaattagcagaatccgttccaaaaagaatgagctgttgtttgctgaaatagagtatatgcagaaaaaggttaaaatagtgaaatgcactgtgaatgacatacccggggacatctctttaaataaaacggctgggctatctgcactttgctttctggagaaggtttgagtttttggtggatgcatagttcacgattagctgaattcatgcatagtgacttgtttaagctaactgattatcttaaaagagcattctatcattatt

SEQ ID NO: 213305 - DNA, 457 bp, Gossypium hirsutum
acgggaaaccaaaccaaactagtgagccgctgtttcttttcttctgtatcccaaaatggttgggtttaggtttcatcaataccaagtggtgggcataggccttcctacagaagcagatgagcatcccaagatttaccgtatgaagctttgggccactaacgaagtccgagccaaatccaagatttggtattttttgaggaagctgaacaacgtgaagaaaatcaatggacaagttttggctatcaatgagatctttgagaaaagccctaccaagatcaagaactattgcatttggctgcgatatcaaagtcgaactggttatcacaatatgtacaaggaataccgagacacaaccctcaatggggctgtataacatatgttcaccgagatggcgtctcgtcatatggtgaggtttccttgtattcaaattattatgacatcttccattccagcaaaa

SEQ ID NO: 213306 - DNA, 402 bp, Gossypium hirsutum
cccacgcgttcggccaggacccgcctacatgacataacattccccaataaacttgctgcctggacatttcaactactcaatcccacttgaaacgctctgcagagacactgagatgactatatggcactatcatggaggctgccaagatagcaggggtgttgaccccgataataaagaacttggcgtcgaaactctaaaggatatcgacgggtccactttcaactttttgtctgggactaatacgtacgccactgtcatgatgcttggaacgtacaagggtgtgaagatattaagagagagactaggccattaataatcctcatgattcggtatggaagatccttatttcttttgatcaagacatgatggacggatggatgaccttgacttggcaatacatat

SEQ ID NO: 213307 - DNA, 284 bp, Gossypium hirsutum
acggttgccgagtcatatccggagaccacgtggaagccaaagtttgaggttgagaaggaaaaacagggggctgaggatgaagctgccgattctgccaggcttgcaggctttcagaggaagggttttgatgtcttatacaaggttgctgacattcctttcttaaacaaatacaagcatcaaattctcgatcttattgagcatgctgagacacaacccgacctcaccaatggtgtcttggtctctatttgggggaatattctcaccaatttcttcaaactcatttt

SEQ ID NO: 213308 - DNA, 416 bp, Gossypium hirsutum
acgtggctctcgaaattgttagcgggaggtgcaacactaaaagccgcccaaagcaagaacctgtcattctccttgaatgggctcatgttttgaaggagaatgggagcttgttggaattagttgatacagggattggctcagattgcaacacagatgaagtcatggcaatgatcaacattgcactattgtgcacaaatcccacttcttcagctaggcctttaatgtcttcggtagtgagcatgcttgaaggcaaggctgaagttcaggaatacctcacagattcaagcatttcttcaaatcgtcaaatgagtgcagagattatgaaaaagttgtatcggaaacttgaagaagatgatacaaatgttagccaaacaaggagtatgttagctgatgggccatggaccaattcttctaca

SEQ ID NO: 213309 - DNA, 386 bp, Gossypium hirsutum
acgcccacgcgttcgtgagatttcaggttccggctcagcttcggcttcgggttcaggggcagccacaggaaccggtggagggttgtactctagtgatgggtcggtgaggatggttggggtggcgggtattttaaggaaggagcaagaaatgtgggagagtactgataagagtttgcaggatgcttttcaggacttaaatgctttcatgagtaaagctaaagagatggtgatgttaccggaaaaattgagacaaaagcttttgttctgaacgagttctcaaacaagtggaacaaatgatgaggatatgggttcaaaggaagagatgcaagattggttgttgagtgttggcataatatccccagtcactaaagagtctgcaggtgccc

SEQ ID NO: 213310 - DNA, 242 bp, Gossypium hirsutum
catcctttccccatgcgactacctccacattagaaacaatttcctcccaatggccattattactccagttgtacagacactaactcatcaaggtcagccagcaacatcagctgtgcttacttaatcatgttgaactcacacacctgatcaccggttgtcactcactttttctgttaaccggcatatgcgttaatgccttctcgctatacgttcgcatcccttctaggctcacgcctttcaac

SEQ ID NO: 213311 - DNA, 452 bp, Gossypium hirsutum
cccacgcgttctataatactatcaagtgaaacagatcggatttgaagagacgcccaaatattctaaaggatatcgcaggtccatagaagatgatccgtgtcttccggtcctttcttgcaaagagggcatagaacatcaacctttaaggtcctttgtagctaattactgtaatggagcagaaaattattaaccaatctccatagatgtattttggttttttctggaatatgtaaagtccataaggacttgtagaaatccttatgagcctcaaaattaggcgtggtgtaattattgtcctgtaaatactttgtaacaagggcccgataaccactcccaacagagtaatctgcagaaccctcatatttccagaccaatatattctccggactagctagaaagtgggatgggaagaatgcggcttacctactcctcatcaacaagtattaaaaata

SEQ ID NO: 213312 - DNA, 354 bp, Gossypium hirsutum
acggcactataaagagaatgctgaaaaaggttggggcattttcaaaagatccatttcgtgacacttgtgtaactgtctggggtgtgtctgagctcgatgcatgctccgatgcttgagctcgtactgtttgggtcaaccaacattaggttcccaactggaatgacctttggcttccaaagtgttagagggaattccttagactctttggttcgaaatcttaagggtttttcctctttaattttaaacattaatatttgtagaatattgtgctttaattacagtgactgctatcttggtcccaggagttggccttaaagtagtgatcctacgcaggcaattttatgttgaatatta

SEQ ID NO: 213313 - DNA, 419 bp, Gossypium hirsutum
acgcttgttttgtgaatacatgtcgtccatcactgagagggccacctctcgttgttagtggatctgttgacggaactgccaaactcatgggatatgcgtcagagaggtgccatccaaacattttctgataaataccaaattacacgccgtagttttttcgatgcatcatataagatcttcaccgatggcattgacaatgatattaatgtttgggacttacgtaaaggtgaagtaacaatgacacttcaagtgtatcaagacatgattacaggtataagtttgagtcccgatatgttgctaccttctcaccaatggtatggattgcaaactctgcatataggatatgcgcccttatgcaccacagaatctttgcgtaaagattatcgaatgccaccaacacaatttcgaaaagaacttgt

SEQ ID NO: 213314 - DNA, 415 bp, Gossypium hirsutum
acgcaccaattctatgcatgtgtcatggatattcaaatgccagaaatggatggatttgaggcggcgaggagaattcgggatgtggaacagaatatcaataatcatattaaatttggagaaatttcagtggatgattacaacaatgtttcaaactggcatgtacccattttggccatgacagcagatgttattcaagctacacacgaggaatgcctacggtgtggaatggatggatatgtgtcaaaaccattcgaagctgagcagttataccgggaagtttcacgatttttccattaggcattattagatcagaaactgttggaagaacatctgctcatgacttggcatgggcactaatgggactgcctgtactatggcattctttgcgatacctcaataaattcagattattccc

SEQ ID NO: 213315 - DNA, 419 bp, Gossypium hirsutum
acgcccacaccttctatatcatccgaccggcattagttgctgcgttacacatccatttctcggtctgtatctgctccggtggtataaaatggactaccgaagatacaacagttctcacgaggcaaaccttggaactaaacagcaaatttcagaagagcaagcataccaagattctcttgttgaggagttggctgaagatttccgcttgccaatcaatcacaagccaacggagaatgttgatctggataatgttcagcaagcaacgttagatacaaagttgaattcttcaaatgttgggtttaggcttcttcaaaaaatgggttggaaaggaaagggtcttgggaaggatgaacagggaataattgagcctataagatctgggattagagatccgaagttagggattggaaaacaagaaa

SEQ ID NO: 213316 - DNA, 390 bp, Gossypium hirsutum
acgctcacacgttctgttgtgtatactgatgtaaagtctacgctcaagcggacacatgaacttgatgatagatttgatgatgcaatcaaacaactcggaggaacagacacagctacacctaagggtgtgatgagggacaaggggatttcaggacatactaagtgtcatcttaaaagctatttacagaaatacatggctggggaaaagcctagcgaacaatacagatcacaacgagattcatgagcagtaatgggaatgccattggggacacatgtgatggaatgcacgggcaaatgaatgaaagctagcatatccaataagctctgcacatgcaaatagaactacatcgaaagcttgatgaacagatacatgttcagatacatttacagc

SEQ ID NO: 213317 - DNA, 417 bp, Gossypium hirsutum
gccgtctctgacaaaccaaaaatgactggagaaccagtgaaccccaaagcataccctttagcagatgctcaattaacgacgacgattttggatctcgttcaacaagctgctaactacaagcagctcaaaaagggagctaatgaagctactaagacacttaatagaggtatatcggagtttgttgtcatggctgccgatactgagcctcttgagattcttttgcatcttcctttgcttgctgaagataagaatgtcccatatgtatttgttccctcaaagcaagcacttggccgagcatgcggtgtcacaagacctgtaatcgcatgctccgtcacatcaaatgaaggaagccagttgaaatcgcaaatacaacagctcaaggatgccattgagaagctcctaatctaaagatattac

SEQ ID NO: 213318 - DNA, 421 bp, Gossypium hirsutum
acgcccacgcgttctaaggaaggaaaaaaaggctaaaagaatgtttttgcgaatgatatcgcggccgttgttggctaaggtgaacgagacaacggggatcgacggattagacgttgtacctaacgcaagggaagtgcttatcggtctatacaacaagactatgaaggagatccaggccgtacctgaagaccagggttaccgcatggccgctgagagcttcactcgccaccggctgaaggttggtcaagaggaagaagattgggaaatgattgataagcgccttggatgtggacaggtccaggagctcattgaggaagctcgtgacgagctcactcttatttgaaaaatgatcgagtgggatccatggggtgttcatgatgactatgaatgtgaggttatcgaaaatgatgatcctattccc

SEQ ID NO: 213319 - DNA, 409 bp, Gossypium hirsutum
acgagagagttatgaagagcgtcgagacctacttgatctacatcttcaaggtcctgaagcagggtcaccctgacatcgggatctctagcaaagctatggggatcatgaacagttgcatcaacgatatctttgtgaagcttgctcaggaagcctctaggctcgcgaggcacaacaagaaacccaccatcacttacagggaaatccacaccgctgataggcttgtacttaccggcgagcttgccaagcacgccgtttctgaaggtaccaaggccgtgaccaagtttacttcatcttgaaaaggctattaactgatctgtacatggcgttaaggttaggaggttgctctttaaattagatcggtgtggttgttatgcctatttagctgaaagctctgcatatctattttgat

SEQ ID NO: 213320 - DNA, 395 bp, Gossypium hirsutum
cggggcgcgccacgcgtccgcttatggctgaggagctaaagaacttaactggaggtgtcttgctgcttagaaacaagtgggtggttgtcatataccgcggaaaagatttccttccaacaaatgttgcagctgctctggcagaaagacaagatttgacaaaacagatacaagatgctgaagagaaactccggatcaaagcagttgagccagctctctcaggtgaagacaaaggacaggcaccagctggtactttggctgagttttatgaggctcaagcccgctggggaagagatatatctgctgaagaacgggaaaagatgattgaagaagctttcaaagctaagcacgctaaacttgttaaacgcgttgaacataaattagctattggccaagcc

SEQ ID NO: 213321 - DNA, 411 bp, Gossypium hirsutum
cccacgcgtccgcaaccgcgcctaataaccgttcggatttttctcagacgtgaaaaaaatggggctgtctttcaccaagctattcagccggctatttgccaaaaaggagatgcgtatactgatggttgggcttgattctgctggtaataccaccattctttacaagctgaaggggggagagattgtcactaccattcccaccatcggtttcaatgttgagaccgtggaatacaagaacatcagcttcactgtttgtgatgttggtggccaggacaagatccgaccattgtggagacactatttccaaaacatgcaaggacttattttcgtggttgatagcaatgatcgtgaccgtgtggttgaagctagagatgagttgcacaggatgttgaatgaggatgagttgaggga

SEQ ID NO: 213322 - DNA, 331 bp, Gossypium hirsutum
acgaatgcacaatctcaaatgtccgctctgttttcccttttctctctctaaaaggaaccctaaccgtacctcaccaaccaggattcaacatgaagggaggaaaatctatgtcagatactaatagtgccaagctatccgtgaaatgacaccgctggaaagaaatcggggaaggctgccaaggatccaaacaagccatagaggcctgctagggcctcattcgatgtcatggcggagttccgtgagcaatacatgacggatcaccctaagaacatattcgtcgccgctgtcggtaaagctggtggagataaatggaagagctggcttgaagctg

SEQ ID NO: 213323 - DNA, 134 bp, Gossypium hirsutum
attatttcgtgaaggcgagtccgtggagagatgggaagggcgatgttgatgctgagttggcttggggagctaaggaagcacgatttgcatttgggctctatctgtctgcatgacataggcatgaaagttgctat

SEQ ID NO: 213324 - DNA, 435 bp, Gossypium hirsutum
gacacactactcaggtgtatccgaattcttggaccgccatattggtctccttggacaaccaaggtatgtggaatgtgcgatctacgttatgggacaggcaatatctcggacaacaattctacctcagagtctggaatccggttcgcagccttgctaacgaatacgacattccctctaatgtcctactctgcggccaagccgtcgggcgtcacccgtagttcgattaaaccattgaaaaccaattttttctagggtcatgagagtttgactggcggagaaaaatagatgatagaaaagagaaaggatcgaaatcattgttctttcatttgtgtatctttagagcattagataaattatgcattcattggatatttggattactatattagctccaagagcctgaattatatgttacgaaaagaacagaggctctat

SEQ ID NO: 213325 - DNA, 352 bp, Gossypium hirsutum
acgcccaagccttcggacaacgcttccgttaaccctgttgggaaagcccggaggcgagacccgaggaggtttcattattcgggtacagctcgccctgatttccgaaaaggaatctgcaaaaaaggcgattcgtgtgagttcgctcatggtgttttcgagtgttggctccacccagcacggtaccgaactcagccgcgtaaggatggtaccagccgtaaaaggagggtctgttttttcgctcacacaccataacagctccggttgttaccacaacagagtccgagaggaaacgggtcgatttctggcgatttggattacgttgggtctacaatacgtcatcgtttagatatag

SEQ ID NO: 213326 - DNA, 384 bp, Gossypium hirsutum
gacccttgtgaacgtgctgtcgctcggttttgggctgcatatcttgacgacaagtggttcccagcggtgaaaagtataggagtcgctaaaggagaggaagcaaagaaagcagcaatagcgcaagtggaagaagggttggctttgatggaagaagcatacgacaagtgcagcaaagggaagggttactttggtggggatgaagttgggtaccttgatatagcttttgggagcttcttgggatggcttagagtgacggagaagttcaatgcgatgaagctgctggacgaggggaagacgcctggtctggtaaaatgggcggacaggttctgttcccatgccgctgtgaaagacgttatgcctgataccgacaagcttgcggagttt

SEQ ID NO: 213327 - DNA, 373 bp, Gossypium hirsutum
gaaaatggctgtaaaacatattatcggttctgttgtggcatcatttgctgttgcttatgtaatggataaacttgttgctgatgagaagatttttggagggactacaccccacactgtttccaacaaggaatggtgggaagaaactgacaagaaatttcaggcatggccacgcactgccggtccacctgtggtgatgaatcccatcagccgccagaatttcattgttaagtcgggttctgaatgacgtaatatttgcttgtattttagtcgaagtgtcagtttgattttacattcgctgtgaagaaattgttgtattagacttgagttaatccggctttgcatttaagagtagctcttgggtcctaaatatgtc

SEQ ID NO: 213328 - DNA, 334 bp, Gossypium hirsutum
acgcccacgcgttctacaacgcgtccgcttggatttgcagtttcaggaggttgccgtggaattgggcgctttaatgtgtctattgatggcggaaaaacatcgacggaagccactacgtttcagaaaactggtaccccttacatagcagatggtgtaagcaatgacacatggtcatggatgctttttgagctcacatttgatatcccacagagcactgagattattgccaaagcaggagattcatctgcatacgtgcaacctgagaaggcgcaagatatttggcacctaagagggattcttaacacttcatggcacataattcatatcctcattg

SEQ ID NO: 213329 - DNA, 337 bp, Gossypium hirsutum
cccacgcgtccgccaccaccgactcagatcatcaaggctttgatggtgagtctttagagacagtcgtccgtggagctcgttccgagaggctgttcttcgagccaggcggtgacacgagttccatcctcgaagaagccaaagcagccggtggtggtggtgatgggttgttcccgttcaaagaaagcgtgattctagctatggaatctgatgatccgtacgtggactttcgtaagtcgatggaagagatggtggagacacatgggatgaaagattgggaatggttagaacaactgttgggatggtatttgaaggtgaatgggaagaacaccatggatta

SEQ ID NO: 213330 - DNA, 288 bp, Gossypium hirsutum
cccacgcgttcgacaccacccactcatatcattaaggctttgatggtgagtctttagagaggggcgttcgtggagctcgttccgagaggctgttcttcgagccaggcggtgacacgagttccatcctctaagaagccaaagcagccggtggtggtggtgatgggttgttcccgttcaaagaaagcgtgattctagctatggaatctgatgatccgtacgcggactttcgtaagtcgatggaagagatggtggagacacatgggatgaaagattgggaatggttagaac

SEQ ID NO: 213331 - DNA, 383 bp, Gossypium hirsutum
aaaagggtttgctgttttggctcaataagtttgcttatgcttccatttttattgttattggtgcttggatacttttccggtttgttggaccggcacttaatctttatcaacttgattctcctcctttgcctcctacctccatgtttaagggctcttgaaaggataccatagtgctttgtctttgtattggtttgttttgtagcatcttgtttagggaaatggagcaataatgagacatcttttactaattgtctatataacatatctgagatatagtcccatttggttataagtggtgcccttttatgtgttatgaattggtgtctcgtgaagacccaacttttcaaggtttgtgaatgtttgttttaataatattgctttca

SEQ ID NO: 213332 - DNA, 366 bp, Gossypium hirsutum
cttccgctggctcctctttgttaatcccgactccaaattctagtacctgaaaaggtcttttgaaactggggaggccgcttgtggagagttacggaataccaaaatgtttcttaagcttttggaggcagcgcttaaaacagggaaccgtatgaatgttggtaccaaccgaggggacgcccatgctttcaagctcgacacactcttaaagctcgttgatgtaaagggtacagacggaaaaaccacgcttgtgcattttgatgtgcaagaaatcatcacagctgaaggttctcgtctttccaatgccaatcagaacccaaaagctgagaaaatacaacagtcgcgatcttcaagatgatgttgtgtttc

SEQ ID NO: 213333 - DNA, 450 bp, Gossypium hirsutum
acgctagaataatctatatgcaacggccttaccatggttttggatggacatcggtcaaccaagggggtattttaccggactaaaactctctctagactccgttataaagaaagcttaacctaagtgggccactggtacaaacgttgaacgaaacgttctggttcatgagactgacaaaatcggataaagatgtttggtctgaccacatgtggcaatcggaccaagctgcggagctaagactggagtaccactctctcggtgcacgatgatgcctggattgcgcattaagaaacacgcatgcatattcagcagtatcatcggaaggcattacacagatgctcaatgggctatagtagaaaacatgaccattcttggagaagacggtcacgtttgtgacgaaatttacagcaacggcggagtggttttgcctcacaaagagatcaaatcgag

SEQ ID NO: 213334 - DNA, 341 bp, Gossypium hirsutum
cccacgcgttcgcccacgcgtgcgcccacgcgttcgcagaaagaaatgtctgctgatcggggcatgagaatccatgcagcgtattccacgttgtcggatcctaatcaacgtgcggattatgataggaatcttagacggtggaaccgtgcctttacgactatggaagcaactgcgactgcggtgggttcctatgggttctctagttatggtggtaataggaattgggagaccgagcactgctggcacgtaattatatgtattcttttttcattattaatgtatgtttcatgttcgtggtccatacaaatgagattttttagaaacgatatgtatcttttaat

SEQ ID NO: 213335 - DNA, 386 bp, Gossypium hirsutum
  unsure (1)..(386): unsure at all n locations
cggccgtccttttttttttttttttagaaaattttaatttttttatgataataaaggggggggaaggtcaatttaaattttccttaaaataggagacccttatgcatataacaaaaatagcccaaagaaagccaaattttttaattttttttccccacttggaaaccctaccaagaaaagcttaaaaccattattattctcacctttaaattaaagggtttttctatcactcgaatgcccatagattctccctactaacctncttttcttcctggggggtgaaatcgctcttgatgttgaaggtcttgcgaatctcctcgggtgtcttgccctttatcatatcagccacagtttggcaggtcaagtccagcaagctctagatattc

SEQ ID NO: 213336 - DNA, 440 bp, Gossypium hirsutum
  unsure (1)..(440): unsure at all n locations
gaaacttgaggggaagaatcttgctatcccttgcttttctctcgcaaaaaattctcaaacttgtttttaacgttcgctgaatactatcgctcatttcttccctcagaaccctaatcgataactgaagccatttaatcatgtttgggcgtgttccaaaaaaatctgataacactaagttttacgaagtacttggggttcccaaaagtgcaagtcaggatgaattaaagaaggcttataagaaagctgcaattaagaatcatccggataaaggtggagaccccgagaagttaaagaactggctcatgcttatgaagtacttagtgacccanagaagagagaaatatatgatcaatatggtgaaaatgctcttaaagaaggaatgggaagaagccgttcttctcacaacccatttgacatatttgaatcatttttcggtgggg

SEQ ID NO: 213337 - DNA, 445 bp, Gossypium hirsutum
ctttatccttctaaaacggtcttcctcccatggcttcctccacggctccgatcggtgttgctgtgtctgccccttcttctgctctttctaatcggagaatatccagcagatttccggagtttcgcggtctcaagatcaaacccaggttggcgtcgctgactcactctaccagatcggcgattcaggatcggcgtcaactcggacgtgtcgtgtgcgaggctcagaacacatctgttgatgtgccaaccattaatgatgaaacatggcagtcactagttcttgaatgcgaatcgccctgcctggttgaaattcgggctccgaggtgcggaccttgacgtatgatccaccccataatcgacgagctgtctaagcaatatgctgggaagctcaaatgctacaaagttaacaccgacgagagtaccaacatcgcaactcgatgtggaat

SEQ ID NO: 213338 - DNA, 254 bp, Gossypium hirsutum
ccttcatacaaggcggccccaaagttttttttttgtttttggcaaaaccaatcaaagaggagtttcgttttagctcacacgctcctttatcgagtgctatattgggtaaggagactgttcacgtcaacattgaggtcattggccatgtcgactctggaaagtctacaaccactggacattcgatctacaagcttgacgcaatagacatgcgcgtgattgctaggtttgacaacgacgctgctgacatgaacaaa

SEQ ID NO: 213339 - DNA, 432 bp, Gossypium hirsutum
cccacgcgttcgccaacgcgtgcccttacgcgtactcccacgcgttcgcatctggccatgtgttgtctagaggagctgatgtctacggcttggagaagaccactcggaatgccacatgcctctgccgatggacgtgggaggatgaaccatgctgacgtcagacataaagataccaccaacgctgcgaatgtaatcggccggatcaacggaattgctccggacagaaactctgaagaggaggaaaatgcaatggacccaccacagccagcccagaggggtgctaccgagctagccgaggctgccctgctacccaaaaatttatgtacaatggatccaacatggcatccctggttacgattgtacacatggtatcctacaaatgtccaaccctgttgtagataaatcataaatgtagcaattgtcagatttgat

SEQ ID NO: 213340 - DNA, 441 bp, Gossypium hirsutum
cttcgggaactggaaggaaaaggccttcccctttgaaaatgtccccatgtgttactcaccatttgcaaggacaagacatacggcagaggttgttgcatccactttgaatcttccatttgagggccctcaatgcaaggtcatggaagatcttcgagaacgttactttggtccttcgtttgaacttctgtctcatgacaaatatacagaaatatgggcaatggatgaaaaagatccattcacaaggccagaaggtggagaaagtgtcgatgatgtggcttctaaacttgcaagtgctatggctaccatggaatcagaataccaaggatgtacgatcttggttgtcagccatggcgatcccttgcaaatcttgcaaaccatactcaatgcagcttcaaaacagatggaaccaagctgcaatgacctagcatctataattcaagc

SEQ ID NO: 213341 - DNA, 271 bp, Gossypium hirsutum
gacttgacagatccagctcctgcaccacctttggttaattggattccacaaccgtggtgccgaccgatctctgagcgcgggatttatcctgctgtggatcctttggatactacaaatcgtatgctctctcctcatatattgggtgaggaacactacaacactgctcgtggtgttcagaatgttctccaaaactacacgaacttgcaagatattattgctattttggggatggacgaccttactgaagatgataaattaactgctgcacgtg

SEQ ID NO: 213342 - DNA, 452 bp, Gossypium hirsutum
cgcccaacccttccgcttggccccacaaaaatgccggccttcagtgcccgttttgaagaatttgagaagctacccaccggaatatttggcgtttctatggacagcgtgttctctcaccttgcctgggttcaaacagatcgaaagccaggtggtcttggtgatatgaagtctcctctcatatctgatgtcacaaagacaatcgccaaagcctatggagtgttgcttcctgatcagggaattgcattgagagggcttttcattatagatacagagggaattatccaccactccaccatcaacaatcttgctattggacggatcgttgatgaaacaatgaggactctccatgccttgcagtatgtgcaggaaaatccagatgaagtatgcccagctgtgtggaaacccggagagaaatccattgaacctgacccttagctcagcaaggattactt

SEQ ID NO: 213343 - DNA, 359 bp, Gossypium hirsutum
  unsure (1)..(359): unsure at all n locations
acgcagagatcagatatatcggacggaaatgaattttggttttgctaaaaaaactttgggagggggttgaggccggtcctaaaccggaacgtggtcttggccggctgaggaggatcaccaccacccaacccttgtccaccaaagatgaggcttcatcaatggcgatgccgacgagtccgacgacacctgggacaccatcgacgccggtgtcggctcgtanggacaacgtgtggaggagcgtgttcaatccaggtagcaaccttgcaaccaaaggtattggcgctgaagttttcgacaagcctcaacctaactctgctactgtttatgactggctttacagcggggagacccggagcaag

SEQ ID NO: 213344 - DNA, 428 bp, Gossypium hirsutum
cggacgcgtgggcggacgcgtgggcggacgcgtgggtttcaaaaaatggctctcctccaaattcacacacttcctcaccaaattccttcactttcacccattgttttttcatcaaaaacccattccaaaaactcactcttcttctctacaacaaaggttatacctttctcactttcaacacaacccagaaagctgctttgcaaacccccacttggcaaatatgtcagggaagattatcttgtgaaaaagatgtcatctcaagaaattgaggagctagtaagaggggagagaagagtacccataattattgatttctatgcaacatggtgtgggccttgtattttgatggctcaagaacttgaaatgctagcagtggaatctgagaaaaatgcaattattgccaaagttgaatccgatgacgagtatca

SEQ ID NO: 213345 - DNA, 425 bp, Gossypium hirsutum
ggggcccaagagctctgccagacttttctgttttgggtctggtcctaacagcgttttgatggagtaaaggcgagcggcaatgcattgtagcaggaacagttcttcacagcaactcgtgcagctaatacctctgcagagcagcagttgctccctttagccccattccaccaagtgagacctgctgcaatgccatcaaagctctggggcaaccctgcctgtgcgttattgtaaatggccctcctatatctggtgtcgatcggaacatggccctgcagctgcctgagaaatgcactgcaaactttgaaccatgtgatataatgaagtagttgcatgcgagattttaagaataagtgcgtggagagctcatgagaacctttcccaattagttctactggttgattacccaacataaaaggatatatgaa

SEQ ID NO: 213346 - DNA, 453 bp, Gossypium hirsutum
cccacgcgtccgcccacgcgtccgaaaaggtcctagatgttggctgtggcattggtggaggtgacatttttatggctgaggaatttgatgttcatgttgtgggcaacgacctctctgtaaacatgatatcctttgctcttgaacgagctactggactgaaatgctcagtggaatttgaagttgctgattgcaccaagaaggtttatccggacaacagttttgatgttatctacagccgtgacactattctacacattcatgacaaacctgcactgtttagatctttctacaaatggttgaagccaggaggcaaactcctcataagtgattactgcaaaagttccaagactccatccagggagtttgctgagtatatcaagcagagaggctatgatcttcatgatgtaaaatcatatggacagatgcttgaggatgctggttttgatgtgattc

SEQ ID NO: 213347 - DNA, 390 bp, Gossypium hirsutum
cttccgcccaaatttgccatgagtttgaaaggttcattccttatctaccagatattaaagttgctggcttctatggtggggtcaatattaaggttcacaaggatttactaaagaacgaatgtcctcatattgttgtcgggacacctggacggatattggctcttaccagggataaagatcttagtttgaagaatgttacgcattttatactccatgaatgtgacaagatgcttgagtcacttgacatgacgagagatgtgcaagagatcttcaagatgactccacatgataagcacgttatgatgttttcagctacactaagcaaggaaattcgacctgtgtgcaagaaatttatgcaagatcccatggaaatttatgttgatgatgaag

SEQ ID NO: 213348 - DNA, 391 bp, Gossypium hirsutum
cggacgcgtgggcggacgcgtgggcggacgcgtgggtttcaaaaaatggctctcctccaaatgcacacacttcctcaccaaattccttcactttcacccattgttttttcatcaaaaacccattccaaaaactcactcttcttctctacaacaaaggttagacctttctcactttcaacacaacccagaaagctgctttgcaaacccccacttggcaaatatgtcagggaagattatcttgtgaaaaagatgtcatctcaagaaattgaggagctagtaagaggggagagaagagtacccataattattgatttctatgcaacatggtgtgggccttgtattttgatggctcaagaacttgaaatgctagcagtgggagttgagaaaaatg

SEQ ID NO: 213349 - DNA, 426 bp, Gossypium hirsutum
acggtacatcttcgcttagagatcagacccaaaattctcctttcctcttatttccgattccgcaatgtttcctgaaaccctaatcctaatcccagattcctcctgtctacatcgtttagcaaacggcagccgaggacccggcagtcgtggcagaccccgcacccgagacggaggaggacaagactgctgagaccaacgctacttcaaaatccggctgagcaaagaaagccagagaacccaacaccaagaaagctgcagctcctaggaaaccacgggctgctactactcatcctccttacgaagagatgatcaaagatgcgatcgctactttgaaagagaggacaggttcaagttagtacgccattgctaagttcattgaagagaagcagaagaatcttcctggaaatttcaagaagcttatgcttg

SEQ ID NO: 213350 - DNA, 410 bp, Gossypium hirsutum
ccttcggtttttgggtcacggggggtgaaattgaaaccgagagcatcttggccacagggctccagggattttttgaggctgtgggactcctccttagaggcactgaggacaaaaaggaagcattggagaacttgcatcttatgtcgttatgcctcgatgagattgatgatggcggtataattctcgaaactgatgcaaatgtcattgacggacaagttgatagtcataggatggatgccggagctcctttgtgcgagcagacaataactcaagcattggctaccgctcgtgaacatcttacaagatctctcctcaagtaaaatgtgtgtacatggaaccaaacgagataagctcgacggtattatctatgcagtatgatactgtacttgatatgcattaggataattttt

SEQ ID NO: 213351 - DNA, 443 bp, Gossypium hirsutum
acggcagaggtccataacctctccgagaggagacgcagggatcgtataaatgaaaagatgagggctttgcaagaacttatacctcgttgcaacaagtcagataaagcttcaatgctggatgatgcaattgcttacttgaaatcacttcagatgcaaattcagatgatgtctatgggttgtggcatggtcccaatgtttccaggtgttcagcagtatatatccccaatgggaattgggatgagtatgggcatggatatgggaataattaggccaatgatgtcatttcccaacgttgtggctggttcagcgttaccaacattggcagctgcagctcatttgggtccaaggattcctatgccagcctttcatatgccaccatcaattccagctcctgacccatcaagattccaaccaaagcatcaatctgaccccatcccaaaccc

SEQ ID NO: 213352 - DNA, 395 bp, Gossypium hirsutum
acggttggatgaattcaatcagccaaacaggttgcttgagaagagattaaaccaaagtgggcaggtatttgtgctcgacaatctacacctctccaccttaaacccgactcatttcattacggttctccgacaaaccgagaagtcgattcggggtttcatccggctgatgatcgatgaaatgaagttagccgattgggatatcaatgctgcagcacgttcaatacagagtggtgttatgtattggaaagaagatgataaacgttttgcatttgagtccttcatttgcagggaaatgttcaaggctttccacctgccttatttctccctttttggtagctcagtaccacaagggaagaaacatcctcaagtgttcttcgataggagtatggaattga

SEQ ID NO: 213353 - DNA, 431 bp, Gossypium hirsutum
acgcccacgcgttctagaactttcagcatgagattcagtagccatggcactatatgcgataggtgggtcgatttgtgctcctgtgtgggaggagatagtttttcgaggtttccttctcccttccttgaccagatacatgcctgtatggagtgcaatactggtaagttcagttgcctttgctctggcacattttaatgtacagagaatgttgccgcttattttcctaggaatggtgatgggtgttgtttttgcacggtcgacgaatctattgccatctatgcttctgcacagcctctggaatggccttgtgttcttggatttaatgagataatcaatcttgtcttctcatgttagctttggctgatccagtgctagtgaagcatatgcgtcaggccaattttctggggtatgcttgttacaggatattcttg

SEQ ID NO: 213354 - DNA, 350 bp, Gossypium hirsutum
gcgtctcctggagtcccacttcggtgtcgacgtcgccactccccccgacgagctcactcagctttacaactccattttcgagaggtttgattgcgatggcagcggcaccgttgacctccaggagttcagatctgagatgaagaagattctgcttgctattgctgatggattgggatcttgccctatccagatggttcttgaggatgatgaccaaagttttctgaagaaagctgctgatcttgaagctgctaagctcgatccaaaccatgctcaagcctcctgaatgatgctcccaggttgctgaacttgaatttatgctgttggatattcttatcttttgcagctacttt

SEQ ID NO: 213355 - DNA, 464 bp, Gossypium hirsutum
  unsure (1)..(464): unsure at all n locations
cgtncgaacaattttgtcttggccaagagccgccaaagtgagagtgatttgtggtcatttgaagctttacagaggcccgtgtcgtgaccgagcactcttattcctccaaaccatgtnggttggcccatctaattgggagcctttgctttttcattggtctttgaccaaatccacctccacttttgtttggtggctttctggtaagtatttaaaatagggtctcaacctactttntaaaaaannaatggtattattgacttntaanngtgcttgcttggttggtgtataacaaacaagtgagggtggaatgatattgacaggatcaatttggtaaggttcctctctattggggaatcaccgccgacggatatgtggcctntgctgataatgctgaattgctgaaaggtgcctgtggcaaatctcttgcttcttttcctcaaggctgtttctactccacagcagta

SEQ ID NO: 213356 - DNA, 432 bp, Gossypium hirsutum
tcaaaaagacaattcaacaatttatttttttaatttttactgaaaaatcaaagggggcaatcatgagattcaagaaaggtagcaaagtcgaggtattaaccatgaaggaggttccaaccggcgcgtggcgctgtgccgagattatctccggcaacggccacacttactgcgtcaagtatggttggtttccgatcactggcgaggcggcgttggtcgagagagtcccgaggaaagcgattaggccttgccctcctcctataaatgggaccgacgattgggttcctggcgacttcgtggaggtgttcgacgagttgtgttggaaaccagcggtgatcgttagagttttcggtggaaacaacatgttttctgtcaggattcttggatcgaagagccaactcatagcacatcaatctcgattgcgtgttcgacaat

SEQ ID NO: 213357 - DNA, 356 bp, Gossypium hirsutum
tccaatttatggtttgcacgagccgtagtgcgccgtttgcatcaggaagaaatggcggcccctttgctgtctaagaagattgtgaagaagcgtgtcaagaagttcaagaggccccaaagtgaccgcaagatctccgtcaagacaaactggcgaaggcctaaaggtatcgactcccgtgttaggaggaagttcaagggatgcactttgatgcccaatattggctatgggtccgacaagaagactcgccactatcttaccaatgggtctaagaaatttgtcgtgcataacgtgcaagagctggagcttctcatggtgcacaacaggacatactgtgctgagatagctcatgatgtttc

SEQ ID NO: 213358 - DNA, 430 bp, Gossypium hirsutum
tcgggaaattttgaccttgaaggccgtggtggtgctggttttccatcgggcctcaaatggtctttggtgccaaaagtatctgatggtcgtccttcttatcttgttgtcaatgctgatgaaagtgaacctggaacctgtcaggacagggaaattatgcggcacgatccacacaaactattggagggctgcttgattgcggcggttggaatgagagctacagctgcttatatctacatcaagggtgaatatgtgaatgaacgtaaaaaccttgaaagagcttgaaaagaagcttatgaagctggactattgggcaaaaatgcatgtggttctggatatgattttgatgttcacgttcattatggtgctggtgcctatatttgtggtgaagaaacagcacttttagagagccttgaaggaaaacaagggaaac

SEQ ID NO: 213359 - DNA, 361 bp, Gossypium hirsutum
ctgcaaggctatagaacaacaaacaatatgttaaggatgatgattatggtgaagaaatggagagagttgatgttttattgacattacctgatgaagaccgaaatcctcatatggatgataccgatatcaaagctctaattcaggatatgatagctgccgcaacagatacatccgctgtgaccaaccaatgggcaatggcggaagtaataaagcatgcgcgtgtcctccgcaaaatccaatatgagctcgattcaaccgttggtcccaaccgaatggtcaacgaataccatctacctcaccttaactacctacgctgcgtcatacgtgaaacattccgtatgcacccggacggaccgttttt

SEQ ID NO: 213360 - DNA, 301 bp, Gossypium hirsutum
acgccacgcgttctaccacgcgtgcgctcacgctttcggttttctttatcaagtcgggatttgggttttggggtgaaaaaaatgttgggagtatttagcactgcgatagtgtctacgccggacgagctgttggcggacgtatgccgaactccattacctatgataacggccgacgctctggtgaaacggttccttgagacgaactactacggcgtgtacatgcacatctgagaccatgtccaagccgcttattctcaccataaagagtctactttacagtccagatcatttgctgtgaaag

SEQ ID NO: 213361 - DNA, 295 bp, Gossypium hirsutum
  unsure (1)..(295): unsure at all n locations
aatgaaggncgaccacgcgtgcgtccgccatgcgttcgagcagatcccaagatgtcatttgctgccattgtctgtggaactaaggggtggaccaacattggcgtgatcgaatcactctcggccaaggtcgatactctcatactgggacgtgggcgtgatgttaaccttctacaacggccaaagatctgcggttgcctctctacttgtgcaagaagaccatctctatctagcaacatggcttaatgagaatgacaacgctaaaggaggctctctcttgctccccactgatgtgaat

SEQ ID NO: 213362 - DNA, 385 bp, Gossypium hirsutum
gcattgggaacacaatgaagaggatttcagttatagtgtcgtccatcatcatcttccacacacgtgttcagcccattaatgctcttggagctgccattgccatccttggaaccttcctttattcacaggcaaagcagtgagaaaggtcaaagaatttcaagattttgttgaactgacaaacaataaaaaaggggctttatgaatatttggaaggaattcactgaagatgatgctaatgggcttagttttgatgcattccacatgaagtcctggagatggaagcaacaagttaatatgatagtctttgcaaccttcaatgctactaattaactagtagatttttattttacattttgtaagttgaaacaaagggggggggggtgca

SEQ ID NO: 213363 - DNA, 290 bp, Gossypium hirsutum
gacccacgcgtaacgcatatgtcctatagcccgagctcccttattttttttaaagccatcaaaaagctagatcgtggtagattacccgagattttactgattcatttgaagagattctcatatagccgtttttttaagaacaagcttcaaacatatgtggactttccaattcatgatctcaatctctccaattacatttcccatattgataaccaactgtccaattgttatgaattatatgctgtaactaatcactatgcaggcatgggaggcggacattatactgcttt

SEQ ID NO: 213364 - DNA, 445 bp, Gossypium hirsutum
cccacgcgtccgcggagcgtgggagaccatccaatctgatggcattgctggtctttaccgagggttcaatatctcatgtgttggaattattgtttaccgtggactttactttggaatgtatgattctttgaagcctgttgttttggttggtggattgcaggatagtttcttggcaagtttcttgctggtttggggtatcacaataggtgctggactggcatcttatccaattgatacggtacgtagaagaatgatgatgacttctggagaagcagtgaaatacaagagctcgatggcagcattttctcaaatcatcaagaatgaaggtgccaaatcgctgttcaagggtgctggtgcaaacattcttcgtgcagttgcaggggctggtgtgcttgctggctatgacaagctgcaagtccttttcctgggaagaaatatggatctg

SEQ ID NO: 213365 - DNA, 315 bp, Gossypium hirsutum
cggacgcgtgggcggacgcgtgggcggacgcgtgggcggacgcgtgggcggacgcgtgggttcgtccactacttcgatcgcagatcagctgctcttgctatattgtctctaaatggaaggcatttgtttggacagcctatcaaggtcaattgggcatatgctagtggtcagagagaggatacatcaggtcactttaacatttttgttggggatctcagtcctgaggttactgatgcaatgctgtttgcatgcttttcagtctatcccagttgttcggatgcaagggttatgtgggatcagaaaactgggcgttca

SEQ ID NO: 213366 - DNA, 448 bp, Gossypium hirsutum
cggacgcgtgggtggaaatgatcttatctttcgggttggatttgttgatgttgtcttctagactggaaaactatttagggaggctgacaaggaatcgggtcacaaaaagacaataacatcacttacaaaatctgcagactgttcacacttccttactggttccttagataaatctgccaagctatgggacacaagaacgttgactcttatcaagacctatgttacggaacgtccagtcaatgctgttgctatgtctccacttctcgaccatatgtagagggtcagcccgagagcattgtgcaagatattgagaacatggttcgctcttacattgagaaggtaaaatgcatttgatctttattgtgtgctccttctagtaaaatttacttaaataagatttacaacgatgttactgccaataatattttaggataacgcgtattttata

SEQ ID NO: 213367 - DNA, 370 bp, Gossypium hirsutum
gtcccatcatgtaattactgtaatcctgattggatactcatacattacaagctttttccgcattggttcaattatccttgccctacatgatgcaagtgatgtgtttttggaagcggctaaagttttcaagtattccgagagagagcttggagcaagtgtgtgctttggattatttgccatctcctggctcttgctgcgtctgatattctttccattttgggtcattaaaacctcaagctatgatgttcgggagtttttaaatctttcggagtcatatcccatgtccctatactatgttttcaatactatgttgctgatgctacttgtgttccatgtgtactaggggtttctcatttgctcaatgatcatg

SEQ ID NO: 213368 - DNA, 288 bp, Gossypium hirsutum
cccacgcgtccggagcgtttgtctcagatctcagaagatggcccgtaccaagcaaaccgcccgtaagtcgactggtgggaaggctcctaagaagcaacttgctaccaaggccgcccgtaaatctgccccaaccactggtggtgtgaagaagcctcatcgataccgtcctggaactgttgctcttcgtgaaattcgaaagtaccagaagagtactgagcttcttatcaagaaattgcctttccagaggcttgttcgtgaaattgcccaagatttcaagactgatttgcg

SEQ ID NO: 213369 - DNA, 386 bp, Gossypium hirsutum
tttggacatcagcaatgaggtcaaatttgcatggaaaattcagagggacatggctgagagagggcacagccttgaaagcattaaagctagtattgaagccaggaaacccgatttcgatgcctatattgatccccaaaagaaatatgctgatgcagtgatcgaagtgctgccaactcagctcattccagacgacaatgaagggaaggttttgagagttaggttgataatgaaagaaggggttaagcatttcagtcctgtttacctgtttgatgaaggctcaaccatctcatggataccatgcggaaggaagctcacttgctcttaccctggcatcaaattccactatggccctgacacttactttggcaacgagggttctattctgg

SEQ ID NO: 213370 - DNA, 387 bp, Gossypium hirsutum
cccacgcgtccgctcgatggaagactcaagtggcgaccaattgtcttgccagacaactatatcgagcatgcatcaccgaaagaacagcttgctcttgctgggctgactggacatcacattgctgcaaccacattgagtctcctcggacgtacccgtgaagcgttacttttaatttgctagaatgctgtatagttttccttactggattgatgatgtacctgaagagcgtgagaaggctaagcaaagaatgaacagtggaatagaatattgtagcattttgatgatccctgtaatttgtatagatgttgaagtgtgaattgtgaagttgacagagtagtggtgaagaaccagaattgaagtgaatgaattttatagaaaattctacct

SEQ ID NO: 213371 - DNA, 448 bp, Gossypium hirsutum
gtttgaaacgctggaggacagttcctttgtttttgagagaaaagagtagatcttggctggtctccttcgttcgattccgcttaattatagcccgcgtttctctcagacgtgaaaaatggggctgtctttcacaaagctatttagccggcttttcgccaagaaggagatgcgtatactcatggttgggcttgatgctgcgggtaaaactaccattctttacaagcttaagttgggagagattgtcactaccattcccaccatcggtttcaatgttgagaccgttgaatacaagaacatcagctttactgtttgggatgttggtggccaggacaagatccgaccattggggagacactacttccaaaacacccaaggacttatttttgtggttgatagcaacgaacgtgatcgtgttgttgaagcttgagatgagttgcacatgatgttg

SEQ ID NO: 213372 - DNA, 344 bp, Gossypium hirsutum
acggttactccatattgttccttcagccattcttctcatattcctgcgagaacatgggtggggtggtcatacagtggatttgttgctcactctactactgctgtcaaagctgttccctgtggcttgccagtaactcgaggcggaagttttgggggtcaggttattcttccactagctcatactattgagcatgaagagttcatggaggtcattaagcttgaaaatatgggtcattatcgagaagacattgatcatgcctggtgatattcttccttttgcatcttagtataggagttgatgataatgcagattggtactttgttctgttcttatcttttgccccc

SEQ ID NO: 213373 - DNA, 362 bp, Gossypium hirsutum
gcgagagttaagtggctcattgcaaagagaatcagatgcaaagaataaaaagcaaatatcaaatgcaaagtataaggagattagtggacatgacatctttgcccctccggaaaataagccacgttcgttggctgctgtcacctctgaatcaagaggaagcaaagacatgggagaacctgcaccacgaaatgtccgcacatctgtcaaagtttcaaatcctgcaggaggtcagacaagtatcctattcacggacgaaccagttgtcaaggtgacaaagaagatacataaccaaaagtttcaagagctgaccggtaatggtatcttcaaaggagatgtcccacccaggtctgtggaaaaaccac

SEQ ID NO: 213374 - DNA, 389 bp, Gossypium hirsutum
cccacgcgtccgcccacgcgtccgcccacgcgtccgcaattgctagggtttcggcgccgcagctctgtggcttttccagtcccctttgcccttttggttgacttgcaggctaccacggcaccacgcgcgccttcatcatccgtcgtagctctgaccggatccccaaggatccgtttggccttggacggagaggcaactgtcgattaagtcggcgtcgatcgacaggtaagagatcctcccccttctttatactcgtatcacagataaagaaaaataaataggagataaataaaaaagaaaaacgatgaatgaacaaccttgaaatctttgctttctctatttgattgcttgatattcagttgttttttggagcggatctctgtgtttat

SEQ ID NO: 213375 - DNA, 408 bp, Gossypium hirsutum
attgatttgacagtgactgttctcacaacaagattctggccaagttataaatcatttgacctcaatctccctgccgagatggtcaagtgtgtggaagttttcaaagggttctatgaaacaaaaacaaaacacagaaagcttacatggatatactcactgggaacttgtcagattaatggcaagtttgatcagaaaagtattgaactgattgtttcaacttatcaagctgctgtcctgctgctttttaattcatctgatcggctgagctattcggagatcatggctcagttgaacttgaaccatgatgacttggtcagattactacattcactgtcatgtgccaagtataagattctaagtaaagagccaaacacataaaccatcttccaaagcgacttctttgaattc

SEQ ID NO: 213376 - DNA, 375 bp, Gossypium hirsutum
gaactcttcaaattcagttttcaaaactctattttctcctaaaccccaaacgaaccctcagaaatggcaccaaaagccgagaaaaagccagcagagaagaaaccagcggaggagaagaaaacagtagctgagaaagctccgccggagaagaagccaaaggcaggtaaaaagctaccgaaggaaggcggagcagctgccggagacaaaaagaagaagaggaccaagaagagtaccgaaacctacaagatctacatcttcaaggtccttaaacaagttcatccagatatcggtatctcaagcaaagctatgggcattatgaacagtttcatcaatgacatctttgagaaacttgctcaagaagcttcgagactcgcg

SEQ ID NO: 213377 - DNA, 369 bp, Gossypium hirsutum
cccacgcgtccgcccacgcgtccgcccacgcgtccgggcagatgtggacttatgaagaacttcatgaactttgcactcaaagtacctgttgtatgtgttcattagttactcaaatcaaatgctacttatttgggcgatcgtgttattcagtgtaaagcgtggtccaggcatttgtttatgtcctggtccttggacatgtaatttagatgaaaacgttatgaaatctgtcagctattcaatgttatattattactctggaactctaaggcggtgtttttattctctttccttttatgagacagtagtaggggaggggtattttgttgccggacctgtatggattttgatgaatgcaaatctctctctagt

SEQ ID NO: 213378 - DNA, 395 bp, Gossypium hirsutum
gaatttgatgtctatttcccaatgcttgatcaccgtgctgctcttcttcggccattctcagagaccaagaccttgggcctttgggacatcaaatgcacagtttaaggaggtggtctttctggtcaagtaggaacaattcagctgggaatcagtctggccttgcaaaattttgagccggagctacgtgctccccttagagccgctggtttcttgacaagggattcacgtgtggttgaaaggaaaaagccagggattgcaaaagcatggaagagcttccaatgggtcaagcgttgatggtcagcttcttgctgctcagatttttcctcaaagggacatcttttctttcctcggtttctttgcattggatgaaaagctgacctttattttgacaatgc

SEQ ID NO: 213379 - DNA, 360 bp, Gossypium hirsutum
agataaggttttgtgcacctaatactaacacaaaccagacaaaatctgatccaagtttgaggtattggtttagagccaaaggaaaactttcagatgatcaagctctgcatagatgtgtagtggcctttgcttcagatctgatatttagtgctgtcagtttgaatccacaccgcagaaagggttttaagtcagcttcccttagcctggaccactcgatgtggttccaccggcatcttaaggctgatgactggttattgtttgagattgttagtcctacagccagcgtcacccgaagctttgtttcgggccaaatgttcaacagaaagggagagcttgttgtatcattgactcaagaagcac

SEQ ID NO: 213380 - DNA, 195 bp, Gossypium hirsutum
agatttggagaaacggctcgcaataacatcccgaatatgcatattaatcgagcgttaacccaataggaaaggtgatcgcttccaagccgtcttgagcttttactttagagactaccgtcacataagggtgcagggaccttacttgacttaacaggacacctttggggctatcactgacgggcctggcatttttga

SEQ ID NO: 213381 - DNA, 275 bp, Gossypium hirsutum
tatagatgcaagttttgtagaactcacttggctctccctgatgatcttgcttggagggctttccattgtcgccgggggaaagcctacctcttcaataaagcaattccattcttcatggtgaacataacagttggagccttggaagagagggagatgctctcttgaatgcctactgcggctgatatattttgctgctagctgagacagattgttggctggaaataccaagctgcacatgagaagaatcaaaagttcaaagaacgaaagtttgttct

SEQ ID NO: 213382 - DNA, 443 bp, Gossypium hirsutum
cgcacacacgcgtccgcccacgcggtctctcacgcgtgcggttcttcaacaaccgcgggtgtgttaaactacgcccacaatcgcaaacccaaacccccacttgctcagttcgtggaatctaagctccatgttgcttcgatttcaccgaacccgattcctaaactggcttacctcatctccggctcagccggtgatggggttagcttgttgaggactttgaaggctttgtaccatccaaggaaccagtatgccgtacatttggatttggaagcttcggctgaggagaggttggaagtggctgagttggttgaaaacgaaccggtttttaaacgagttgggaatgttaggatggttactagagctaatctagtgacttatagaggaccaactatggttactaatactcttcatgctgccgctattttgtttaaagaaggtggtga

SEQ ID NO: 213383 - DNA, 382 bp, Gossypium hirsutum
gtcagaaatctgtgaactcactgggtgatcttgtcccttttagcaacaaaatatataggggagatttggagaaacggatcggaataacatcaggaatatgcatattaatagagcataaacccgaaatgaaaggtgatcgctacgaggccatcttcagcttttacttcggagactacggtcacatagcggtgcagggaccttacttgacttaccaggacacgtatctggctattactggtgggtctggcatttttgaaggcgtctccggtcaggttaggctccaccaaatcgtcttcccctttaagattttctacactgtctatttgaagggaattggtgaactcccagaagagctgctttgcaagccagttgacccacaccc

SEQ ID NO: 213384 - DNA, 217 bp, Gossypium hirsutum
ccctaatggttagtgttggacggcattttatttggaaataataaaataatatgaaatggatggttaagcagtttatggtgctccagctaaaggtggagtaggggcaatacctggagtagcaagttttttaataccattcaataacaagaatggagaggctggaattgtgctaccaattacgttgccagccgaatctatggaaatatttgtgaaagaa

SEQ ID NO: 213385 - DNA, 310 bp, Gossypium hirsutum
gccaatcgttctatctctgctcaatttttatttttaaactattaacgaatgcccattggggagattccatttatgagaggtcaactgtacattcagttcactgatgacttccctgactcgctgaccccttaccacttcaatgcactaaaggcttgtgctttctcccaatgcatctttttatctttctgacatggatctggattattgccaggaaactacccttcatgattttaacattgaagaagtgatgcgtttgatacataactcaatctcaacatgtagcttatttttaatatgtgtacatgctttt

SEQ ID NO: 213386 - DNA, 374 bp, Gossypium hirsutum
cccacgcgttcgcccacgcgtccgcttaaagattgttgagagccagaattccgggaaatctagtgaatgtgctgagaatcaagcacggctgcagcgaaacctcatgtacttggctgcaattgcagattctcaaccgcaacctccggccatacatgcccaggctggagggcactacatgcagtatcagcatcaaactcaacagatgtcaccgcaatcgctaatggctgcacggtcctccatgttgtatggtcaagaaccattttctgatctccaacaacaagttctgcatggtccacttggcatgagctccaagtagagcaccggtctttacatgctgcaaagagaaactagcactacatgtggcaatggagcac

SEQ ID NO: 213387 - DNA, 449 bp, Gossypium hirsutum
cctacacttaatacataacatcctgttttgtacatagattttgttcaatgcgacatggggggcctatgatggagacgtcaaattcctgatactgttgtgattaatcctccatttggaactcgaaagatgggtcttgacatggattttctatttgtggcattgaacggtgcttctcaagctgtttattccttgcataagacctctacatgagattatattaaaaggaccttcttgagggacttaaatgctatcaacgctgacgacttgtgtgagctcccatttgatgttcctcaactatacaagtctcacaagaaaaaggaggtatacatcgctgaacatctatgtcgatttgatcccaaaatgtgtcaggtaaaagacaattagctgctcgaagtgcactttgaaaccatgcatgaagcacatataactcagttaatcattctttaaaa

SEQ ID NO: 213388 - DNA, 402 bp, Gossypium hirsutum
caaaaccctaacggctacagctctagaattcaagcctttcgaccatggcggatgttgagacggaggtagcggcggctggagtgcccaagaagagaacattcaagaagtttagcttcagaggtgttgatttggatgctctccttgatatgtccactgatgagcttgtcaagctctttcctgcccgtgctcgcagaaagttccagaggggtctcaagagaaagcccatggctttaatcaagaaacttcgcaaggcgaaaagggaggctccaccaggtgagaagccagaaccagtcagaacccaccttcgaaatatgatcatcgtacccgaaatgattggtagcattatcggtgtgtacaatggcaagacattcaatcaggttgagatcaagccccgaatgatca

SEQ ID NO: 213389 - DNA, 349 bp, Gossypium hirsutum
gccactcgttcgatgacacgtgggtttattcattggtgaaaacgcacattcagaaaggctggccattatcccttcggtcctgcacatagttctcattaatataacacgaaaattcaatgatgcccgaatgtacattacctttaatgggatggatgatgaagaggacaacagattgcccctaaatgagattcttgatgacaaaatatgagtctactaatttaagggataccttgatgcagtcgctcatgcaatcaatgattgagcagatttgaggggatactatgcatggtcattattagacaatttagagtgatctcaatgctataccaagcgctttgttttggattat

SEQ ID NO: 213390 - DNA, 433 bp, Gossypium hirsutum
gaaagaaagatttgggacgcatacaatttttttgcgcaaacatttaagacagcgatgggagcagcttgcatgcttctaccaattgatgacattgtaagtgggattaagaagatgcaggctcctggagctggccatggtccaacaaaacccaaggtcgtgactgaagcacatgcggatggtgagcaaattcttcctgatgaagatactgaatcacttaaacacacccttcgctttcaaactgtttgatgagaagatgggtctgttttgttaaaaatagaaaaagggatttgttgaacatattattgcttgtatttttgagaattttaatctgtggttggtgtgagcttttaagtcattatctttttactatgtcattctaataaaccttcaattccttaaatgcgtgaagttactaaaatagttattttaaagt

SEQ ID NO: 213391 - DNA, 398 bp, Gossypium hirsutum
cccacgcgtcccccacgcgtccgcccacgcgtccgcccacgcgtccgctaaattctctccttatttggtttcttggaaaattttctgatcaagaatggcgcaccttagcatcatcagcgcgttcttgtacgtttgctttgcagtggcgcttctctcatcgagtgttgtgacggcgctagatactgaactggcaccgtcaccttctccgtcgccattgattgaaactggagctgggtctttcctccgagcctcatgcttcgtcctcttctcttcattgatcttctcagttctttcttttcttccggattaaatattcttgacattttattgtcaaaattgaaaacctttggggtttgattgaaaaagtggtgtgctgatgtaattttaatttctttttc

SEQ ID NO: 213392 - DNA, 237 bp, Gossypium hirsutum
atcgtggggtcatgagatttattcatggttctcgcttaaggtcttctctgacatctccgtggagatttctaagagctaaagctgctggtcaagaaccttttttaaaagaactttctgtcgctactggcatgaaaccttctgttctgattggggctgaggatcgtattatttatcccggggctccctttgcaactaaaaatcggtcactgccactcattggaggtggatctaccaaaa

SEQ ID NO: 213393 - DNA, 451 bp, Gossypium hirsutum
  unsure (1)..(451): unsure at all n locations
gagaatcgttgaatgggaagggggtgaaaagattggtgaaaaggcagcttcagaatggctttacattgtcccttggggcctccggaaggttctcaattatatagcgcgaaaatacaataatcccccaatatacatcaccgagaatgggatggatgatgaagaggacaacagtttgcccctcaatgagattcttgatgacaaattaagagttcactactttaagggataccttgctgcagtcgctcaggcaatcaaggatggagcagatgtgaggggatactttgcatggtcattattagacaattttgagtgggctcaaggctataccaagcgctttggtttggtttatgtagattacaagaacggtctcactcggcatcccaaatcttcagcatattggttctcacggttcttgaaaggcggtgaaaagaaaaatgngcaggaaaactaa

SEQ ID NO: 213394 - DNA, 427 bp, Gossypium hirsutum
atcattcgccggtaaagcagtgaagttctccccttccacccctgaaatccggggaactggccgtgtttccatgaggaaaaccaccaagcctgttccttctggtagcccatggtacggtcctgaccgagttttgtacttgggtccactttccggtgagccaccatcttacttgaccggtgagttccctggtgactatggttgggacactgctggactctcagctgatcccgaaacctttgctaggaaccgtgagctcgaagtcattcactgcagatgggccatgttgggagctcttgggtgtgttttccctgagctgttggctaggaacggtgtcaagttcagtgaatctgtatggatcaaggccgggtctcaaatcttcagtgaaggtggacttgactacttggtaacccaagcttgatccatgctc

SEQ ID NO: 213395 - DNA, 407 bp, Gossypium hirsutum
ctcaaggagctgcagaatttggagcagcagcttgatactgctcttaaacttattcgttcaaaaaaaaaccaactcatgtatgagtcaatatcagagcttcagagaaaggagaaggcaatacaggagcaaaacaccatgcttgcaaagcagatcaaagagagggagaagacagtggcgcagcaacagcagcagcagccgctgtgggggcagcaagaccatggcctcaacacatcatcctttctgctgccacagcctcctccctgcttgaatatcggtggcacataccaggaagaagcaacagaaatgaggaggaatgaactagaccttactctggaacctatttactcatgccacttgggatgctttgctgcatgaaaatgggtacaattaatttaactatgcttttg

SEQ ID NO: 213396 - DNA, 439 bp, Gossypium hirsutum
ctattcccaatcctgaatacaagggcccatggaagccaaagaaaatcaagaaccccaactacaagggcaagtggaaggcaccaatgattgacaaccctgatttcaaggatgatccggatctctatgttttccccagcttgaagtatgttggtattgagttgtggcaggtgaaatcaggaacaatgtttgataacatcttagttgctgatgatgtagagtatgccaagaaactagctgaagaaacatggggcaagcagaaggatgctgagaaggcagcatttgaggaggaagagaagaagaaagaggaagaggaatcgaaggatgagccagtggattccgatgctgaggacgacgacgatgatactgatgatggtgaaggaagtgagtcagaatcaagcaaagacagtgctgaggaagatgcagtacaacatgatgagct

SEQ ID NO: 213397 - DNA, 260 bp, Gossypium hirsutum
agactatgggcaccaagaagctggttccaaatttggaaaagacccaagatcctatgaggttttgactaaaaggtttataggagatgataatggaaatgtgaaaggactttaagtggttcgtatgcgttgggagaaggatgccagtgggaggatccaattctaggatgttgagggcttataggaaattatcgctgctgtacttgtcctgctaaccctgtggttccttggacacaaatctacactgtgggaaaaatttggtg

SEQ ID NO: 213398 - DNA, 440 bp, Gossypium hirsutum
agcagaagtatcccgaggctgtgaagcattatacggaatcattgagaagaaatccgaaagatccaaaggcatacagcaacagagccgcatgctacacaaaattgggtgcattgcccgaggggctaaaagatgctgaaaagtgcattgagcttgacccaaccttttccaaaggttacacaagaaaaggtgctgttcagttcttcatgaaagagtatgacaaagctttagaaacataccaggaagggttgaaacacgatgccaataaccaggagctgctcgatggtgttcgaagatgcgtagaacagatcaacaaagccaatcgaggtgatttgagccccgaagaactgaaggaaagacaggctaaggcaatgcatgatccagaaattaaaacattctctcatatcctgtaatgagacaagatttgaatgattttcaggaaa

SEQ ID NO: 213399 - DNA, 425 bp, Gossypium hirsutum
ggcagcaacgtgggtgacggaacggaaaatagattaggatcttggttaatgctgacatgtttccaaacttccgttatttcttcttcgatgtttttaactgcaatggcggcgaatccattaagtgctaatttagctttcaataccattaaacagcagatcgggtggatggattgggctaaggcggcattcgtgccgggtttagtttcgttgcttgttgtgccattgattttgtatgttatttatccaccaacggtgaaaactagtcccgacgcgccaaagcttgctagggagaaactggagaagatggggccgatgtccaagaatgagattatcatggctgggactctatttctaacggtggggctctggatttttggaggggcgttaaatgtggatgctgttactgctgccattcttgggttatc

SEQ ID NO: 213400 - DNA, 341 bp, Gossypium hirsutum
gaggagaagaaacaagcaaagttgctaaaaagtaattgtaaccttaacaatgcagcttgcaaattgaagcacaaagattacaagcaggctgcaaaactgtgtactaaggtattggagcttgatagcgggaatgtgaaagcactctacaggagggctcaagcatatattcaacttgttgacttggatttggcggaggctgatatcaaaaaggccttggagatcgaccctgataacagggatgtgaaattggagtaccgagtcttaaaagagaaaatcaaggagtgcaacaagagggatgcgcaattttacggcaacatattcgcaaaaatgaacaagtcagc

SEQ ID NO: 213401 - DNA, 424 bp, Gossypium hirsutum
cccacgcgtacgcggacgcgtgggcggacgcgtgggcggcgccattggagttgttgagtccgataacttgagactcagatgtcgaatagcaccttcggcttacataccttcgttatccgtcagtggcagcaacggtgcagcctatgccgtggtcatagcagctcacccatcggaaccaaaccagattgctctcgggatgagtgatggagcagttcacgtaatcgaaccctctcaagataatggatcccataatccatcaaattcatctaatccttcattaactgttaaacaaccaacagagttaccttctaggtgaatattattaatgtagatacaaaaaaaaaaaaactccttttacttttggaatcaatttgccttaaaaccactccccaatgttatgtaatattcattggaattttctttt

SEQ ID NO: 213402 - DNA, 309 bp, Gossypium hirsutum
  unsure (1)..(309): unsure at all n locations
caagatccgactcacaccaaaatcagctattttaaccttcttcttcgaattgatcaacagattcgagggttttatatcgcgatgaacgatgtgtctccggtgaaggtagtttaaaccattgaggatttgtcgagctagatccgataagttagattcgtgtgatatatgagtcccttctaaagatccaacatccatgaattccaataggacctgaatttcgccattttgatcgtacatttcatggcatttgacaacgttaggatgattaacatcacgggagatttcgatctttctacngatctgacgacg

SEQ ID NO: 213403 - DNA, 433 bp, Gossypium hirsutum
cccacgcgtccgaaggatttaatctccaaaccttcttcccatttcttcattacattgttcaagaaaaaagaagcaaaaaaacatggccaaagttctgttgttcattgcactatgtgtgcttccagctttggttagtgctacacgcattctgaataatcaattggtggtagaaggctatgtgtactgtgatacttgccgtgctggttttgaaacccctaagactagaagcctagctgatgccatggttaggttggtatgctccgacaggaagagcggccaagttgtcttcaaaaaggagggatacaccgacaaaaccggaaaataccagattcgtgtatccgaggatcacttggatcagatctgtgatgcagttcttgtgaagagctcccagcttggttgtgccacaatgtcccccggtcgtgaacgtgcccgt

SEQ ID NO: 213404 - DNA, 421 bp, Gossypium hirsutum
gtgaattaaagaaagattgtcacgatggaattgtcgttaatggcggaagcgagggccttttactctcacatgccaacagcaacaagctcattatcgataccgatcccgggattgatgatagcatggcgatctttatggcatttcaaaatccagaatatgagatcttaggtttgaccaccatatttggcaatgtccaaaccgaagatgccactcgtaatgccttacttctgtgtgaaatcgcagggcgtcctgatgttcctgtagcacaaggcagccccgagccgcttacgggtgggaggccgattgttgccgactttgttcatggctctgttggactggggaatatattcctatctcctccaaaaactagcaaatctgataaggctgcctctgaatttttagttgagaaagtttctgaata

SEQ ID NO: 213405 - DNA, 420 bp, Gossypium hirsutum
agggaaccactgcttataaaagggaaggttgcaaaggtcatgattattgtggttcacttcctattaacctaagatttgattttttaaccaacgcaatgatacaagatataactaccaaagacagcaagcagttccaggctaatgttctaggatgcaaaaacattactttcgaacatttcaccgtatctgcacctgacgaaagcccaaacacagatgggattcacattgggagatcggatggggtcaatgttcttaactcggagataaaaactggtgatgattgtgtttcaattggggacggttccaaaaatttggttatcaatggagtaacttgtggaccaggacatggtatcagtattggtagtctcggattgtttaaaaatgaagaaccagttgatggagttacagtaaaaaattgca

SEQ ID NO: 213406 - DNA, 430 bp, Gossypium hirsutum
gagttcgtctcggccaagtttctcgaatttaccgcgagttagtctaatgtttcaaggagccgagatgagtgtatccggcgagaggctattatatcgggtacccgatatgaacaaagggagtgattcagtgtattgcttcacatttggcaactctgatctcctagggatcgaagcattcgtgattggtcatcatcatcaacaaaacgtgtggatggaatttgatttggtgaaatcaagggttggatttgctgagattagatgtgaacttgcaggtcaaaggcttggtattggaccctaagggccccacaaaaaagaatgtaaaaacgttgtgaaaggattttggatgggtcccacatcgtccaatctacggcccacctgttttgatggaaggtggaccattgatcggacaatgtatggtcatgattggaaa

SEQ ID NO: 213407 - DNA, 363 bp, Gossypium hirsutum
caggattcccctagtaactgcgagcgaacttggaaaagcccagcttgagaatcggtcggcatcggcgtccgaattgtagtctgaaaaaacattcttagcgactgaccgggcccaaatcccctggaaaggggctccagataaggtgagtgccccgtcgtaccccgaccctgtcgcaccaagaggcactgtctaccaatccggttgtttgggaatgcaagcctaattgggcgggaaatttcgtccaaagcttaattctggccataaagggagcgacaagcccgcaaagaaaaaaaacttgacaaaaacataacaacatttaagcgctgacggaggcagccaacctgaaatcctacttaacaaaag

SEQ ID NO: 213408 - DNA, 412 bp, Gossypium hirsutum
ggtggcagggatttagatgactttgtttctttcatcaacgagaaatgtgggaccagtcgtgatgcaaaagggcagttaacttcaacggctggtattttgtcaagtttggatgcattagtgaaggagtttgtggctgcttctgccgacgagaagaaagtagtcttctccaagattgaagaggaagttgagaagctcaagggttctactgcgaggcatggaaagatatacttgaaagctgctaaaagctgtttagagaaaggtgctgactaccccaagaaggaaattgagcggctgcagcgcatgcttgacaagtcaataagcccagcaaaagctgatgaattcacgctcaagaagaacatcctatcaacatttgcatcttcttagatcaatgtatttcacctcgtctagtgct

SEQ ID NO: 213409 - DNA, 401 bp, Gossypium hirsutum
cggacgcgtgggctccaatgccaccatctattcttagccgtggtattggttggcagggagttgcaattttggtgtcgggattgtttggaactgccaatggttcctcagtttctgtagagaatgctggccttttagccttaacacgagttggcagccgaagggttgtccaaatctcagcagggtttatgattttcttctctattcttgggaaatttggagcagtctttgcttcaattccagcacctattattgctgcattgtactgcctattctttgcatatgttggtgctgggggtcttagttttcttcagttttgcaacctcaacagcttccgtacaaaatttatattaggcttctctgtttttatgggcttatctgtgccacagtacttcaatgagtat

SEQ ID NO: 213410 - DNA, 405 bp, Gossypium hirsutum
gcagagagagagactaagggtgaaaatggcctggtgtagtttaaggtctattcacgttccaaccgtcgatgtcggattactacgcactcgctccccgttagccgctgtcggtggagtcgttgccggctcttcatttttgcgatcttcctccagaaatggctctccttttgcttgcttaagcctatccacttctcctgggattaaggaggctgtggcaactgacaaagctccagcagcattgggaccatattctcaggccatcaaggccaataatcttctctttgtctccggtgttctcggtcttattccagagactggaaagttcatctcagacagtgtagaggatcaaaccgagcaggtactgaaaaatatgggagaaatactgaaagctagtggtgctgacta

SEQ ID NO: 213411 - DNA, 442 bp, Gossypium hirsutum
cggacgcgtgggctttcacggaaattgaggaagcaactctcaactttgatccctctctgaagattggagaagggggatatgggagtatttataaaggtaatctgcgtcataccactgtggctataaagatgttgcattctaatagcttgcaaggtccatcggaatttcaacaagaggttgatgttttgagtaagatgaggcatccaaatctggtaactctgattggtgcatgtcctgatgcttggactcttatttatgaatatcttcccaatggaagtcttgaagaccgacttagctgcagaggcaattccccccctttatcatggcaaactcgtatccgtcttgctactgagttatgttctgttctcatcttccttcattcaagtaagcctcatggcatagtgcatggtgatttgaaacctgcaaacattcttcttgatgc

SEQ ID NO: 213412 - DNA, 419 bp, Gossypium hirsutum
ggacaacccagtgctgaaagctgagcaagatgcacagattggaaaaggctcccgtggagatgtaactatactgccaacccttgtgataaacaacagacagtatagagggaagttggacagaggagctgttctcaaggcaatttgtgcaggttttcaagagaccacagagccagcaatttgcttaactgaagatatacaaactaacgagtgcttagaaaacaatggtggttgctggcaggacaaaagtgccaacataactgcatgcagggataccttccggggaagagtgtgcgaatgcccgttagttaatggtgtgaagttttctggagatggttatacacattgtgaagcttctgcggctttacgctgtgaaatcaacaatggaggatgttggagagaaacacgggaaggaaggacat

SEQ ID NO: 213413 - DNA, 418 bp, Gossypium hirsutum
atcatcgtcgctcgaggtaggagtagttccagatgggaactccgtgtcggatatctgatatactttgggacggaccatgggtgacccaagcgcaccaatctgggcagctacagccaataaccaagcaccaccccaggcccaagtcggtggaatggatcgagaagctagagttctaaggtacagagagaagagaaagaacagaaaatttgagaaaacaatccgctacgcttcgagaaaggcatacgccgagtcaaggccaaggatcaaaggccgtttcgccaaaagaagtgaaaccgacaacgaagttgaccacatgtataactcggcttcttccgctgctaccgcagcagctttcatgtacgataaccagtacggcatcgtcccatccttttgaggatgtcatgaatgaatctgattc

SEQ ID NO: 213414 - DNA, 426 bp, Gossypium hirsutum
  unsure (1)..(426): unsure at all n locations
cgccgctagggtttcaagggatttcttccggtgcaaagagcagcagccatggttctcaagacggagctttgccgatttagtggtgccaagatataccctgggaaaggcatcagatttgttcgtggtgattcccaggtcttcctcttttccaattcaaaatgcaagaggtacttccacaaccgcctgaagccatcaaaacttacatggacggccatgtacaggaagcaacacaagaaggacattgcccaagaagctgtgaagaagaggagacgtactgcaaagaagccatactccagatccattgtgggtgccaccttagaggttatccagaagaagaggagtgagaaacccgaagttcgtgatgcagccagggaagctgctctccgagaaatcaaggaaaggatcaagaagactaangatgaaaag

SEQ ID NO: 213415 - DNA, 392 bp, Gossypium hirsutum
gtacagcatcaatgcaacagttgaaagaacgacttgagaaagacttgcttgaggaatctcctcaagctgctagagttaaagtactggcaagtggaaatgcaacagaaagaagattcagtgtttggataggagggagtatattggcatctcttggttcattccagcaaatgtggttctccaagtcagagtatgaagaacatggagcttcatatatacaaagaaaatgcccttaagatgaggatgacaggcttttgcatttatcctcatggttcaagatctttttcggatccgaagtatgcccatttgtgctataacaaatttcaaattgacatcgcttggaggtcaatggacgatatattcttattaaaggaaaaggcattattagcttttat

SEQ ID NO: 213416 - DNA, 431 bp, Gossypium hirsutum
caatactaaatccagatgatcttcagagaaaaatacgagcgctgttggatgagtatttctacgttaggctgcttgatgaagctttgctgtgcgtggaggaactaaaatctccatcacaccaccctgaggttgtgaaagaagcgatttcaattgccttggacaaaagcccaccgtgtgtcgagccagtctggaaacttcttgaatacttgtttacaaagaaagtttttactgcaagagacattgggaccggatgcctcctctacggtgccttgctggatgacattgccattgacttaccgaaagcaccaaataattttggagaaataatcgggagactcattttggctgggggactagattttaaagtggttaaggaaatccttaagaaaatggaggatgacctatatcagaaagctgtattcgacgcagca

SEQ ID NO: 213417 - DNA, 429 bp, Gossypium hirsutum
cccacgcgtccgcccacgcgtccgggcaaacagagttgagaaagctttgttattccttgaagagatggatgaaaaaggctttcctccttgtccggctgcatattgtagcctgatcaatagtctagggaaggcaaaacgatatgaagcagcaagtgagctatttcaggaattgaaagagaattgtgggcattcaagtgctcgggtttatgctgtgatgataaaactttttgggaagtgcggccatctgagtaaggctgttgatctattcaatgagatgaagaaactgggatgcaaccctgatgtttatacttacaatgcactgatgtcagggatgataagagcaggcatgatagatgaagctcattccttgctgagaactatggaagaaaatggttgcaccccagacttgaattctcacaatatcattct

SEQ ID NO: 213418 - DNA, 414 bp, Gossypium hirsutum
cccacgcgtccgactttccggtgagccaccatcttacttgaccggtgagttccctggtgactatggttgggacactgctggactctcagctgatcccgagacctttgctaggaaccgtgagctcgaagtcattcactgcagatgggccatgttgggagctcttgggtgtgttttccctgagctgttggctaggaacggtgtcaagttcggtgaagctgtatggttcaaggccgggtctcaaatcttcagtgagggtggacttgactacttgggtaacccaagcttgatccatgctcaaagcattttggccatctgggcttgccaagttatcttgatgggagccgtcgagggctaccgtattgccggtggaccactcggtgaagtgactgacccattgtacccaggtggcagctt

SEQ ID NO: 213419 - DNA, 433 bp, Gossypium hirsutum
ccttcgcgttctttcaatccgaattctatctgttcaccgtcaatcaacccaatggctcgtaccaagcaaacagcaaggaaatcaaccggtggtaaagctccacgtaagcaactggccacgaaggcggctcggaagtcggctccggcaaccggaggagtgaagaagcctcatcgttttaggcccggaactgttgctctgagagaaatcaggaagtaccagaagagcaccgagcttttgatcaggaaacttccattccaaaggttggtgagagaaatcgctcaagatttcaagactgatttgaggttccagagtagcgctgttgccgctcttcaagaagctgccgaggcttatcttgttggactgttcgaggataccaatctctgtgcaattcacgctaagagggttacaatcatgcccaaggatattcaacttg

SEQ ID NO: 213420 - DNA, 420 bp, Gossypium hirsutum
aaaaaaaaaaaaaaacagtttccgaatcttttacagctcgtaaactcgttgaagtgactcatggcttccgccgttgcttccgttgctaagaagaaaaccgctggctccaagaagcctaaatcagctccttcacaccctccatttcttgagatgatttcagatgcaatcgtttcgttgaaagagaggacaggatcgagccaatatgcgattgcgaaattcattgaagagaagcataagcaattaccggcgaatttccgcaaagtcttacttgttcagacgaggaagtttgttgcttccggaaagctcgtaaaagtgaaagcctcttttaagctgccttcggcttatgccgcagctaagaaaccagccgccgtagctaagaaacctgccgccgcgaagcctaaatctgcaactaccactacc

SEQ ID NO: 213421 - DNA, 434 bp, Gossypium hirsutum
cagctgttaaatcgttctccactcgagcagccaggtcctccctcaatgaccccaatcctaactactcgaaccggcccccaaaagagaccatcttgctcgacggatgtgattttgagcattggcttgttgtggtggagccgcctaaagaggatgctactagggatgatattattgatagttatatcaaaaccctagctcaagtagtgggcagtgaggacgaagcaagaatgaagatatactcagtttcaaccagacattactatgcatttggtgctttggtgtctgaagaggtctcatataagctcaaagaacttcctggagttcggtgggttcttccagattcctatctagatgtcaagaacaaggattatggaggggaacctttcattaatgggcaagctgtgccttatgacccaaaataccatgaggaatgg

SEQ ID NO: 213422 - DNA, 423 bp, Gossypium hirsutum
cccacgcgtccgcgatggacaatggaggtatgcccctgacttgccatgggctcaagacggcacgggcaatgctaacaacattttggacttgcaggattatgttccggaagatattgaaagtatatctagtttcgaacctccgctgtcccccgagtcaagttacagtaatttgccgcttggagccgaagatttcgctaaggagccaccactcgtccctcctcacctacaacttcctctccttaatctacctgcatctcacatggagatcccgccacctctgtcgagaccaaagcacgtaatcctcaaccatctgtacattcaaaaggggaaaaatggccaacccgtggtggcactcggttcgactcatcggtttcgagccaagtatgtgactgtggtgctgtacaaacccgtgcagcggtagta

SEQ ID NO: 213423 - DNA, 419 bp, Gossypium hirsutum
  unsure (1)..(419): unsure at all n locations
cccacgcgtccgtgggacgccaaaaccgtacacctaccattgttgttgtatggtcaattctgcttgcctccattttctctttgttgtgggtgcggatcgatcccttcacaaccagagttaccgggccggatgtagaacagtgtggaataaactgttgagagagaacctataaagactgaagatttgttttggtgtcactaagcttccaatgccaaaggtttgtttagttgtaatttgtgtatttcagttcacatcatgtgcagaatatacggttgatatatatatgtcatcttgtttctactttgatgtaaatatttggngnngnnacataactttatttatttgtgctaaatattaagaaaacactactttgtaaattaaatattattattttgtttttatcttactatatttttttt

SEQ ID NO: 213424 - DNA, 438 bp, Gossypium hirsutum
gtcttctctggttgacaccagcattggatttccttgtagaattgatccgcagggtacgggcacattcatattggactatgaccgaatcttgtacagacttctatggcaaaaccctgaaaaagtttcatggctggattgctagttccgatttcactgctgcattgaagttggctccagattggaagaagttcatggaagtgatagctggcaccggagatgttaatgctgacatggagaaattttgttcgactatccctccatttcttgaggagaatcacaaatatctggccaagttttgcttggatgatataaaagcatgatgtaacaagtttattgagtataggagagactaccttcctatatttttactcccgtgtttgaacttccaatatcttgcttccggctaaaccttccttttacttgaataattaatacttt

SEQ ID NO: 213425 - DNA, 416 bp, Gossypium hirsutum
  unsure (1)..(416): unsure at all n locations
cccacgcgtccggcacattcaagcctctcgttttctggccttactggagagagtggcgctggtgattatcaagattgtggggcttcatcaatgctcctcatgggagagcctccctggtgtcctccatgtactgagagctcgatcccatcagcaactcgaagtgatgctgtcatgcgttacaaggaaaagaagaagacacggaagtttgaaaagcgagtgagatatgcctcgcgcaaagcaagggctgatgtgagaaagcgagtgaagggacgctttgtcaaagctggtgatgcctatgattatgatccgttgaatcaaaccagaagctgctgagagtacaaaatnttttaaccatgcttacaaaaaggaaagaaacacatgaatgttagtttgaaagaatttattattctttgcct

SEQ ID NO: 213426 - DNA, 420 bp, Gossypium hirsutum
caatgacttacatggctgcattattgattttggattgactcctttaatgacttggcgaggggtttcgtctagatgtgcacgattcctagcaccctgtgtgatcgaatctcgaaagattactcaaaagtctgatgtctacagttactgtgtacttctcctatagatgctgacaggcaaagcaacaacccaatcatcatggcatgaagacgtggtctaccttccaaggtgggtgcagactgttgttagagaggaaaggactgttgatgtatttgatgtagagctgatgaaatatcaaaatattgaagaagagttgttgcagatgctccatatagcaatgacttgagtggcaaggctttcggacatgagacctacaatggaagaagtatctcggatgattgaagaaatttgacctttttgttt

SEQ ID NO: 213427 - DNA, 369 bp, Gossypium hirsutum
cgctgagtttaagcatatcaataagcggtaggaaaagaaacttaccaggattcccctagtaacggcggatctcgttactcaaaaagcggcggtgcatctgatggcagctggaggtcttaagtttaggtttcaaagtgggcttgggcctatattgctatgggtttggttagggtttagtagttagcaattataagtgtctctattactggttggtttagattctctattctttgatcgattttgatactgttctcttaaaatcacattgatggtgttgagagttatgcttttctttttggaatgtatggacctttagcttatcgggagccaggaagagcattccttcatgctgccgtttaaaatctgacg

SEQ ID NO: 213428 - DNA, 450 bp, Gossypium hirsutum
cccacgcgtccgattgacaacgtcaaggccaagatccaagacaaggaaggcatcccaccagaccagcaaaggctcatctttgccgggaaacaactcgaggacggtcgcaccttggccgattacaacatccagaaggagtcgaccctccatttggtattgaggcttcgtggtgggatgcagattttcgtcaagacgttgactgggaaaaccataactttggaggtggagagttccgatacgatcgacaatgttaaggcgaagattcaggacaaagaagggattccaccagatcagcaaaggttgattttcgctgggaaacagttggaagatggaaggactttggctgattacaatattcagaaggaatccactctccaccttgtcttgcgtcttcgtggtggtttctaagctctcctatgaaaatgagggttctggattttatgtgaatga

SEQ ID NO: 213429 - DNA, 406 bp, Gossypium hirsutum
  unsure (1)..(406): unsure at all n locations
cccacgcgtccgcacagatctaccatatcgtgagcaagaaagctatggagaccagcgaggaagggaatgcttcagctgtcccatcaaagggagagaaaatcgatgtgggtaaagacgtgtcagctatgaagaagggaggttgctgctcaagctaggatgatcacactaatctgaagtcagattgtttaaatgatgcggccggggtttcgatttcatcataaaccttggttttgtaaaattttcttaaaagggtgcctaaagtagatctgagcagagattgatttaatttttcattcatttttttccctgatgactgttattgttagtagacaagaggattacgaagaacagggtcttacactattgcatntaaatatgtgcttagaacgtctgtttacttagaaca

SEQ ID NO: 213430 - DNA, 422 bp, Gossypium hirsutum
tctttatccaatctaaagagatttagattagagaaggtttcagttccatccttcagtacgagcgcgtttcagctaaagaatctgcgaaaaatatccttggtcatgtgtaatatcagtcaggcttttgaaaagggcacaaacaaaatgtcagataattttccaaatcttttggaaatcgacatcgactattgtgatgatctgacggaactgggtgaagggttgtgtgatgttgttcaactgatgaagcttagtatcaccaattgccacaagctccgtgcactgcctgaaggcattggaaagcttgtaaacttggaagttttgagactaacatcctgcactgacctcatgtcgttgcctgagaccattgggagcttatcccagctcactattcttgacatttccgactgtctaagcatcaaaaa

SEQ ID NO: 213431 - DNA, 432 bp, Gossypium hirsutum
ctttagtcaaggatatattaaacagggcagtacaggtaggcgtctcctaaaacttacgggatctgaattccgactccactcagagatggcaacgggaacagctccaccaagaggaagtgcagcagcagcagcaagcctgcgcaggaggagaacaacaagcggtgggggtgcctcgggaggggctgctggtactatgcttcagttctacaccgatgatgctccaggactcaagatctctccaaatgtggtgcttgtaatgagcattggtttcattgcttttgttgcagttctccatatcatgggcaagtttgttcgtagggactaggaagtattccaagcgtgtagcaaacactttttctttttttttggtcttaacaggagcaaacacttcccattgttataatttttcagttttccttattcctggatttg

SEQ ID NO: 213432 - DNA, 445 bp, Gossypium hirsutum
gaacgacccacgcgtgcgaatacacggaggggagtggcgagaacgatattgtgacaccaaatgagttcaaggagatggtgggcgagttgttcttgcttaacggggtgctaaatatcggtgactcgatcccttggctcactttcctagatttgcagggctatataaagagaatgaaggcattgagcaaaaaattcgacaggttcttggagcatgtgttggatgaacacaacgccaggagagaaggggcggaagattatgttgcgaaggacatggtggatgtgcttttgcagctttctgaggatcccaatcttgaggtcaagcttgaaaggcatagtgttaaggcatttactcaggacatgatagctggtggaacagagagttcagccgtgactgtagaatgggcaatctcggagctattgaaaaaacccgaaattttggcaaaagc

SEQ ID NO: 213433 - DNA, 417 bp, Gossypium hirsutum
acgactagttctaggccaagtgtatatccatcgtctgatactttatgagattttgtggaggtggcactgcaatttggaatgatcatgatgtttgcctgtgcgtttccccttgcatttgctttctctgccttgaacatcattgcataaatgagaacagacgcctttaagctgcttgccatgttgagactgcctgttccacgagctgtcttcacaattggagcttggcttaacatttttcagttcctaatattgatgtcaatatgcaccaattctgcacttctagtatggttatacgatcaggaaggaaaatggaaacttgatcctggccttgcagccattcttgtaatggagcatgttctgctattgattaaatttgtgttctaccgctttgttccctatgaaccttcttttgtgaga

SEQ ID NO: 213434 - DNA, 291 bp, Gossypium hirsutum
aatacacggaggggagtggcgagaacgagattgtgacaccaaatgagttcaaggagatgttggacgagttgttcttgcttaacggggtgctagatatcggtgactcgatcccttggctcactttcctagatttgcagggctatataaagagaatgaaggcattgagcaaaaaattcgacaggttcttggagcatgtgttggatgaacacaacgccaggagagaaggggcggaagattatgttgcgaaggacatggtggatgtgcttttgcagctttctgaggatcccaatc

SEQ ID NO: 213435 - DNA, 443 bp, Gossypium hirsutum
cccacgcgtccgcccacgcgtccgggccaaaatcctctttcagtctcgaaatctttcccctctgccacttctatattctcaggtggttggttatggattctcagcttctacgacttaacccacccaacaatctttctattaaaccattacactccccccattttccttccttcgccgcccctagtttcatccgtctttccccactttcttttccttcagctacagtcacaggatcggcttgtaagagaataaggtgtgcaatgaagtcttataagttatcagaacttagtcatgttgaggtagagagcttgaaggctcgtcctcgcatagatttttcttccatattcagtgtgatccaaccaatagtggatgatgtccgcagcagaggcgatgctgcagttagagtttatactgaaaagttcgataaagttaagctagagaaa

SEQ ID NO: 213436 - DNA, 405 bp, Gossypium hirsutum
  unsure (1)..(405): unsure at all n locations
acgcatacacggacgggagtggcgagaactagattgtgacaccaaatgagttcaaggagatggtggacgagttgttcttgcttaacggggtgctagatatcggtgactcgatcccttggctcactttcctagatttgcagggctatataaagagaatgaaggcattgagcaaaaaattcgacaggttcttggagcatgtgttggatgaacacaacgccaggagagaaggggcggaagattatgttgcgaaggacatggtggatgtgcttttgcagctttctgaggatcccaatcttgaggtcaagcttgaaaggcatagtgttaaggcatttactcangacatgatagctggtggaacagagagttcaaccgggacttgtagaatgggcaatctcggagctattg

SEQ ID NO: 213437 - DNA, 324 bp, Gossypium hirsutum
cttatcctcatctttgctgaagctttggctctttatggtcttattgtcggcattatctggtcatctcgggctggacaatcccgagcagaataagatactcaagtgctgcatagtattctcttattgattttatctgtagcactagaccgaaaaccatttcgatcaatatcaggttagttatggttggacagcaagtgccgcgttcgcacataaatattgatgaacatttgtttttggtggatgctcttgtcctctttgtagtagtagaaattgagtttcttttaactcttaataaaatgttgtggagctttcccttgtttgatt

SEQ ID NO: 213438 - DNA, 386 bp, Gossypium hirsutum
attggaaaacccggcccgacgcacgcgtacgctggaatggcacctacaggtgatacaagatttcaatttcactccgatcaaattggcatgggggtatttcatgaaactcaattagcaatatatcatgcctccaagatggagcgcgttcgacagtggattctacaagatgtattgcatgcacccatatcttacgcaacatactcctgtaatagtcaatctgtttatgccaccttttgcgatggtaacattggggtatttgatgctgatagcctgagacttacatgccgtatcgctccatcagtgtacttgttctcagtaatcttaaaaggaagtcaaactgtgtacccgcttgttgtggctgcacacccgatataagcaaaccaatt

SEQ ID NO: 213439 - DNA, 429 bp, Gossypium hirsutum
acgcccacgcgtccggtcttatacaaggttgctgacattcctttcttaagcaaatggaggcgtcaaattctcgatcttattgagcatgctgagacacagccgaacctcaccattggtgtcttggtctctattgtggtgattattctcacgattttcttcaagctcatttttggtgggaagaaacaaccaatagtagagaagaaaccagagggtgctgaaacatcaaatggtgaaggaagcagtggagaaaaggctgaagaggcggagaaggaagaagctgctgccgctcctcgccgaaggcgccgtgacaattgagcaaatcttaaaacaaaggtggctggtggcgactagcagtttgagttttggctaatttttgcactcgaagtggttttcgtagctgagatattatttgcctttggcattatttta

SEQ ID NO: 213440 - DNA, 414 bp, Gossypium hirsutum
cccacgcgtccgcccacgcgtccgcttttttttgttttttgtttacaacaacaatggctggacacacagtttacaccctctcagaagtgtctcgatacaaatccaagaacgactgttggcttgtcatcgatggccgagttctgaacgtaacaaagttcctggaagaacatccaggaggagaagaggtgttgttggaatcagcagggaaggatgcgacgaaagaattcaacgatatctgacatagcaagtcggctcagaatttgctcctcaagtatcagattggtgttctccagggtcacactttaaagaataatgaacaggttggttcaaccgaggagcccaaaaagaaagagatgagtgcattcggtatcaaggatgacctgacgcctaaatatgctgcagtcgtcgagttcg

SEQ ID NO: 213441 - DNA, 413 bp, Gossypium hirsutum
cccacgcgtccgcccacgcgtccgcccacgcgtccgcccacgcgtccgcgcgaatcaactccggattttgtaatccgccattcgtacgcggcggtgtaaaggaaaagagaggtgaggagaggaggatgttggaaaaccctacacccaccgcagctgatgccgctcctgccatcaaacgctatgctcctcccaatcaacgaaatcgttctctcggacgccgtaaatctggagagaagaatcaaggtgccacatcgagaaacattaatccagtcggggatgctgggagcagcgctatcctgaatgaagacaaccctcgtcatgctttgatacctttagaaggctgttctagaagtgatgcctctcggcttttaagcaatcgttgggcagctgtcttacatcgctaccatgataca

SEQ ID NO: 213442 - DNA, 385 bp, Gossypium hirsutum
gctaaaatgaagaaactccataacaaattcgataggttcttgagtgccattcttgaagaacacaaaaccaaagctcgacaaagtaatgggcaagtgaaacacaaggattttttaagtacgttgatttcattggagaatgttgatggcgctgaaggtggaaagctctccgacactgagatcaaagcattacttttgaacatgttcacagcaggaactgatacatcttcaagcacagttgagtgggcaatggctgagctaattcggcatcccaacatcatggctcaagttcgtaaagaattggactcagtcgttggtcgagaccgcctcgtctccgacttggacttgcccaatctaacctacttccaagccgtcatcaaagaaacct

SEQ ID NO: 213443 - DNA, 420 bp, Gossypium hirsutum
cggacgcgtgggctaaaggctacaacagaaaagttgaagctgctcttcattacctcgagcaaaaacccagggtactgaataaaaatatgccagctattttcttcggcacaaccgcacctgggacaaagagtgttcatcactaccctctttattttaaggttgacaaaggaagggataaaatcccaagaaatcctccaaattgtcatctgaatctttgaagggatatgtaacttccataatttgttgtagaaattttttgtctcggtatgtaataataaatcattagggtccagattagaaccatgtaatagtttataggcactcctcaccgagaactcccctatcggttctcctctccatacttgaagatcttcttgttctgtctccgcaagagggatttgtaatatttgctctgcaaca

SEQ ID NO: 213444 - DNA, 443 bp, Gossypium hirsutum
ctttcctatggcaattgaggactatatgactaaactaaaggacacctccacttcgggagcagtattttttgcagtttgtcgtggcaaggtcagtgaaggattagattttgctgaccatgctggaagggcagtggtcatcactgggatgccatttgccacacggacagaccccaaggttcgtctcaaacgtgagtacctggacctacaggcacaatcacccagggaaggatgtaagatgattaagttgttatctggagaagagtggtacaatcaacaagcatcaagagctgtaaatcagtcagtcggacgagttatccgtcaccgtcatgattatggagcgattatcttttgtgatgaaaggtttgctcaatcaagtcgacagtctcaaatatcagtttggatactgcctcatattaagtgttattccaaatttggggatgctg

SEQ ID NO: 213445 - DNA, 374 bp, Gossypium hirsutum
cccacgcgttcgggggccacttggtgaaagactggacccaatttacccaggtggagctttcgacccacttggactggctgatgatcctgatgcgttcgctgaattgaaggttaaggagatcaagaatgggcgccttgcaatgttctccatgtttggattctttgtccaagctattgtcacaagaaagggtcccattgagaaccttcttgaccaccttgccgatccggtgggcaacaacgcatgggcttatgccactaactttgtccccggaaaatgaacttagattatagatatgtctgtgcaagctgttacattaactgctatgtagcatgcgttgctgagtactgacgtaattcactagctgtcttttgagc

SEQ ID NO: 213446 - DNA, 423 bp, Gossypium hirsutum
atactattggatcaactgtgtcaggcgacaccattcgaaagcttgccataaatacttttactgagtttttacagggattgctgaagaaaggtgcaaaatacgtggtcgttgaagcactgccgacgacaggttgtttaccgttggcgatgacattggctccttcagacgacagagatgacatagggtgcgtgaaaagcgtgaacaaccaaagcaacgcccataacctcgtcctccaatccaaggtgtcggatctcagacaacagtttccccaagccatcattgtttacgctgattactggaatgcttatcgcacggtgatgcaaagcccagaaaaatacggattcaaagagagcctcaaagcatgttgcggaacatgggagccgtacaacttcgaggttttcaatacgtgcgggaatccttcgg

SEQ ID NO: 213447 - DNA, 270 bp, Gossypium hirsutum
  unsure (1)..(270): unsure at all n locations
cccacgcgtccgcccacgcgtccgcccacgcgtccggacccacgcgttcgtgaagnaggggcagtttccatttttgacaggacacgattgtacggcctttcaatctaaaaacgaatgtgcccaagcccattgttaattcagcacactctttatgcatctaattttacaacggcaaccttctgttctttaaccccgcttactggaagccctggaagggcaccttcctttttgaaaaaaaacattcttaaagaggaattcaatttggaaaat

SEQ ID NO: 213448 - DNA, 332 bp, Gossypium hirsutum
  unsure (1)..(332): unsure at all n locations
cccacgcgtccgcccacgcgtccgcccacgcgtccggttcgagggaggaagcatagtccagcacgtgatgaaagaagcccacaagagagacgtagcccatccccaagggatcgcagacatgccaatggttcggattacagtgggagtcccagggggaggagcagaactccagatcgtgaagctgatgctggagacggngattataagagctccgcaaaggaaaatgggaacagccgcagtcctaaccccgctcccaaagatgatcggagccctatttatgaaaaaaaaagatgatgacaatcatgcattttcgaaacccaacggattaaatt

SEQ ID NO: 213449 - DNA, 288 bp, Gossypium hirsutum
cccacgcgtccggcagataaattcaatggagttccttcagaatatggcttccggagatgactcagttcgtcaaatggttgttagagaaggaggggttcgtccattagtacgcgttttggatccgaaatcatcgacctcttcaaagacgagagaagtagcattgagggcaattgagaatctatgtttctcttcgcagagttgcataaacatgttgatgaatttcgggtttatcaatcaactgttcttcttgctacgcaacggtgaggcttcggttcaagaattggcact

SEQ ID NO: 213450 - DNA, 337 bp, Gossypium hirsutum
cggacgcgtgggtgctgatcctgctcaaactgaacggtatcacctcttcatccaggatgctaatgaatataagagaagggttcgccagcaagccaagcaatacccacctgtggtctagtctgttattaaaaaatagtaactcagactttccatgaaattgctggtaaatgccagctgggttggctgcttgcctcatgtataatgctagacttggcttttgctaagagaaaatatgcttccttgggtatttggtaatctatataaactgtatgaaccagcattggtatttcaactctcatcggattcggattaatgggttgttctaattttatactac

SEQ ID NO: 213451 - DNA, 246 bp, Gossypium hirsutum
ctgtattgaggccttcagaaaaccgttcagaaactcaagctattgaaattgctattaccaaactgctcttaagatcatactatgacattgttaggaagaacatagaagactctgtgcccaaagcaattatgcacttcttggtaagtttaaaccgagtagatttgctaattgtgtattttttggtttctttctgctatctatccatgttcacattcaagctcctgatgactggaattcaaaaacgca

SEQ ID NO: 213452 - DNA, 261 bp, Gossypium hirsutum
cccacgcgtccgaaaaagaaaatttcgaagagagagagaaaaaatgtttgcatacgatcgcgtaagccactcgagtgccaacaaggcggatgagatagatctagaatcaggggagactttgtacccgggactcagctacggcgaagaccaactccggtggggttttatccgcaaggtttacggcatcttggcagcgcaagtggttctaaccaccgtggtatccgccttcgtggttctttcggcttcggtcaacgagcttct

SEQ ID NO: 213453 - DNA, 321 bp, Gossypium hirsutum
cggacgcgtgggattcagctgcatgctatgcgatatggaacagttccgatagttgcctctactggtggacttgttgacacagtcaaggaaggattcacagggttccaaatgggagctttcaatgttgaatgtgatgaagtggatccaagtgatgtgattaaggtggtaaaaactgtcaagagagctcttgcaacatatgggactcaagcactgaaagaaatgatccagaattgtatggcacaagatttttcatggaagggaccatcaaagttgtgggagaagatgttggtgagcctcggggtggctggcagtgaaccttgc

SEQ ID NO: 213454 - DNA, 409 bp, Gossypium hirsutum
ctcctccagttgaagccttaaaacctgcaaacagcaccgcagcggagaaagctgcagaaaggagattttgaggtaatcttaagtaattaattggttggtttaggggcgaaatgggaaacgaagcaaaaaccacctccaacgtgggaggaggaggattcagggcgagaatggaacactacatatatagcggtgaaaagaagcatgtaatggctggcatcgccatcgtcgccctcgtttttggtgccccttggtttctcatgaaccgaggaacaaagcatcagtcacaccaagattacatggagaaagctgacaaggcacggagtcaacgactttcttcttcaaaataatagttaagttaatcaattgtttccttcagcagctttttgattgtcagcgcgggagctgctac

SEQ ID NO: 213455 - DNA, 255 bp, Gossypium hirsutum
cggacgcgtgggcaagaaatcatggtaagtctcaaatcacttgtatctctcagttcccgatccgctgccgtagcactacttgttttggtggtttcagtggcagtgcagacccatactacaaatgcacaaagctgcccgaccgagctgacgagcctgaacgtgtgcgcacctttcgtgggtgcccgtgcagctgtggctaaccctagcattgactgctgtaacgcactccaatcggtgcaccatgattgcctttgc

SEQ ID NO: 213456 - DNA, 431 bp, Gossypium hirsutum
cccacgcgtccgcccacgcgtccgggaacagatacccaaatcaaagaaatcttcactattcaaaagagagctagatttacagacatgaaagctctggtgtttttggtggcggccaacggcataactgcagcttactcattggtacaaggagtgcgttgcgttgtgggtatggggagaggaagtgtcctttttagtaagcctctggctttggccattttttctggagatcaggcactggcatacttgaatttggctgcagtgggagctgcagcacagtcagcggcgtttgctaagttggggcaaacaaagcttcaatggatggtgatatgcaacatgtacgggaaattttgtaaccaagttggggaaagaatagcagtgtcactactagttagcatctgcatggtgggcctatcttgtatctcagcatttgg

SEQ ID NO: 213457 - DNA, 408 bp, Gossypium hirsutum
cccacgcgtccggcagataaattcaatggagttccttcagaatatggcttccggagatgactcagttcgtcaaatggttgttagagaaggaggggttcgtccattagtacgcgttttggatccgaaatcatcgacctcttcaaagacgagagaagtagcattgagggcaattgagaatctatgtttctcttcgcagagttgcataaacatgttgatgaatttcgggtttatcaatcaactgttcttcttgctacgcaacggtgaggcttcggttcaagaattggcactgaaagtaacgtttaagttgtgtagcgcatcagaagaggctaaaaaggcaataagagatgccggtttcatgcctgaacttctcaaattgctcgatgcaaagtcatatgaagtgcgtgaaat

SEQ ID NO: 213458 - DNA, 415 bp, Gossypium hirsutum
cccacgcgtccgagcagctcgaagacggccgcaccttagccgactacaacatccagaaggaatccactctccacctcgtcctccgtctcaggggtggcgccaagaagaggaagaagaagacctacaccaagcccaagaagatgaagcacaagaagaagaaggtcaagctcgcagtgctccagttctacaaggtggatgagtccgggaaggttcagaggctgaggaaagagtgtcctaatgcggagtgtggggccgggactttcatggccaatcattttgataggcactattgtggtaagtgtgggctcacttacgtttaccagaaggctggtggagactgagcaacgtccgattccaccttcaagaaaaaaaaaaaaactgaaatcaatagtttatttttatcagtatgagtagc

SEQ ID NO: 213459 - DNA, 299 bp, Gossypium hirsutum
attccttgctgccacggtgcacttgaataaactggaaagggaagagaatctggtgggtgccttctcctttttcgacaaagatgggagtggatacataaccattgatgagcttcaacaagcctgcaaagagtttggattaagcgacgtccatctcgacgagatgatcaaagaaatcgatcaagataacgatggacaaatagactatggggagtttgcagcaatgatgaagaagggcaatggaagtattgggaggagaactatgagaaggacgatcaatttgggagacgcgttcggagtga

SEQ ID NO: 213460 - DNA, 293 bp, Gossypium hirsutum
gaagaagtctgggcctgaacttcctcaacttttgacccaattctctgctggcattgccgggactggtcttgctgttgtcttttctgttttctgtaaggtagcgtatgtgagagccccattgtgtacatctaacctctttagcactagccttggtttcgggctagtttggctctcctgggcagttaacagactgagggacacgattgtacatatcagcaagaatactggcaagttggatatgaaagaaaaagagatgatttagagagttgagaaaagtgttgatgacatctact

SEQ ID NO: 213461 - DNA, 369 bp, Gossypium hirsutum
aggaggtgacttcaccgccggaaacggtaccggaggtgaatccatctacggatcaaagttcgctgacgagaacttcatcaagaagcacactggtcccggtattctctcaatggctaacgctggaccgggaactaacggatctcagttcttcatttgcacggctaagactgagtggctcgacggaaagcacgttgtgtttggacaagttgttgaaggcatggatgtggtgaaagccattgagaaagttgggtctagcagtggaagaacttccaagcccgttgttgtcgctgactgcggacagctctcttagagaagaaaaagagaactatgtgttaagctgggatgttgtctaatgtctagaatatttaa

SEQ ID NO: 213462 - DNA, 357 bp, Gossypium hirsutum
gatcagtagagctccgctttttgcagagacaaaaatggaagacaaaacttctcagttcaagagtgcagacattgacgagaaaggtatcagaaaggagaagccagaggagttggtcatggcccttgctgaagcaaaggcagacgcaatcttacagaggcttcctgtcagtgattatgtaaaggaagctgagccaacattactaattacttctgatcaagtggtggtctatgaaggtgttataagggaaaaaccggccaatgaggaagaagcacatcaatttataaaaggctattcaagtgggcatgctgcaactgtgggatctgttctagttacaaaccttaaaactggattcagaaa

SEQ ID NO: 213463 - DNA, 388 bp, Gossypium hirsutum
agagaatgtacaattagccacagaatttgatattgtcaagtcggatcctgcgactgggattgcaataaatggtacctctgaacacgtccgcgcctcggtcgaggctagcctgaagcgccttgatgttgattacattgatctctactaccagcacagggtcgacactaaaacaccaatagaggatactatgggggaactgaagaagctggtagaagaggggaagataaagtacattggtttatctggagctagccctgaaactataagaagggcacatgttgttcatcccgtctctgccataaaaatgaagtggccgctttggactcgcgatagcaaggacgaaataatccccctcttcagggaacttgggattgggataggtccatat

SEQ ID NO: 213464 - DNA, 455 bp, Gossypium hirsutum
ctgtctcgcttgtgagttggattgaggggaaggctgaattgtctctggttgttgccttgatatcacactattctactgcaactagccagcttgtgaagaaatgtttggatgtgtggagtgtgtagctcagtggagtgtttctcgtgaacctcataccatgctattgcaatgaactgcagttgctgtttggagtggaccggaattttcatggaggtgcatgataatccattaaatgcaccggttgatggtcccactcaatggccactgcgccatttggaggaacttctggaagagctaattgcaatagctggagtaagcaaagggaagaaacgcttcaacattgatctcacaccctattcaggttaggaagattccaagagttgttcgagtggataagcaagtgattgtttaccgttaaagcacgtttaagtagaaacagcggttgattcttgaat

SEQ ID NO: 213465 - DNA, 427 bp, Gossypium hirsutum
caaattttgtatgagggaaggaactgtaacaatgatcccgggcaaaggtcgaccactgactcaggaagattgtgaaggcggaaagtttgcacctttgatgctttttgactgcaggggttacgagcctgtagggtttgtatttggcgttggctggaaggttgaatctctggaaggaactaaatttgaaggtattgacttatctggagatgacttctgaatatgatgagaagggagagtgccctgtgatgatatccaacctccgttctacttttgaaccggtgaagtagagtaatactgcacactgttttagtaaataaaaactaacaggtcaccaagaatgaggtagaaaccattgaccggaatacatgttggcattaagctattatatcctaaggtggtctgatgtgaaacattacaatttggtgca

SEQ ID NO: 213466 - DNA, 394 bp, Gossypium hirsutum
cttggtgcttctgtttttgatgctctttatgtctccatatcaaggagaggttactcaggtgcaccgccggcggcagtgacggctagctttggtaggcctggagcgatggggaaagtggaacgaagatatgcgatgaaagagtcgtcgtcgtcggagacaagggcttattcttcagcttgggcgcctgaccctgttacggggtattaccggccggagaactgtggggctgagatcgatgcggcggatctccgggagatgatgttgaatcacagggttagatcacagtagaaacttgccaccgcatgtgatcaccgtagcagagcatagcctgaatgttttgcaaatgtttgggtgcctttgtattttgttttggttttgagttcaaaatctttta

SEQ ID NO: 213467 - DNA, 365 bp, Gossypium hirsutum
cccacgcgtccggcgagcggccgctcgcgatctagagcacgtcctccttattttcagatgatcaaggaggcgcttttggctttgaaagagaagagtggttcaagtccgtacgctatagccaaatacatggaagagaagcacaaggcggtgcttccagcgaatttcaggaaaatcttaggtcttcagcttaaaaactcagctgccagaggcaagctgataaagatcaaggcctcttacaagctctccgaagccggcaaaaaagagaaagcccctgttacaaaagctaagacagaaaaaaaagcttaacccggcttcaaacccgaagaaagctgaggctacaaagaagccaacaaaagagagtcggg

SEQ ID NO: 213468 - DNA, 280 bp, Gossypium hirsutum
cccacgcgtccgccagctataatgtcctactgggatcttagccaagctgagaggagcaagtacgggattttggataacttgattcgattcagcttcggggttgaagacttcgaagatttgaaggccgatatactgcaggccctggagaccatagcttaaatagcgttttgatgtgtttagtatttttcctagtctaaatggagcatgttgatctccaaaagtactttctgttgtgtttgattttggtagatccacattggttgaatgaagtcatgatttt

SEQ ID NO: 213469 - DNA, 319 bp, Gossypium hirsutum
cccacgcgtccgagcgcactgagcagatgaactacctgcgtctcgcttcccgactcgatgctgtagttgccaggctcgatacccaggctaagatgaccaccatcaacaagtccatgggaaatatcgtcaagtctctcgaatcttccttggccaccggcaatttgcagaaaatgtcagagacaatggataaattcgagaagcagtttgtgaatatggaggtccaggcagagtttatggagagtgctatggctggctctacttcattgtccacaccaggaggtgaggtcaacagcttgatgcaacaagtggctgatgatta

SEQ ID NO: 213470 - DNA, 352 bp, Gossypium hirsutum
cccacgcgtccgcccacgcgtccgcccacgcgtccgcggacgcgtgggttcttattcttcttcttctttttctccttaccttgctaactctcttgggtcactttgcaaggcttgtaaacctgaggttgaagtggaagcactggtaatccaggggccaaagctggggacagtgatgagccaagtgaagaaacttgaggtttcagtgttggtactgggtcaaaaaaggcattctccatttctaagctgtgtttgtgggagcagcagcacagatgagttcgtggagcggtgcatcaacatgcagattgttaaccattggggttaaaggcaaagcaaggcgtggggggctatctta

SEQ ID NO: 213471 - DNA, 393 bp, Gossypium hirsutum
  unsure (1)..(393): unsure at all n locations
cttaaagagaccttaaaatggagagcagaatacaaaccagaagagatccgctgggaagaggttgctcatgaagcagagacagggaagatctacagatcaaattatatagacaagcatggaagaacagttcttgtcatgagacctagttgccagaacacaaagtcaactaaaggacagataaggtatttggtttattgcatggagaatgcaattttaaatcttccaccagacaaggaacagatggtctggttgatcngattcaatggctacaacttgtcacatacatcagtgaaagtgacacgggaaacagcacatattttacaagaccattatccaaagcgtctgggcttggcaatactatacaacccacctaagttctttgaaccattcttg

SEQ ID NO: 213472 - DNA, 370 bp, Gossypium hirsutum
cccacgcgtccgcccacgcgtccgagatcttctttcaaccgcgcctaataaccgctcggatttttctcagacgtgaaaaaaatggggctgtctttcaccaagctattcagccggctatttgccaaaaaggagatgcgtatactgatggttgggcttgatgctgctggtaaaaccaccattctttacaagctgaagttgggagagattgtcactaccattcccaccatcggtttcaatgttgagaccgttgaatacaagaacatcagcttcactgtttgggatgttggtggccaggacaagatccgaccattgtggagacactattttcaaaacatgcaaagacttattttcgtggttgatagcaatgatc

SEQ ID NO: 213473 - DNA, 413 bp, Gossypium hirsutum
cccacgcgtccgcttctcaacttagaacctacaatcttacagcaagtgatttggttaaagatcacttgcgatatttgatgggaggcagattgaatgtagaaaacgaggttctatgccgatttgttttcccggagaggcctggtgctttgatgaagttcttagacacatttagtccacagtggaatattagtttgttccattaccgcggtcagggtgaaacaggagctaatgtgttggtcggaattcaagttgggaagagcgagatggaggagtttatacaaagatcggaaagtcttggatacgagtatgtattggtaaccaatgacagcaatttccaacttctgatgcattagttaagaaataagttctcatatttatagaaatagaatatgtagctcgcaataaaggttaaa

SEQ ID NO: 213474 - DNA, 321 bp, Gossypium hirsutum
agccaacctttccgcagctcgctaatgggggcttacaagtacgtgtcggagctatggaggaagaagcaatcggatgtgatgaggtttttacagagggtgaggtgctgggaataccgtcagcatccaaccattgttagggtcaaccaccctactcgtcctgataaggctcggcgcttgggttacaaggctaagcagggttatgtagtttatcgtgttcgagttagaaagggtggtcgaaagaggcctgttcccaaaggtattgtctatggttagaccacaaacaacggttgtactcaattgaagttccagcgcaacaagcgg

SEQ ID NO: 213475 - DNA, 382 bp, Gossypium hirsutum
gcagtgtcggagctgaacgagaaggatttctggaggatgttcgatgctgacctgtatgagcatgtgcgtaggaagtacggagctgtgggaacattcatgagtgtgtactacaaatccaagaaaggaaggaagaccgaaaaagaggtccaagaagcggagcaagcccaccttgaaaactgcctatgcagaggctgattagtgagcatgggggagtttggtagattttatgtgagaagaatctttgcattctctttgttgtctctttaatttagtatttgctttcaacgatggtattatggggggtcggaactgatgttatgggataagtttaaacagtgaatgttgggggatgatttattgctatagtttaactattattgat

SEQ ID NO: 213476 - DNA, 391 bp, Gossypium hirsutum
gcatatagtaatagtaagcagtaatagcaatggcctcctccatgatctcatcggcaaccattgccaccgtgaaccgctcctccccggcacaggccaacatggtggcccccttcaccggcctcaaatctgcctctgctttcccagtcaccaggaaggccaacaacgacatcacttctcttgcaagcaacggtgggagagtgcaatgcatgcaagtgtggccgcctcttgggaagaagaagttcgagactctctcatacctgcccgatcttactcccgtacagttggctaaagaagtagattaccttcttcgctctaaatggattccttgcttggaattcgaattaaaagagggattcgtgcaccgtaagtactcgagcttacccacgtacta

SEQ ID NO: 213477 - DNA, 325 bp, Gossypium hirsutum
gtttttgttggaggaagtaggcatgccatgggggcttttgccacttagagacatcgaagaatgtgggtacgtgaaggacacaggtttcgtgtggctcaaacaaaagaagagcatcactcacaagttcgaaaagatagggaagctggtttcctatgcaactgaagtcacggctgtcgttgagaaaggcaagatcaagaagctgactggggtgaagaccaaagagcttttggtttggatcacactgagtgatatccaagtggatgatcctcccactgggaagatcacttttaagaccccttcaaggctgtttaagactttccctgta

SEQ ID NO: 213478 - DNA, 311 bp, Gossypium hirsutum
gggcaagcccttacagctacagggcagagcttgctttgaagttgaaaggtgtttcttatgagtacataaatgaggatatctttggcaacaagagcgatttgcttttgaaatacaatccggttcataagaaagtcccggttcttcttcacaacgggaaaccaattgtagagtctcttgttatacttgaatacattgaggaaacttggaagcataatccctatttgccacaagatccttatgacaaagctaccgctcgattctggatcaagttcatcgacgaaaagtgctttcctaccctttggctagctgca

SEQ ID NO: 213479 - DNA, 398 bp, Gossypium hirsutum
cccacgcgtccgcccacgcgtccgcccacgcgtccgggcagatgaatctgccggatcgatttgacatctacagtgctggtctcattttccttcaaatggcatttccatctttaaggacggacagcgcattgattcaattcaaccgtcagctaaagaggtgtgattacgacttggttgcatggaggaacaccgtcgagcctcgtgcaagccctgacctccgcaaggggtttgagctgctggatttagataatgggataggatgggaacttctgacatcaatggtccgctataaagcaagacaaagaatcaatggcaaagcagcactggcttacccttactgtgacagggaaaggctattagctttatccttcgtacaaaatctgaaagtgcaagtcttt

SEQ ID NO: 213480 - DNA, 358 bp, Gossypium hirsutum
gcccaagctaatttccactcttttcttcttcttcggtttctgtaattttggtttaataatggcgaataccgagttgaaatccgataatttgtttgagatgatgaaagctcacttggctagtgatgctggtaaagagctcaccaagaagatcggcctcgtttaccaaatcaatattgcccccaagaaaattggatttgatgaggtttcttactttgttgacctcaagaaaggagaggttaccaaaggtaaatatgaagggggaaagcctgatgctatattttcgttcaaggatgatgattttatgaaggttgccactggaaagatgaatccacagattgcttttatgaggggtgcgatg

SEQ ID NO: 213481 - DNA, 357 bp, Gossypium hirsutum
cttcaggaagctgcagaagcataccttgtgggtctctttgaagacaccaacctgtgtgcgatccacgccaagcgtgttactataatgcccaaggacattcagttggctcgtaggatcaggggcgagcgtgcttaatttccaagtgtgttaatcacacacttagaatggagaaactattgtttgttgttaggcaaatgtgttgtactatttttttatgtttatttttaatcctcttttaggacaagattaaatgataggtttatcttagtgcgtaagttccaatgttatgatgaaatggggttatggtggagagtgtgatgtctgatattttaatggataagatcttatgtcttgtat

SEQ ID NO: 213482 - DNA, 374 bp, Gossypium hirsutum
gcaacatcacgccttattgtgcatgaaagtattgcggcagaatttttggacaggcttgtgaaatggagtgagaacattaaaatttcagatcccttggaagaaggttgcaagcttggccccattgttagtagagggcagtatgagaaagtaatgaatttcatttcgaatgctaagagtgagggagcaactattttgtatggtgggaatcgtcctaagcatttaaagaaaggattctttgttgaaccaaccatcatcactgacgtaacaacctccatgcaaatatggagagaaaaaagtttttggacctgttctttgtgtcaaaacatttaccaccaaaaaaaaaagccattggaatggcaaaatgatacccatta

SEQ ID NO: 213483 - DNA, 283 bp, Gossypium hirsutum
cggggcgcccacgcgtacgtttcatgaagctgcaaaagcataccttgtgggtctatttgaagacaccaacctgtgtgcgatccacgccaagcgtgttactataattgggaaggacattaagttggctcgtaaggtaatgagcgcgctctctttaatggcaagggtgaaaatcacactgatggcggaaacttaaccatcaagcgtcgaaggcaaatgtgttggactatttttttatgtttatttttaatcctcttttaggacaagattaaatggattggttttt

SEQ ID NO: 213484 - DNA, 417 bp, Gossypium hirsutum
cccacgcgtccgcccacgcgtccgcccacgcgtccgcggggataattggaggacagctcaagctgttgctagggaggtgggtatccgagatgttagggcagaggtaatgccggctggaaaagctgaagttgtgcgatcattccagaaagatggaagcatagttgctatggtgggtgatgggattaatgattctcctgcactagcagctgcagatgttggtatggcaattggggcagggacagatattgccatagaagctgcagactatgttttaatgagaaataacttggaagatgtgatcacagccatcgatctgtccaagaaaacatttaaccggatacggtggaactatgtttttgcgatggcgtacaatgtggtggcaataccaattgctgctggggttttgtatccatcatt

SEQ ID NO: 213485 - DNA, 278 bp, Gossypium hirsutum
cccacgcgtccgtgttcacaagctcatgcacctagaggaactgatagatattttccttggacacgattggccgctcagcatcactgattatgggaactggcaatgacttgtttgctgcaaaaaaaaagattcaaagatgagatccagcaaggaactcttggaagcaaacctgctgctcagctgctcgaaaaactcagaccatcgtattggttttcagctcacttgcactacaaattcaccgctctttgtgaacatgaaaaaggtggtcgagtgacaaa

SEQ ID NO: 213486 - DNA, 445 bp, Gossypium hirsutum
tcgcccacgcgtctcgctatttaatatgaacctatcgacgaggttgccatccaaaatctgcggacgtacaaagaaaagaaatttgttgatattagcaaggaagatttagaacttggtgatgaagatgaggtaaaagagagggaaactaaacaagaatacaaccttctctgtgattgggtaaagcaacaacttggagacaaagtggccaaagtccaaatttcgaagcgtctatcctcttcacctagtgtgcttgtttctggcaagtttggatggtcagccaacatggaaaggttgatgaaagcacaagcccttggagatactgcaagtttggagttcatgaggggaaggaggatactagagattaatccagatcatccaattatcaaggatttgaatctgcatgcaagaatgcactcgaaagcagtgatgccaagagagctgttga

SEQ ID NO: 213487 - DNA, 356 bp, Gossypium hirsutum
cccacgcgtccgcccttgatgagatctctcccttgacatttagcgtcgggaacaccatggagcgtatatctgttatagtctcctcaatcatcatcttccacacgccggtccagcccatcaatgctctcggagctgcaatcgccatcctcggaaccttcttgtattcccaggcaaaagcgtgaggaaaatcggggttttgagagtttagattcatcatgtaccatagatgatgaaaaaaagagcaaatatcatctggaagaagttacctcagatgagatcatgttttaatgacttttgtctttagtattggattgatgctggattatcgtcatagtgtagatatatataataatgat

SEQ ID NO: 213488 - DNA, 430 bp, Gossypium hirsutum
aattaaggatccaaaagccagtcttgatttttactctcgtgtgttgggcatgtcgcttgttaagatagtggatgttccagaattgaagtttaccttgtactttatgggctatgaggatgtttccaaagctccaagtgatccatacggtagaacagtttggacctttggaagggcagctaccattgaattaacacataattggggtactgaaagtgaccctgagttcaaaggatatcacaccgggaattcagaacctcgtggctttggtcatattggcatcacggtggatgatgtgaataatgcatgcgagagatttgaacgcctgggagtagaatttgtcaagaaattaaatgcacgcaagatgaaagggattgcattcattaacgatcccgatggttacttgattgaaatttttgatttgaaaaccatt

SEQ ID NO: 213489 - DNA, 277 bp, Gossypium hirsutum
tcgaatatcgattccgatgatcgagtcaaaattttgaaatctttattcaatatagctggagcggatcccaacaatcaaacaattataaaaaaatctattgtaataaaagaaataagtgaaaaagttcctcgacggtcatacaaattaatcgacgatttagaacaacaagagggagaaaacgaggaaaatgtaacagcagagcatgaaattcgttcaagaaaatccaagcgcgtcgtgatttttactaataaccatccaaacgccgatgcttatacta

SEQ ID NO: 213490 - DNA, 389 bp, Gossypium hirsutum
caaaaggaaaaatcgatggatccagacgctgtagccaaggcttttgtcgatcactactactggacattcgatgcgaaccgggccggtttagccaatctctaccaggaaggttccatgttgacctttgaaggtcaaaagatccaaggatctcagagcattgtcgctaagctaaccagccttcctttccagcagtgcaagcacaatatttccaccgttgattgccagccatctggcgccggcggcgtcctcgtcttcgtctctggaacactacaactcgccggcgaacaacatgctctcaagtttagccagatgtttcatttgatgccaacaccacaaggaagcgtttatgtgttgaatgacatattcaggttaaaactacgcgtgaagag

SEQ ID NO: 213491 - DNA, 387 bp, Gossypium hirsutum
gtgaagctgatcccttggattctcaggtggtcagcattgcgaaattccaagggggtggtgcattcaatgtcattcccggattctgtcaccattggtggcactttcagggcattttcaaaaaaaagttttcttcaactcagacaaaggattgaggaggttttttcgaaacaagcaagcgtgcaaagatgcaatgcgacagtgatcttcgacgaaaggtccatgtaccctgtgaactcaaacaacaaagagttgcatgagcatttcagaaaggttgcaggggagattttgggctttgagaacattatagaaatgcaaccgcagatgggaagaaaagattttgcattcttttctgagtcgatccctggactttttttctttcttgggatg

SEQ ID NO: 213492 - DNA, 305 bp, Gossypium hirsutum
cccactcgttcgtctcaacacatgtgatgggaacctttggttacttggctccggagtatgcgatgaccggtcaccttcttgtcaaaagtgatgtttatagttatggggtggttctacttgagctcttaacagggaggaaacctgtggacttgttacagcccccgggtcaagaaaatctcgttgcatgggctcgtccactccttacagacaaagaaggtctggaaatggtcatcgatccagccataaaatctgatatctcacttgatagcatagcaaaggtagcggcaattgcatcaatgtgcgtg

SEQ ID NO: 213493 - DNA, 423 bp, Gossypium hirsutum
ggaacaaagctgatctagtggacctcagagccgttccaactgaagacgctggtgagtgcgcaggggatcagggcctattcttcgccgacacgtccgctcttagcggggacaatgtggataaagcttttttcaagctgctgcgtgagatttacggtgtgctttgtaaaaaatccttggaatgtgggaatggaaaactcaacggtgctgatcacgccaccgcgttgaaaggatctaagattgaggtcatcgctggtcctgatttagaaatgagtgagatgaaaaaattatctacctgctcttgctgatcttgctttcatttaaaggaatggatgctttattaaccttattttattcgatatttgcatttgtgctcttgggttggttgtacatttcaatcatatcgcatattatatgtatgaatat

SEQ ID NO: 213494 - DNA, 430 bp, Gossypium hirsutum
cccacgcgtccgcggacgcgtgggttcatcacaacataggtcgtcgaaaggatctgggggactcaccaaagcacgaaagccaggatctttcagaaaatggattcctattcgaagagtgcataaccgcatggataagctcacactaacccgtcaattttggatccaattcgggattttccttggggggtatcagtaaggaattggaatgtaataatattgattcatataagaggaaaaggttctctattgattcaaatgctgtacctatgggatagggatagagaaagaggaaaaaccgaagatttcacatactgcttttgatcgaaaaatcaatctgatttatttcgtacccctcgctcaatgagaaaatgggtcagattctataggatcaaacctatgggacttatggaatgatggaaggggaatatat

SEQ ID NO: 213495 - DNA, 434 bp, Gossypium hirsutum
  unsure (1)..(434): unsure at all n locations
gaagaaatgaagcttctggctgaggtggaccaaccaggcagccacattgacaatggtgggacccagctgagcttcgttctttcacgcaaggctgctagtctggtgagtcttcaagctcgccttgcccggttccagcatcgactgaaagagcaggagatactgagtcggaaaagagttcctcgttgatgccagctctttgttctctgctttcattgctgcatcagactctgtccatcgatgcacggagctgcattaaggtcttgagaggaaattcagcagtgtgcaaagatcctgatcctatttcccccaacatcaaacgttgcagatcgcgtttcttcaaacgcaatggcaaagataattcangtgcaaatacttgtgtgatgcttgatttatcaaaatgtgtattgttttagatgaatctgataatggtctgg

SEQ ID NO: 213496 - DNA, 401 bp, Gossypium hirsutum
  unsure (1)..(401): unsure at all n locations
ctgaaacgcaaatctcgctttcggaaaatcctcaaatggcagaccaaccgcaggggtatgaactcaacaatggaaccgtggttgttaagatcaccaactatggctgcactatcacctcattgtctgttcctgacaaaaacggtaaattagccgatgtcgtcctgggattcgacactgtcgaaccgtacgtgaaaggtgcttcaccttattttggatgcattgtgggaagggttgcaaacaggataaaaaatggcaagtttactcttaatggaacggagtacactttgccaatcaacaagcctccaaacagtctccacggtggattcaagggttntgacaagaaaatatgggaagtagcagaatataagaaaggcgacaaaccctccattacttttaaatat

SEQ ID NO: 213497 - DNA, 447 bp, Gossypium hirsutum
tcggtaattgggaggtctccttgttgttagaataggtccacatacaaaggatcatgggctaggaaagaatattagcgtttgataacttacatccaaactcatggagagggttgttggagatcccttccgaaagctgctggccttctccgttgtggtaagagttgccggcttcgatggattaactatctccgccctgatgttaagcgaggtaattttaccgacgaagaagatgaactcatcatcaagttacatagccttcttggtaacaagtggtcaatcatagcagggagactacctgtgagaacagataatgagatcaagaatcattggaatacccacataaagaggaagctagtgagcagaggtattgaccctttgacacatcgaccggtcaatgaacaagctgcaattcacaccatatatacagtctcatcaacagcagttcta

SEQ ID NO: 213498 - DNA, 379 bp, Gossypium hirsutum
gtcaaaataccagttactttgatatatgatgatatcaaaagtacatatgatgacattaagcctggcagcatcattccatataggctgaaagttgatctcattgttgatgttcctgtttttgggaggttaactttacctcttgagaaaactggagagatccctataccttacaagccagatatcgatatggagaagatacactttgagagattctcttgggaagaaactatagcagttcttcatttgaaattggagaatatgaatgactttgacttgggactcaatgcccttgactatgaggtctggctatctgaggtcagcattggatctgcagaacttgaaaaatctgcaaagataggcaaaaatggaatcagttata

SEQ ID NO: 213499 - DNA, 432 bp, Gossypium hirsutum
gccgagtcacggaggttactctcgactctgctgcttattccggttctctctcttcgatttgctggaacctcccttacttgcaaacccttgacctctccaacaatttcttctccggcaggattccaggctcactctccaacttgactcggttaactcggctgggtctttcaaggaatgcattttccggtgaggtaccagcctcgattgggtccttgtctactcttgaagaactctacctcgataacaacaacctacaaggtcctatccccccgacttttaatggtcttggtagcttgaaaaggctcgaaattcaatcaaacaacatctctggtgagttacccgagttgggttcactcaaaaacctgtactttcttgatgcaagcaacaatgtcatttctgggtatttgcctacaacgctgccaccttttttag

SEQ ID NO: 213500 - DNA, 364 bp, Gossypium hirsutum
cccacgcgtccgcccacgcgtccgcccacgcgtccgctcaccatttttatcatctcttggtcggcgttgagaaaatagctccttttggtttgtagtctgtactaacggaactaggatctttcctataatcatctaaatttgtgctttttcttttctttttttctctcatggattgtcttttgaatttgtatattgatggccctttgtgttctcacactttccttcaactactttggatttagatatgtttgatctgttaactgaaacatggagaaattgcttcctattgtttcttgtgatgtaatctgatctagtatgttttaatgaactaatattatatttgtggttttggagttaaacaaaa

SEQ ID NO: 213501 - DNA, 367 bp, Gossypium hirsutum
cccacgcgtccgcccacgcgtccgcccactcgttcgcccacgcgtccgcaaaatcaactgcttgacaatggcctctacaaccatggctctttcttccccatcattcgccggtaaggcagtgaagttctccccttccacccctgaaatccagggaactggccgtgtttccatgaggaaaaccaccaagcctgttccttctggtagcccatggtacggtcctgaccgagttttgtacttgggtccactttccggtgagccaccatcttacttgaccggggagttccctggtgactatggttgggacactgctggactctcagctgatccacagacctttgctatgaaccgtgagctcgaagtcattcac

SEQ ID NO: 213502 - DNA, 329 bp, Gossypium hirsutum
ggaagagaaactaaaagataaacctggattcgaacaccttaatgagccgttgcgggttgtgtggatgctgaacttccccaaaatataataaattctcgtttggactacgctgttgccatactaaaaaatcttctgaaacctgtggatgaatccttggataactataagaaacaacaccttatggaggtggctttactcaatggtacattaaaggaagagagttccagaatgagcccgactattaaccctaatatgtcacccttttaccggactggaatgaaacccgcccagacacgaagatgacccttattgtgacaagatgttgagtc

SEQ ID NO: 213503 - DNA, 459 bp, Gossypium hirsutum
gaaaacccgggccgacgccacgcgtccgcccacgcgtccgcccacacgtccggtttttgtaggaaatttgcctattaaagcgaagcgtagagtcttgttgaaggagttcactaagtttggagagattgagtctgttagaattcgatctgttcctctaaatgatactaagaagccgagaaaaggagctataatgttaaagcaaattaatgagaatgctgatagcgttcatgcgtacattgttttcaaaactgagcaatctgctgaggcatctttagccaataacatggctgtgattgcagaaaatcacattcgtgttgatagggcgtgcccgccgaggaaaaaaatgaaagcagagaatgctcctctctatgataacacgaggactgtttttgttggtaatctcccatttgacgtgaaggatgaagaaatttatcagcttttttgtggtatcaataatct

SEQ ID NO: 213504 - DNA, 412 bp, Gossypium hirsutum
tccactcttccgtccactcgttcgttctcatctcccaagcgaggtttcacttgcagaagcgaggctattccatctgataactcaactccggaaaaagttcaagaactacatgtgtatgagttgaatgagagagatcgtgggagtccagcttaccttcgtttgagtcagaaatctgtgaactcactgggtgatcttgtcccttttagcaacaaaatatataggggagatttggagaaacggatcggaataacatcacgaatatgcatattaatagagcataaacccgaaatgaaaggtgatcgctacgaggccatcttcagcttttacttcggagactacggtcacatagcggtgcatggaccttacttgacttaccatgacacgtatctggctattactggtgggtctggca

SEQ ID NO: 213505 - DNA, 432 bp, Gossypium hirsutum
attctcgaatctccgatgttttcgccgttgatatacatccggcagcaaagatcgggaaaggcgtcttgttagatcatgccaccggtgtggtgatcggagaaaccgcggttgttggcaacaacgtgtcaattttgcatcacgttaccctcggtgggactgggaaggcatgtggagatcggcatccgaagattggtgatggagttttaatcggagccggtgcaaccatattagggaatgtgaagattggggaaggagcaaaaatcggggcagggtcagtagtgctgatcgatgtgccacctcggaccacggctgtaggcaaccctgcaaggctcgtcggagggaaagagaaaccgtcaaagcatgaggaatgccccggagagtccatggatcacactttattcatctctgaatggtcagattatatcatttgat

SEQ ID NO: 213506 - DNA, 308 bp, Gossypium hirsutum
agaaaagtgcctagaaaacaaggatcgcagttggttggtttatttgccgatatttggtatggacatactagaccgcaaacttgggggaaatcatgtgtgaacttttattatgttgaatatgtaggaaatttcgtaataaagttgttgggattcttagtttaaaaaaaaaaaaaaaaaaaaaaaaaaaaaaaaaaaaaaaaaaaaaaaaaaaaaaaaaaaaaaggggggtcaatattaaaaatacaaaatttattaaagggggcgggcgactacaaaaaaccatttttatgtccccttaattaaaaata

SEQ ID NO: 213507 - DNA, 254 bp, Gossypium hirsutum
cggacgcgtgggtttggttctccttgctgaacttagcaccaggatccagttcaaggctggtggagagggcaagttccacactttccatcctgtggctacaatcctcagttacctcaccaaagcccctcttgttccaccaggcacaccggtggtgaacgcactgtccaagcagcgtgcaatgctggagaacatactaagggccagcattggcttggctcctgaaaacaacatgattttggaatacaagtgaaaaa

SEQ ID NO: 213508 - DNA, 280 bp, Gossypium hirsutum
cccacgcgttcgatcattttatcattcaaaaccctaaaggccgctcccgccgcaagcgcgcgcgaaaatggcagtctccgcgggattggttcttcgccgcaccatgcgagcccacaccgatatggtcactgccatcgccactcccattgataactccgacatgatcgtcacttctctcacgtgacaaatccatcatcctttggcacttaaccaaatacgaaaaaacctactgcgtctcgcgtcgacttctcaccggacactctcatttcgtccaagatgt

SEQ ID NO: 213509 - DNA, 442 bp, Gossypium hirsutum
cttacatctttttgcacttgctgactaggttgttgaactcgatttcctttatccaagtggggggattcatagaagatgggaaaaaggatatcggattaccgcagcagctgctacagaggaccaagctgcattcatacttagtgcgtccaagagaaaatcacaagatgtaatgcaagaaactttgcgtacatctgcttttcctagtacccatgtaaaggataaatggttgaaaaatctgtatatttcatccatttgctatgggaggacagtgtcctgaagtttggtattcggaagaagcaactgcagtttacaagttaaaaggcaggtaaactatcccggtctattattcaaggccttgaaattaataacagttgatgagtcttgtaaagattccatctgattgcgcattttgtcccgctaatacttaatgctttgaatcaaa

SEQ ID NO: 213510 - DNA, 254 bp, Gossypium hirsutum
  unsure (1)..(254): unsure at all n locations
tggacgcgtgggcggacgcgtgggcggacgcgtgggcggacgcgtgggttgtaacgttcctttttttaggtctgtgtgctttctcacccaaaggtctttttgttggtgccattgccatcttcgttgttttagcttgtaagcaatttatatatatatattatccagtgttgggttttcaaagcattaggggagctgcaggtgtttcacttgtgcgtaattcattatatatatatattatccagncttatttgatc

SEQ ID NO: 213511 - DNA, 437 bp, Gossypium hirsutum
cggacgcgtgggtggaggctaaggttgtggaccctgatagtggtaaggctttgaacgtgaaccagacgggtgagcttcggcttaggggcccctccgttatgaaaggttatttcagtaatccagaagcaacgacgtcgacacttgactcggacggatggctgaggactggcgacttatgctatattgatgaggatggcttcatatttatagttgacaggttgaaggagctgattaagtacaagggatatcacgttcctcctgcagagcttgaggcattgctcctttcccacccggaaatcttagatgctgcggttattccgtttcctgataaggaggttgggcagtttccgatggcatacgtggtaagaaaacccgggagcaatttatcggagacaggagtgatggatttcgtgggtagacaggttgccccatataaa

SEQ ID NO: 213512 - DNA, 431 bp, Gossypium hirsutum
cccacgcgtccggtgcttggtccttcgcacggccatttactccattgatgtgggcggtgacagctgcatttttcctcattgtgggatcagttgtgtggatccttgagcatagaagaaatgatgaattccggggccctccaaagcagcaatttgtcacaattttgtggttcagcttctctacgatgtttttttcccatagagaaaacacagtgagctcacttggacgcctagtactgattatctggctttttgtggttttgatcatcaactcaagctatactgcaagcctgacatcattcctcacagtgcaacagttatcatcacccatcaaagggattgataccttaattggtagcaatgaacgaataggcttccaagtaggatcttttactgaaggctatctgatggaagaacttaatattccaaaatct

SEQ ID NO: 213513 - DNA, 447 bp, Gossypium hirsutum
ctagattattggcctccacaagacagggatgtcaaccacaggagtctctcactccctgctggtggattgctggccgaatgtcttgagcttaggaagttatttatccatgggacggctcatgaacacttcatgatgttccttcttaaaatacctaacctcagagacgtacagctgagagaggactactatccggcaccagagaatgatatgagtactgaaatgagagcaggctcatgtagtcgctttgaagctgctctaaataggcgacacatcctcgattgaaatgatttactggtgtggagcctagccctgattagattatacacgggaagaacaggaggggtttcaagtacgaaattttcttttttcccttttctagaaaagaaactgtaaaagttcatccaaggtctgcgtttctttatatacatgcaattccctccccaactt

SEQ ID NO: 213514 - DNA, 428 bp, Gossypium hirsutum
  unsure (1)..(428): unsure at all n locations
ctcaaatcacttgtatctctcaattcccgatccgctgccgtagcactacttgtgttgggggtggtggtggcagtgcanacccatactacaaatgcacaaagctgcccgaccgagctgacgagcctgaacgtgtgcgcacctttcgtggtgcccggtgcagctgtggctaaccctatcattgactgctgtaacgcactccaatcggtgcaccatgattgcctttgcagcactctaaagatcgcttctcgactcccttctcaatgcaatctcccaccactcacttgtgcttgaaacaaaagcaatggtgctgcctgcttaatgggtaggaaaatataataacgccatggaatatcgatacctccctgtttttttctttcttttttaatgggtaataataagcaatggtggtggtgaaatggaaactaata

SEQ ID NO: 213515 - DNA, 420 bp, Gossypium hirsutum
  unsure (1)..(420): unsure at all n locations
gattantgaaacagtgaatggaaagcttattttaggggcaaggattcttcaagtaggagggttggtgaatgttttcaagcagttctttattttcagagaaggagagaagctgttaaaggcttgccaatgttatttatcaacaacagcaggccctattgcaggcttacttttcatctcatctgaaaaggttgccttttgcagtgagagatcaatcaaaatcccttgtccaaatggagaatatgtgagagtccattacaaggttgtggttccagttgagaaaataaagcgggtgaaccacagtgagaacatgaataaaccatgtcaaaagtacatgtaaattgtgacagtggatggtttcgatatctgcttcatggggttcttgaattatcacaaagctttcaaagtttgcagcaagcaatc

SEQ ID NO: 213516 - DNA, 216 bp, Gossypium hirsutum
  unsure (1)..(216): unsure at all n locations
cccacacgtactggctctgttactgtttaaacctcctccactttatatacttgaccacgtttgtgcttctctatatctaanccacactcanaatataaggagaatgattaaggctcacttttcgcactcccagtttattgatgtttcactgaaagagggcatgtttaataatgccaacgttctttttcgaacaaaattcttggatggtgtttccac

SEQ ID NO: 213517 - DNA, 409 bp, Gossypium hirsutum
  unsure (1)..(409): unsure at all n locations
aaagaattcttgtggcaacagatttggttggaaggggaatcgacattgaacgaggttggtttgttatcaactatgacatgccanattctgctgatacatacctgcacagggttggtagagctggtcggtttggcaccaacggtcttgcaattacatttgtttcatccgcttcagattctgatgtgctcaatcaggtccaagagaggtttgaggttgatataaaggagcttcctgagcagattgatacatctacgtacatgccatcataaatgaaggttcattcaacaataccagtctcgggccccaaatcatgaatcggntagtgtggttgcggatgtgtatctgtttgtaaactaatgtgtaacgccttttaaatcacatgcttgggagggagcggcagatgcactat

SEQ ID NO: 213518 - DNA, 399 bp, Gossypium hirsutum
  unsure (1)..(399): unsure at all n locations
cgaggaatgccacaaaaatcacttacagatcacaggctatcacgggccttgccgcggctgcgcatgtatgtgcaacaatcaactctttcnacaaaactgatggtgaaacacccatggctcagatcgtttctccacagatgtatccggtggacgtcgattgggaatcagatgaagaagatgaaggggatgatttggataacacgaagcttgtccccatttttgcgcacacgtgacatatctagagcacaacagaactggaattacagtgtacggtttcatggtagacaaaacttggatccacaccatattccggatcgaactagctttactgctttggctactcaacaagacaatagtaaacttgacatgaacaccatatatgacggacagaacttaacc

SEQ ID NO: 213519 - DNA, 409 bp, Gossypium hirsutum
ctgaaattttatagcaagactccttatttctccgatgtcgatcttcgaatacaacgggagggccctaatagccatggtaggcaacaactgcttcgccattgccagcgatcggagactcggagttcaactccaaactatcgccaccgatttccagaggatttataaagtccacgatcgcctcttcctcggtctctccggcctcgccaccgatgctcaaaccttgtatcaaaggcttgtctttcggcacaaactgtttcatctaagagaagaaagagacatgaatcctgagacttttgctaaccttgtttctgcgattctttactagaaaaggtttggtccatacttttgccaacctgcaattgctggattaggagatgaagacaagcccttcatttcaccatggattcca

SEQ ID NO: 213520 - DNA, 206 bp, Gossypium hirsutum
cccacgcgttcgaaatgcttaatcctgatccagagcagcatcttacagtacagaaagtgcttgggcatccatggctacaaaatgccaagaaagcacccaacgttttgttgggtgagactgtgaaagctaggctcaaacaattttctataatgaagctgaaatgaacaaaaaaaaaaaaaaaaaaaaaaaatgcaaccaattctaac

SEQ ID NO: 213521 - DNA, 441 bp, Gossypium hirsutum
atccaagacgattcgagtaatgtgacgcgcttcgttatgttagctcgggagccaatcatcggtcgcacggaccggccattcaaaacgagcatcgtattcgcgcacgataaagggacgagcgtgcttttcaaagtactatcagcttttgcgtttaggaatatcagtttgacgaaaatcgaatcccggccacaccgcaatatgccgatccggttggtatatgacgccaacgttggaaccgccaagcatttcgagtatatgttctacgtggatttcgaagcgtcgatggcagaggttagagcccaaaacgcgttggctgaggtccaggagttcacttctttcttgagggtattgggcagttacccaatggatatgacgccttggtgcccttccagcggagattaacaaaacctatgaaagttaaaaaaaaaaaaagaaaaagga

SEQ ID NO: 213522 - DNA, 279 bp, Gossypium hirsutum
taattttatacgtgataagtaccgattgaagtttcctgagcttgaatcgcttgtgcatgatcgggttgattatgctcgtgtggcgaaaaaaattggcaatgagatggatttaacccttgtggatttggaagggcttctgccttcagctatcattatggttggttcagttacagcatcaactaccaagggcaagccactttctgaagatgttttccaaaaaactgttgatgcgtgtgatcgagctctggctcttgatacttgcaaaaaaaaaggtttttt

SEQ ID NO: 213523 - DNA, 337 bp, Gossypium hirsutum
ccacgcgtccggtgagagagctcaacccggccaataatttgttgggtaaattcgagctctctggcatggcgggggcacccataggcgttccccaaattacagattgcttcgacattgatgctaatggcatcttgaatgtctctgccgaggacaagactactggccagaagaacaagattaccataacaaatgataagggtcggttgtcgaatgaagaaatcgagaagatggttcaagaagccgagaagtacaagtccgaggatgaagagcacaataaaaaagttggatcccaaaattcattggaaaactattccttccacatgaaggaatctattaa

SEQ ID NO: 213524 - DNA, 218 bp, Gossypium hirsutum
cccacgcgtacggcaaatccttcaattccgatcatcatggatggacctgggactggaggagcacctttccgaggttttctacacgaaagagtggtccttaaagaagatggcgcagaacttggtccatctctactcttttttggatgtaggaatcggaaaatggatttcatttacgaagatgagctcaataatttggtggaacaaggtgcactatacga

SEQ ID NO: 213525 - DNA, 449 bp, Gossypium hirsutum
gaaaatctttccagtttcaattttctcacaacaaaactgaaaatgtcttgctgtgcaggaaaatgtggctgcggcgctgattgcaagtgtggcagtggctgtaacggatgcagtatgttccctgacataatatagaagactacaactgagactattgttcttggtgtggcaactcagaaaatgcactttgagggatctgagatgggagttggggttgagggtggatgcccgtgtggagacaactgcaaatgcaacccttgcacttgcgggaagtgaacaacaaagagaagcagagtggcctttgtcattttaactaaataaattctattactttagtatgtatcagcaaatcttcatgaggatctggttcttaattatgtgtaatgtggcttttctgctatgtcagaatgtattatgatatttaagaaagtttgttttctattgaaaga

SEQ ID NO: 213526 - DNA, 426 bp, Gossypium hirsutum
cccacgcgtccgatcaaatcaaaacagaacttccaaagctttcagacaagactagggaggcgtgttcaaagaaccaaacaagccaagtacatggttgatttggacgttcagatccctacaactttcgatccattcgccgaggctggggaatttgatggcactggaaccaaggagtatgttcatatacggattcaacaaaggaacgggaagaaaagcttgacgacggttcaaggcctgaggcatgacctgagctacgagaaaatcctcaagagtctcaagaaggacttttgttgcaacggcaacgttgttaaagacaaagagctcggcaagatcattcaactccaaagcgatcaacgcaagaacgtgtcgcagtttctcgttaatgcctgcatcgtcaaaaagaccaaatcaagattcatggttttt

SEQ ID NO: 213527 - DNA, 435 bp, Gossypium hirsutum
  unsure (1)..(435): unsure at all n locations
caatcatacaatatggggtagtttgaattcttattgaggctttttcttcctaaagtatggatttatttcatatagcatatagaaggaaattgatttcatatagaaagtatagatagattactatgtatcgactgaaccaatgactattcatgattccataattgaatcaatgctccaaactagaggaatgttatggtaaaacttcgtttgaaacgatgtggtagaaagcaacgtgcgacttgaaggacatgatcagctgtggatgtcaaaacccaccactttccgttatgtagaaatgaaagtgctttttgctcgacatcctttgttctattataatcacgctttttgttgggttgtaatgtaaatagtacaggatggagctcgaaaagaaacatccatttttcacgggcaaggatctanggttagttaatggaa

SEQ ID NO: 213528 - DNA, 452 bp, Gossypium hirsutum
  unsure (1)..(452): unsure at all n locations
ctaagctccagtttaaaggtgcgaacaagaagggcatcccagtttcaagggacccggccgcactcttggccaagtactctgatcccttggtctacactggtccaataagggcccgaactgggcatgagatattgcgcatttcctcttatttgatgcggaactttaagtccgtgacagtcccattctttgttctgcatgggactgcagacaaagtcactgatccactcgcctcccaggatttctacaacgaggcatcctccaccttcaaagacataaagctctatgaaggcttcttgcatgatcttctctttgaacccgagcgtgaagagatagggcaggatataatcaactggatggagaagcgattaggcaccatagccgaaaatattgatcatatctggtgaatgatcttgcaggacgccatctcaagtgttntttttttcctttctcaa

SEQ ID NO: 213529 - DNA, 322 bp, Gossypium hirsutum
cggacgcgtgtgaaaatctcggtaaatgcatggtggcttgccaacaaccctgctaactggaaaaatcccgacgaatttacgcctgaaaggttctttgaagaggaagccaaggttgaggccaacggtaatgatttacgctaccttccatttggcgtggggatgaagaagatgcccaggaattattcttgcattgcccatccttggtattacttcgggtcgattggtacagaattatgagctcttgcctactcatgtgcactgctaaattgataccactgaaaaaggaggacagttcagccttcatatttctgagcattccacc

SEQ ID NO: 213530 - DNA, 406 bp, Gossypium hirsutum
  unsure (1)..(406): unsure at all n locations
ctcctgcaatgcatttgaggagtcttaactgtatttcatgacctaaagttaagactcctgcaatgcatttgaggaaacaaacacgaagaagctgaatgccaacttctctttatatatccgatgtaatagaggttgtatatgtaacaggaggaattgcgtggctttggttagggtagcacatgttttctggatgtgttgtgtccttaaaaaataatgccgatagcggcagctgtgatagttttagatgtttgttttcataatgtctgttatatcgttgtacgagtagtatgtgttgtttttgttgaaacaatcttcatatcttagtgataaatgataatgctgtgtaagcatagtttttagtttgcaataaaaaattccttcttcgggnananaaannnnnnnnnng

SEQ ID NO: 213531 - DNA, 274 bp, Gossypium hirsutum
ctttcccagagcctgtaatatcacgaccacgtttgtggacatcggcgatctcgaagctgtgaaaaatgccatcgtcgaaggaaagaccaaagtgttatacttcgagtcgatgtcgaatcccacgctcaccgtagccaacattccggcacttagcatgatcgggcacgagaaaggaacgacggtggtcgtggacaacacgttcgcccccatggttctttctccggctcggctgggtgctgatgtggttctccatagtatctctaagctcataagc

SEQ ID NO: 213532 - DNA, 426 bp, Gossypium hirsutum
  unsure (1)..(426): unsure at all n locations
gaagatgctgccgaacaagttaaaaatggtttgtcaaagattcttgttcatcattatccacttgctgggcgactaaccatcagctccgaagggaagctcatagtggactgcaccggggagggggctgtttttgtggaggctgaagctaattgtgggattgaagagatgggggacataacaaagcctgaccctaacattcttggaaagttggtttatgaaatctctggtgctcagaacttgctagagatacctcttttggtgattcacgtgactaaatttaagtgtggaggattttctattgggatgagcatgaaccactgtatgctcgatgggatngctgctatggaatttgcgaatggatggngtgaagttaccagangcttgccattaaagacccctncatttttagacagaaccatactgaaa

SEQ ID NO: 213533 - DNA, 341 bp, Gossypium hirsutum
cccacgcgtccgcagcattctctcattctttacccggaacacatataaacactaagaacaagacaatggcaccaaaagctgagaagaagccagctgagaagaagccagctgaggagaagaagacggtagctgagaaagcccccgccgagaagaagccaaaggcaggcaaaaagcttcccaaggaaggcggagctgcggccggagacaagaagaagaagagggccaagaagagtactgagacctacaagatctacatcttcaaggtcttgaagcaagttcaccctgatatcggtatctcaagcaaagctatgggaatcatgaacaagctcatcaatgatatc

SEQ ID NO: 213534 - DNA, 435 bp, Gossypium hirsutum
gcttgtcctatcacattgtttcttgtgttctatttatgatttgatgagctgagtgcctctatagttaagaaggacactgctgcggaaatggctaagaaacgagagcaggagcgccaaagactggaaaaacttgaagacacaagccgattaagtcgtcaaaggtaccaaatccacagtcgcagtaggagcaatagtcgttctcctccaagaagacatcgacgaagtagaagttctagtaggagccgtaatcgaagatatgtttctcgctcacgttcacgatctaggtcccgctcttactctcgctcgcattctcgttcaaagtctcgctcacccaggtaaaatgcttggcagtgaagacttttctctgaatgatgcttggaggctgatttaatgatggtataaaaaatacagggtaagaagccattcaaagtactg

SEQ ID NO: 213535 - DNA, 388 bp, Gossypium hirsutum
gtttgaatcaaaggggaaatggaggaagagaagggaacaacaggaagcataaacctaagcctgaatggtaaagaagagaaaataaatctgagtggtcaggttcatcatcttccattctgcatcaaattcaatggcccttgcactgtttctcagtacttcaaacccaaacttaaggggatggagattgatggattagcagtagaggaagcgcattttagaggaaggaagcttcaaggaactactatttctcttccaaatggatatgctggctttgttcttgcgaagaacaactctggaaagaggaaagcttgtgatgtatctgaaggaaactcaaacgattgggaaatgaaagccaaatttgataaattgacatattggaatcatgatg

SEQ ID NO: 213536 - DNA, 346 bp, Gossypium hirsutum
gacgattccgaagggaaccttgttccccatgtgcggaatgaatctggcatttaaccgagaattgatcggccctgcaatgtactttggactcatgggagatggtcaaccaattggacgatacgatgatatgtgggctggctggtgcaccaaggttatttgtgatcacctcggatggggagtgaagaccggacttccctacatttggcacagcaaagcgagcaacccgtttgtgaaccttaagaaagaatacaaaggaatttactggcaagaagagttgattcctttcttccaatccgttgcccttccgtaagactgcaccaccgtacagatatgctacatcgagatc

SEQ ID NO: 213537 - DNA, 383 bp, Gossypium hirsutum
gttcaattctctcatcccttgttttccttctaagccaaacgaaatctaatcatttttgaaaaatggcaccaaaagctgaaaaaaagccagccgagaagaagcctgcggaggagaagaaagccgtagctgagaaagccccggcagagaagaagcctaaggctgggaaaaagcttcccaaggaaggcggagcggctgccggagacaagaagaagaagagagttaagaagagcgtcgagacctacaagatctacatcttcaaggtcctgaagcaagttcaccctgacatcgggatctctagcaaagctatggggatcatgaacagtttcatcaatgatatcttcgagaagcttgctcaagaagcctctaggctcgcgaggtacaac

SEQ ID NO: 213538 - DNA, 424 bp, Gossypium hirsutum
  unsure (1)..(424): unsure at all n locations
acaaaatctggcaagaaggtgagcaaagcctcaaaaatccagaggctggtgactccattgacactgcagaggaagcgggctagaattgctgacaagaagaaaagaatggccaaggccaagtcagaggcagctgagtaccataaactgcttgccacaaggttgaaggagcagagggagcgccgtaccgagagtttagcgaagaggaggtccaagctctctgctgcttctaagccttctgtttcagcttagataagttttgataaaccaaaaggggtctcggtgagtacccagttttttgcagtgccatatgctgtcataatttatcgcttagtatccaatgtggtaatgttatttttccatctactatgttaagtcatctctgtgacaattatcaataactaaatngcttcatctaatgcatact

SEQ ID NO: 213539 - DNA, 433 bp, Gossypium hirsutum
acttcactccccccccccaaatcaatcagataatccttagaatgcagaacagtgaaggcagctgtttgtcttacatggcggcgtggttgggaagcagcgtggcccaagctttcttcgcgtctctcgagcgttgctcttgcattaacctttccacctccgatgatgccgatgattccgaggctcatgatctccctctcatgttcactaattgttcctccatctcttcatcatcagtcacctctatccctaacaacaacaacaacactccttcaaacgacgtcgttaatctccctgtttaggtcatggatcgcgtattgtttctagggtttcgaatcttttgtctatagttctttttagtactttgaatcttgatgtaagcttttttcttgttgtttgactcttttttttcttagtttggatgtctatgaaattc

SEQ ID NO: 213540 - DNA, 426 bp, Gossypium hirsutum
gacgattccgaagggaaccttgttgcccatgtgcggaatgaatgtggcatttaaccgagaattgatcggccctgcaatgtactttggactcatgggagatggtcaaccaattggacgatacgatgatatgtgggctggctggtgcaccaaggttatttgtgatcacctcggatggggagtgaagaccggacttacctacatttggcacagcttagcgagcaacccgtctgtgaacctcaagaatgaatacaaaggaatttactggcaagaagagtcgattcctttattacaatgcgttgcccttccgaaggactgcaccaccgtgcagaaatgctaaatggagatctccaagcaagtgtaggcgaaactcggtatggtagatgactacttcaaatatctagcagatgctatggtgacatggattga

SEQ ID NO: 213541 - DNA, 436 bp, Gossypium hirsutum
  unsure (1)..(436): unsure at all n locations
ggcggctggagtgcccaagaagagaacattcaagaagtttagcttcagaggtgttgatttggatgctctccttgatatgtccactgatgagcttgtcaagctctttcctgcccgtgctcgcagaaggtaataagaaaacagaagcaagtttcattttttttttgcaaaatatgtttttttaattgctattagtgaaaaatatgaaatgggttttccttattattattatcattattattattattattattattattattattattattataagttccagaggggtctcaagagaaagcccatggctttaatcaagaaacttcgcaagggcgtaatttgntcttccctttcctcttttcatttcttatgtttatcaattttggatttatcttagatctaaaatttgatgtgaaagttgagaattttgacttaattt

SEQ ID NO: 213542 - DNA, 430 bp, Gossypium hirsutum
cggtaagtccagatgggaagttgcttgcagtactcggagatagtgtggagtgcttgatcgttgatgcccaatctggcaaaattaccaacagcctaaaagggcatttggactattcttttgcttcagcttggcaccctgatgggcacattctggcaactgggaatcaggacactagctgtaggttgtgggacataagaaacctgtcgaagtccctagctatattgaagggaagaatgggagcaataagaggcgtgaagttcacatcggatggtcggttcctggccatagctgagcctgcagattttgttcacatctttgatacaaagttggggtatgttaattgccaagaaattgatatttttggtgaaatagctggaatatcatttagcccggatacagaagcgctctttgttggggttgctgatcgcac

SEQ ID NO: 213543 - DNA, 419 bp, Gossypium hirsutum
gttttacagaagtcaggaagctctccacaaagcttctaccgaaaatgccgaagcaaattcatgagatcaaggacttccttctcactgccagaaggaaagatgcacgctctgtaaaaatcaagaagagcaaagactttgtcaagttcaaagttcgctgctcaaagtacttgtatacacactgtgtgtccgatgctgagaaggctgataagttgaagcagtctcttcctccaggtttgagtgtccaggacctgtgaaaatagggccgcttcgagtttatcatccaattactaggtgaaagctagattttgactttgcttttatcatatttcatgcctttcaaactcaaaatttactgtaatggatttgtattctggttatttttatggatatgagtaaggtcgagttactttttaatggtt

SEQ ID NO: 213544 - DNA, 432 bp, Gossypium hirsutum
cggacgcgtgggtttctttaggcgtcttcacacccaatgatgatctagcaaaggagttatttcaaacatcagaggccagtggtgagaaattttggaggatgccattagaggaaagctattgggaatcaatgaaatcaggagttgctgatatggtaaataccggcggtcgcaaggcagtgctatcaatgcagctttgttcttgaaacaatttgttgatgaaaaagtaaaagtggatgcacgttgacatggctgggcctgtcttgaatgataagaagcatgtggcaactagatttggcatctcaactttggtggaatgggttctgaagaactcttcttcttaaatgaaagcttggaacatgctcttgtgtgacggtggcagaccgaaaaagcagaacaacatgttcgagggtgttgggttctgtaagatctgtc

SEQ ID NO: 213545 - DNA, 382 bp, Gossypium hirsutum
  unsure (1)..(382): unsure at all n locations
agctcctccaccacttcctgatgagccagagccaaaaagacagaaacttgatgatgccaagcttgttccagaagatcagttttttgctcaacatccgggtcctgcttgcattactgtgtctgttcccaaccttgatgaagggaatctcaaaggacaacttcttgagatcacagtgcatgccttatctgaaacagttggcagtttgaaggagaaaattgcaggggagattcagcttcctgcaaataagcagaaattgagtggaaaagctgggtttctgaaggacaatatgacccttgcatattacaatgttggagcaggagaaacgcttgctctttcattganggaacgtggtgggaggaaaaggtgatgagttttttgaacg

SEQ ID NO: 213546 - DNA, 433 bp, Gossypium hirsutum
  unsure (1)..(433): unsure at all n locations
gaacatccaaaagcaatatggtaagcttttgaaggacttcaacaaagggttggacaacaacaaggagatccaagagctgaaggttgatgttgagaagttcgcatcctcattcgatatgcctggcttcaagatgtccgaaatgaagtacaaggattagatctaaataaccatacgatctaattgatgttattatcagcatctgccactttttgggttgcccccatttgatgtcttatgagtgaaaggaaaaagaaagggaaaagagaaggatgcaaatgccttccacgtacggttttaagtgtcttcatttactggtcaatttgatatgatatttttcaagtttttgctgttctgtctttataagagtttgcataaaacgtatgtactaattntatgtattcttttttgttgctagaaaagttttttttttggg

SEQ ID NO: 213547 - DNA, 420 bp, Gossypium hirsutum
cccacgcgtccggttctgaagatgctcgtggactgctcaaagctgctattagagatcctgacccagttgttttccttgaaaatgagttgttatatggtgaatcattccctgtttctgatgaagttcttgactccagcttttgtcttccaattgggaaagctaagatagagagaaaagggaaggatgtgactattacagctttttcaaaaatggtgggctatgctcttaaggcagctgagatacttgaaaaggagggaattgatgctgaggttataaatttgcgttctattaggccactggatagatcaacaattaacgcttctgtcaggaaaaccaacagattaataacagttgaagaaaggtttccacagcatggtgttggtgctgaaatctgtgcatcagttgtggaggagagttttg

SEQ ID NO: 213548 - DNA, 417 bp, Gossypium hirsutum
  unsure (1)..(417): unsure at all n locations
cccacgcgtccggcgaaatatttacgaagttctaccgccatggggagaagacctgcaaggtgttatcgtcagataaaaaacaaaccttacccgaagtcacgttattgtcgtggtgttcctgatcccaagattaggatttatgatgtgggaatgaaaaagaagggtgtggatgagttccctttctgtgttcacttggtctcttgggagaaggaaaatgtctctagtgaagctctggaagctgctcgtattgcttgcaacaagtatatggctaagtatgctggaaaggatgccttccacttgcgagtccgtgttcacccattccatgtcttgcgtatcaacaaaatgctttcatgtgctggagctgatangctccaaactggtatgcgaggtgcttttggcaagcctcaaggaacatgt

SEQ ID NO: 213549 - DNA, 352 bp, Gossypium hirsutum
  unsure (1)..(352): unsure at all n locations
cagggatcaaagaggcagatatagtgctggtggttctgaccctgccctcttttataactcctccagttactgggatgagtttgtttggggtggagcttggttatactacgccactgggaattcttcctaccttcagttggctactcatcctaaacttgccaagcatgccggtgcattctggggaggcccagattatggcgttcttagctgggacaacaagcttgctggtgctcaggtgcttctgagccggttgagattgtttttaagtcctgngtatccatatgaggaaatattgagaacgtttcacaatcaaaccagcatagttatgtgctcattcttccagtttttacta

SEQ ID NO: 213550 - DNA, 403 bp, Gossypium hirsutum
  unsure (1)..(403): unsure at all n locations
cccacgcgtccgatctttacaggggtactgatacattgctgcagttggcgttttggcatttttcaaatatgggacattgcttctctaaggataaatctgacggatctgattcagaacaggctgttgagtttgttggtggaaatgtgcaccgggttacctctaaggaggattgggatcagaagttgtctgaagcgaagagagatggcaagattgttattgcaaacttcagtgcgacatggtgtgggccttgtagaatgcttgcaccattttattgtgaactctcagagaagcacccttctctaatgttcttgttgatagatgttgatgaactaactgatttcagcacctcatgggatattaaagccactcctacatntttctttcttaaagatgggcagcaaat

SEQ ID NO: 213551 - DNA, 425 bp, Gossypium hirsutum
aaaacactacaccatggatgaagtgaagctctttgggttttggccaagtccttttagtagaagggtcatttgggcattaaagctaaaaggcgtggaatatgaatacattgaagaagatctgccttataataagagtgatctgttgttgcagtacaacccagttcataaaaagatcccagtgctcgttcatggaggaaagccaattgcagagtcattggttattctggaatatatagatgaagtgtggccacataatcctttgttgccaaaagatgcttacgagagatccgtagctagattttgggccaaattcattgaggaaaagactcaaccaatgtgggaattctttcgtaaattcggtgaagaacagcaaaaggcaatcgagaacaactatgaaattctgaggacgattgaggaacatggtc

SEQ ID NO: 213552 - DNA, 424 bp, Gossypium hirsutum
gcatctttgaaatttacagtgttgaaccctaagggacgcatttggacaatggttgctggaggaggtgcaagtgtcatctatgccgatacggttggagatctcggattcgcttctgagcttggaaactacgctgaatacagtggagcacccaacgaggaggaagtgttgcagtatgccagagtcgtaattgattgtgccactgctgaacctgatggtcgtgaaagagcccttgtaattggtggaggaatagccaactttactgatgtgggtgccacgtttaatggcataattcgagccttgaaggagaaagaatcaaagctcaaagcagccaacatgcacatatatgtaaggagaggaggtcccaattaccagaaggggcttgcaaaaatgcgggcacttggagaggaaattggcatcccaattg

SEQ ID NO: 213553 - DNA, 408 bp, Gossypium hirsutum
  unsure (1)..(408): unsure at all n locations
cttggcagtaatgacggttatattcttttgggctgcatacaagaccaactttttcccgcgtgtatttggggtggcaactcttgagaaaacagctcatgatgacatcaaaaagcttgcctcagctgtatatttgcaagtgagcattataagtcaggccctaatatttgtaactcgatctagaagttggtcctttgttgagcgtccaggtttactactattggcggcctttgtcatagctcagttgattgctactcttattgctgtgtatgccaattggagctttgctgcgattgaagggatcggatggggttgggctggtgtgatctggctntataatattatcttctatatcccacttgatttcatcaagttcttcattcgctatgctttgagtggccgggcgtggga

SEQ ID NO: 213554 - DNA, 421 bp, Gossypium hirsutum
  unsure (1)..(421): unsure at all n locations
cattcccttactctgaaattcacaagaagcagccgctacggtgtcgttggtctcttacttagccaaatttaaggatggattcacaaattaagtttgctgtggtggtgaaaattatgggaaggacgggatcgaggggtcaggtgactcaagtgagagtcaagtttttggatgatcagaaccgttttattatgaggaacgtgaagggaccggtcagggagggagatattctcaccttgctcgagtctgagagggaagctaggaggcttcgttgatcacttcctcttatctccattntgttacgttattaaatgttatgttgcgcaagtagctagctgtttcttatttctgaaagtattccaatttcaaatctagactnngattttggagactgattaaatggatgagtngttttaaagcatat

SEQ ID NO: 213555 - DNA, 408 bp, Gossypium hirsutum
cggcttcttccatccttctatctttattttctcgcctgtgacgagaagccgacgctaccatggttcacgtcagtttctaccgcaactatgggaagacctttaagaagccacgacgtccgtatgagaaggaacgattggatgctgagttgaggcttgtaggagagtatgggctccgatgtaagagggagctgtggagggttcagtatgctttgagccgcatccgtaatgctgctagggaccttctcactcttgatgagaagaaccctcgtcgtatttttgaaggtgaagcccttcttcgtaggatgaacagatatggacttttggatgagagccagaacaagctcgattatgtgttgggcttgactggtgaaaacttccttgaacgtcgtttgcaaacgctcgtgttca

SEQ ID NO: 213556 - DNA, 170 bp, Gossypium hirsutum
aggctttcggtacggatgcatgctggcattcattctgttcctgtagggcaaagtagtaaaaggcacaaatttagctgtccgggatatgatgacgagtgatccttatgttgtcctgactcttgggaagcaaactgttcagtcgactgtaatatcaagcaacttgaattcaa

SEQ ID NO: 213557 - DNA, 421 bp, Gossypium hirsutum
  unsure (1)..(421): unsure at all n locations
agattcttctagttccgaccaaaaaaacaattgctcatctttccttcagagaatatttgttttgagtgaaaaaaaaaatgttgggagtattcagcggagcgatagtgtccccgccggacgagctggtggcggccggttgcaggacgccgtcgcctaagataacggcggacgctcttgtgaaacggttcatcgaggcaaacccctccaccgtgtccttgcagatcggagatcatgtccaattcgcgtattctcaccgtaacgagtctgctttacttcccaggtcattcgcggtgaaagatgaaatattctgcatgtttgagggggcacttgataacttanggagtttaaagcagcaatatggacttggtaagtcagcaacagaggtggtgttggtgatagaagcttacaaggctcttcgtga

SEQ ID NO: 213558 - DNA, 367 bp, Gossypium hirsutum
ccaagaggtaaattctgagcagggggttcaaattctcaaaatatttaaagatcattccactaagacatgcattctcgacgatctggaattctacgaggctcgtcaaaagataatacaagaaaaaaagactaagcatcagctgtcacaaaaacagatccaggtttcaagtggggagcctaaagatgctgtaactgataacaaaaaaagtgcagcaatagcaaatgagactttggaaaaatccgcaaaggcagctttgatagaagaaccaactgttgcatcgaaaggtgagaatggaaatatgaaacccgtagaagagaatggatcgagtgctgcaactgaagacgacaaccccgcaaaagcagctagt

SEQ ID NO: 213559 - DNA, 337 bp, Gossypium hirsutum
cggacgcgtgggcaacaactgagggagggtgtgcacaatttctttgtgacctttatcgaagttctacgtgatagaccccctggtcatgattgggagcttgaaccaggtgttacatgtggtgactacctgtttggaatgctacagggcacaagatcagctctgtatgcaaataaccgagaatccatcactgtcaccgtccaagaggtgacacctagatctgttggggcactcatagcactttatgagcgagcagttggaatttacgcctcgcttgtcaacatcaatgcttatcatcaaccgggtgtggaagctggggaaaaaagctgcttgtgaaagt

SEQ ID NO: 213560 - DNA, 427 bp, Gossypium hirsutum
  unsure (1)..(427): unsure at all n locations
ggttgacagcacttcttgacaagaaagaagcgcagcttttggccatgaatgaacaatgcaaagtaatggcactaagttcttcaaacatatgaaatctgatctcattgtctatctcgttctactgcctgttggactgcgctgcctggttgcttagttacaacagactagatcaccagccagataaatattaggtgggacaactaatgctgcataggcgtgtttgcaacagatactcttgaaagtttaacatggaactngaattattgccattgttgtgctttcgaaattgagccagtatgcatggatgcatattattgtgctttcggaacacaattttcatcttttctgtaaagctagaaatctctgtgtttgtcgaatatcccacctttctcgctgtctcttttcatctgaaactaaaatatagtgc

SEQ ID NO: 213561 - DNA, 436 bp, Gossypium hirsutum
aagaaatcatggtaagtctcaaatcacttgtttctctcagttcccgatccgctgccgtagcactacttgtgttggtggtttcagtggcagtgcaaacccatactacaaatgcacaaagctgcccgaccgatctgactagcctgaacgtgtgctcacctttagtggtgcccggtgcagctgtggctaaccctagcattgactgctgtaacgcactccaatcgttgcaccatgattgcctttgcagcactctaaggatcgcttctcgactcccttctcaatgcaatctcacaccactcacttgtgcttgaaacaaaagcaatggtgctgcctgcttaatgggtaggaaaatataataacgccatggaatatcgatacctccctagttttttctttcttttttaatgggtaataataagcaatggtggtggtaaaatgg

SEQ ID NO: 213562 - DNA, 432 bp, Gossypium hirsutum
atcgctttttatttctcttttatttctctttttccacccattgatctagttgtatatttgaaaatgaaattaaaaaaagtggtaatgtacagggaaagagaacatggagttttggtaaaagaaggaacaagacccacactctctgcattaggtgtggccaccgtagcttccatctccagaagagccattgctctgcctgtgctttccctgctgctcgtaagaggacatgtaagtgcctcatgcgctttttctttgttatcaagatcgtgaaggcaatcagaagaaagaccactggaaccggtaggatgaggtatctgcgccatgtccctcgcaggttcaagacttgtttcagagaaggtactaaagcagcaccgaggaagaaggttgcagcagcttctgcttgaggtattacaaggagctaatgcctataat

SEQ ID NO: 213563 - DNA, 388 bp, Gossypium hirsutum
cccacgcgtccggattcgctctactttcgcctaactttcgcaagatttgtagattcatttctatcgtatctccgtctccgaatcaatggctttgccgaaccagcttacagttgattatccgagcttcaagctcgttatcgtctgcgatggtggaactggcaaaactaccttcgtgaagaggcatctaactggagagtttgaaaagaaatacgagccaaccattggtgtggaggttcatcccttggacttcttcactaactgtggcaaaatccgtttctactgctgagatactgctggacaggagaagttcggtggtctcagagatggtttctatatccatgggcaatgtgccataatcatgtttgatgttacttgcccgttgacatac

SEQ ID NO: 213564 - DNA, 328 bp, Gossypium hirsutum
cccacgcgtccgcggacgcgtgggttcaaattctcctgttgagcaagaacaggtccttatggggaatatattcaagctgcacgacaagtatattgcatatgtgaccgacttttttcaaaaccatactctctttcacaagtgactgttctaatatctaaactcaactgcacatcctgggattgatttgacagtgactgttctcacaacaggattctggccaagttataaatcatttgacctcaatctccctgccgagatggtcaagtgtgtaaaaagtttcaaaggggtctatgaaacaaaaaccaaacacagaaagcttacatggata

SEQ ID NO: 213565 - DNA, 250 bp, Gossypium hirsutum
tcgcccacgcgtccggattcgctctactttcgccaaacaaacgcaagatttgtagattcatttctattgtatctccgtctccgaatcaatggctttgccgaaccagcaaacagttgattatccgagcttcaagctcgttatcgtcggcgatggtggaactggcaaaactaccttcgtgaagaggcatctaactggagaagttgaaaagaaatacgagccaaccattggtgtggagggtcatcccttggac

SEQ ID NO: 213566 - DNA, 328 bp, Gossypium hirsutum
tccacgcgttcgcttcattacattattccctaccctacattgctctgagagtgaatttttgaagtgtggatatttggacataaatatgatatatgattgatactatttaaggttaaaaaaaaaaaaaaaataaaaaaaactttctgtatttggtggtgcgactttaacatttcaaatgaaaaagaaagatgataaccgcaagctgttttactctagagccaagcagaatgcaaaggagtatggagctcatgaaaaagagttgattaagatgaagctcgaagccagataaaaaagagggttttatgttaatacggaagcttaacttttg

SEQ ID NO: 213567 - DNA, 159 bp, Gossypium hirsutum
tcgcccacgcgttcgcggacgcgtgggttcaaatgctccgggtgtgcaagaacaagtccttataaagaaaataatcaagccgcacgacaagtatattgcatatgtgaccgacttttttcaaaaccatactctcttccacaagtgactggtctaatatct

SEQ ID NO: 213568 - DNA, 425 bp, Gossypium hirsutum
ctggtcagagatttgcagctaaaatgagaaacatagagaattaggaagcatggtgtaccccaatgaatcccttgaagactctccccagaagaaaatggggagaggaaagatcgagatcaagcggatcgaaaacacgacgaaccgccaagttaccttttgtaagaggcgcaatggtttgctcaaaaaggcttatgagctatcagttctttgtgacgctgaagttgctttgattgtcttctccaaccgtggtcgactctatgagtatgccaacaatagtgttaaagcaacaattgaaaggtacaaaaaggcttctgattcctccaacactgggtcagttgctgaagttaatgctcagttctatcagcaagaagctgacaaactccgaaatcaaatccggaatttgcagaatacaaacaggcacatgc

SEQ ID NO: 213569 - DNA, 402 bp, Gossypium hirsutum
aaatcatggtaagtctcaaatcacttgtatctctcagttcccgatccgctgccgtagcactacttgttttggtggtttcagtggcagtgcagacccatactacaaatgcacaaagctgcccgaccgagctgacgagcctgaacgtgtgcgcacctttcgtggtgcccggtgcatctgtggctaaccctagcattgactgctgtaacgcactccaatcggtgcaccatgattgcctttgcagcactctaaggatcgcttctcgactcccttcttaatgcaatctcccaccactcacttgtgcttgaaagaaaagcagtggtgctgcatgcttaattgggtaggaaaatctaattacggcatggaatatggatacccgccctgttttttctttcttttgtaatg

SEQ ID NO: 213570 - DNA, 258 bp, Gossypium hirsutum
tgccaggaagcttgcgggtgatcctaatcttcacttcgtggagtctcctgcacttgctcctccagaagtacacattgacttggctgcacagcaacagcatgaggctgagcttgcggcagcagccagtcagccccttccagatgatgatgatgatgcatttgaatagagaggggtttggagtgccagaaagccatcaacaatttctgctgctttttcattttcactcccgtctgaatgtgtgctctcattttcgtattt

SEQ ID NO: 213571 - DNA, 420 bp, Gossypium hirsutum
agcggccagctaaaatccaatttatatttctacaattggaatcgaatggagggtaggttctgcgatggatcatcgttcaccggggatgctgtcgatcgagctaataatctctttttcaaaggaaacagcatatgggaatttatcattgctgatctactatcaaaaggaatgagaaatgctaaaaatgctattctttctggctgttccgctggtggattggcttcgatattgcactgtgacaggtttcgagctctccttcccgcttctactaaagtaaagtgcattacagatgctggcttcttcctccatgcgcaagatgtctcgggagggaagcacatagaagaattctatggcaaagtggctagactacacggatccgataagaatttaccagcgtcttgcacttcaagaatgggagcc

SEQ ID NO: 213572 - DNA, 436 bp, Gossypium hirsutum
cttacatagccatgatggggtcaaagggactgactgacgcttcaaagatagctattctgaatgcaaactatatggcaaaacggttggagaactactaccccgttcttttccgtggtgtcaatggaacagttgctcatgaattcattgtggacttaagaggatttaagaacaccgctggaatagaacctgaagatgttgctaaacgtcttatggactatggattccatggtcctacaatgtcatggcctgttccaggcacactcatgattgaacccactgaaagtgaaagcaaggcggagctcgataggttctgtgatgctctcatctccattagggaagaaattgctcagattgagaatggaaaagctgatatccacaacaatgttctgaagggagctcctcatccaccatctttgctcatgggtgatgcatggac

SEQ ID NO: 213573 - DNA, 423 bp, Gossypium hirsutum
ccatgaccaagcagcaggctaactggtctccttacgacaacaatggaggatcttgcgttgcgatcgctggagctgattactgtgttatcgccgccgatactcgaatgtcaaccggttacaatatactgacccgagagtactccaaaatctgtaaacttgcagataaatgtgtcatggcatcctcaggatttcaagctgacgtgagggctttacaaaagcaactggcagctaggcacttgatttatcagcatcagcacaacaagcaaatgagctgccctgcaatggctcaattgctttccaacacactttattacaagcgtttctttccttattattcttttaatgttttgggtggccttgataacgaaggaagggttgtgtcttcacatatgatgctgttggttcctatgagaagttggatac

SEQ ID NO: 213574 - DNA, 272 bp, Gossypium hirsutum
agcggggaacatatgcgtggcatcatttgattggtcgtgcagcggagtgtgtaagtcggtggagaagatgaaatacgtgcacaactcttgtggagaaggcgattctagtatttggaaatcagatttttaagttgccttcctacctccttaccggctttttattatccattttcaaatttattattaagtagtaaaattacttcaagaactttcaacactttgcatactccttttattattattattattattattattattatcatgtattt

SEQ ID NO: 213575 - DNA, 404 bp, Gossypium hirsutum
cggacgcgtgggatttcaacacttctctcaccgttactcgccttggagactctccaccgtcagcttgcagttcttcgacggcggagattgcgccggtgcattgcccttacgtttgggagagtagtctttccaaccgggtggggaaatcagttccgggtcttgttcttgcaatttagtttcctcctcccacgtgtggataagataacagatgtgagttccatgagttgagttggtctggtgttaaaatattgtgtcagaactgtcaatttggtaacttatattgttgttgtgtgtgagtgttgttttccatgcaatggatttagtgaaaaaaaaaaaaaaaaaaaaaaaaaaaaaaaaaaaaaaaaaaaaaaaaaaaaaaaaaaaaaaaaaaaaaaagggggcgg

SEQ ID NO: 213576 - DNA, 434 bp, Gossypium hirsutum
  unsure (1)..(434): unsure at all n locations
cggcacnaattcaagatcttcttgcagccattattggcagnctgatgcatgctgacgtaaaantctgcaatgagctgagcggatctcagtcatactccaaaacatgacttcacttctcacctccttcatcgtcgccttcattgtagaatggagggtctctcttctcatcctcggtaccttccctcttctagtccttgcaaactttgctcagcaactctctctcaaagggtttgctggtgacactgcgaaagcacatgcgaagactagcatgattgctggcgaaagtgtaagtaatatcagaacagttgcagccttcaacgcacaaaacaagatcctttcgctattttgtcatgagctccgagttccacagatgcanaagccttcgtcgcagccaaagtttctggccctcctctttggcctatctcaacttgctc

SEQ ID NO: 213577 - DNA, 432 bp, Gossypium hirsutum
attcgcttcagctcatcacttcccatagtctctcctcctccctcaccaaatgaaaatgtctctggtggcgaacgaagactttcagcacattttgcgtgtgctgaacaccaacgttgatggaaagcagaagatcatgtttgctttgacctccatcaagggtattggaaggcgtttcgctaacattgtttgcaagaaggctgatgtcgacatgaacaagagggctggtgaattgactgcacaggagctggacaatctcatgaccattgttgcaaaccccaggcagtttaagatccctgactggtttttgaataggcagaacgattacaaggatgggaagtattcccaagttgtgtctaatgctctcgacatgaagttgagagatgacttggagcgattgaagaagatcaggaaccaccgtgggctgaggcacta

SEQ ID NO: 213578 - DNA, 430 bp, Gossypium hirsutum
ggttaccccagtgtgattcactggcttcaggcataccatcagttaatattagccctctgtcgtctgtcaccccgactgttattatggcctctagttctactgcaagtggagataaagctgataaaccgagtcagccacaactggatactccacatcgaacaagctcatctgaaacagcctctttctcagagtctataaaatctaaatggtccactgattcagccagatacaaggaaacaatatctaaaggtaccaaaggtctcaaagagaagcttcttgctcgtaataactctgttaaggagctcagcaagggagtgcagcgtgagatgactgctggggttgcaaaaatgattgagcgcctagatatttcatcaaaaagatctggagcctctgtacctgcttctggtggcacaggcagtacctcaaatat

SEQ ID NO: 213579 - DNA, 430 bp, Gossypium hirsutum
cccacgcgtacgcccacgcgtccgatacatataaactgtaattccacaaaaccaacttctttttatacgtagaaaaaggagaatatgaaggcatcatatattgcattgtgtgcagtgatggtgatcctcttggcagaagcagtaggggtgtcaacggcggtgacatgcagcccaacgcagctgagctcctgcgtgagcgccataacatcttcatctccaccatctcaactgtgctgtagcaagatcaaggagcagaagccatgcctttgccaatatcttaagaaccctaaccttaagaaatttattaacactggcaatgccaggaaggttgcttccacctgtggaactccttttccaaagtgctaagctagaccctttgcttaaggctttctttctctctattttcactgcacaatggatagagaggaag

SEQ ID NO: 213580 - DNA, 436 bp, Gossypium hirsutum
ctcctctgcgccgctcccaattgctcccttactaacaacaaaaacccggaaatgtcggacgacgatcatcatttcgaatccaaggctgatgccggcgcatccaaaacctatcctcagcaagccggtactatccgtaagaacggctatatcgtcattaaaggccgtccctgcaaggttgtggaagtttccacctccaagacggggaagcacggtcatgctaagtgtcacttcgttgggatcgatatcttcactggcaagaagttggaagatattgttccctcctcccataactgtgatgttccgcatgtcaatcgtactgactaccaattgattgacatttctgaggatggatttgtgagtttgctgactgagagtggtgacactaaggacgatctgaggctcccaactgatgagaacttgttgaaacagatcaagg

SEQ ID NO: 213581 - DNA, 433 bp, Gossypium hirsutum; identical to SEQ ID NO: 196374
  unsure (1)..(433): unsure at all n locations

SEQ ID NO: 213582 - DNA, 431 bp, Gossypium hirsutum
  unsure (1)..(431): unsure at all n locations
gtgctgtaggaggcctaataggagtgatatacatttgtcagtggaagaagaggccaaattggaggagcagaccagggattactttgatcacacagcacctaaacgtcacactaagcctcaacgaagcgactattcttccaactacgtcgacgctcttgccgccgctgattccggtatccctgaatacctcgagtttcaacgtctagagaatgatccccagaaaatagtttacaatggaagtgaagtgagagaagaatttgtggagactgaatattataaggatctcaattgcgtcgacaaacaccaccacacgacaggaacaggtttcataaaggtagagaacgacaatggcagaaactntaatttggaaccagattcagacaccagctgccatgcnctcttgtagggaaatccagcaactaacgactgga

SEQ ID NO: 213583 - DNA, 440 bp, Gossypium hirsutum
cccacgcgtccgcccacgcgtccggactagttctagcggacgcgtgggtggccataccttcaattatcttgttgacaatggatacacttattgcgttgttgcagatgaatcagctggaaggcaagtgccgattgcttttttggagcgtatcaaggatgatttcgtgtcgaaatatgataacgggaaggctgctacagctcctgccaacagcctgaacaaggaatttggaccaaaactgaaagaacatatgcaatactgtatggagcatcctgaagaaataagcaagctggctaaggtcaaagctcaggtttctgaagttaaaggtgttatgatggagaatatcgaaaaggtgttagatagaggggaaaagatagagctgctagtggataagaccgagaatcttcataatcaggctcaagactttcgaagtacagggacaa

SEQ ID NO: 213584 - DNA, 412 bp, Gossypium hirsutum
cggacgcgtgggtttgagtgtcagcacgttagcgggcacccctggctacgttgcttctgaatactaccagagcttgcgatgttccaccaagggcgatgtttacagttacggtgtggttttactcgagctactaacgggaaaacggcctacggattcagccgattttggcgataacaatcttgttggatgggtgaaacagcatgctaaactcaaaataagtgatgtcttcgatccagagttgatggaagaagaccccatggtcgagatcgagcttttacaacacttaaaggtagcttgtgcttgcttggatgatcgacattggagacgacccacaatgattcaagtgatggcaatgttcaaggagatacaagcagggtcggtgctcgacacgcaatcgaccattgccaccgat

SEQ ID NO: 213585 - DNA, 433 bp, Gossypium hirsutum; identical to SEQ ID NO: 195303

SEQ ID NO: 213586 - DNA, 436 bp, Gossypium hirsutum
acatgtcaaagcaaatgccctacttcaggcccacttctctcggcagcatgtgggtgggaacctatcactagaccagcgagaggtgctcttgtttgctactaggctacttcaagccatggttgatgttatttcgagcaatggttggttgagccttgctcttcttgcaatggaggtgagccaaatggtgacacaaggaatgtgggagcgagactctatgcttctacagctcccatacttcactaaggaattagccaagagatgccaagagaaccctgggaagaacattgagaccatttttgatctggtggagatggaagatgacgagaggcgtgagctgttacagatgtctgatttgcagcttctggacattgcaaagttctgcaatcgtttccccaacatcgatttatcatacgaggtgattgatagtgacaatgta

SEQ ID NO: 213587 - DNA, 439 bp, Gossypium hirsutum
cccacgcgtccggacggaagcttattggaggaagtgatgttggagggatgaaagaaactcaggagatgctagacttctgtgctaagcacaatatcactgcagatatcgagctgattcggatagaggaaatcaatacggccatggaaaggcttgctaaatctgatgtcagataccgttttgtgatcgatgtggcaaattccttgtcacagtagggttcattgtgaaggaactagtccagtaagtttaaagattatgatcttaatggagaagagaaaaaagatgaactttgatggcttgggacttgtaatgctatataataatcatttatatgagatcattttgtgggtgttctgcttcatgttatcactgttggtcggatggaatctttattttaacctcactattatttttgcagtcaataaaggaaatagttgcataa

SEQ ID NO: 213588 - DNA, 430 bp, Gossypium hirsutum
  unsure (1)..(430): unsure at all n locations
agaagatgtttgaggtatttgctgacatggaagagcttggtgtcaaaccaagtatatcagttgtttcaatggttggaaatgccttccaaaagttgggcatgttggacaagtacgacaaattaaaaaagaaatatcctccaccaaaatgggaataccggtacatcaagggaaagcgtgtcaaaattcaagtaaagcagctacaggaatttgataaaaaggccaaaggtgtcagtgaggacaaggaaactgaagagaattcgagtttagagcatcaggaagcagaagcaagtttaaataaaattgccaaaggtgccactgaggacaatgaaactgaatggattatgaaatntgaagcatgaagaaccagaagcacaatcaaatacattcactgctggagttgatataatttcatgattaatcaatagtctta

SEQ ID NO: 213589 - DNA, 401 bp, Gossypium hirsutum
  unsure (1)..(401): unsure at all n locations
tgagaaatatggcgaggagataaattgtgcggtgattccaagggaaggagtgagcttggatgaagcagaaatcacgaaatattgcaaaaggaatcttgcgagtttcaaagtacccaagaaagttttcatcacggattccgcgccgaaaacagttactggaaaaatccagaggacgatagtaacagagcatttctcgactcaaatgtctgcctctaaagtacccaaatttggagcttaaattcagcattgcttgtctatcgcttagttgcttacgtacatatttaagcgactgtaatatattggttgtgtgaacaggtattactaaagcaccatgttacatgtgaatctgnttcgtgatagaccagaaccgcaatcaaatgcattcactgctaaaacttata

SEQ ID NO: 213590 - DNA, 405 bp, Gossypium hirsutum
gagcaaccccctttcgacaagaagcagtttgtcgtgttcatgaagaagttcatcaagaacttgacaccgaaactggatgcggaaaagcaagagtccttcaagaaaaacattgagggagcaaccaagtttttgctttcaaaattgaaggaccttcaatttttcatcggagagagcatgcacgatgatggatgtttggtatttgcttactacaaggatggtgctgttgacccgacatttttgtactttgcgtatgcattgaaggaggtcaagtgctgaggtttgaagcaaagaaaaaaaaagtggttgctgaagaatttagtcctttttattattgcttttgtctcttattttcagtactctgctaaagacataaattatttatggtttttgatgtttttgatttaa

SEQ ID NO: 213591 - DNA, 407 bp, Gossypium hirsutum
cccacgcgtccgagaaaatttcactgcgagattcatatcgggtttcaactcttttcctccaatttgcacttgaagtgatggataccggatcaaaggtgaagaaaggagccggaggaaggaaaggcggcggtccaaagaagaaaccggtttctcgttcagtgaaagccggattacagtttcccgtcggtcgaattggccggtacttgaagaaagggcgatactctcaacgtgtgggaacgggtgctccagtttaccttgctgctgttcttgaatacctagctgctgaggttcttgagttagctggcaatgctgcaagagacaacaagaagaataggatcattccaaggcatgttctattggcagtgaggaacgatgaagaacttgggaagctttagctggtgtgacca

SEQ ID NO: 213592 - DNA, 439 bp, Gossypium hirsutum
ttcagcgtgtcgtcgaactcttcgtttatgtcttctgcgatcaccggagacggcagcgtttcgaacgggaagcaaggatcatctctatttttgacaccggcggcggccgtttccgcgggaaaaccaccactatcctctgctccattcaagaagaggtgccgcgaacatgagcactccgagaacgtctccggcaacggcaagtgtcactgctcaaagcgaaggaaaaacagggtgaaaaaagtaatcagagttccagccatcagttctaagatcgccgacattccggcagacgagtattcatggaggaagtacggtcaaaaaccgatcaagggctcaccatacccacggggatattacaagtgtagtacggtcagagggtgtcccgctaggaacacgtggagcgagcgaccgatgatccgtcgatgttgattgtaacata

SEQ ID NO: 213593 - DNA, 383 bp, Gossypium hirsutum
cggacgcgggggtcgaactatgcgtttatgtccgctgccaggaccggatacggttgtttttttaacgggaagcaaggaacaacatctattgatgacaccggatggaggacgagaacagacggaaaaccaccactatcctctgctccattcaagaagaggtgccgcgaacatgaacactccgagagcgtctccggtaacggcaagagtcactgctcaaagcgaatgaaaaacagggtgaaaaaagtaatcagagttacatccatcagttgtaagatcgccgacattccggcagacgagtatacatggaggaagtacagtcaaaaaccgatcaagggcttaccatacccacggggatattacaagtgtagtacggccagagggtg

SEQ ID NO: 213594 - DNA, 374 bp, Gossypium hirsutum
gtttcatcaatgacatctttgagaaacttgctcaagaagcttcgagactcgcgaggtacaacaagaaacctactattacttctagggaaatccagaccgctgttaggcttgtacttcccggtgagctagcgaagcatgccgtttctgaagggactaaagctgtgactaagtttacttcgtcttgaagaaggggatttgtacgtttgtctttttagttagggtttgctttaagttgatgtttggagattgtgtattggaagatggatttactcgatcctgatgtgattatatagtagatttaaatggaattatttcacaatttcgcattatttctaggcatttgttcgtttttctaattcaactaatgggagatt

SEQ ID NO: 213595 - DNA, 437 bp, Gossypium hirsutum
  unsure (1)..(437): unsure at all n locations
gtggcagagcagtgaagagaatcagttgagatatgtctaagcaaggagaagtggtctgcgtaaccggggccagcggcagcattgggtcttgggttgtcaaactcctccttgttcgcggctacaccgtccacgggaccgtcagaaatctcaaggacgagaaagaaacgaagcacctagaagctctagaaggagcagactcacatctccgcctcttccagatcgatctcctcgattatgattcactcgccgccgcaatcaatggctgtgctggtgttttccacctcgcttctccatgcagcgtcgatcaagttcacgatcctcagaaggagcttttggatcctgcgattaaaggaacgcttaatgtactgacagctgccaaagagcttggtgttaaacgtgtgggtggtacgtcttcaatcttctncatgtggccctgc

SEQ ID NO: 213596 - DNA, 403 bp, Gossypium hirsutum
  unsure (1)..(403): unsure at all n locations
caggaatgtgagagacaattagctgctaaagaagcttctctgcctctggagccatcagccgatgaggaaaatgctgtaaaccttctagtgcgaatgccagatggcagtcgaaggggccgtttatttctcaagtctgacaggctgcagtctctctatgacttcatagatatcggtagaggagtcaagccaggcacttaccgattggtgaggccgtacccaaggcgtgctttcagtgatgatgaatgcagcttgacgctgaatgaacttggattagcaaacaaacaagacgccctattttggagttgatctaataacatcttaactattacatgaatatcatagaataccactaggtaatnttagttcacttagatatggaatttcataaggttcgtgaatgttg

SEQ ID NO: 213597 - DNA, 415 bp, Gossypium hirsutum
cggacgcgtgggcggacgcgtgggcgaagcaggcttggatcgttgacggcgagtccccgcaggtaagaaacccttccttctatactgctattttacaaaaaaaaaacaacttgcaacctaagaaaagtgagggtgaaattagtgggatatatgtgaaagtgagcatggacggggctccttatcttagaaagatagatttgaaggtgtttaaagggtacccagaattgcttaaggccttggaagagatgtttaagttcaaagctggtgaatattcagagagggaaggatataatggatcagaatttgtacccacttatgaagataaagatggtgattggatgttggtcggagatgtaccatgggaagatgttcaccaattcttgcaaaaagctgaagatcatgaaaggatcagaag

SEQ ID NO: 213598 - DNA, 441 bp, Gossypium hirsutum
  unsure (1)..(441): unsure at all n locations
gtgaagctatacgtacagcccataatagttttgcaaggcctgagccatttgttccagaggagcagaaagctgctgggaaagatgacgatgtctaccatttcataagctacataccagttgatggagtactttacgaacttgatggactgaaggagggacccattagccttggtcaatgccctgctagtccaggtgacatggaatggttgaagttggtgcaaccagtaatccaagaacgaattgagagatactcccaaagtgaaataagatttaacctcatggcagttatcaagaacaggagagaagttgtacaccgctgaacttaaggagctccaaaagaagagggaacgcatcttgcagcagttggctaccatacagtctgaaagacccacagacaaaaccagttntgaagcactaaacaagcaactttgagaagttaat

SEQ ID NO: 213599 - DNA, 371 bp, Gossypium hirsutum
cccacgcgtccgaatatgcgaccggatgagatcaaggtcccgaactggattggtcccgatgtacgcaggttgatatcgaaaatcttggatccgaatacaaaaacaaggatctccatggaaaaaataatggagaattcatggatccgtaaggggctagacccgaaacctgaacttgtagatcctgaagtcaaagaaccggctattggactccaaactggaactccttgcaacttgaatgcttaagatataatctctgtgtctgcaggcttcgatttatccggtttattcacggaacaagaacaaaagaaagaggtcagattcacgttcaacaaaacggcttcgactatcctttcaaaactagaagatgtagc

SEQ ID NO: 213600 - DNA, 269 bp, Gossypium hirsutum
tgaagctttgcaaggtcagcattcatcatctaaatcacctacttcatcatcgtcggactgtgaagagagaggagatgcaaaagtgaatactggagtgaaagctaccgatgatgagacggctgctgaagtaattgagcctcaggatgcaaataaaacaaagaacaaaaaacaagttgaccggtcctcatgtggctccaacactccttcaagcagtgaggtagagacagatgcgttagaaaaacatgaaaaagacaaggaagattcaaaag

SEQ ID NO: 213601 - DNA, 434 bp, Gossypium hirsutum
  unsure (1)..(434): unsure at all n locations
cccacgcgtccgcccacgcgtccgagaaaagccaccattgctgttgaaaagtcacggaggacctactgctgaaactcgtggaattttgaatctaagcatccagtactgggactagcccagggtgggcatttggggatggtaactatggtggaagcacaagttaccgaagagaatttcgtgaacgacttttggaccgttggggaattgttgatgttgatgactgttgtagctgtgctaaatttttgttggagaacgggaaggcagataaggaacgactttgtataacaggaggctctgccggtgggtacacaaccttagcagctcttgcttttagagatacattcaaggctggagcttccctctatggngtagctgacttaaacttgttgaaggccgagacacataaattcgaatcccattatcttgataaactc

SEQ ID NO: 213602 - DNA, 422 bp, Gossypium hirsutum
tgctggtgagttttccgggccaattgcaattcccctacctgtcgggtcagttctagttttaaatggaaatggagcagatgttgctaagcattgtgtgcctgcagttcctacgaagaggatatcgatcacatttaggagaatggatgaattgaaacggcctataggatatgctccagaatcagacttgcagggcattgaaccattgtcatatgatgcagagaggcccaagggatttaattcaccaaaatctgaacgccctgtaaggcaaccgtttagaagagaagataaaagggaagccaagggcttaacagagaataatgagccctcagaatggcgttcctcaacccggcctcgaagaggcccttcatataggagaaggttcactgtgaatcagagcaggtgatgggtcgctgaatgtctac

SEQ ID NO: 213603 - DNA, 443 bp, Gossypium hirsutum
  unsure (1)..(443): unsure at all n locations
cggacgcgtgggcgaatttctcagcaaccaaacaaaatcttccattgtcttctagaactttccaagcacactagagttaatcaatggctcgtacaaagcaaacagccaggaaatcaaccggtggaaaagctccacgtaagcaactggcgacgaaagccgcgaggaaatcagctccagccaccggaggagtgaagaagcctcaccgtttcaggccaggaacagtggcgttgagagaaatcaggaagtaccagaagagtaccgagcttttgatccgtaaacttccgttccaaaggctagtaagggaaatcgctcaagatttaagacggatctgagattccaaagtagtgcggtggcggctttacaagaagcggcggaagcttatctggttggcctgtttgaggataccaatctctgtgctattcatgccagnagggttactatta

SEQ ID NO: 213604 - DNA, 426 bp, Gossypium hirsutum
gacccacgcgtccggcgaagaagagatgaaggaaaagtaatggtagatcgcaagcgctagaagttaccgagaagactttatagatccctatgtaacgcactactttctccattttgcgttttttctccactacatttcccttttttattttggttgagtatcggaaagagggaatttcagcggataacagaagttcattttaatttataaaatcatggttgccactgctgctacatcctcattctttccaatcacttcttccccggactccattgactcaaaaaacaagaagcttggaaatggatctactaaccttggaggtataaagttgaaaccatctgcttcttctggaagtttgcaagttatggcaaatgcacaagcccccccaaagataaatggtaccacggatgtgatgactccagtaga

SEQ ID NO: 213605 - DNA, 426 bp, Gossypium hirsutum
ctgatatgtgtgaccagtggcaactcttacttgggttctttcattgtcaaagagctattggctcatggttaccttgttcgagtaaccattcaacacccagctgaatttgaagatgtgaaagacctgctaggggtggaagatttaaacctattggaaagtgtagttgtaaccaagatggaagatttacaaagcctttgtgatgcttttagaggttgccatgctgtttttcatacatcttccttcattgatccacatggtatctctggttattcagaacaaaaggtgtttttggagactgaagtggcaaggactgtcatggaagcttgtgctaaggcagcctatataaagagaatgcgtcttcacttcatctctattggcatccacttggaggaatgaaaatatagatggaattattgatgacagctg

SEQ ID NO: 213606 - DNA, 356 bp, Gossypium hirsutum
gggttcaccaccactttggattctgcttctgggtgtgttgtttatggcttctggaacaatcgcagctccccctaggaagcctgtagatgtcccattctccagaaactatatgcctacttgggcttttgatcacattaagtatttcaatggtggctctgagattcagctccaccttgacaaatacactggtactggtttccagtccaaaggatcatacttgttcggacacttcagtatgcaaataaagctagtccctggagattctgcggtgactgtcactgccttttatttgtcttctcaaaactcagagcatgatgagatagattttgagttcttgggcaacagaacagggcaac

SEQ ID NO: 213607 - DNA, 432 bp, Gossypium hirsutum
ggcggctccgagatgctgttaagacggtgcttacttccgggcgcaataagcaattcgacagcaatgtccatattgtcattgcagggttgacaaatacttattcacaatatgttaccacttttgaggagtaccaagtgcagagatacgagggagcctcaactctgtatggaccacacacgcttaacgcatacatacaggagttcaagaaacttgcagcagctcttatcggtggtggatctgttgaaccaggtccgcaaccacctgatcttcttgataagcagattagcttattacagcggttgtccttgatgcaaccccacttggtgtgaatttcggtgatgttaaagacgatatcgctaattccactttcaaacggggcaatacagtctcagtcaccttctggtctgcttgtcctaggaacgacctcatgac

SEQ ID NO: 213608 - DNA, 312 bp, Gossypium hirsutum
accacgcgtccgctggaggggagcaagtagctgctgatttgaatgcggactgggtttccatggggcggggcacacagtgggtgggggactcaaaatatgcaagcaaacaagagagctggcgtactcccgtgttggtggcactccgattggcctcttagattaattcttggagcacatacaagccgcacttgatgcagcaacagagaacctggtaataatacctcattcaatcgtcagtcatatggggcttgcattgcatctgttgtacatcactataacgcatccgttggatatatatgtaaacttgtactc

SEQ ID NO: 213609 - DNA, 431 bp, Gossypium hirsutum
cggacgcgtgggctgttattcaagagaacagagtggctactgctcagtgcttgtctggtactggttccttgagggttggagctgagtttttagcaaagcattaccaccaacgtactatatacattccacagccatcatggggaaaccatgtgaaagttttcacgatggcagggttgtcggtgaagaattaccgctactatgatccaacaactcgtgggcttaatttccaaggtttgctagaagatcttggcgcagcaccagctggagctatagtgcttcttcatgcctgtgctcataatccaactggtgttgatccaactgttgagcaatgggaacagatcagacagtcgatgagatctaaagggttattgcctttctttgacagtgcttaccagggatttgcaagtggtagcttagatgtagatgcacaa

SEQ ID NO: 213610 - DNA, 420 bp, Gossypium hirsutum
  unsure (1)..(420): unsure at all n locations
cccacgcgtccgcccacgcgtccgtgttattccatctccttttgaatacgctgatgttgtgacaaccacaacacacaagtcacttcgtggtccacgtggtgctatgattttcttcaggaagggactcaaagagattaacaaacaagggaaagaggtaatgtatgacttggaagacaaaattaatcaagctgtctttcctggtcttcaaggtggaccacataatcacaccatagctggtttagcagttgcattgaagcaggtcagaacacccgagtacaaggcttaccaagagcaagttcttagtaattgctcgaaattttctcagaggttgctggagaacggctatgaactagtatctggtgggaccgagaaccatttagtcttggtcaatttgcgaaaaaggngtattgatggctaaga

SEQ ID NO: 213611 - DNA, 435 bp, Gossypium hirsutum
gtgatggtgtttttatggtggctcatgctgatggaaacatgtacgtgtatgaaaagaacaaggaaggagctggtgattcttcattccctgttgtgaaagaccaaactcaattttcagtttcacatgcacgttacagtaagagtaacccaatagcaagatggcatgtttgtcaaggttcaattaatagcattgctttctcccatgatggggcatacttagcaactgttggaagagatggctatctgcgagtttttgactattctaaagaacagctcgtatgtggtggcaaaagctattatggtgctctactatgttgcgcttggagtatggatgggaaatatattctgaccggaggtgaagatgacttggttcaagtttggagtatggaagatcgaaaggctgtggcatggggtgaggggcacaactcatgggtta

SEQ ID NO: 213612 - DNA, 430 bp, Gossypium hirsutum
  unsure (1)..(430): unsure at all n locations
cggacgcgtgggtgggtccagaatcccactgcccataccgcattggatgacattcttccctgtgtggacaatgcaacagcccaagagaccttgtcacgatccaagaatgtcactcatcaacttgtaaatgtcgtgaatggtgtcatcaataatgttttcaaccgaaatttcccaccagcattggcaccattatattttaatcaatctggtccattggtgccagttctctgcaatccatttcattcgaatcttacaaacagagactgtgcatttggntgaagttactttgcataatgccacagaggtttggaagaagtatatatgtgaaggtttcgggctctggagntatgttctacacctgggcggttaacccttcaattttacactcagatgtcggcagcatgaatttgattatggtttgtatcgctat

SEQ ID NO: 213613 - DNA, 334 bp, Gossypium hirsutum
gtctcattctgttcttgtgtcccagtttatctctaagcacaagaaaatgggggccggggctgttaagaagccagctgcgaatacgccatctgaggagaagaagacggcagctgagaaagcccccgctgagaagaagcctttggcaggccaaacgcttgccaaggaaggctgttcatgcggtcggacacaagaagatgactagggtaaagaaaagtactgaggcctacaatatctacatattcaaggtcttgacagcaagttcaccctgatattggtatgtcaagcgtggctatgggaatcatgaacagcttcatcaatgatatctttgaaaagc

SEQ ID NO: 213614 - DNA, 442 bp, Gossypium hirsutum
  unsure (1)..(442): unsure at all n locations
cccacgcgtccgcccacgcgtccggttgtgtgaggcgaaattgtgtgaagaacttaatgctgatacggtggcaacaacccttgcacttgctgagcagcaccattgtgcacagcttaaggccatatgtttaaaatttgctgcaactccgtcaaacttgggagcggtgatgcaatcagaagggttcaagcacttggaggaatgttgtccatctttgttatcggagatgttgaaggcctttgcatccagcgaggaaagctcgagtctgctttcaagtcggaagaagagtgtcagcagtgtatacgggtatggatcttgcagcagaaggtccggcagcagaaccgatgaatcccaatggcaggcgagttcgaaggcgttgattggcaatcaacgntaagtgtgttggggggtgtttctgggggcataccattgaaatatttggagt

SEQ ID NO: 213615 - DNA, 433 bp, Gossypium hirsutum
  unsure (1)..(433): unsure at all n locations
cccacgcgtccgccacgctttaatttgtttttgcatctctcgttttatttctcgtatattaatggcgggtcggggtaagactctcggatccggagcctcgaagaaggcaacatcaaggagtagcaaggctgggcttcagtttccggtgggtcgtattgctcggttccttaaagctgggaaatatgctgagcgggtcggagctggagctccggtttacctcgccgccgttcttgaatatcttgccgctgaggttcttgagctagccgggaatgcagccagggacaacaagaaaacccgaatcgtgccacgtcacatccaactngccgtaaggaacgacgaagagctgagcaagctgctcggcgatgtgacgatcgccaatggtggtgtgatgcccaacatccacaacctnctnctcccgaagaaaaccgggacc

SEQ ID NO: 213616 - DNA, 440 bp, Gossypium hirsutum
gaattttcgagtcttactcccgaagacgctaccgatacgcgaacttgttcggtacgcgacggtttcgttcttacactcgaaaacgaataacaacaagggcaaaactccaagcttgaatatgaaatctgggtttcaacatttctgtattcatcctggtggaagggcagtgattgatgcaatgggacgaagtctagggctaaacgaatacgacctcgaaccgactcggatggcacttcatcggttcgggaacacgtccgcggccggaatatggtatgttttaagttacatggaagctaagaagaggcttaagaaaggtgataggatattgatgatcagtcttggagcaggttttaaatgtaataattgtgtatgggaagtcatgaaggacgccacggatgacgttaacgtgtggaaagattgtatcggtcgatatcctgtga

SEQ ID NO: 213617 - DNA, 437 bp, Gossypium hirsutum
ctctcattcttttcccgggacccagacaaactctaagaacaagaaaatggcgccaaaagctgagaagaagccagctgagaagaagccagcggaggagaagaagacggtagctgagaaagcccccgctgagaagaagccaaaggcaggcaaaaagcttcccaaggaaggcggagctgcggccggagacaagaagaagaagagggtcaagaagagtactgagacctacaagatctacatcttcaaggtcttgaagcaagttcaccctgatatcggtatctcaagcaaggctatgggaatcatgaacagcttcatcaatgatatctttgaaaagcttgcccaagaatcgtctaggctcgcaaggtacaacaagaagcctaccatcacttccagggaaatccagaccgctgttaggcttgtacttcccggtgagcttgcga

SEQ ID NO: 213618 - DNA, 360 bp, Gossypium hirsutum
tgacgatcggtggtcagcccgctggtcggattgtgatggagcttttcgcagattgcactcctcgcactgcggagaacttccgtgccctctgtactggcgagaaaggcgtcggccgcagcggtaagcccctccactacaaaagctcttctttccatcgtgtgatccctaactttatgtgccaaggaggtgacttcaccgccggaaacggtaccggaggtgaatccatctacggatcaaagttcgctgacgagaacttcatcaagaagcacactggtcccggtattctctcaatggctaacgctggaccgggaacaacggatctcagttcttcatttgcacggctaaaactgagtggctcga

SEQ ID NO: 213619 - DNA, 419 bp, Gossypium hirsutum
ggaattggggcagatgaccaaaatgaaacattatttacaactctggtagacaccgacatcttgttgaagccaaataggccggctcttgttgtaagcagtacaagctggacaccagatgaagattttgggattctattggaagccgcggtgatgtatgatagacgagttgctgctctactggatgaaaatgattctgctgatgaaggggtcctctggaaggagatctctggtggaaagcaatacttgtaccctaggttattgttcatcattacaggcaaaggtcctgaaaaggaaaagtacgaagagaaaataaagaggctaaatctcaaacgtgttgcatttcgtaccatgtggctgtcagctgaggaatatccattgcttcttggttcagcagattaagtgtttgtttgcatactttc

SEQ ID NO: 213620 - DNA, 396 bp, Gossypium hirsutum
gaaaatggtacttctaaacttacttttcttttacgaacatttcctccgattggcattttaagtgatgggtgcaggatcaaaggtgtagaacggagccggacgaaggaaacgccgcagtacaaagaagaagccggattatcgttcggtgaaagccggaatacagttatccgttggtcgaattggccgatacttgaagaaaggccgatactctcaacgagagagaaccggtgcttcagattactttgctgatgttcttgatacctagctgttgagggtcttgtgttagctggtaatgctgcaagagacaacaagaagaagttgatcattccacggcatgttctattagcattgagaaacgatgaagagcttgtgaagctcttagctggtgagactatt

SEQ ID NO: 213621 - DNA, 437 bp, Gossypium hirsutum
cccacgcgtccggtgaattccaagtgtaatctctatcttcttcgaattcgacttccaattctcagagtcgaaaaccttcgttgaaaatctcgttgccgcataaagtggagtggattcagttcggcaaaccggatttaaccgaggtaaagccaaagaattcaaataccgaagagaaaactaagcattacagaggcgtccgacaaaggccgtggggaaagttcgcagccgagatccgagatcctaaccgaaaaggttcacgggtctggttgggaacttttgacaccgccatagaagccgcaaaggcttacgaccgagccgcctttaagttacgtggctcaaaagcgattcttaacttccctctcgaagctgggaagttggatgtaatcgctgctgacggagagaggaaacggatgagagacgacgacgcttgggatgaa

SEQ ID NO: 213622 - DNA, 443 bp, Gossypium hirsutum
  unsure (1)..(443): unsure at all n locations
cccacgcgtccgggcaacttgctgaaatgatgactaaggtctatgcaaaggtaagtggtgaaccttcactggagtcaccaacaattgatgtcagttccaaggaattttatggggagggatatgatgatagtgacaagagaattccagacatgaccataataaatagacaactgggttggaaccccaagacatccctttgggacttgcttgaatcaacccttacctaccaacacaggacttatgctgaggctatcaagaaatccatggtaaaacctattgcatcctaaataggtaaagatgttcagaccatgcctaaggaaggatgcatgtaaaatttacttgttcgaaaaatgttccaattctttttgtccttttaaggaatcctatatatatctgaattgttgatnttacttgtatgctactntntgggtcatcccttgtgt

SEQ ID NO: 213623 - DNA, 438 bp, Gossypium hirsutum
gataaatggcacaacgttctcatgtaccccagtttggcaattgggagagtgaaggtaatgttccttacacagcttattttgataaggcacgtcagggtcgcagtggaggaaagattgtgaatccgaacgatccccaagagagtccggaattacatcaagattatggagctccaactagagctccccctgcttcacgaccaaaaccagaatcggatgaaccaataggacatggacctgcaagaaggggacacgaacgaggaaggagcagggaagaaggtgacctcaggcaatatgctaactctccagcacgtaacgagaatgtcaaccgcagagctgctggagactctacaccttctcgttatggtcgtggagtaagttctggtgaatcccagaaacgttccatgagaacaagtattggatctgaaaacagcatagata

SEQ ID NO: 213624 - DNA, 399 bp, Gossypium hirsutum
  unsure (1)..(399): unsure at all n locations
ggaanngcaggggcgacccacgcctcccgggccgcgtgggcggacacgtgggcggtacgcctggggaaaaacaccatgcctgcatgcttgctgttggtagccgtgggtatggagctataaaaaaggctgttcttggcagggggagggagtattggtctcaccatgctcattgctcagtgaagatcgtggagaggccgtagatcaaacattaatgtgtgcaataaaattgaacccacaactgggggtgctgcatatatttagtcgtctaataacaccatggtgttgcacactgggactgcgataccaatcatgctgaatattacatattggtgtggataaggagaacttacacgattcttatgtcttaatgctttttaattagcttgtacaagcgttact

SEQ ID NO: 213625 - DNA, 398 bp, Gossypium hirsutum
cccacgcgtccgaagcctctcagcagccctttctttctcttcttctccttctccccttctgcggtccctgagcaggccagcctgtaattcaaataagatgtatacatcaatgaagaagatccacaaggataaggatgttgaaccaactgaatttgaggagtcggttgcccaggcattcttcgatttggagaataccaaccaggacctgaaaagtgacctcaaagatctctacattaattcagcagtccaaattgatgtttccgggagccggaaagctgttgttatccatgttccctacagattaaggaaagcttttcgcaaggttcatgttaagcttgtgagggaacttgaaaagaagttcagtggcaaggatgtgattctcattgccactcggagga

SEQ ID NO: 213626 - DNA, 393 bp, Gossypium hirsutum
gttttcccatcggatccatttgatgccggaaatgctgcagtgacagaggaaggtttggtccttatatcatcaggatgtcctaagctcaactcattgctgtatttctgtcatcagatgacgaatgctgccctcatcactgtagccaagaattgcacaaattttatccgtttcaggttgtgcatccttgaccccgtaaaagctgaccctgtaaccaatcagccattggatgaaggttttggggcaattgtccggtctaacaagagtctgaagcggttatcactctctggccttctgactgatcaggtttttctttacataggaatgtatgctaagaagctcgaaatgctgtccattgcttttgccggcgacagtaacaaaggaatgctctacgtg

SEQ ID NO: 213627 - DNA, 452 bp, Gossypium hirsutum
  unsure (1)..(452): unsure at all n locations
gacccacgcgtccgcccacgcgtccgcccacgcgtccgagtgtttcgagtggattcaaagttgctgctcgattctaaagctgggaaactaggccctcatatcgaagatgtcatatacagcttgagctactcgttgaggcttctgcgttccggaaaagttgtagcttggtattctccaaagaggaaggaagggatgatagaattgcgccttttcgaattttaactcatcttctgtcatcctatcattggttttgttcagaatttctttttctaatcatatgattatcctagttagaggctgatgtgaaatcttgcagctgaatntacagcttcatttccctttttttgcccaattcccatgttttgtaggcctttatggagcttcatagttaatcccaaatccaaaccctgcatgttaagtttgtcttctcccttttatattcaacaattgag

SEQ ID NO: 213628 - DNA, 272 bp, Gossypium hirsutum
cccacgcgtccggttatttttttaaacaaagatccccgatctcctgcttagagttagtttctcatatttatggggctacttgaccagttgtgggacgacaccgttgcgggtcctcgacccgataatggtctcggcaagctccgaaagcactccactttcactttccgctctaactcctccaaggaaaccgatggcgggagtgtgagatcgtacaatgatgagacgccggaggaaacaacgaaagtgacacgtacgattatgatcgtaaaatc

SEQ ID NO: 213629 - DNA, 407 bp, Gossypium hirsutum
cggacgcgtgggcggacgcgtgggcggacgcgtggggaaaaacaccatgcctccattctcgctgttggtagccatggttatggagctataaagagggctgttcttggcagtgtgagtgattattgttctcaccatgctcattgctctgtgatgatcgtgaagaggccgaagatcaaacattaatctctgcaataaaattgaacaaacaactggggttgctgcatatttttagtcgcctaataacaccatggtgttgcacactgggactgtaataccaatcatgctgaatattagatattggtgtaaataagcagaatttacacgattcttatgtcttaatgttttttaattagcttgtacaagtgttactggaatattctatacttaaatctatcatgcgagtgttg

SEQ ID NO: 213630 - DNA, 436 bp, Gossypium hirsutum
atcaagctgaacaatgcaattttagctgaggagaaacaccttcccatgtatcaagaaatggcatccaagcccaatgtagacaatattgctggaagtgctactcaaaattcaatcaaagttgcacagtggatgctgcaaattcctggcgcaactgtttacattggctgtattgggaaggacaagtttggggaggaaatgaagaaaaactcaaaagctgctggcgttaatgttcaatatcttgaggatgaaactgcaccaacaggaacctgtgctgtttgtgtagctggtggtgaaaggtcactcattgcaaatctatcagctgctaactgctacaagtctgagcatttgaagaagcctgacaatagggcgttggttgataagggcaaaggcttgtatattgctggatcttgccttactgtatctccggaatacatac

SEQ ID NO: 213631 - DNA, 447 bp, Gossypium hirsutum
ggcttagcaacggtgataaggtcccaccagctgaatttgcaaaggtagctcaagaatattctgaatgcccttcagggaagaaaggtggagatttaggatggtttccgcggggtaagatggctggtccgtttcaggaagttgcctttaacacagtcattggagctaccagtgcacctttcaaatctacacatggataccatatcatcctctgtgaagggaggaagaattgaagcgagccaagatacagtcaggcagtgaagatgagttttatgttctatattaatgcagacatgaagtatgttcagtttgaaatattatccaatgattattcttcggatttgcaactgggataatgcttcttcttgttgaaaaatggcctgtaagttgatcttggatgtttgatgccaagatattttacatgttttcacatttcaaggtcttagttat

SEQ ID NO: 213632 - DNA, 253 bp, Gossypium hirsutum
ggcgagagccgtggcaggggaagccggggtgccctttttctcatgcgcagcttcggagtttgtggagttgttcgttggagtaggcgcgtccagggtaagggatttgttcgaaaaggcaaaatccaaagcgccttgcattgtattcatagatgagatcgatgctgttgggagacagagaggagctgggcttggaggaggaaatgatgaaagagagcagacaatcaaccagttgctgactgagatggatggattt

SEQ ID NO: 213633 - DNA, 395 bp, Gossypium hirsutum
ctttcgatgggagcggcattaaaagactattaaccaacaagttcgaactagacaagttgcttaatacggctttagaaaatgtcccgaaagatcgtaatggtaaagtatcaaaggagtacttgcgcgtcgtgctagacgtagtggcaccatctgccagtttacctccaataggtgcagttgaacagatcgaccaggtcgttgccgatgcttttgacatgataaacgcggacgacgggaaagcggttaaagaagatgagttcaagaaactattgacggagatcttaggaagcgtcatgctgcagttagaaggcaacccggtctcgatttcttcgaattctgtcgttcacgagcctctcgcatcgtcctcatcgttactgcaaccatcatcctagttg

SEQ ID NO: 213634 - DNA, 416 bp, Gossypium hirsutum
gggcgacccacgcatgcggtcttatgagctgatttgttgctggtcttcttagccttgcgaaagaactgcctgtgggttaactgattctcgttgctgaaaaaagaccgtcactttacaatgccttcggatgataaagaaaggcgtggcttccaacgtcacaagagttactaccctactgtttgattcacgctgccccataaggtgatacatgtgtctatatccttcactgtgtattgttgcaaatacttctactcccacaaacactacatcttcgaagacctgaagcaagttcactctgacatcggaatctctagctttgctatgtggatcatgatcacgattcataattgatatcttttagaagctggctcatgattcctatttgctaacaatgtacaccaagatacccaccatta

SEQ ID NO: 213635 - DNA, 278 bp, Gossypium hirsutum
ggtcgataccacttattgagttgatatttatttactgccgaggcatcaaagggggagggtacaatttacttgcaggtataccagaaggttcatctgttccacttttacccaagcacatatatgatgatgtcctgatggattatgatgcactcaaggctgtccagtcaagactgggaactgctgcagtaattgtgatggataagtcaactgatgttgtagatgcaattgcgaggctttcgtacttctacaagcaccagagttgtggacagtgcacgccc

SEQ ID NO: 213636 - DNA, 445 bp, Gossypium hirsutum; identical to SEQ ID NO: 196393
  unsure (1)..(445): unsure at all n locations

SEQ ID NO: 213637 - DNA, 441 bp, Gossypium hirsutum
ataccacttaaggagttgatagagaggcactgcggaggcatcagaggtggatgggacaatttacttgcagtaataccaggaggttcatctgttccacttttacccaagcacatatgtgatgatgtcctgatggattatgatgcactcaaggctgtccagtcaggactgggaactgctgcagtaattgtgatggataagtcaactgatgttgtagatgcaattgcgaggctttcgtacttctacaagcacgagagttgtggacagtgcacgccctgcagagaagggactggatggctatggatgatcatggaaagattgaaagttgggaatgcaaagttggaagagattgacatgcttcaggaggtgaccaagcagattgaagggcacacaatttgcgctttaggtgatgcagcagcttggcctgtgcagggtctaatacgg

SEQ ID NO: 213638 - DNA, 396 bp, Gossypium hirsutum
cccacgcgtccgctggatcctgttcagaagctggcctctggtggatgtgacaatatggtcaaagtatggaggctgtataatgggagttggaagatggactacagccctgccctccagatgcacactgattgggtgcgggatgttgcttgggcacccaacttggggctcccaaaatccaccattgcaagtgcttctcaggatgggaaagttattatatggacttgcggtaaagaaggggaacaatggaagggtgcgattttgaaggatttcaagaccccagtttggagggtctcatggtcgctgactggaaacttattgtcggttgccgatgccaataacaatgttacattgtggaaagaaacggttgatgatgagtggcaagaagtgaatgctatt

SEQ ID NO: 213639 - DNA, 220 bp, Gossypium hirsutum
gcaaattcccttcttttcccctccacccaagcctaaaaaatcatggcgacagctcaaatcagcaaaaagcgaaagttcgtcgctgatggagttttcttcgcggaactcaacgaggtattgaccagggaactggctgaggatggatactctggagtcgaagtcagagttactcctatgcgtacggagatcatcatcagagccacccgcacccaaaacgttc

SEQ ID NO: 213640 - DNA, 440 bp, Gossypium hirsutum; identical to SEQ ID NO: 196396

SEQ ID NO: 213641 - DNA, 312 bp, Gossypium hirsutum
atcggagtctcgtgccgatgacaggcaatggcttacatattgggttctctattccatgatgacattgctggaactcacttttgccaaagtcattgaatggattcctatctggtcctatgcaaagctgattttcacttgctggctggtcatcccgtacttctctggcgctgcctatgtttacgagcactatctgcgacccttctttatgaacccacaacagacgattaacatctggtatgttccgagaaagaaggatttcttcagtaagccggacgatattttaactgccgctgagaaatacattgaagagaa

SEQ ID NO: 213642 - DNA, 373 bp, Gossypium hirsutum
ccctgatgacccacttgttctggagattgcgcacatgtataagactgatcgggcaaagtatgaagctacagcacgtggctggacccagaagtatgccatgggatgatggtggttagtgggtaatacgtattggcttttgtacgatgccatgtatgtgttaaaaccttcatatattttggtttgggaaggaacttgtgattgtgcttagatttggatttgaattatgtggacatcttatatcaaaggtgggtctatggttgtaagagagaatgccattccattccatgtctttttatagcttgttatatgatgaagcatttcctaaaactttcatgcttattaaaaaaaaaaaaaaaacaaaaaaataactact

SEQ ID NO: 213643 - DNA, 451 bp, Gossypium hirsutum
  unsure (1)..(451): unsure at all n locations
agatcatccaattattaaagacttgaatgctgcttgcaagaatgcgcctgaaagcagtgaagccaagagagcagttgacttgttgtatgatacagcattgatctccagtggtttttctcccgacagccctgccgagttaggtaacaagatatatgagatgatggcaatggcacttggaggaagatggggtagatatgaggacgatgatgaagtggaagcatcagaagttagtgctgctgaaactgatacgagtgccagtgaagcttcagagaaccaagtgatcgaaccatctgaagtaaggacagagagtgatccttggcaagattgaagtgtcaaaatttaaataaaaattttcctgtattatctgattgctattaacaaaagaatccagaaggaaagaagagttgtgggttccgttggngaagatgaggatgttagtgataatggctgt

SEQ ID NO: 213644 - DNA, 392 bp, Gossypium hirsutum
ctttgcttctgaagatccagagaatgacatgatcaaaccagcgacccaaggagtggtgaacgttttgaaagcttgtgccaaagcaaaaacagttaaacgtgtcgtcttgacatcatctgccgcagctgtgtctatcaacacactgaatgggacagatctggtcatgacagaaaaagactggaccgatatcgagttcttatcatcagcaaagccaccaacttgggggtaccctgcattcaagacgttggctgaaaaggcagcttggaaatttgctgaagaaaacaacattgatctcattacagttatcccttctctcatgactggtccttccctcaccccaattgtccccagcagcataggccttgctacatctttgatttcaggcaatgaat

SEQ ID NO: 213645 - DNA, 449 bp, Gossypium hirsutum
  unsure (1)..(449): unsure at all n locations
cccacgcgtccgcccacgcgtccgaacagcctgaagaaaccctaaatgatttcctatctcatcaccctcacaacactttctccatgagctttggcaacgctgctgttttggcttatgtccgccatgaacgtgctgcttcagttcatcagaggttgttttgtgggtttgatgacatatactgcctcttcttagggagcttgaacaatctatttatgctgaatagacaatatggtctttccaaagggagcaatgaggcgatgtttgtgattgaagcatataggacgctgagggataggggtccataccctgctgatcaagttgttaaaggatcttgaaggaagctttgcctttgtgatctatgacagcaagactggaaccgggtttgctgcactggggtctgatggggngtgaagctgtattgggaattgcagctgatggcttgggtcata

SEQ ID NO: 213646 - DNA, 451 bp, Gossypium hirsutum
  unsure (1)..(451): unsure at all n locations
gccggcacttcctctcttccgtaatctcttactttcagatttcagtctcagtaaagctttttcagcaccagccaaaatggggaagactcgtggaatgggagctggccgtaagctgagaacccaccgcagaaggcagaggtgggccgacaaggcatataagaagtcaaatcttggaaatgaatggaagaaaccttttgctggatcatcacatgccaagggcatagttcttgagaaaattggcattgaagctaagcagcctaactctgctatccgaaaatgtgctcgtgttcagttgatcaagaatggaaagaaaattgctgcttnttgtacccaatgacggttgcttaaactacattgaggaaaatgatgaggtattgattgctggatttggacgaaaggngcatgctgtgggagatattcccggagttcggttcaaggttgttaaggtttc

SEQ ID NO: 213647 - DNA, 445 bp, Gossypium hirsutum
  unsure (1)..(445): unsure at all n locations
cgacaagacgaggaatgcatggaaaacggtctctcagatacggatttcgagcattacgtgaaggtaatcagatggttagaatgcaaaggacatatcgaaaagaacttcagacagaaattcctcacctggtacagcttaagagcaaccccgcaagaagtaaggatcgtgaaagtattcgttgatatcttcatttccgatccagcatctcttgcggagcagctcgtggacacattctccgattgtatctccagcaaaagatcatccgtcgtaccggctggcttttgcatgaagctttggcattgacatgaacggactgtgnncgaagtagtgagctacatgtttccgagtgcaaaaccggattaanagtcggtgttcggcaataattctttagacccacaacattctggatttagttgcttttgtcattgttatgatcatgtcagaa

SEQ ID NO: 213648 - DNA, 313 bp, Gossypium hirsutum
cccacgcgtccggccttcttctttttcctccgcggctacatttccactctcgttcccgagatatcaaagtaaaatgaaggtggtcgccgcctacttgcttgccgtgctcggaggaaacgcttctccttccgccgatgacttgaaggttattctcggatcagttggagctgaggctgatgatgataggatagagttgctattgtctgaagttaaaggcaaagatatcaccgagctaattgcaagtggaagggagaagttggcttctgttccttctggtggtggtgctgttgcggttgccgctcctacagctggt

SEQ ID NO: 213649 - DNA, 452 bp, Gossypium hirsutum
  unsure (1)..(452): unsure at all n locations
aactagagcagactaggttattggttcttgaagcagctgaccagcttgatcgacttggaaacaagaaagcccgtggaaccattgcaatggcgaaggtagcagctccgaacatggccctgaaggtactggacagggcaatacaagtacatggtggagccggggtatcatccgacactgttttggcacacctttgggcatcagcaagaacattgagaatcgctgatggacctgatgaagtgcacttgggtaccattgctcagttagaactacgaagagcaaagctttgaaggatcttgaaactatgatcatcacacaacagnnactttttattttttcttcttgcagtctcgaagataaaaataaggaaaaggaatccaaaaaattgggcattttcttagtaatattatggaattattatgaaagataataataataatgataatntatgtagt

SEQ ID NO: 213650 - DNA, 390 bp, Gossypium hirsutum
cccacgcgtccgcccacgcgtccgcccacgcgtccgagcggtttaatctacgaggaaacccgtggggttttgaagatcttcttggagaacgtgattcgtgatgcagtaacctacaccgaacatgcgaggaggaagactgtgactgctatggatgtggtttatgcactgaagaggcagggcaggactttgtatgggtttggtggttaaatgatttagggaatagatcttttagcgatgttggcggatctggacttgttgtcatgctagcaagaatgtttgagtttaggattagggatagggcttgtaattaaggggtgctattgggattactggaaattataatttggtcgtgtagttttctttggtgatttgtaattcgtgccatgaatt

SEQ ID NO: 213651 - DNA, 444 bp, Gossypium hirsutum
  unsure (1)..(444): unsure at all n locations
attatgatcaactagtcaagatagccaaggttcttgggacagatgaattaaatgcttatctaaataagtatggtatcgaattggatccccatcttttatttcttgttgggaggcatagtcacaaaccttggacaaagttcattaatgctgagaatcaacatctggcattacctgaggccattgatttcctcgataagttgcttcgatatgatcatttggaaaggctaactgcaaaagaagcaatggctcatccttatttttacccgattagaaatgcggaaagcagcagaactcggacctagcatgccaacttcacggtgatggatgttaaggcatggcatcttcttctttcttcatatagcatgttaagatcctcatccctttatagaatgacagaagattaaagtctcttttntttttcttttgattttcatgtctccccca

SEQ ID NO: 213652 - DNA, 454 bp, Gossypium hirsutum
  unsure (1)..(454): unsure at all n locations
atcacctgaaactccaggggtaaagatatcagttgaaccacagactttgagttttagccaagcaaatgagaagaaatcatatacggtgacgttcagtggtagttcacagccaaccggtacgaacgtgttcgctcgtttggagtggtctgatatgaagtataccgtgggcagtcctattgcaattagctggacatgataggagaataaaggggatggacagtttttaaactttaaaaagttgaatggcttcttaaactcactcaacaagatgagatgggggttggttcaattgttttagtgttttgtagttgccagattcatgatagctaaaccagctaataatggaagctggggtcttaagtgtttgatgttattctctgagagagggaacaatgaaaactaggaacattggtaggttntctttctcagtatacagtgtattaatatgctttta

SEQ ID NO: 213653 - DNA, 419 bp, Gossypium hirsutum
cccacgcgtccgcccacgcgtccgcccacgcgtccgcggacgcatgggtggacccacgcatacatggacgcgtgggtcaagaggacattgctgagatgactggtggaggagtctaccgcaaggttgaatgtaccgggagcatccatgccatgatttatgcatttgaatgtgtacacgatggttggtgagttgcagagcttgtggaggttcctaacaaagacgatgcattcaaaacacatacagtgaatctacttaatgaaaggacttttaagggtactttatttggcaactacaaacactaaactgatattcctgctgtcggtgagagatacatgaacaaggatcttgaacttgataagctcatgactcactctgttcccttatgtgagattaacaacgcatgcgatttcattcttgct

SEQ ID NO: 213654 - DNA, 396 bp, Gossypium hirsutum
ggagatctgctgcgaccaatcttggaaaatttgctgctactgtagaagcacctcatttgaaggtggacatcatgtctatgtttgatgatttgacacaggatgatcaagattctgttcgcctattggctgttgagggttgtgcagcacttggaaagttgttggaaccccaagattgtgtagcacatattctccctgttatagttaatttctcacaggataagtcttggcgtgttcgttacatggtcgcaaatcaattatacgagctgtgtgaagctgtcggacctgagcctactaggtcggaactagtacctgcttatgttcgcctacttcgtgataatgaaactgaagtgcggatagctgctgctggaaaagtaactaagttttgccgaattctga

SEQ ID NO: 213655 - DNA, 433 bp, Gossypium hirsutum
  unsure (1)..(433): unsure at all n locations
cccacgcgtccgcccacgcgtccggaaggctttcaccatgtttctatcatgtcctatacagcaaaatatgcaagttcattttatggccccttccgagaagcactggactctaacccacgctttggagataaaaaaacgtatcagatgaacccagcaaattacagagaagcattagttgaggctcatgaagatgaggctgaaggtgctgacattctattggtcaagcctggtctcccttatttggatatcattagacttctaanggatcaatctcctttgcctattgctgcctaccaggtttcaggtgaatactccatgatcaagccggtagtgttctaaaatgattgatgaagaaagggtcatgatggaatcatngatgtgcctncgccgggctggtgccgacattatccttacatattntgctctacaagct

SEQ ID NO: 213656 - DNA, 444 bp, Gossypium hirsutum; identical to SEQ ID NO: 196410

SEQ ID NO: 213657 - DNA, 445 bp, Gossypium hirsutum
atcggttctacacttaattaaagaccttccggttaccttagcttctcaggtgggcgaataagacgaaggagagtctccttcctttccatttctttttccttttccaaaaacctccgatacttcctatctccctttcctccgattccatatctctctctctttctgctagggtttgggagttagtgaacaacgggttgctatttcatggggcaacaatcgttgatctacgccttcgtggcacagaggcaccgtggtcttagccgactatacggagttcaccggaaacttcaccggcatagcttctcagcgtctccagaaacttccttcttcaaacaacacgttcacttacaactgctatggccatacctttaactatctcgtctataacggcttgactaattgtgtggttgctattgaatacgttggcatacaggttcctatggca

SEQ ID NO: 213658 - DNA, 391 bp, Gossypium hirsutum
cctctatcaaagagtaagcccaacaatgccgcccaagtttgacccaacacaagttgtcgatgtgttcgtccgcgtcaccggcggcgaagtcggagctgctagttccctcgctccgaagatcggtccactcggtttatctcccaaaaagatcggtgaagatattgccaaggaaaccgcaaaggaatggaagggtctccgcgtgaccgtcaagctcactgtccagaaccgtcaggcgaaagtcatggttgtcccgtcggcggcggcgctggtgattaaggctttgaaggagcctgaaagggataggaagaagaccaaaaacatcaagcataatgggaacatcggccttgatgacgtcatcgagattgctaaagtaatgaagccaaggtcgatg

SEQ ID NO: 213659 - DNA, 270 bp, Gossypium hirsutum
ccccgacgtctacacaagttcagggagattcgtcgccaggtttggctttggcggcaaaaaagcagctcccaagaaagtctcgaaacgaaccccagaccgccctctatggtacccaggagcagtggcgcctgattggctcgatggaagtttggtgggtgattacgggttcgacccgttcgggttagggaaaccggcggagtacttgcaatatgatttggattctttggaccagaacctggctaagaattcggctggtgagataattggaac

SEQ ID NO: 213660 - DNA, 454 bp, Gossypium hirsutum
ggctttggtaccatctttggtgagcaacagacaggggatgttggaaatgttggcattgatcttttctttgagatgctttttgagagtttgtccaaggttgaagaacaccgtgtagtatcagttccttatcagtcagtggagattgatatcaatataaaccctcatctcccctctgagtacataaattatctggagaaccccatggaaatcattaatgacgctgagaaagcagctgagaaagacatctggagtttgatgcagtttacagagaatcttcgccgtcaatatggaaaagagccatattccatggaaattcttttgaagaagctttatgtaaggcgaatggcagcagatcttgggatcaacagaatctatgcttcaggaaagatggttggcatggaaaccaggatgagtaagagggttttcaagctgatgacagattccatgatatctg

SEQ ID NO: 213661 - DNA, 253 bp, Gossypium hirsutum
cccacgcgtccgcccacgcgtccgcccacgcgtccggcattgttgatcagccagctataatgtcctactgggatcttagccaagctgagaggagcaagtacgggattttggataacttgattcgattcagcttcggggttgaagacttcgaagatttgaaggccgatatactgcaggccctggagaccatagcttaaatagcgttttgatgtgtttagtatttttcctagtctaaatggagcatgtttgatct

SEQ ID NO: 213662 - DNA, 447 bp, Gossypium hirsutum
  unsure (1)..(447): unsure at all n locations
gtttggacaacactccttgtgtggttgttacatcaaaatacggatggagtgctaatatggagaaaatcatgcagtctcaaaccctatctgattctagcaagcaagcttacatgcgcggcaagaggatcctagagattaacccaagacacccaatcgtcaaggagcttcgtgagagagttgccaaggactctgaggatgagggtgtgaagcaaacggctcagcttatttaccagacggctctaatggagagtggtttcaatctacccgatcccaaggattttgcttcacgcatctacagctcggtgaaatctagcctaaatattagtcccgatgcaacaattgaggatgatgatgatgatgtagaagaaaccgagacagaatcggacacanaagacagtgcagtcaaagatgagttgtagattgcctgaaacctcgggacatgccttt

SEQ ID NO: 213663 - DNA, 449 bp, Gossypium hirsutum
gtaaaagcaatgacactttccctctcggttttagttgccatcgaaatgttcaactcccttaatgccctctctgaagatggaagtctcttgacaatgcctccatgggtcaatccttggctcctcctcgccatgtctgtgtcattcggcctgcacttcttgatcctctatgtgccattccttgctcaagtattcggtatcgtacctttaagctttaacgaatggctgctggttctggccgtcgcattccctgtgattttgatcgacgaagtgttgaagttcgtagggaggttgggacggcggatgagatcctccagtcaaagacctttgaaacccaaaacagagtgaagacagatatggtataaatccgataagtggatactagacagccaatgctagcctctaaaatgattaaaattcttgggaactgtcctctaacatggcgtttttac

SEQ ID NO: 213664 - DNA, 418 bp, Gossypium hirsutum
atggaccataaccatgtaatcgagcttcataattactgcacaagtgtgtatgaagaaggcgatgctcgctcagctctcattactatgcttcaatcactcaatcatgctaaaaatggggtcgacatcgtctctggtacgagagtaaaatcccacttcgccaagcctaattggcgcagtgtctacaagcatattgctgtcaatcacaacaactctcgagtgggggttttttattgtggggcaccggcgctgacaaaagagcttcgccagctagcttcagatttctcccacaagacgtccaccaagtttgatttccataaagagaacttttaatcccatgccagggtcccggatagggagaacctaaaaaagaaatggcttggagctaaccagactctaagacagttacaagcaccttcat

SEQ ID NO: 213665 - DNA, 451 bp, Gossypium hirsutum
cactgttgaagcaatatcagcactctccttttcatgttacccttcttcttctgcctctaaattcctcttatatgccaaacccagtagactctcttccctaacttcccacattcccaagtctactcctttactttcccacaatatctccatctcgccattaatcagcacccaaaagaaattgagttttcaactctgctctacactgcaagaggtgagcttagaagctgaaacagataaaacccagaaatcaaatgtgaaaaggaagctttttgtgttgaatttgccttggtcttatacggttgctgatatcaaagacctctttggccaatgtgggactgttaaagatgttgagatcataaagcaaaaagatgggagaagtaggaacttcgcatttgtgacaatggcttctggtgaagcagctcacgctgctatcgatatactcgattctcat

SEQ ID NO: 213666 - DNA, 224 bp, Gossypium hirsutum
cgattgcgctgataacgggataccgttgcctaatgttacgagcaagatcttggcgaaggtgatcgagtactgcatgaaacacgtctaggctcctaagacagacgatcgatccgccgatgactagctcatgattggggacgcttactttgtcaaggtggattaagctactctctatgatctgatactcacagcgatctatttgaacatcaaggtctagctggatc

SEQ ID NO: 213667 - DNA, 235 bp, Gossypium hirsutum
cccacgcgtccgtctaaccctagccctctatcaggattcaaacatgaaaggaggtaaatccaagtcggatgccaagagcgccaagctctccgtgaataagaaatcaaccacgaaagctggaaagaaatcggggaaggcagctaaggatccaaacaagccaaagaggcctgctagcgccttcttcgttttcatggaggagttccgcgagcaatacaagaaggagcaccctaaaaac

SEQ ID NO: 213668 - DNA, 404 bp, Gossypium hirsutum
ggaattaacaccaagatcacagcatgcttagatcctgatggttggaagacggtttttgttgataatattgatttcctcaaggaattggagtgaggtttagagacattctgatatgatccttttgacacggtccaaatccgagctgcaaggatttgtggaagaactccaccaatcccgttttgtagatgagtcttctacagtgacaattgcataacttcgtggaagtgaagaaacaccgagatgtcagttacaatttcaattatattttcctttttttttttttttgtttcaatcaaattcactctctatgtaggaaagagaagaatggcacagcaaacatacctgcttatcttatgtgtttgaggttgatttctcttcttttgttttttcagtcccacaaataa

SEQ ID NO: 213669 - DNA, 370 bp, Gossypium hirsutum
ctcaactaaacttataacgttcgatcgtttaacgcaaacccatttttaagtgagggaaaggtttcagttcagagtcataagcaacatcaatggctccttcaactctgacggctcttgcggaagagaaaaccttgcaggcaagcttcgttcgtgatgaagatgagcgtcctaaggttgcttacaaccaattcagtaatgatatccctgtcatctctcttgctggtatcgatgatgttgatggcaagaggggtgagatatgcaagaagattgttgaggcttgtgaggattggggtgtcttccaggttgtggatcatggtgttgatactaaactcgtgtccgaaatgacccgtcttgcgagagagttttttgc

SEQ ID NO: 213670 - DNA, 416 bp, Gossypium hirsutum
tctctacaggctcatctggccaaactgctgggcagggaactcgccctgaccattgtgatcagcagtccaaaaatttagtgttctcaaatgctttatcaagtcctgttcgtcggagtctccagcattaccacatagctcaagaaggctactgtcctaatggcggccttccttcaggaaacggagccaggaacaatgaacctagctttctcccaaaccagactagggattcaaatcctcttagctctaatgactcctcaatggacatgcatgccgatagtccatctcatgaatctacctactgagaatgcaaggtaactcccttttgaacccccaacgattaacaagatcaagaagggcttttggtgcattaccattttgtttgtcgctgcttgtacccaagtaaagaaagcatgaca

SEQ ID NO: 213671 - DNA, 405 bp, Gossypium hirsutum
atcgaggtactacattcggactgaaaactggaggtcgaattgaaagtattcttgtttctcttcctttatctgcacgatgggaatatgatcataaaccagaagagggaagtgaagagtggaaactgttagatgcttgcatcaatcctaaggaatggatctgatacttctggtcgagtttctttcaatcctttcgaaaattcccattggttcctttatttttaagatgctctccttttagggagttccttcttgcagtagtagttgtaagttttagcttcatggatttgttgtattaatgtaaatcacgtgaatgtaattagatgccctataatacgcattgcttagagttaagaggtctaacagttgctaatggattgtgtatctgctaacatatttgtgtacttt

SEQ ID NO: 213672 - DNA, 373 bp, Gossypium hirsutum
ctcaactaaacttataacgctcgatcgtttaacgcatacccattcttaagctgagggaaagggttcggttcaaagtcataagcaacatcaatggctccttcaactctgacggctcttgcggaagataaaaccttgcaggcaagcttcgttcgtgatgaagatgagcgtcctaaggttgcttacaaccaattcagtaatgatttccctgtcatctatcttgctgggatcgatgatgttgatggcaagaggggtgagatatgcaacaagattgttgaggcttgtgaggattgaggtgtcttccaggttgtggaatatggtgtcgatactaaactcgtgttcgaaatgacccgtcttgcgagagagttttttgctt

SEQ ID NO: 213673 - DNA, 324 bp, Gossypium hirsutum
gaaggaacaaggattacaacactaacttaaattgtaagcacattgcttagcccgtggtgaaattgtacactgaaacgacagatggttttgccattgagactaaagagagctcccttgtgtggaactaccgagatgctgatcctgatttcggattttgccaggctaaggaacttttatatcacctctaaagcgttcttgctaatgagccagttttggttaatagtggccagcacattgtataagttaaacctcagggtgtgaacaagggtctggttgcggaacatcttctgttgacaatgaaacaaaagggaatgctacccgatt

SEQ ID NO: 213674 - DNA, 413 bp, Gossypium hirsutum
gattgggaaacttgtatctctgtgccggactttgattggaagcagattgctgagcccgtgatgaaattgtacactgaaacgacagatggttctgccattgagactaaagagagctcccttgtgtggaactaccgagatgctgatcctgatttcggattttgccaggctaaggaacttttagatcacctcgaaagcgttcttgctaatgagccagttttggttaagagtggccagcacattgtagaagttaaacctcagggtgtgaacaagggtctggttgcggaacatctcctggtgacaatgaaacaaaagggaatgctacccgattttgttctgtgtattggggatgacaggtctgatgaggacatgtttgaagtgataatgcgagcaacggctggcccctatctctcccc

SEQ ID NO: 213675 - DNA, 355 bp, Gossypium hirsutum
cccacgcgtccggagaaaaaagccgagaaagccccagctgagaaaaaaaccaagagccgagaagaagctccctaaagaagcgggggacaagaagaagaagcgaagcaagaagagcatcgaaacctacaagatctacatcttcaaggtgctgaagcaagaaatgaataaaaatgaggaagaaatgaagaagaaaagaggaaatttcaatgaagctgaagcatgtacagaagatcatcaggtcagcaattcaaagcaaataagaaaaagtgaagaagttgaagatctagtagagaaaagagtggtggttgaagaagaagaagaagaagaagaaaacattgaggcattaaaagctgtc

SEQ ID NO: 213676 - DNA, 408 bp, Gossypium hirsutum
gggggtgcagctggccttcgtgtagcaaaagacattgccgaaaacaatcccggaagtcggatcttactagctacttctgaaactaccattattggtttcaaacctccaagtgcagatagaccatatgatctggttggtgcagctctttttggcgatggtgctggagctatgatcattggctctgatccagttttgagcattgagagacctctctttgagcttcacactgcaatgcagaatttcttgcctgatactgagaagacgattgatgggaaacttacagaagaggggattagtttcaagcttgcaagggagcttcctcagataattgaagataacgttgaaagtttctgtgagaagttgatggcaaccgttggattgactgacaaggactacaacaagatgttt

SEQ ID NO: 213677 - DNA, 411 bp, Gossypium hirsutum
aatagatgtatattgggacctttcttcggctaaattcggatccgggcctgaacctttcgaggggttttatgttggtgttgttgctaataagcaaatggttttgcttcttggggacatgagtaaagaagcttgtaagaaaactggtgcaactcatatcccttgtaatgccagtttagtggctaagaaagagcatgtttttgggaagagggtatttggtaccaaggcgcagttttgtgataatggtcgaattcatgatctgataattgaatgtgacgcggttggtatgaaagatccttgccttataattcgtgtggatggaaaggctttgatgcaagtgaagcggctgcggtggaagttcagagggaaccataccattttggtcgatggaatggctgtagaagtttactggga

SEQ ID NO: 213678 - DNA, 349 bp, Gossypium hirsutum
cccacgcgtccgaaaccccttgtcttccaggttggtcaccttggagaagcttaccaggaatgggttcatacgcctattgtgacagatgaaagtcctcgctttttcaagagtgatttcatggagatcctgactcggacagtgtggtgggtagtaccattgatatgggtgccgggtgcaatgtggttcatctcactctcttacacaatgggtcatacacttccccaagttgatttaatgtctgctgatggaagtttcatttggacattcttggaatactgtttccaccgcttccttttccacattgaaacagagagttactgagcaaacactgtacactatctaattcatg

SEQ ID NO: 213679 - DNA, 411 bp, Gossypium hirsutum
gctattcagccggctatttgcaaaaaaggagatgcgtatactgatggttgggcttgatgctgctggtaaaaccaccattctttacaagctgaagttgggagagattgtcactaccattcccaccatcggtttcaatgttgagaccgttgaatacaagaacatcagcttcactgtttgggatgttggtggccaggacaagatccgaccattgtggagacactatttccaaaacatgcaaggacttattttcgtggttgatagcaatgatcgtgaccgtgtggttgaagctagagatgagttgcacaggatgttgaatgaagatgagttgagggatgctgtgcttctagtatttgcaaacaagcaagatcttccaaatgctatgaatgctgctgagattaccgacaagcttgg

SEQ ID NO: 213680 - DNA, 410 bp, Gossypium hirsutum
  unsure (1)..(410): unsure at all n locations
gcataacagagggagtaaacaacttgaacatcatggattcatcaccttcaaacaacaccaccaggaagaaccgttttcaagtctccaatactaaaaaacccctctttttctacgttaatcttgctaagagatatatgcagcaatacaatgaagtggaactctctgctcttggaatggctattgctacggtagctaccattgccgagatattgaagaacaacggactggctgttgagaaaaaaattatgacttctaccattgatatgcgagaggaatcgggggggccgacctgttcaaaaagcaaaaattgaaatacttctggcaaaatcggagaaattcgatgagttgatggcagctgctgcggccgaggatgctnttggaaacgaggagcaaagctaagattgttactt

SEQ ID NO: 213681 - DNA, 254 bp, Gossypium hirsutum
gttctcaatcatcaccaccccaaaccctatgttcacccacttggctggaagcattggggcatggaaggcgatatcacctgaagttcttcaagcagcattcaaggttcctgctgagacagagaagcttttccgctccaagaggaccaatgatgccatcttcttcccaccaccaaaatgaaggccatccgtttagctgtcttctgccagtttttagtgttttgttttttttccaaataaaatgggttttagtgact

SEQ ID NO: 213682 - DNA, 404 bp, Gossypium hirsutum
cccacgcgtccgcccacgcgtccggagccagcaacctgtgaaccttaaaggtgaagttgtgagcaaccatgatgagcttatgtccaactttttcgcacagccggatgccctagcatatggaaagacagcagagcagttgctgaaggagaatgtttcgcagcatcttattcctcataagacgttctctgggaatcggccttctctcagtcttttgctaccatctcttaacgcttacaatattgggcagctcttggcaagctatgaacatagagttgctgttgaaggttttgtttggggcatcaattcttttgaccagtggggagttgagttgggtaagtcactagctactcaagtccgaaaacagcttaatggatcacgtacaaaaagtgaacctgttgaaggct

SEQ ID NO: 213683 - DNA, 410 bp, Gossypium hirsutum
  unsure (1)..(410): unsure at all n locations
gcagatcaatggcgaaggagttggaaggattcaatttcgagcaaaggcatggaaaggcgagggtgagagtgggtagagtttggaggagcaaagatggatgccgccacttcatggtcgaatggaatgttaacatcagcttgctttccaattgcgttgccgcttatgtccgcgatgacaactctgacatcgtcgctactgacaccatgaaaaactctgtttatgtcaaagcaaaggaatgttcagaacaactttcggcagaggaatttgctattctacttggcaagcacttcacatcattntatccacaggtttttactgcaatagtaaagatagtggaaaagccatgggaacgcatttctgtcaatggccaaccacatgaacatggctttaaactgggatctgaaaagcat

SEQ ID NO: 213684 - DNA, 409 bp, Gossypium hirsutum
cccacgcgtccgccctactaaatcttgcaaagctaggggttctgaccttcgtgttcattttaagaatacacgagaaactgcctttgcaatccgaaagctacctttgacaaaggcaaaaaggtacttggaagatgttattgcccacaagcaagcaattccattcaggcgcttctgtggtggagttgggcgaaccgcacaggctaagaatcgccattctaatggacaaggccgttggcccatgaaatctgcaaaattcattctcgatttgctcaagaatgccgagagcaatgctgaggtgaaaggcttggatgtagattcacttatcatatctcacatccaagtaaaccaagcacagaagcaaaggcgccgaacatatcgtgcacatggaagaattaacccctacatgtct

SEQ ID NO: 213685 - DNA, 409 bp, Gossypium hirsutum
ctaagagtcacagtgaagctgaaaggagaagaagagaacgaatcaacaaccatctcgcaaagctacgcagcttactcccaagcaccaccaaaacggacaatgcttcactgcttgcggaagtgatccaacacgtgaaagagcttaaacggcaaacgtgtttgatagcagaaacaagtccggtaccgaccgaaaccgatgaactaacggtggatacatcggaccaagatggtaagttcgtgataaaagcttcgctttgctgtgaagataggtccgatcttttgcctgacctaatcaaagcattgaaagatttacgtctcaaaacactgaaagctgagatcacgacgctgggcgggcgtgtcaagaatgtactcttcattaccggagaggaacaagaatcgagctgtagcag

SEQ ID NO: 213686 - DNA, 404 bp, Gossypium hirsutum
gccattagggaacacttgccagaaaaaggaaagggagtacaaggaagcccttgatgcatttaatgaaaagaacaaggaaaaagtacaactaatcacaaagttaatggagctggtgagtgaaagggaaaagttaaggatgaagaagctggaggagctgagtaagaacatagattccatacactgatcatataaggaaagagaagcccctttagctttggttttaactgattaggcttgtgtgtgatgtatttaaggtgactttgaatatttatatatgggtgtgttgtaatggtaatctttgtttgtttttggttagcattcgatgaatgttcaactgatttagaaaaagggaaataccctataaaaacaaaacaggtttgtaactaaaatgcatctcttacatt

SEQ ID NO: 213687 - DNA, 406 bp, Gossypium hirsutum
cggacgcgtgggcggacgcgtgggcagccatgcaagtgctaatttcccatttgttgaagggaacccattcacagctaccttatgggtcggtttagaggggttccatatgactgtaaatggaaggcatgaaacatcatttgcatacagggagaaacttgaaccatggtcagttagtggagtcaaagttgtaggtggtttggatctcttatctgcgtttgccaaaggcttgcctgttcctgaagatcatgatttaattgtcaattccaagatacttaaagctcctgtgattactaggaaaagacttgtaatgttagttggggtcttctccactggaaataatttcgagcgtcgtatggcattgagaagatcttggatgcaatttgaggctgtacgctccggggatgta

SEQ ID NO: 213688 - DNA, 408 bp, Gossypium hirsutum
cccacgcgtccgggagaaattaacaaagcaaaccttgcttgagcaaacgatgagtgagcagctaaaggagaggcaggaacaggagaagagactacaaaaggttgcgaaaacaatgaaccatatggaaagagctaagagagaggaagcagcacctttgattgaagcagcttttcaacgacgactgctagaagagaaggtgcttcatgaacgtgaacaacagatgttctatcttcatctgcatttccatatcttgaagggaagagcagcgtttatatgtcgcagtctttcttcatgagagctggaagttgagttgagtaggcagcatcatgatggggacttgaaagagaagaataggttggcacgcatgttagaaaattattcaggcctggaagcaggaaagggatatca

SEQ ID NO: 213689 - DNA, 410 bp, Gossypium hirsutum
cccacgcgtccgcccacgcgtccgggaagaagaatgagaaaagtccagcagaaattgcattgctagttgagagtgtaatggcggagcttgaggtaactgctgaagaagatgcagagcttaatagacaagggaagccagcaattaataaactcaagaagttaccacttcttactgaagttctgtcaaagaagcaacttcaaccagaattcttagatcatggggttttaaccttgttgaaaaattggcttgaaccccttcctgatggaagcttaccaaatataaatatccgtgcagctgttttgcagattttaactgattttccaattgatttagagcagcatgatagaagggagcagctaaagaaaagtggtcttggaaaggtaaggaactttgtatttcaaagcatgttt

SEQ ID NO: 213690 - DNA, 398 bp, Gossypium hirsutum
cggacgcgtgggcaacaccaaaattacattagggaattaattcataggccaccatgactcggtcggtcaactttctacccatgctcctcttgcttactttatcagccctgactgtccaagaaatttcagctgcaccttcctgcactgaagttgccatagaattactcccatgcctcagcttcctgtctggcaacggtgctgcagatgttccatcgcgggcatgttgtttgggtgctcaaactattgcttacgaagcacagaccaaagatgaccgacgggctatctgcgagtgccttgttaatgcattagcaaatattggcacatctgactccttcactgcgcggatacctttaattgctacccaatgcggtgttgatgtttctcttccgccaattacc

SEQ ID NO: 213691 - DNA, 346 bp, Gossypium hirsutum
agtgcaggtcaggatgaattaaagagggcttataagaaagctgcacttaagaatcatccggataaaggtggagaccccgagaagtttaaggaactggctcatgcttatgaagtacttagtgccccatagaagagagaattttttgttcattatggtgaagatgctcttaaaaagggaatggaaggaggcggttcttctaacaacccatttgacatatttgagtcatttttcggtgggggagccttcggaggcggtggtagctcgagaggaagaaggcagaagcgaggtgaagatgtagtgcatgctcttaaagtttctctggaagatttgtacaatgggacgacaa

SEQ ID NO: 213692 - DNA, 382 bp, Gossypium hirsutum
gatcgcgagcgcccacgcgtccgctcctgatatttctggtaccaccattgatgcgcacttgcgatacgctgccggagtcaagggatttgcttgaaggtacttcaaaggtgacgacttttctgaacagaactacattgccaaagcaggggagctcgctcctcaataccgatgatttggtggtttcttcgtccatgaaagagagtccaaatgtgttcggttggtagtaaaacgtacctactatggaaataatgtgatgtttaataggtggcaaataatgtgccatctatattgtgctttgaacttgatgttaccttgtaatgagttcagtttttgatggttcatctttttatgactggtggttgtaatcccatgagggagggcc

SEQ ID NO: 213693 - DNA, 359 bp, Gossypium hirsutum
cccacgcgtccgcacagctgttgatgctgagtggagtaagaccggttgctcatcttagatctcacaatatcccagtggtgttagaccaacccttggttggccaaggcatgtgtgataaccccatgaacgccgtttttgtcccgtctcctattccggttgaggtttcacttatcgaagtctttggtatcacacattttgggagctacattgaagctgcaagtggtgaaacctttagtgcttctgttactactacttcaagaaactatggcatgttctcacctaagattggtcagctatctacggtgccacctaaacaaaggaccccagaagccattgccagagctgttgaatacttggat

SEQ ID NO: 213694 - DNA, 399 bp, Gossypium hirsutum
tcaacatacaggcacgctcatgattgaacgctacagaaagtgaaagcaaggcggagctggaccgggtctgtgatactcttatctccattagggaagaaattgctgaaatcgagaatggaaaggctgatatccacaacaatgttcttaagggagctcctcatccaccatctttgctcatggccgatgcatggacaaagccgtattctcgggaatacgctgccttccctgcttcctggcttcgaactgctaagttctggcctactacaggacgtgttgacaacgtatatggtgatcgcaatgtcatctgcacccttcttccagtatcgcagatggttgaagaggctgctgcagccaacgcgtaggcctaagcctcatctatgttgcgattgaagccaacgt

SEQ ID NO: 213695 - DNA, 287 bp, Gossypium hirsutum
tattttcttactattttcatttaaatttttttttttacttgcatttccatataacacccggcaattatgatgatcttgaataaacctctcttaatatcatagctctttattttctttatttgctgtaatctaactaatcaacttcaccatggggactagaagctcgtgtgccctttttagataaagagttcatcaacattgcaatgagtatagatcctgattggaaaatgataaggcctgatcttgggatgatagattaagtgtatcttacttaatgcatttgacta

SEQ ID NO: 213696 - DNA, 81 bp, Gossypium hirsutum
gaaaaagcttgagcgaacaagaaaatggccgatcagcttaccgacgatcagatctctgaattcaaagaggcctttagcctg

SEQ ID NO: 213697 - DNA, 329 bp, Gossypium hirsutum
tgttaagaaaaagaagatcaagagagagataaaaatccttcagaatttgtgtggtggaccgaatattgttaagcttcttgatgttgtaagagatcatcactccaaaactcctagcttgattttcgagcacgtcaacagtacagatttcaaagttctttaccctactttgacagactatgatatccgctactacatatatgaactcctcaaggcattagattactgtcattcacaaagaataatgcacagagatgtcaagcctcacaatgtcatgatagatcatgagctgcgcaaacttcgcttgatagatatgggacttgcttaatttt

SEQ ID NO: 213698 - DNA, 351 bp, Gossypium hirsutum
ccacgcgtccgggtttgaacagtttaagttactcttattttcatgcagagcatgtaggcaccaaatctgcagttcaaattcgaagccatgctcaaaagtttttctctaaggctcattgctttgagttcattacaagatttccttgattaaatacatgtattatatcttttattaccaagatttacttgattaagaaaatgcattgtatgttttattaccttgcatatgtattatttaatttagttttggatctaaatttttaattttacttaaaaagtctaacttttggaattttaatggggtaataaattaatattttaaaatcttaaattaaattcaattatttttatt

SEQ ID NO: 213699 - DNA, 376 bp, Gossypium hirsutum
cgccaatgttaccaggattggacatgcgggggctattgttagattgcaaggctcctcctccttgacctcaatgtacactcgcaagggcaagaaggggatcaaccaggacgctatgaccgtttgggagaactttacgggggaaaagaatgtgttcttctgcggtgtatttgaccgtcacggtccatcgggtcacaaggttgcacccacgtatgcgatgccttgccattgaagctttcgacaatgcattagcctcggcccagcgctaagaaggagggcgacaaggacagcagtcacaagcattgggaggcaagtttgattagaactttccaagaattggatgaagatcttagcatggaaaattcccttgatagttact

SEQ ID NO: 213700 - DNA, 273 bp, Gossypium hirsutum
cgtcacacgtgattgaagtcgtatcttagagcgtatcaaattatattgttggatggattattagtggatatgatgtgggattcgcatgattgggtgtttaagcaaacagatgggagagctgagttcatgtttaggacatggagtgggtttgatagcaggctttggttagaagaaaaaagtgggtgtttggaacatagtgacaaaggaagaggtcatgagttttctttgttgatctgtgcttgtaagaatcctcgttaatttcttttttttttt

SEQ ID NO: 213701 - DNA, 170 bp, Gossypium hirsutum
cggacgcgtgggtgggtccagtccttactgctaatatcaccatccacccaatctggtacggccggtggcagaaatcccagaagaaaatcatccgtgagttcatcaactcgatctccgccgttgattccaaacacccttcggtggctgggtggtggaagaccctacagttt

SEQ ID NO: 213702 - DNA, 317 bp, Gossypium hirsutum
ggcgggattacccgctgagtttaagcatatcaataagcggaggaaaagaaacttaccaggattcccctagtaacggcgagcaaaccagattttagcccatgaacttattcggagtggaacctctcttattcagccatagtcaaattttatcatttatcatttagctaaggttgaaagaaaaaagataatattttatcatgcatgtcctttatattttattgcaattaataaaaacaatgcaattttcttaaaaacaaaaaggacaatttgacatttggttaaaaaaggaattcaatattaaggaaaatagttggaaa

SEQ ID NO: 213703 - DNA, 399 bp, Gossypium hirsutum
cccacgcgtccgcccacgcgtccgtttgtctatattagtaaggagctgaaaccaaggacgtatagaatcaaggctggtaacacagttaatattgctggattaatgagggtggaacattgacaagtcatttgtggaatcactatatgttacggtttgggcatccccttatctaccattacacatggggaaaactgaaaatgcacaaagaatactagaggatcatattggtcatcagttacagccaccaattggagagcaacgagaaggacagcttggcagttgggtgagaaaggaattccatatttcgggtaatagctgggaatcgagttcagtggacattgctgctgctggtattggttggtttgctattggacttaaaggagaggcagttttaggggt

SEQ ID NO: 213704 - DNA, 368 bp, Gossypium hirsutum
tcgatctcctcgattatgattcactcgccgccgcaatcaatggctgtgctggtgttttccaccttgcttctccatgcagcgtcgatcgagttcacgatcctcagaaggagcttttggatcctgcgattaaaggaacgcttaatgtactgacagctgccaaagagcttggtgttaaacgtgtggtggttacgtcttcaatctcctccatgtggccctgcccaaactggccagctgataaaatcagaacagaggattgctggactgatattgagtattgcaagcaaaatgaattatggtatccaatttccaaaacactagctgagaaggctgcatgggaattttccaaggagaaaggtctggatgtggtg

SEQ ID NO: 213705 - DNA, 399 bp, Gossypium hirsutum
ctcgcttcatagacccgatgttttaccgattaatgatctcgggattcggaaaggggttcagttactctacagtttggaggagttgccgaggccttcgcagatggatcaattgtgtgagaaatggaggccttataggtcagttgcttcgtggtatctctggaggtttgtggaggccaaaggagcaccttctagtgcagctgctgttgctgctggtgctagtcttcagccactgccgcaagaggagcatcaacatcagcagcagccccagcttctcgatcccattaatagcattctggaccttggggcctgtacttgggggcaatgattatcattggaacacaatgtatgtgatttgtcacaatgcattgatcaccttgaaggacaggcacttcaaatgcg

SEQ ID NO: 213706 - DNA, 336 bp, Gossypium hirsutum
ggaaactattgttccgacaaaaaaccggctgcggtaaattggattgaaggacgaggcaaatctgttgtctgtgaagccaccattaagggtgatgtggttaggaaagtcttgaaaacaagtgtggaatctctcgttgagcttaacatgctgaagaaccttactggatcagctatggctggagctctgggtggatttaacgctcacgccagtaacatcgttgctgcaatctacatagctaccggccaagatccggctcaaaacgtcgagagctcgcattgcatcacgatgatggaagctgttaatgatggcaaagaccttcacgtctctgtcacaatg

SEQ ID NO: 213707 - DNA, 337 bp, Gossypium hirsutum
cttgccgaggaatttcacggttagatcatcggaagaaagtgacagttacgggagagtagcagcagagtttgaaggaaatgtggatgcagtctcgacagaggatcaaaactggtcaggtctggaaggtgtgacacgagtgaactcacttgtccagcttccaagattttccgaggaaagaccaaacccttaacttttgggtattgtctagaaacgaaactgaactggttttgctgtaatatccaaagaaaagaaagccctaatgaaatggtgcctattgtgttgtacatttctgctataattaaagaaatttctcaaccaaaacaaatatataacaatt

SEQ ID NO: 213708 - DNA, 383 bp, Gossypium hirsutum
cccacgcgtccgaagcctctcagcagccctttctttctcttcttctccttctccccttctccggtccctgagcaggccagcctgtaattcaaataagatgtatacatcaatgaagaagatccacaaggataaggatgttgaaccaactgaatttgaggagtcggttgcccaggcattcttcgatttggagaataccaaccaggacctgaaaagtgacctcaaagatctctacattaattcagcagtccaaattgatgtttccgggagccggaaagctgttgttatccatgttccctacagattaaggaaagcttttcgcaaggttcatgttaagcttgtgagggaacttgaaaagaagttcagtggcaaggatgtgattctca

SEQ ID NO: 213709 - DNA, 435 bp, Gossypium hirsutum
accggactggaatacccggcccacacccacgcgtcttagcaacagtgataaggtcccaccagctgattttgcaaaggtagctcaagaatattctgaatgcccttcagggaagaaaggtggagatttaggatggtttccgcggggtaagatggctggtccgtttcaggaagttgcctttaacacagtcattggagctaccagtgcacctttcaaatctacacatggataccatatcatcctctgtgaagggaggaagaattgaagcgagccaagatacagtcaggcagtgaagatgagttttatgttctatattaatgcagacatgaagtatgttcagtttgaaatattatccaatgattattcttcggatttgcaactgggataatgcttcttcttgttgaaaaatggcctgtaagttgatcttggatgtttgat

SEQ ID NO: 213710 - DNA, 391 bp, Gossypium hirsutum
  unsure (1)..(391): unsure at all n locations
cccacgcgtccggttatttttttaaacaaagatccccgatctcctgcttagagttagtttctcatatttatggggctacttgaccagttgtgggacgacaccgttgcgggtcctcgacccgataatggtctcggcaagctccgaaagcactccactttcactttccgctctaactcctccaaggaaaccgatggcgggagtgtgagatcgtacaatgatgagacgccggaggaaacaacgaaagtgacacgtacgattatgatcgtaaaatcgccgcgttaccagagcggatcgcctccggtttcgccggccgaatcgactcctccggaggaagcagagagtcgtatcggtttcggagaaggtcaacatcagatgcatacganaaggggaa

SEQ ID NO: 213711 - DNA, 417 bp, Gossypium hirsutum
  unsure (1)..(417): unsure at all n locations
atcaagtngaacaatgcaattttagcggaggagaaannttctcttcttctttttttttttttttttttgttcnnngnncatgtatattgctggaggtgctactcaaaattcaatcaaagttgcacagtggatgctttaaattcctggtgcaactggttacattggctgcattgggaaggacaagtttggggaggaaatgaagaagaactcaaaagctgctggtgttaatgttcaatatcttgaggatgaaactgcaccaacaggaacctgtgctgtttgtgttgntggtggtgaaaggtcactcattgcaaatctatcagctgctaactgctacaagtctgagcatttgaagaagcctgagaatttggcgtttggttgaaaggccaattactttttattttgctggatttttcctta

SEQ ID NO: 213712 - DNA, 382 bp, Gossypium hirsutum; identical to SEQ ID NO: 196389

SEQ ID NO: 213713 - DNA, 405 bp, Gossypium hirsutum
tttggacttccagaaaaagattactttctctaaacatgagaagccagacttgggttccagttccttattgtgcaagggagaagtgtacaagcaacttcttgaaatggaaaaggaagatgatcttcttgatcagttgtggaagtctagaagcttggctctggagagggtaagaggaaatcggcagcatattatcctagtagcatcattgattgatcgcatacccaaccttgctggattggcacgtacctgtgaggtttttaaaacacaggggttagctgttgcagatgcaaaaatagtacaggacaaacagtttcaactcatcagtgtgacagcagagaaatgggttcctattatagaggtccctgtaaatagtgtgaaacaattcttggagaaaaagaagcggga

SEQ ID NO: 213714 - DNA, 366 bp, Gossypium hirsutum
  unsure (1)..(366): unsure at all n locations
tcgcccacgcgtncggttggtcttgccgccgctgaaggtgcaagggtttgtggggcttctcggatcatcgctgttgatgtgaaccccagaagatttgaagaagctaagaggtttgggattacagaatttgtgaatccaaaagactacgataagccagttcaagaggtgattgtggagatgaccggcggaggagtggatcgcaatgtggagtgtacagggagcgtgcaagccatgatttccgcttttgaatgcgtccatgatggttggggtgtttgtgtgctggtgggtgtgccaaagaaagacgatgcattcaaaactcattcaatgaatctactaagtgagaggacccttaagggtgctttttat

SEQ ID NO: 213715 - DNA, 410 bp, Gossypium hirsutum
tggataaattagatgcactagtgaaaaattgcaattccttttcatcattgacctatgttgctgtcaacaaaaaggggaatttgttatcaaacattggcctcacagatgtgaatgcagtaacttggggagccttccctgctaaagaaataatccaaccaactgtggtggatcctgccagttttgtggtgtggaaggacgaagcatttgaaatctggtctcgatcatggtccaccttgtacccagatggtgatccttctaagaatttgctcgaagagattcagagcagctactatttggtgagcttggtagataacaattacatggatggtaatatttttggtgtttttgaagatctttgaagatgagatttgagatattattatgctgcagtgcagtgttccacttatgct

SEQ ID NO: 213716 - DNA, 413 bp, Gossypium hirsutum
ggactaaaaactggtggtactgtccagcagcgtgcagagaggcttttcctaaccaagcacactcctctggaaaagctggacaaaaagcattttgcaaaaggctcactcggacctcgacaaaatgggtctactgcagtttcacaagacattaacagtctgaaacatattgcattgatggaggccaagatgaagaaactcgctgatttactgaacaattgaacaaacaaaagaaaatgtggtaaagaagcaagcattgacatatgaggaaatggaacaagaacgtgaggaggaagagacacaagttgacacggaaagtgatgatgaagatcaacagatctataatcctcttaaattgccaatgggttgggatggcaagcctataccttactggctttacaaacttcatggtcttg

SEQ ID NO: 213717 - DNA, 411 bp, Gossypium hirsutum
ctttcgatgggagcggcattaaaagactattaaccaacaagttcgaactagacaagttgcttaatacggctttagaaaatgtcccgaaagatcgtaatggtaaagtatcaaaggagtacttgcgcgtcgtgctagacgtagtggcaccatctgccagtttacctccaataggtgcagttgaacagatcgaccaggtcgttgccgatgcttttgacatgataaacgcggacgacgggaaagcggttaaagaagatgagttcaagaaactattgacggagatcttaggaagcgtcatgctgcagttagaaggcaacccggtctcgatttcttcgaattctgtcgttcacgagcctctcgcatcgtcctcatcgttactgcaaccatcatcctagttgcatatcactaatatta

SEQ ID NO: 213718 - DNA, 408 bp, Gossypium hirsutum
ataccacttaaggagttgatagagaggcactgcggaggcatcagaggtggatgggacaatttacttgcagtaataccaggaggttcatctgttccacttttacccaagcacatatgtgatgatgtcctgatggattatgatgcactcaaggctgtccagtcaggactgggaactgctgcagtaattgtgatggataagtcaactgatgttgtagatgcaattgcgaggctttcgtacttctacaagcacgagagttgtggacagtgcacgccctgcagagaagggactggatggctatggatgatcatggaaagattgaaagttgggaatgcaaagttggaagagattgacatgcttcaggaggtgaccaagcagattgaagggcacacaatttgcgctttaggtgat

SEQ ID NO: 213719 - DNA, 401 bp, Gossypium hirsutum
gggaactcggaatttccacaagactatgcattttttgagggtactacacatcctgttatagatggtgcaaacacttacaccaatgcatttgatggaaattatgacacattaattgcggccctcagtaaaatgggatacgggcagatgcccatagttattggggaagtgggctggcctacagatggtgcggtcggtgctaatctcactgctgctgaggttttcaaccaaggcctcattaagcatgtgttaagcaacaaaggaacccctctaaggccggctgttccacccatggatgtttatcttttcagtttacttgatgaaggggcaaagagcacccttccaaggaactttgaaaggcactggggaattttctcctttgatggccaggctaaatacgcact

SEQ ID NO: 213720 - DNA, 407 bp, Gossypium hirsutum
cccacgcgtccgctggatcctgttcagaagctggcctctggtggatgtgacaatatggtcaaagtatggaggctgtataatgggagttggaagatggactacagccctgccctccagatgcacactgattgggtgcgggatgttgcttgggcacccaacttggggctcccaaaatccaccattgcaagtgcttctcaggatgggaaagttattatatggacttgcggtaaagaaggggaacaatggaagggtgcgattttgaaggatttcaagaccccagtttggagggtctcatggtcgctgactggaaacttattgtcggttgccgatgccaataacaatgttacattgtggaaagaaacggttgatgatgagtggcaagaagtgaatgctattgagccatgaag

SEQ ID NO: 213721 - DNA, 374 bp, Gossypium hirsutum
  unsure (1)..(374): unsure at all n locations
caaattccttttttttcccctccacccaaccctaaaaaatcatggcgacagctcaaatcagcaaaaagcgaaagttcgtcgctgatggagttttcttcgcggaactcaacgaggtattgaccagggaactggctgaggatggatactctggagtcgaagtcagagttactcctatgcgtacggagatcatcatcagagccacccgcacccaanacgttctcggtgagaaaggtaggaggattagggagcttacctcagtggttcagaagcgattcaagttcccagaaaacagcgtcgagctttacgctgagaaggtcaacaacagaggtctttgcgctattgctcaggccgagtctcttcgctacaagctactc

SEQ ID NO: 213722 - DNA, 339 bp, Gossypium hirsutum
ccctgtgaccaattggttttggaaatggcccccatgtataaaactgatcggccaaagtatgaagctacagcacgtggctggacccagaagtatgccatgggatgatggtggttagtgggtaatacgtattggcttttgtacgatgccatgtatgtgttaaaaccttcatatattttggtttgggaaggaacttgtgattgtgcttagatttggatttgaattatgtggacatcttatatcaaaggtgggtctatggttgtaagagagaatgccattccattccatgtctttttatagcttgttatatgatgaagcatttcctaaaactttcatgcttat

SEQ ID NO: 213723 - DNA, 410 bp, Gossypium hirsutum
cccacgcgtccgcccacgcgtccgctcttttcaatgctctggcaaaggctaatattaacattcgtgctatagcccaaggttgttctgagtacaatatcacagtggttctcaagcgtgaagattgtatacgggctttaagagctgtgcattcaaggttttatctttcaaggacgaccatagcaatggggatcattggacctggattgattggtgcgacattactcgaccagttgagggatcaggcagcagtcctcaaggaagaatttaacattgatttgcgtgttatggggattactggttcgaggacaatgcttttaagtgaagttggtctcgacttgtcaagatggagagaacttctgaagcagaaaggacaagttgctgatttagaaaaatttactcaacacgtgcat

SEQ ID NO: 213724 - DNA, 404 bp, Gossypium hirsutum
atcggagtctcgtgccgatgacaggcaatggcttacatattgggttctctattccatgatgacattgctggaactcacttttgccaaagtcattgaatggattcctatctggtcctatgcaaagctgattttcacttgctggctggtcatcccgtacttctctggcgctgcctatgtttacgagcactatctgcgacccttctttatgaacccacaacagacgattaacatctggtatgttccgagaaagaaggatttcttcagtaagccggacgatattttaactgccgctgagaaatacattgaagagaatggaacagatgcatttgagaagctcattcatcgggctgacaagtccaggagtagcagttatggtcacatatatgatgatgatggctacaggc

SEQ ID NO: 213725 - DNA, 413 bp, Gossypium hirsutum
agatcatccaattattaaagacttgaatgctgcttgcaagaatgcgcctgaaagcagtgaagccaagagagcagttgacttgttgtatgatacagcattgatctccagtggtttttctcccgacagccctgccgagttaggtaacaagatatatgagatgatggcaatggcacttggaggaagatggggtagatatgaggacgatgatgaagtggaagcatcagaagttagtgctgctgaaactgatacgagtgccagtgaagcttcagagaaccaagtgatcgaaccatcggaagtaaggacagagagtgatccttggcaagattgaagtgtcaaaatttaaataaaaattttcctgtattatctgattgctattaacaaaagaatccagaaggaaagaagagttgtgggtt

SEQ ID NO: 213726 - DNA, 413 bp, Gossypium hirsutum
ctcgcatatttgttgctagcccctccaggaggatcagcatcaaagatatcaagagccatccgtggtttttgaagaacttgcccagggaactgacagaggcagctcaagctgcttactacaggaaagaaaacccgacgttctccctccaaagtgttgatgaaatcatgaaaatagttgaagaggccaaagtcgcccctcgagtatcacggtcgatcggaggctttggctggggtggagaagaagatggggatgcaaaggaagaagatgcagaagaagaagtagaagaagaagacgaagaagatgagtacgagaaaacggtaaaagaggtacatgccagtggagaaattcacgtctcttaaggaaaaaagagagtaatatatggtttccaaacgatggagttttggtgtctttta

SEQ ID NO: 213727 - DNA, 397 bp, Gossypium hirsutum
gtaacttttctttgactggtcagaaagggaaaacttacaaatttagggttacaaatgtgggaatatcaacatcaattaactttaggatccagggtcatccaatgactcttgttgaagttgaaggatgtcatactctgcaggaggtgtatgaatccatcgatattcatgcgggtcaatccatagctgttttggttaccttacatgggtcggttaaagactacttcattgtggcttcgacccgtttcaccaagcccatcctcaccactaccggtattcttcgctatcagggttcccaaactccgccctctttgccattgcctgttgccccaacttatcacgttcactggtccatgaaacatgccaggactatcaggatgaacttgacagcaaatgcagc

SEQ ID NO: 213728 - DNA, 409 bp, Gossypium hirsutum
ctttgcttctgaagatccagagaatgacatgatcaaaccagcgacccaaggagtggtgaacgttttgaaagcttgtgccaaagcaaaaacagttaaacgtgtcgtcttgacatcatctgccgcagctgtgtctatcaacacactgaatgggacagatctggtcatgacagagaaagactggaccgatatcgagttcttatcatcagcaaagccaccaacttgggggtaccctgcatccaagacgttggctgaaaaggcagcttggaaatttgctgaagaaaacaacattgatctcattacagttatcccttctctcatgactggtccttccctcaccccaattgtccccagcagcataggccttgctacatctttgatttcaggcaatgaattcctcataaatgctttg

SEQ ID NO: 213729 - DNA, 410 bp, Gossypium hirsutum
gccacgcgttcggccacgcgttcgaacaggctggagaaaccctaaatgatttcctatttcatcaccctcacaacactttcttcatgagctttggcaacgctgctggtttggcttatgtccgccatgaacgtgctgctttaagtcatcaaaaggtggtttggggggttgatgacatatactggctttttttaaggggcctggaccatctatttatgcctgataaaccatatgggctttcccaaaggggcaatggggcgatgtttgtgattgaagcatataggacgctgagggataagggtccataccctgctgatcaggttgttaaagatcttgaaggaagctttgcctttgtgatctatgacagcaagactggaaccgtgtttgctgcactggggtctgatggtggggtg

SEQ ID NO: 213730 - DNA, 402 bp, Gossypium hirsutum
cgacaagacgaggaatgcatggaaaacggtctctcagatacggatttcgagcattacgtgaaggtaatcagatggttagaatgcaaaggacatatcgaaaagaacttcagacagaaattcctcacctggtacagcttaagagcaaccccgcaagaagtaaggatcgtgaaagtattcgttgatatcttcatttccgatccagcatctcttgcggagcagctcgtggacacattctccgattgtatctccagcaaaggatcattcgtcgtaccggctggcttttgcatgaagctttggcattgacatgaacggactgttgccgagtagtgagctacatgtttccgagtgcaaaaccggattaaagtcggtgttcggcaataattctttagacccacaacattc

SEQ ID NO: 213731 - DNA, 412 bp, Gossypium hirsutum
gccggcacttcctctcttccgtaatctcttactttcagatttcagtctcagtaaagctttttcagcaccagccaaaatggggaagactcgtggaatgggagctggccgtaagctgagaacccaccgcagaaggcagaggtgggccgacaaggcatataagaagtcaaatcttggaaatgaatggaagaaaccttttgctggatcatcacatgccaagggcatagttcttgagaaaattggcattgaagctaagcagcctaactctgctatccgaaaatgtgctcgtgttcagttgatcaagaatggaaagaaaattgctgcttttgtacccaatgacggttgcttaaactacattgaggaaaatgatgaggtattgattgctggatttggacgaaaggggcatgctgtggga

SEQ ID NO: 213732 - DNA, 407 bp, Gossypium hirsutum
aactagagcagactaggttattggttcttgaagcagctgaccagcttgatcgacttggaaacaagaaagcccgtggaaccattgcaatggcgaaggtagcagctccgaacatggccctgaaggtactggacagggcaatacaagtacatggtggagccggggtatcatccgacactgttttggcacacctttgggcatcagcaagaacattgagaatcgctgatggacctgatgaagtgcacttgggtaccattgctcagttagaactacgaagagcaaagctttgaaggatcttgaaactatgatcatcacacaacagtactttttattttttcttcttgcagtctcgaagataaaaataaggaaaaggaatccaaaaaattgggcattttcttagtaatattatg

SEQ ID NO: 213733 - DNA, 382 bp, Gossypium hirsutum
ggcgaaaatgccgaagagaacaacgcacacatactcaagcgaagacgcagcaccggatggacctgactctgatcttttcgtctactattgcaagcactgcggttcccacgtccttattaccgaaaatgcccaagcgaaagactgataaagcagatgtgctagacaagaaaaagcaccttgctaggcttaacatcagcgaggcgggaaaagttctcttgaagaggggagacgggaaattggagaagcaattccgtatgaattgtataggttgtggcctatttgtttgctatcgggctgaagatgatctcgtaactgcgcctttcatttatgctgttgatggtgccctctgtacagttgcagtagagaccaagcctccagatgc

SEQ ID NO: 213734 - DNA, 410 bp, Gossypium hirsutum
  unsure (1)..(410): unsure at all n locations
atcacctgaaactccaggggtaaagatatcagttgaaccacagactttgagttntagccaagcaaatgagaagaaatcatatacggtgacgttcagtggtagttcacagccaaccggtacgaacgtgttcgctcgtttggagtggtctgatatgaagtataccgtgggcagtcctattgcaattagctggacatgataggagaataaaggggatggacagtttttaaactttaaaaagttgaatggcttcttaaactcactcaacaagatgagatgggggttggttcaattgttttagtgttttgtagttgccagattcatgatagctaaaccagctaataatggaagctggggtcttaagtgtttgatgttattctctgagagagggaacaatgaaaactaggaacatt

SEQ ID NO: 213735 - DNA, 410 bp, Gossypium hirsutum
cccacgcgtccgcccacgcgtccgcccacgcgtccgagcggtttaatctacgaggaaacccgtggggttttgaagatcttcttggagaacgtgattcgtgatgcagtaacctacaccgaacatgcgaggaggaagactgtgactgctatggatgtggtttatgcactgaagaggcagggcaggactttgtatgggtttggtggttaaatgatttagggaatagatcttttagcgatgttggcggatctggacttgttgtcatgctagcaagaatgtttgagtttaggattagggatagggcttgtaattaaggggtgctattgggattactggaaattataatttggtcgtgtagttttctttggtgatttgtaattcgtgccatgaattgcagattttaaatgaaattg

SEQ ID NO: 213736 - DNA, 406 bp, Gossypium hirsutum
  unsure (1)..(406): unsure at all n locations
attatgatcaactagtcaagatagccaaggttcttgggacagatgaattaaatgcttatctaaataagtatggtatcgaattggatccccatcttttatttcttgttgggaggcatagtcacaaaccttggacaaagttcattaatgctgagaatcaacatctggcattacctgaggccattgatttcctcgataagttgcttcgatatgatcatttggaaaggctaactgcaaaagaagcaatggctcatccttatttttacccgattagaaatgcggaaagcagcagaactcggacctagcatgccaacttcacggtgatgatgttaaggcatggcatcttcttctttcttcatatgcatggntagatcctcatccctttatagaatgacagaagattaaagtc

SEQ ID NO: 213737 - DNA, 337 bp, Gossypium hirsutum
cggacgcgtggttcaagaggtcattgctgagatgactggtggaggagtcgaccgcagtgttgaatgtaccgggagcattcaggccatgatttctgcatttgaatgtgtccacgatggttggggagttgcagtgcttgtgggggttcccaacaaagacgatgcattctaaactcatccagtgaatctactgaatgaaaggactctcaagggtactttctttggcaactacaaacctcgaactgatattcctgctgtcgatgagagatacatgaacaaagaactcgaacttgataagttcatcactcactctgttcccttttttgagaataacaaggca

SEQ ID NO: 213738 - DNA, 398 bp, Gossypium hirsutum
cccacgcgtccgcggacgcgttagtcaacgttttcgtaacagatgaattacatgcggaggtaaataagtatagtattgaagtggattcaaatgtttttttacatgcaaccaggactaacgtgttagctcgttcggagtggattgatatgaagtatacagagggcagttctattgcagtcatctagtcattagatgagtagattggatatgatcatttggaaaggctaactgcaaaagaagcaatggcttattcttatttttacccgattagaaatgctgaaagcagcagaacttgaacctagcatgccaactagacggtgatgatgttaacgcatggaataatcttctttcttcatatgcatggttaaatcctcattcctttatagaatgacagaaga

SEQ ID NO: 213739 - DNA, 151 bp, Gossypium hirsutum
ggagatctgctgcgaccaatcttggaaaatttgctgctactgtagaagcacctcatttgaaggtggacatcatgtctatgtttgatgatttgacacaggatgatcaagattctgttcgcctattggctgttgagggttgtgcagcacttgg

SEQ ID NO: 213740 - DNA, 408 bp, Gossypium hirsutum
  unsure (1)..(408): unsure at all n locations
cactatttctattgtatctgctagttggtttttattgtctgtcagttgaaactgcagtgctaaagggtgtagctcagtagtgtggaccaaaaagcatttgtttccgtgttgcacgtttatttgctcatacgaatgtctttnnnnttnnnnnnnttttttttctctccaggtatatgggtacagtaactggcataagcgatttggatcaagttcgctggccaaattcccattggcggtctgtgaaggtaattattaacatttttttacatggatctcatagtagatggtttttattgtttgggatggataatatcatgttctattttattatgcatgtctaaagaaatttatgtgtttaacgtccatgatttcttgtttgatgtctttgatttcatggagattcaatgc

SEQ ID NO: 213741 - DNA, 406 bp, Gossypium hirsutum
gttgatgttcttcccaagaagcctgctaaacagtttcatgagcaggaaaatgggaacattgagaaaaatggaaagcattctgagcaaaagagctcaaagaagcagcaaaatggttcagttcagccaaagaaaccatttcaaagagtgaatgtggatgaggtagaatttgttgatagcaggcttgaagataattcatactgggcaaaggatggtgctgaaactggatatggtgcaaaagcacaagaagttctaggtcaagtaagaggaaggggtttccggcacgagaagaccaagaagaaacgtggatcatacaggggagggcagattgatctgcagtcgcactctataaaattcaattattctgatgaggagtaaatgctgactttctagttggatgatgagcact

SEQ ID NO: 213742 - DNA, 415 bp, Gossypium hirsutum
  unsure (1)..(415): unsure at all n locations
cccacgcgtncgctacctgccactctgtctgaagctttgagctttcaacctttccaacaatggcagcgataattggtgagtctccaaagcttgctctgtattcatactggcaaagctcatgttcatggcgagttcgcttcgctttaaacctcaaagggatttcgtatgagtacaaagctgtgaatctttcaaaaggagagcagtttacaccagagtttgagaaattgaaccctctgcattttgttcctgttcttgatgatggtgatgttgtcgtgtctgattcatatgcaatcttgttgtatttggaagaaaaataccctcaaatagctctcttaccagctgatccccagcttaaagctctgaatcttcaggttgccagcatagtcacctctagcatacagcctcttcatatgct

SEQ ID NO: 213743 - DNA, 403 bp, Gossypium hirsutum
cctctatcaaagagtaagcccaacaatgccgcccaagtttgacccaacacaagttgtcgatgtgttcgtccgcgtcaccggcggcgaagtcggagctgctagttccctcgctccgaagatcggtccactcggtttatctcccaaaaagatcggtgaagatattgccaaggaaaccgcaaaggaatggaagggtctccgcgtgaccgtcaagctcactgtccagaaccgtcaggcgaaagtcatggttgtcccgtcggcggcggcgctggtgattaaggctttgaaggagcctgaaagggataggaagaagaccaaaaacatcaagcataatgggaacatcggccttgatgacgtcatcgagattgctaaagtaatgaggccaaggtcgatggcgaaggactta

SEQ ID NO: 213744 - DNA, 411 bp, Gossypium hirsutum
ccccgccgtttacccaggttcagggagattcgtcgccaggtttggctttggcggcaaaaaagcagctcccaagaaagtctcgaaacgaaccccagaccgccctctatggtacccaggagcagtggcgcctgattggctcgatggaagtttggtggggtgattacgggttcgacccgttcgggttagggaaaccggcggagtacttgcaatatgatttggattctttggaccagaacctggctaagaattcggctggtgagataattggaactaggaccgaggttgccgacgtgaaggcgacgccgtttcagccttacagcgaggtttttggtctacagaggtttagggagtgtgagttgatccatggacggtgggccatgttggctacgcttggtgcactttaccgtgaat

SEQ ID NO: 213745 - DNA, 393 bp, Gossypium hirsutum
cccacgcgtccgcccacgcgtccgcccacgcgtccggcattgttgatcagccagctataatgtcctactgggatcttagccaagctgagaggagcaagtacgggattttggataacttgattcgattcagcttcggggttgaagacttcgaagatttgaaggccgatatactgcaggccctggagaccatagcttaaatagcgttttgatgtgtttagtatttttcctagtctaaatggagcatgttgatctccaaaagtactttctgttgtgtttgattttggtagatccacattggttgaatgaagtcatgattttggtacccatgaataatttggaactttgggggtgcttggttttagaaaattcatctaccgagaaaatgttttctgt

SEQ ID NO: 213746 - DNA, 172 bp, Gossypium hirsutum
tgggcaacacgtcctgtgtgcgaggtccatcacaaaacgggtggggtgctcatatggggaaaataatgcgacgtcgaaccctatctgattctatcaagcgagcttacatgcgcggggagagggtcctctagatttacccccgacaccccctcgtgtaagggctttttgagag

SEQ ID NO: 213747 - DNA, 380 bp, Gossypium hirsutum
gtaaaagcaatgacactttccctctcggttttagttgccatcgaaatgttcaactcccttaatgccctctctgaagatggaagtctcttgacaatgcctccatgggtcaatccttggctcctcctcgccatgtctgtgtcattcggcctgcacttcttgatcctctatgtgccattccttgctcaagtattcggtatcgtacctttaagctttaacgaatggctgctggttctggccgtcgcattccctgtgattttgatcgacgaagtgttgaagttcgtagggaggttgggacggcggatgagatcctccagtcaaagacctttgaaacccaaaacagagtgaagacagatatggtataaatccgataagtggatact

SEQ ID NO: 213748 - DNA, 416 bp, Gossypium hirsutum
  unsure (1)..(416): unsure at all n locations
atggaccataaccatgtaatcgaccttcataattactgcccaagtgtgtatgaagaaggcgatgctcgctcagctctcattactatgcttcaatcactcaatcatgctaaaaatggngtcgacatcgtctctggtacgagagtaaaatcccacttcgccaagcctaattggcgcagtgtctacaagcatattgctgtcaatcacaacaactctcgagtgggggttttttattgtggggcaccggcgctgacaaaagagcttcgccagctagcttcagatttctcccacaagacgtccaccaagtttgatttccataaagagaacttttaatcccatgccagggtcccggataaggagaacctaaaaaagaaatgctttggagctaaccagactctagagacagttacaagcacctt

SEQ ID NO: 213749 - DNA, 415 bp, Gossypium hirsutum
aactgttgaagcattaccaccaccctccttttcacgtgaccctttttcttttaccacgaaattcctctttaatgccaaacccagtagactcttttccctaactttccacataccgaggtctacattcgttacttgtacacaagatctatatctcttcattaatcctcactcaaacgatgtcgagtatcctactgttgtctatcacagcagctgtgagctgagggtcttttattgaggggcaccggcactgacatgagagctgggagcgctagctttagatttctcccacatgacgttcaccaggtttgattttcataaagagaactttttattccatgccagggtcctcggttatgagaacctaaaaaagaaatgcttttggacttacccgactctaaagacaggttacagcacc

SEQ ID NO: 213750 - DNA, 309 bp, Gossypium hirsutum
gcgtatcgcgcacgatatagcggctgatctgttgcctaatgttacgagcaagatcttagcgaaggtgatcgagtactgcaagaaacacgtcgaggctcctaagacagacgatcgatccgccgatgactagctcaagagttgggacgctgactttgtcaaggtcgatcaagctactctttttgatttcattctggtattgatcaacatcaacttcttgctcttgatggactccttcgttgaagacaccgatttccagttcttcttcgccgccggctgcaccttcttgcacgttttcatggccgtttgtag

SEQ ID NO: 213751 - DNA, 399 bp, Gossypium hirsutum
cccacgcgtccgcccacgcgtccgggactctttgtctttcttcaactgctaggagatatcaatcagctcttcagtcacgatctgatatgtttatggggtttgaagaaatggatggagaagacgatgtaagagaggagtttccatgccctttttgttcagagtatttcgatatcgtgggcttgtgctgtcacattgatgatgaacatcctgtggaggctaacaatgggggtatgtcctgtctgtgcaatgagggtgggagtagatatggttgcgcatataacgcaacaacatggacatatattcaagcgtaagcggagatcacgtagaagtggatctcattcaacgctttctcttctgaggaaagagctgcgagacggaaacctgcagtccctcttcggc

SEQ ID NO: 213752 - DNA, 426 bp, Gossypium hirsutum
cccacgcgtccggagatgcgtaggaagcaggcgcaagcagctcaagaggcttatgaggaagatgatgacatgcatggtggtgcccaaagagtgcaatgcgctcagcaatgatcggtggcagacggtaaggaatggaatgtatgattgtttaacaaaaattatttgaaaataccattctggatatggttgtttgcttagaccatttcttctagagtgctatctgctttggtaactggtaaagtgtatggaaagatttagcgttggaacttgacctatttgtttatggtatacaacctattgcttcttgtgagcttagtttttttagttttgattttatatttgaatttgagaaatcatttagggatattttatgatttgaaggtgttcattgttccgatttgattcgggtcattataagatgtttgg

SEQ ID NO: 213753 - DNA, 425 bp, Gossypium hirsutum
cagaggttgtcattggtttggaatatcttcattgtctaggaataatatacagagacctgaagccagaaaacattctactccagaaagatggacatgttgtcttaacggactttgatttatcatttatgactccctgtaaaccccaagttttaaagcatcccttgcctaacaagagaaggagatccaggaatcaacctcctcctacatttgttgctgaaccatctacacagtcaaattcatttgttggaactgaagaatacattgctcctgaaattattacaggtgcaggacacagtagtgcaattgattggtgggcactcggtattttgctgtatgagatgctgtatgggcgtacgcctttcaggggtaaaaacaggcagaagacattctccaacatcttgcacaaagatctctccttccccagt

SEQ ID NO: 213754 - DNA, 429 bp, Gossypium hirsutum
gaaaaattgccagttccggatatctaaagaacatagaaaagctggctgaagctgaagtttatgatgccaaaaaacttgtcaggaagttgtctaccaacagatttcgtagtattctgagtggattttggcattcttgaataaatggtggaaagcaattgaggtgcttgcacatgggaaaggcatgaaaatccagaataggcatgttagcagtggcaatcaaggttttgtcagctgccatcatgggacagaagggatagtgattgatgaaagttccttctctatctgtttgtgttgttgccagcattatcttcttcatcttatcatgatttttctaattcatgaaaaccacttaatattctgatataaaagcataggcttagatcgccaggcatcagtttattattagcttgaggattgagatataggata

SEQ ID NO: 213755 - DNA, 416 bp, Gossypium hirsutum
cccacgcgtccgccgaaattgatgagctaaccgtggatacgtcggaagaagatggtaagtttgtgatcaaagcttcactttgctgtgaagataggtccgaccttttgcctgacctaatcaaaacattgaaagctttacgcttgaagacactaaaagctgagattacaacgcttggtgggcgtgtaaagaatgttctgtttataaccggagaggaagactccagtagtagcgctgagcagcagcaacaacagctgcagtattgtattagttcaatacaagaagcattgaaagcggtgatggagaagacttccgtggacgagtcttcttcagggaatgtgaagagacaaagaaccaacatcggtattcttgaacataggtctctttagcttacaaaagaccttgaatacgtacttttt

SEQ ID NO: 213756 - DNA, 406 bp, Gossypium hirsutum
tcgcccacgcgttcgcccacgcgttcgcccacgcgttcgcccacgcgtccggaaaatctttccaggttcaattttctcacaacaaaactgaaaatgtcttgctgttcaagaaaatgtggctgcggcgctgattgcaagtgtggcagtggctgtaacggatgcagtatgttccctgacacaatagagaagactacaactgagactattgttcttggtgtggcaactcataaaatgcactttgagggatctgagatgggagttggggttgaaggtggatgcccgtgtggagacaactgctaatgcaacccttgcacttgctggtagtgaacaacaaagagaagcagagtggcctttgtcattttaactaaataaaatctattactttagtatgtatcagcaaatcttc

SEQ ID NO: 213757 - DNA, 404 bp, Gossypium hirsutum
cactcatttgtttgtttactctgaaagggtgctctgagatcacatagaaaaatggtgaaagcagtggctgtccttagcagcagtgaaggtgttagtggaactgttttcttcactcaagagggagatggcccaactacagtgacgggcaacatttctggtcttaagcctggcctccatgggttccatgttcatgccctaagggacacaacaaatggttgcatgtcaacaggacctcacttcaatcctgctggaaaagagcatggagctcctgaagatgtgaatcgccatgctggtgatctaggaaatgtcactgttggtgctgatagctctgcgagtttctctattgtcgacaaacagattcctctcttcgggccacactccattattggaagaagcagtcgtgt

SEQ ID NO: 213758 - DNA, 418 bp, Gossypium hirsutum
tcgaccacacgttcggatatgttgatgaagacatggtttcaagcaatggaatcctctatgagcctggtgaacatactgatcatgttgtggccatcaagtatgtgccgtatgtgggagacagcaagagaggcccggatgaatgcacatcaaacatattcatgggaggcaagatcaccattgtgttgcacatcacatgtgaggatttcctggtggctgatgccattatcctagattttgatgtccttgctgaacttatcaccatgatccaaggcaaggctgacggagagggcaaggtccacactttccatcctgtggatacaatgctgagttacctcaccaaagcccctcttgttccaccaggcacaccggtggtgaacgcactgtccaagcagcgtgcaatgcttgagaacatactaag

SEQ ID NO: 213759 - DNA, 420 bp, Gossypium hirsutum
cttccagctccatcaaaagataacaatggcgggtagattaggcagacgagttgtccacttcgccaaccttccaatcaagctactaatgcccaacaccttcaccaacatcacagaaatagccctcaaaaccatcccatccgcatccaagattgagatcaaacgcgtcctggaatccctctacggtttcgacgtcgacaaagtccgtaccctcaacatggacggaaagaagaagaagcgcggcggtttcttaatcgcccggcccgattacaagaaagcttacgtcaccctgagaacccctctttccatatccgagaacctcttccctatccaggtgattaaagaggaaaaagacagtattaataagaccagtaagagtaagagcattgtggaagaaggggaaaagaagaagcattggcttga

SEQ ID NO: 213760 - DNA, 415 bp, Gossypium hirsutum
ctagaatcttactgtttttgaacacttgattaggaccttttgagttttgtgaagacattgatgatgacatagagaacatatttaggtctgcatttggtggaagccagttcttttattggtccttcattaatgatgagtaccctaaatggaggagatccagatactcggataactatgagaaatcttggaggtggagctctcaatttgatgaggattcagactcaacagaatctggtaatgctgagagttcagaccaagatacaattgcagataggcgggcccttggactaagtgcatctggtcctctaacacttgaagatgtcaaaactgcatatcgagcctgcgcactgaaatggcatccagatcgtcatcatggctcttccaaagtatacattcccgttcattaaggcacttt

SEQ ID NO: 213761 - DNA, 409 bp, Gossypium hirsutum
attttggtccctagtagattcgaaccatgcggtctcattcagctgcatgctatgcgatatggaacagttccgatagttgcctctactggtggacttgttgacacagtcaaagaaggattcacagggttccaaatgggagctttcaatgttgaatgtgatgaagtggatccaagtgatgtgattaaggtggtaaaaactgtcaagagagctcttgcaacatatgggactcaagcactgaaagaaatgatccagaattgtatggcacaagatttttcatggaagggaccatcaaggttgtgggagaagatgttgttgagcctcggggtggctggcagtgaacctggcattgaaggagaggaggttgctcctcttgccaaggaaaatgttgccacaccctgagcataatcag

SEQ ID NO: 213762 - DNA, 425 bp, Gossypium hirsutum
gtttacagaggaattcttgatcaaagtgaaatcattgtcacagtaaaagtgctgtatttacatcgaacaggagctttaaagagcttcatggctgaatgtgaaactttaagcaatgtccggtaccgcaatcttgtaaagttaataactgcttgctcgagtgttgattttcaaggaaatgaattcaaagctccagtctgagttcatgcctaatgggaatttggagagctggttgcatccagttccaaatgcaggaggtaatggatcggaatatgatctgcggattttaagcctcccccaaagactaaacattgccattgatgttgcctctgctctagaatatctccatcaccgttgccaaaaaccaatcgttcaccgtgatttaaagcctagtaacatccttcttgactacgatatgactgctcatg

SEQ ID NO: 213763 - DNA, 381 bp, Gossypium hirsutum
gctttaagctataatggcggaaccttattttcaaagcttctacttgcattatgcttagctaagctctatttgagtgctcagcttggtcaaaccagggatccttatgataagaaagctattggtatcaatggtcaaagaagaatattggtctctggatctattcattatcccagaagcacacctgatatgtgggaagatctgtttcagaaagctaaagatggcggacttgatgtgattgagagttatgataatcggaatgtgcatgaaccatctatctggaaattataagcttgaaagaggatatgacctttggagattcataaaaacagtacgaaaggccaggcactatgctcagcatagtattggaccttatgattgtgc

SEQ ID NO: 213764 - DNA, 427 bp, Gossypium hirsutum
ctagctctatggacagagaccttacaaaaaagtttcagattccagcaggctcttatgggatgttcaacatcatctcccttgcactatgggttattttctatgatcgtgcgatcctccccatggcatcaaagatcaagggtaaaccagtacgcattggtgtcaaactaaggatgggaattggactctttcttacctgcattgctatggtagtttcagccattgtcgagaatgcacgacgaaaggaagcaattcgatccgggtttcaaaacaaccctactgcagttgtgaaaatgtctgctatgtggcttgtgccacagttttgcctgaatggttttgctgaggccttcactgcaatagggcagacagagttcttctattccgagttacccaagagtatgtcaagcattgccgctgccctcttcggact

SEQ ID NO: 213765 - DNA, 379 bp, Gossypium hirsutum
  unsure (1)..(379): unsure at all n locations
tagaccggtacctctcggggaatnnaatgaacaggcagcggctacagttacttggtgttgcctgcatgatgattgcttccaaatatgaggagatttgtgcccctcaggtggaggaattctgctacataactgataatacatatttcaaggatgaggttctagaaatggaatcatctgttttgaattacttgaagtttgaaatgactgccccaacagctaaatgtttcttaagacggtttgttcgtgctgctcaagggatcaatgaggttccatcaatgcaattagagtgcatggccaactacattgctgaactgtctttccttgagaacagtatgctttgctaccctccatcactcattgctgcattctgcattgttct

SEQ ID NO: 213766 - DNA, 412 bp, Gossypium hirsutum
ctcagataagatttttcatgatattaaatcgaatgaacttaggttgcgatattaaatcagcgaagcttaacattattagctgtgatattaaatcagtgagctatttagagtagcggtattaaatcagctagctcaaagataattattcatgctagatggaccaaaaaacatttgcaaatagtgtatctttattgaaaaaaggggatagattactcaaacataatatttctttagatggcgtgcattccatgtacgaggtaggacagagccatccatttttgctattctataagctccatagcctattttttctacaacgttgtagggtccttcccaattaggggccatttttccttgttgcaatgctaaaaaactagcttcagtatttcttaaaacaagatcacccacttgg

SEQ ID NO: 213767 - DNA, 429 bp, Gossypium hirsutum
gagacctcaaataagctagaaggattgcctggtgttctctttgtgctcccagattcttatgtcgatcccgagtacaaggactatggtgctgaattgtttgttaatggggagattgttcaacgatcaccataaagacaaaggagggtggaaccacaaccgcaaagggcccaagacagaccaaggtacaacgatcggactcgttatgttcgtcgcagagagaacatgaggtgaaaagtattattagaaagaaagaaaatgatttatagaactccttttaagtgtttcttgagatatgggagcattactattatgaagataagacatggaaaagaaaagcttatgttgatgttttttaatgtaggtctgaatctgaacttgaatgttttgtggtctgcttgagtttcagcgtaaaactgatgtaagattatt

SEQ ID NO: 213768 - DNA, 412 bp, Gossypium hirsutum
gtcacgcgtccgaccacgcgtgcgggagattactgctgctacctttcgtggacctagtgacactcacctagacagtcttgtgggccaagcattgattggtgatggtgccgcaactgttataatcggggcagaccccgtgcccgaaatcgagaagcccatgtttgaactagtctcaacagcccaaacgatcttgccagatagtgatggtgcgattgatggtcaccttcgtgaagttggtgttacatttcaccttcttaaggatgtctcggggcttatttcgaagaatatagaaaaaagcctggtcgaagcatttcaaccattgggcatatacgattggaactccctttttgggatagctcatgctggcgagccagcaatattagatcaagtagaagccaaattagcactgaag

SEQ ID NO: 213769 - DNA, 303 bp, Gossypium hirsutum
attttctctcaaagttcactacttgtgtgcagacaaaaatggcttttgctgggtttttcttgttgggtttactttcaatggtctcagctgttcatggatatggtggtggatggactaatgctcatgctactttctatggtgggagtgatgcttcaggcacaatgggtggtgcttgtggttatgggaacctgtatagccagggatatgggacaaacaccgcagctttgagcacagctctgttcaacaatgggcttagctgtgggtcttgctatgagattaagtgtgtgaatgatggcaagtggt

SEQ ID NO: 213770 - DNA, 392 bp, Gossypium hirsutum
cacaatcaaagggtctgaaatcaaaccccgtcacttctcaatctcagaaactgccttcatttggtcttccaccaatggccggacttcagtctcccaagtttctcatggcctctactcttcgttctggttccaaagaggttgatctcaacaagcctttcatgcctcctaagggggtgcatgttcagggcacgcactcgatgccacctcagaagattgagagcttcaaatctttggaggactgggctgagaacaacattgtaacttacctcaaacccgctgagaaatgttggcaaccccaagattttcttgcggatcctgcatcagatggatttcacgagcaagtcaaagaacttagggaaagggcgaaggagattccagatgattactttgtt

SEQ ID NO: 213771 - DNA, 409 bp, Gossypium hirsutum
cccacgcgtccgcactattcattccaagacccttctttgttggtggaagcattaacccatggttcttatatgcttgctgaaattccaggatgttatcaggtgataatctgctatacgaatgacacattaaaattttttttttcatcatatgtatcttaatgtcttataatcatgggtagttggttcatttttctctctcaagtttaaattgaacataattaatactttttccttgcagcggctggaatttctaggggactccgttttagattatcttattactctgcatttatataataaatatcctgggatcacgccaggattattaacggatcttaagtcagcatctgttaacaacaattgctatgcattatcagctgtaaaagctggatttcataagcacattctc

SEQ ID NO: 213772 - DNA, 405 bp, Gossypium hirsutum
cggacgcgtgggcggacgcgtgggattttgtgtttctcattctcactatagggtctggtttgaagtatttatatcgttatctcaatttcttgtaccttatatcgcagcacgggtcagaagtacatttacactggatctcatgactctcgggttttgtatctatgatgtggtaaccggagcccaagttgcagtactcaagcaccatacatcaccggttagagactgtagttggcacccatactacccgatgctggtcagctcttcttgagatggagatgtggttaagtgggaattccctggtagtggagaagcaccaacccctgtgagcaagaaaagaatccgaaggagatattactattgaatggtgaaagccaaccgtaacatcttgtagttgtaaatcatata

SEQ ID NO: 213773 - DNA, 411 bp, Gossypium hirsutum
gtccaatcggtgctgcatatgtagactcactctttggactcgagccaccgacccgaggtccgttaggtgatgaagagtacgtgactctttgttcggaggcgatcagtgccggtaccgatactagcgccacgaccgttgaatgggctatgcttcacttggtaatgaatcaagaaattcaagaacaactgtaccaagaaatcattgattgcgtaggtaaagatggagaaatcaaagaagaagacgtggagaaaatgccgtatctcgaagctatcgttaaagaaactttccggcgacacccaccaggtcatttccttctatctcatgcagctacaaaagatactgagctcgccggttacacgattccggcaggtgtttacgtggagatttacactgcatggattactgaagatc

SEQ ID NO: 213774 - DNA, 416 bp, Gossypium hirsutum
ggaacttttgatgttaagaccaagacaggaggtccattcggaaccatgaagcatcctgctgagctcgcacatgctgctaacaacggccttgatatcgccgtcagacttctcgagccgatcaaggagcagttccctaacctcacctacgctgacttctatcagctcgctggtgtcgtcgccgttgagattactggtggacctgaaattcccttccatcccggaagagaggacaagcctcacccaccacctgagggccgtcttcctgatgctaccaagggttctgatcacttgaggcaggtgtttagtgctcaaatgggtctcagtgaccaggacattgttgctctttctggtggccacactctgggaaggtgccacaaggagaggtccgggtttgagggaccatggactaccaaccc

SEQ ID NO: 213775 - DNA, 424 bp, Gossypium hirsutum
  unsure (1)..(424): unsure at all n locations
ggagaaacgtctggtgtagacggccaactgtgggttttatgtccaattctttttgctatgcaggggtttgaggcatatgttggactcctattgctcaagacagcattcgttggagttgttaccgaatggcaggtaatttgttgtgggatacttttggttttgatggctgttgggaactttataaacacaatacagacactcatgacaaaatcaaggtttaaagcaaagatgaaaagatcaaagagcaagccggagttggattagaatgtccttgattgttaggtaaatcttacataagcaacgcctagatattctttctccattttgaactctntaagaaaatggcaagtccaagactaggcttctttttttttttctttgaaatgtatttttgtaaggtatttttatttatataaattttgat

SEQ ID NO: 213776 - DNA, 405 bp, Gossypium hirsutum
tcggtcccacgcgtgcgcccacgcgttcgtgcacgcgtccgagagagggaaggatataatggatcagtattcgtgcccacttatgaagataaaaacggtgatcagtatgttggtcggatatgtcccatgggagatgtgcaccaattcttgcaaaaagctgcggatcatgaaaggatcagaagcatgaggcttgagttgtgttgtttgaataaaaagaatgaaaaaaaaatagcccttcagcttagggtgttcaaagaagaaatgacgatcccttttttctttcttctttgttgaccaagccacagagaagatgaatcttaagatgttgtccaaggcataacccagaaaaatatatattttcatgtatagttgtggcatgtttctaatttgcttgtggaatttgta

SEQ ID NO: 213777 - DNA, 376 bp, Gossypium hirsutum
cccacgcgtccggtttgaagcaacggctgataagttagctagcagttctaaacggcgggagcgcaagaaaaagtattttgaagcaaagaagaaaaagcataagagtgctggaacagaagagaatctagagtttcctggaagagagcacgtaaaatttggagatgtggttgaagctccaccgaagttggttacagtacccaagggatcaacggccttactcgatgcttcaaaagagaggcttaagttacaggctattgaggcttataggaatcgcaaaggatggaggtcaagaccaggggcgcctcaactatcctcagtgactacatgaaatttcattcaacacttgttctactttaaagtgttgcattcattgaca

SEQ ID NO: 213778 - DNA, 344 bp, Gossypium hirsutum
cgttcaaaactctaggagttttacctactgcagtcacttgtcccacaaacatgaacagacctctagatcagctctcccttctttcatcgcttaagtcgacgatcttgaaaggctgaagatgcccggttgtggaaaagttcaccctgcgtttggtcctgttgaggaagaaactaaacgtctggctgtgcttcatgaggagcctggcgcgctggcctatcctttgaggtatgacgtctcccaagcgaggaagtcgattgatgcatctgacacagatttgaagccgtttatgtacacttgcgcaaaaaatgctatggagcgctcagtatctcctgatgcattcattg

SEQ ID NO: 213779 - DNA, 431 bp, Gossypium hirsutum
gaaatcatggtaagtctcaaatcacttgtatctctcagttcccgatccgctgccgtagcactacttgtgttggtggtttcagtggcagtgcagacccatactacaaatgcacaaagctgcccgaccgagctgacgagcctgaacgtgtgcgcacctttcgtggtgcccggtgcagctgtggctaaccctagcattgactgctgtaacgcactccaatcggtgcaccatgattgcctttgcagcactctaaggatcgcttctcgactcccttctcaatgcaatctcccaccactcacttgtgcttgaaacaaaagcaatggtgctgcctgcttaatgggtaggaaaatataataacgccatggaatatcgatacctccctggttttttctttcttttttaatgggtaataataagcaatggtggtggtaaaa

SEQ ID NO: 213780 - DNA, 410 bp, Gossypium hirsutum
ccgccgccgccgccgcaagcgtctcatctaacaccacttcttcttctcatcatccaagtaaccaggcgccgaaccatggctggatacccttttttcaaccaccggcacaacgtgcagcgctcccagctttgagccgctacgaatctcagaagcgacgtgactggaaggcgtttgtagagtacctgaagaagcatcgcccccacttgggtctctcccgctgcaccggagtgcatgtgcttgaattcttggactatcagttcgggaatactaaactccacacacggaactgtcctttttggggcaaccctcctgacctaccatcgccatgctcatgctcttgccctctcgaccaagcatggagcagcttggatggtgtggtagggcgccttcgtgtagcttttgaggagaac

SEQ ID NO: 213781 - DNA, 390 bp, Gossypium hirsutum
gagccacaccagtggaagaaaaagaaaccgtagtattcaggggcattaattttcgtggaatttgaagtatattcttttggcaccaatggagcgtgcggaactaacaactgagcaggttctgaagagagacatcccatgggaaacatacatgacaactaagctgatttcaggaacaggccttcagctgttaaggcgttttgataatagagctgaaagtgtcagggcacagttgttggatgatgatggtccagcctatgttcaagtgtttgttagcatattacgtgatatatttaaagaagaaacagtggaatatgttctggctctaattgatgaaatgcttacagccaatccgaaaagagccagattatttcatgacaggtctctttgcaa

SEQ ID NO: 213782 - DNA, 431 bp, Gossypium hirsutum
ggactgttcgtgatgggataatcacccaagtgagggagtatttcaacacttctctcaccgttactcgccttagagactctccaccgtcagcttgcagttcttcgacggcggagattgcgccagtgtattgcccttacgtttgggagagtagtctttccaaccgggtggggaaatcggttccaggtcttgttcttgcaatttagtttcctcctcccacgtgtggctaagataacagatgttagttccatgagttgagtttggtctggtgttaaaaattattgtgtctggactgtcaatttggtaacttattagtattgttgtgtttcaagtgttgtcttccaatgcaattggatttagtgaagtgtgtggggtccggtatgagaagagttcctccacctcctcattttcagtgtttccattgtgtaataaaa

SEQ ID NO: 213783 - DNA, 245 bp, Gossypium hirsutum
cgtcactcggcggcagaagcagagagcctcaacatctacactttatcctcaaaccatgactttcaagcgtaggaatggtggccgcaacaaacatggccgtggccacgtgaagttcatccgctgctctaactgtggcaaatgctgccctaaggataagtcgatcaaaaggtttcttgtgaggaacattgtggagcaagctgctgttagggatgtccaagaagcttgcgtctatgacacctacactc

SEQ ID NO: 213784 - DNA, 406 bp, Gossypium hirsutum
  unsure (1)..(406): unsure at all n locations
gatgaggaaaatcatgggtgccaaagttctcttcttctttgctttgctttccttttcagctgtgtcggcatttgcacaggatgaggaagaccaaggtcttgttatgaacttctacaaggattcttgtcctcaggctgaagacattatcaaggagcaagttaagctactgtacaagcgacacaaaaacactgctttttcttggctgagaaacattttccatgactgtgctgtccagtcatgtgatgcttcactgctgctggactccacaagaaagagcttgtctgaaaaagaaacagacaggagctttggccttaagaatttcaaggtcattgagaccatcaaagaagctgtagaaagggaatgtcctggagttgnttcttgtgctgatatccttgttctgtctgct

SEQ ID NO: 213785 - DNA, 319 bp, Gossypium hirsutum
acatccacacatccgggagtttatgagctatactttcttagactgccaacccccacatcaggaacgcgcagttttttgaaatggccgctcaaacctctcatctatggtctctccaaaaagacattcgacgccctacaattccagaaaacccacctcaatctattctgggaagttttaaacctagcatatcatagatctaccaagtatccccagcaagggggtccatcgatttggatgtcacaactccaaagcacttgaatcacacagtgtacctgaaacatataacagtagacttatttgcaattgaacataaaattct

SEQ ID NO: 213786 - DNA, 312 bp, Gossypium hirsutum
  unsure (1)..(312): unsure at all n locations
cggacgcgtgggttcgagtccgatgaccctgagaatgaagtcataaaaccaacaatcaatggagtgctaagcatcatgaaagcttgcgccaaagccaaaactgttagaaggttagtgttcacatcatcagctggaactattgatgttgcagaacaacaaaagccctgttatgatgaaacctgttgaagcgaccttgaattcattcaggccaaaaaaatgactggttggatgtattctgtctncgaaacaaaggctgagcaagcagactgcatattcgcttaaaaaaataacattgatttttgcagcataata

SEQ ID NO: 213787 - DNA, 410 bp, Gossypium hirsutum
cccacgcgtccgggagttaatggcatatgcttacttggcagtcagtcccccaagcatgagcaagcagtttgatgagatcgccgctgcagcatcaaataaatctactatcaaaaaggacttaagataccctgatattgaagaaaaagcactgcaatttattctcgatagttgtgaatcaagcatatcaaagtactccaagtttttgcaagcaagtggctctatggatttggatgtgacaactccaaagcagttgaatcgaagagtgtttctgaaacagctagcagtagatttatgtacaagtgagcagagaatactatttcgcgctcaatatatactgaggacgagattgagggatatgaggagtggtgaactgagagctttaagaatcttcgatggattgcgaaacattt

SEQ ID NO: 213788 - DNA, 437 bp, Gossypium hirsutum
cccacgcgtccgcccacgcgtccgcccacgcgtccgaaaaaaaaactaaaggaacctttaatctctcccccctcttccccatggccaacaatcgggtttcttcgccgcaccaccgtaccaccaccgtatccggtggccggtgatgcgtaaaaaggggcttttaacctgcttcaaacggatccaaagcgaggctcttcaaatccgaagaaaaacgaaagaaaaggcctctccccctcacttttagatctgatctagacgaaggagaagagtccttcgacgacgtaaccgtgggttctccagtaaggtgcttcctttccattttttgttcaaaagcaaaaataaaatataataaaacgaaaatttgaaagtaaaaagatccacctttttcttgtttttgctctttgatttcttaaaagtgcgcggtaaaaaaaaaacaa

SEQ ID NO: 213789 - DNA, 374 bp, Gossypium hirsutum
attcctgcggaagcagagcggacgagcgagaaagaaagaaaaaaagaaacaaacaggagagggaaacaatgagccggagcttgggcataccggtgaagctactgcacgaggcatccggccacgtggtaacggtggagcttaagagcggagagctttacagaggaagcatggtcgaatgcgaggataactggaattgccagctcgagaacatcacctacaccgctaaagatggaaaggtatcacagcttgagcatgttttcattcgaggcagtaaagtcaggtttatggtcataccggacatgttgaagaatgctcccatgttcaaacgcctcgatgctaaaatcaagggtaagagctcatctctaggagttggc

SEQ ID NO: 213790 - DNA, 413 bp, Gossypium hirsutum
caattataaagtttctgcagttccagatgggttgaaggcatgggagatgctgaagggaaaaccccataactatgatctcattttggcagaagtggatttgccatctatatctggatttgctcttcttacactaatcatggagcatgagctttgtaaaagcatccctgttataatgatgtcctcacaagattcagtaagcacagtatacaaatgcatgttgagaggggctgctgattaccttgttaagccagtaaggagaaatgaactgagaaacttatggcagcatgcgtggagaagacaatcatctataattgatggaaacttccccggggatgagagcattggacgcaaacaggttgaagctacctctgaaaatgatgctgcaagacaaactgataaaggaagtgatactc

SEQ ID NO: 213791 - DNA, 320 bp, Gossypium hirsutum
acgcgtgcgggagttaatggcatatgctttcttggcgggaactcccccaatcatgaacaagcagtttgaagaaatcgccgctgcaccatcaaataaatcttctttcaaaaatgacttaagacaccctgatattgaagaaaaaacactggaatgtactctcgatagttgcgaatcaagcgtatcaaagaactccaagcttttgcaagcatgaggctctatggatttggatgtgacaacttctaagcagttgaatctaataatgtttctgacacagccttcagtagatttatgtacacgtgatcagagtaaactatttttcg

SEQ ID NO: 213792 - DNA, 400 bp, Gossypium hirsutum
ggattcggcatgttagggatatcggttttcgtggttgttctcgtgccttacttggcggtactggtttatatttccttggtttggcaattggctagcgtggtttcagtgttggaagacgactatgggatcaaagccatgaagaagagcaaggcgttgataaagggtaagacgggggttgcggtcgccatgtttcttgtgctggttgtttgttttattgggattcaagtggtgttcgagatcggggtgttgttttattggtcgatgagtgttgaaatgaggattgggattccaatcctttgctttttgatgctgtttatggtggttctgttcggacttgttgctcaaacagttatctactttgtgtgcaaatcatatcaccacgagaatatagacaagtctt

SEQ ID NO: 213793 - DNA, 428 bp, Gossypium hirsutum
cggacgcgtgggctctgctcgaaatcttcttcattctcattctctctccactgaactcttgctaaacggtatcgttttagtcagtctttcatcaatggcgaaagaaccagttcgcgtcctcgttactggagctgcaggacaaatcgggtatgctcttgtacccatgattgctaggggagtcatgttgggtgctgaccagcccgtgatccttcacatgcttgatatcccacctgctgcggaggctttgaatggtgtcaaaatggagttggtggatgctgcatttcctcttctaaagggtgttgttgctacaactgatgctgttgaggcatgcactggagtcaatgttgctgtcatggttggtggtttcccaaggaaggaaggaatggagaggaaagatgttatgtcaaagaatgtgtctatttacaagt

SEQ ID NO: 213794 - DNA, 403 bp, Gossypium hirsutum
aatggatttggttcagttgcaaaggcaactagttgactacagaacctcactctaccatgagggttttctggatgaacaattcacccaacttcagtcactccaagatgaaaataacccagattttgttgtggaagtagtgtctcttttctttgaagattctgaaagacttcttaatgaactgagtaaagcactagagcagcaggtcatagatttcaaaaggatggatgctcaagttcaccagttgaaaggtagcagctccagcattggtgctcacagagtccagaaactctgcatcgtcttccggaactattgcgaagctcagaacgtggaaggatgtcttaaatgtctgcaacaagtgaagcatgagtatggcattattaaaacccaagcttgaatctatgtt

SEQ ID NO: 213795 - DNA, 422 bp, Gossypium hirsutum
ggggaaagtgaaaagcttgtctcgaaccttttcgagatggcgcgtgatagtgctccttccatcatattcattgatgaaatagattccttgtgcggccagcgtggagagggcaatgagagtgaagcttcaagacgtatcaaaactgaacttcttgtgcagatgcagggtgttggacataatgatcagaaagtcctagttcttgcggcaacaaatactccctatgctcttgatcaggccatccgccggcgttttgataagcgcatttacattcctctcccagacgtgaaggctcggcaacatatgttcaaagtgcacctaggtgatactcctcacaacttgactgaaagtgattttgaaaacttagctcgccggacagagggattttcagggtcagacatatctgtttgtgttaaggatgttct

SEQ ID NO: 213796 - DNA, 440 bp, Gossypium hirsutum
ttcgccagcactaccggcgcgcaatgcctgggtcgacgcacacgcgtgcatcatcgtcccattggttagaatggaatgggacgtttgctttgagtaccctctattatggggagtacctgaaccgagggcccgggtccaatacgagtgcaagagtaacttggcctggttatagggtcatcaacagttccactgaggcaactcagtttacaattgagccatttatacaaggaaatgagtggctaaattctagcaatattccattcgctctcggcttgaattgagagctaaatgccacttacgtgcctcccttattttatttttcgttaataattggattctgtgtttgtctgatcaagtaagccaccatgcattttgatcccatgtcaaattgcttttgtactgaaattaataagaaaatgaataaggcttcttttctctct

SEQ ID NO: 213797 - DNA, 402 bp, Gossypium hirsutum
gtttgatctcttttagcgaaagaaatggctgaaactcttatgcatgctttacaatatgacagctatggcggaggcgctgctgctttgaagctagtgatgtagcaggagaagtcgtaaaggttggaccaggagttacaaatttcaaagctggggataaagttgtagctacgcttcatcattttaccggaggtggactagctgaatatgctgtggctaaggagaatctgacagttgcaaggtcaccagaagtatcagctgccgaaggtgcaggtttgcctgttgctggtctcacagctcaccaggcactcacccaggcagctggggtcaagcttgacggaagtggccagcaagtaaacctcttgattactgctgcttcaggtggtgtaggtcattacgcagttc

SEQ ID NO: 213798 - DNA, 391 bp, Gossypium hirsutum
cccacgcgtccggccgcccaaagaatcaaatctctgctactgcatagtaaaagagagaaagagcgacaatggaggcagcatgaacagttaaggacgtttcccctcacgatttcgtcaaggcttacgccgcccatctcaagcgctccggcaagattgagcttccttcatggactgatattgtcaagaccggcaaactcaaggaacttcctccatatgatcctgattggtactatatcagagccgcttccatggcgaggaaaatatacctgaggggaggtcttggtgttggtgcctttagaaggatttacggtggggctaagagaaatggaagccgtcctcgccatttctgtaagagcagtggatctgttgctcgccacattcttcaacaatt

SEQ ID NO: 213799 - DNA, 403 bp, Gossypium hirsutum
cgactaacaaacaatagcgggacgggaggatctctcagggtttaggtgatggcttcaaagcggatattgaaggagctcaaggatctccagaaagatcctcctacctcttgcagcgctggccctgttgctgaagacatgtttcattggcaagcaactattatgggtcctccagatagcccgtatgccggtggggtgtttctagtcaccattcatttccctccggattatccatttaaaccacccaaggttgcattcaggacaaaggtatttcaccctaatattaacagcaacggtagcatttgccttgatattttaaaggaacagtggagccctgccctcaccatatccaaggtgttgctgtcaatctgctcactcctgacggatccaaatcctgatgaccctt

SEQ ID NO: 213800 - DNA, 421 bp, Gossypium hirsutum
attggagtatatcatgattggtgtgaacctttctcaacatacccacgtacttacgattttattcatgtagctggcattgaatcactaataaagcttcctggttcaagcaagagcaggtgtaaccttgtggacctaatggtggagatggatcgcatgttgcgtcctgaaggaacagttgtgattcgagattcacctgaagtaatcgacaaagtggcacgcatagctcacgcagtaaggtggacggctaccataaatgacaaggaacctgaatcacatgggagagagaaaatcctggtagcaacaaaaaccttttggaagctaacttcatcccattgagacagacttgttctttataatgtaggtattttccttttcgtttcaatttttttattatctcgagccaagttgtcttcctcatgca

SEQ ID NO: 213801 - DNA, 424 bp, Gossypium hirsutum
cgaaggtcatcatgagggagaaggagatggaactgttaggtcaaagcaaagccgaagtgaaaagaagagtcgcaaagctatgttgaagcttgggatgaaaccgatctctggtgtcagccgggtcactgtgaagaagagcaagaatatcttatttgtcatctcaaaaccagacgtgttcaagagcccagcatcagatacttatgtaatatttggagaggctaagattgaggacttaagctcacaactgcagagtcaagctgcagagcaattcaaggctcctgatctaagccatgtgatatcgaaaccggagtcatcaacagcagtccaggacgatgaagaagtggatgacacaggggtggagcccaaggacattgaattagttatgacacaagcaggagtgtccaggtcaaaagctgtcaaggca

SEQ ID NO: 213802 - DNA, 403 bp, Gossypium hirsutum
ggaagatacaagagttgcctgcatagagcagtggtgaacaaggagagagagaggagatcattggtatactttgtgtgcccaaaagaagacaaaatagtgagacccccacaagatctaatgtgcagatcaggagggccaagagtgtatcctgatttcacatgctctgatttgttggacttcactcaaaatcactatagagctgacgttgctacactccaaagcttctttccttggctcctttcttctaaccctacttccaacttctagttcttctctactcccctatcttttcatataaatatcttggtttccactttgtatctatctactatagattataatatgttttaagtctctctatatttgaatttgagttttcctattttaaaaattcaagtataat

SEQ ID NO: 213803 - DNA, 372 bp, Gossypium hirsutum
gccgtatcgatgctcgaggtgcagagattgaaccagctagggaggggatgaggatttggtgtgagctgattgagatgcttaacgctcacaagatgggtatgacaacagatactgtcaatacctatggatatatagctaaagccattgatcacacatgatgtacatggcaactcataaagaacgaatatcaaagtgcatgaaccccagaaccgagttagcacaactgtggctatcctcaatcgtcgctgaaacaacgatcacacaactacagaaagagccagcattgatgaatgagtaccgagtgccatatctaaatgtgcacaatggtgactcgaagggatactactgcctgatggagtatactggacaaat

SEQ ID NO: 213804 - DNA, 361 bp, Gossypium hirsutum
gaaaaatcctaatggtccaatgtatacatctcttggtgtcatgaccaaaggaacaatcatcgaggtgaatgtaagtgaattgggtttggtcacgccagctgggaaagttgtttggggaaaatatgctcaagtaacaaataacccagaaaatgacgggtgtataaatgcagttttgcttgtctaagaggtttacaccccatgtgttgggttgagtctgctaactttgcttgattgtcatttcatttcatgttgtttagtatgttacgtgtttcaaattttgagtagtcataaagggtaatttgaaaagtggaatgttttaagtggtgaaaaaaaaaagcttaatacaacaatataatgtgtt

SEQ ID NO: 213805 - DNA, 422 bp, Gossypium hirsutum
  unsure (1)..(422): unsure at all n locations
cggacgcgtgggcggacgcgtggggtaaagtgttgaagaaagtagtaggctcatctttacctacaaacatgtatatatcggaagaaaaatgccttgagctcatctattatatgtttttactataatctatgagttgtatgtatcatctcactttagctccaacatgcttgatcattgtgtaattgatttttctcttctttgtgtatgtaggggtctgcaaccatgcatttcacttccattgtatcagccgatggctcaagactcgtcaagtttgcccattggataacagtgagtgggagttccaaaagtatgggcactagagagctttcaggccaatactggttgaaccctcttacctttctggtatggtgagagaagaatgcatatatttcattagctnttatgctgattcaaacagtagt

SEQ ID NO: 213806 - DNA, 421 bp, Gossypium hirsutum
cccacgcgtccgcccacgcgtccggtgaaaaatcgatgatcaagaagcgatacatgtaccttacagaagagattttgaaagagaatcccaatgtatgtgaatacatggctccttcactggatgctaggcaagatatggtggtagttgaggtgccaaagctaggcaaagaagcagccaccaaggccattaaggaatggggccagcccaagtccaagatcacccaccttgtcttttgcaccactagtggtgtggacatgcctggggctgactaccagctcaccaagcttttgggcctccgcccgtccgttaagcgcctcatgatgtaccaacaaggttgcttcgcaggggggacggtgctccgagtggctaaggacttagctgagaacaacaaaggtgctcgtgtacttgttgtgtgctcgga

SEQ ID NO: 213807 - DNA, 426 bp, Gossypium hirsutum
cccacgcgtccgcccacgcgtccgagattctcaaaggtgttaattatgcatctggttctgctggaattctcaatgatagtggccaacatctgggtgttcgaataagcatgaacatgcagttaagcaaccaccaaagtgttatctcaacaatagttgagatgttgggaaattgtgcagcatcaaagcttttaggcaaatgcatgtatgcggttcaaataggcagcaatgactacattaacaactatttcaagccagagatgtacaacagcagccacctattcactccagagcaatatgctgcttatctcatcgaacaatattcacggcaaataaagactctgtacaataacggcgcaaggatgtttgcactgttcggacttggtgccataaggtgtactccaaatgcaatcgcggtgcatggaacaa

SEQ ID NO: 213808 - DNA, 403 bp, Gossypium hirsutum
cttccatctcttccctttccttttccccttcgccgccccaccttttcgccaccgcctactccacttccgtttccctcttctccccgctctccctctccgacggcgatgtttcaccttcctccacaatctcctccttctccgacgtcgtttcttctattgccttccgtaacgacggcctcctcttagccgcttccgatctctccggtctcatccaggtcttcgatgtcaaaacccggaccccgcttcgtcgcctccggtctcatacccgtccggttcggttcgttaagtacccggttctggataagctccatttgctatctggtggtgacgatgcggtcgttaagttctgggacgttgctggggagagcttggtattggacttgatgggtcataaggattacgt

SEQ ID NO: 213809 - DNA, 391 bp, Gossypium hirsutum
atcttctgaagccatctgatgttatacttagttttgatggggtaaaagttgctaatgatggaacagttccattcaggcatggggagcgcataggcttcagctatcttgtttctcagaagtatactggggatactgcactagttaaagttctccgtgattcgaagatacttgaatttgatataaaacttgcgactcacaagaggctcatcccagcgcacaccagtgcgatacctccttcttattacattattgctggatttgtttttactgctgtaactgttccatacttgcgttctgagtatgggaaggattatgaatttgatgcacctgtcaagctattggataagcatctacatgcaatggccgagtctacagatgaacagcttgttgt

SEQ ID NO: 213810 - DNA, 394 bp, Gossypium hirsutum
cccacgcgtccgagagacgttaaggaaaagttggcttacattgccctcgactatgaacaggagctagagacctcaaaaacaagctcatcagtagagaagagctatgagttacctgatggtcaggttattaccattggtgctgaacgtttcagatgccccgaagtgcttttccaaccatccttgattggtatggaagctgcaggcatgcatgaaactacatacaattcaataatgaagtgcgatgtggatatcaagaaggactagtatggtaacattgaccttagtggtggtacaaccatgttctcggctattgccgacagaatgagcaaggagctttcggcactcgctccgagcagcatgaagatcaaggatgcagctccacctgagcgaaagt

SEQ ID NO: 213811 - DNA, 394 bp, Gossypium hirsutum
ctccgataacgtttccggcaagatatctggctccggcaacagcaagtgccattgctcaaagcgaaggaaaaatagggtgaagaaagtaataagggttcctgccataagttcgaagatcgccgatattccaccagacgagtattcatggaggaaatacgggcaaaagccaatcaaaggctccccattcccgcgaggatattataagtgcagtagcgttagagggtgccccgcgaggaaacacgtggagcgagcccccgatgatccgtcaatgttgattgtaacgtacgaaggggagcaccgacacactcaacccgcaatgcacgagaatatggctcctgccgtgggaatggactggacttcgagtcaacgtgataataagcaaatattaatctaa

SEQ ID NO: 213812 - DNA, 423 bp, Gossypium hirsutum
gtttcgactgttctcagatctaaacgacaacgtttccagatccacaatggcttctacattcagcggcgatgaaacggctccgttcttcggctttctcggcgccgccgccgctcttgtcttctcttgtatgggagctgcatatgggaccgctaagagcggtgtcggtgtggcatctatgggtgtgatgaggccagaattggtgatgaaatcgattgtacccgttgttatggctggtgtcttgggtatttacgggttgattattgctgtcattattagtaccgggatcaatcctaaggcaaaatcgtattaccttttcgatggatacgcccatctttcatctggtcttgcttgtggccttgccggtctttctgctggaatggctattggaattgttggtgatgctggtgtcagagctaatgcaca

SEQ ID NO: 213813 - DNA, 425 bp, Gossypium hirsutum
gccagccgagaaaaagccagccgaggagaaaaaagccgagaaggccccagctgagaaaaaaccaagagccgagaagaagctccctaaagaagccggggacaagagggagaagcgaagcaagaagagcatcgaaacctacaagatctacatcttcaaggtgctgaagcaagtccaccctgatatcggcatttccagcaaagccatgggtattatgaacagcttcatcaacgacatcttcgagaagctggctcaagaatcttcgaggctcgcacgctataacaagaagcccaccatcacctcccgtgagattcagactgccgtaagattggtcctgcctggggagttggccaagcatgctgtttcagaagggaccaaggcggttacaaagttcaccagttcttagtttccaaaaatctgggaaataa

SEQ ID NO: 213814 - DNA, 396 bp, Gossypium hirsutum
cccacgcgtccgcccacgcgtccgcaagaaactggtggtggtggatttcacagcatcatggtgcgggccatgccgttttatatcaccaatcctggtggatcttgctaagaagctgcccaacgtcatattcttgaaggtggacgtggatgaactgaatactgtggctcaggagtgggctattgaggcgatgccaacttttgtgtttctgaaagaaggcaccataattgacaaggttgtgggtgcaaggaaagaagaattgcagcagaaaattgcctttcattcatctaacccggtgcagacagcatgaatcaacatttaaatgtacttgatgtctggagttgtttatgaaactaggatcttatgaatgtctgacagacagaccctaaataatgtgtg

SEQ ID NO: 213815 - DNA, 381 bp, Gossypium hirsutum
attagatttgagcttttagccaggctgtgtcctaattccactggagctgacataagaagcgtgtgcacagaggctggaatgtatgccattcgggctcggagaaaaactgtgacagagaaagacttccttgatgctgtgaacaaagtgatcaaaggttatcaaaagttcagtgcaactcccaaatacatggtttacaattaaccaggttctcctaaagacatgttctacattcaaaccaaaacatatatacatttttcaatgtattggaatagatattcaatgctgtttctttttatgaatttgagttgctttaatgtggattttacacttccctatatatacactaatggtcaatatatagacattgatttttactttact

SEQ ID NO: 213816 - DNA, 422 bp, Gossypium hirsutum
atggggtcttggatttgtcattccagcattgtttatgggccttgcaattggaagttttttctcaggcacggcactctatagatttcaaagaccaggaggaagccctattacaagaatgttccaggttttggttgcagcatttcataaacggagcctcaaggtacctgaagacagtactctcctatatgaaactggtgacaagcactctgccatagaaggaagtcggaaactagagcacagtgaggagttgaagtgcctagataaagctgccatagtcactgatgttgaaaccaaaagtggggacttctcaaatccttggaggctttgcactgtaacacaagtggaggaattgaaaatcttgatccgcatgtttcccatatgggctactggaattgtgttctctgctgtatatgctcaaatgt

SEQ ID NO: 213817 - DNA, 378 bp, Gossypium hirsutum
cccacgcgtccgcccacgcgtccgcccacgcgtccggctactgatagtgaagacccagggcattgtagaaaaacatggataccatcttcttccgcattatgacagcgaggacagaagctgtttgcaaccactctcttgagtctgagattcgatagagtaggaataaaattccataagattcgccatatagtaatagtaattttttatgggagatgtaaattccatagctttttatagaaattttttgtttcagcctgtaataaataagaactaggatccatactagcctcttgtaatagtttataggcacttcggactgaaaattcgccggaatgttcttctcgccagacttgaaagtcatcacgtgcttcttttgcc

SEQ ID NO: 213818 - DNA, 402 bp, Gossypium hirsutum
actagttctagatcgcgatctaggaagatcacccttaagagctcggacggcgaatcattcgaggttgatgaagcggtggcgttggagtcgcagacgattaagcatatgatcgaggacgattgcgctgataacgggataccgttgcctaatgttacgagcaagatcttagcgaaggtgatcgagtactgcaagaaacacgtcgaggctcctaagacagacgatcgatccgccgatgacgagctcaaggcatgggatgatgattttgtcaaggttgatcaaaaaaccctcttcgacctcattctggcggcccgctctttgaatatagagagcttgttggacttgacatgccgaactgttgccaacatgataaaggggaagacagtcgaggagattcgcactacc

SEQ ID NO: 213819 - DNA, 405 bp, Gossypium hirsutum
gcaagatcttagcgaaggtgatcgagtactgcaagaaacacgtcgaggctcctaagacagacgatcgatccgccgatgacgagctcaagagttgggacgctgactttgtcaaggtcgatcaagctactctctttgatctcattctggcagcgaactatttgaacatcaagggcttgctggatctcacttgccaaactgttgctgacatgatcaagggaaagaccccagaagagatcaggaagactttcaatatcaagaatgacttcaccccggaagaggaagaagaggttcgtcgggagaaccagtgggcattcgaatgaagggtcaatttcgagtgccggttcaattgtatcaaactcatctatatataaaaatgtagtttgttgctctgacttttcatttgta

SEQ ID NO: 213820 - DNA, 393 bp, Gossypium hirsutum
tcgaaaatctgtcatccagcggaatttgatttttacctttgcagtcatgctggtattcagggaacaagccggccagcgcactaccatgttctttgggatgaaaacaattttacagcagacggtatacagtctctaacaaacaacctttgttacacatatgcaaggtgtacgcgctcagtctcagtcgttcctcctgcatattatgcacatttagctgcattccgtgcacggttctacatggaaccagagatgcaagagaatgggtcgaacagctgcagtaatggtcaaaataaaggtacaagggtagtgggagaatcgggggtgcggccattgccagccttgaaggagaatgtgaagagagtgatgttctactgttagaatggatgagtggag

SEQ ID NO: 213821 - DNA, 394 bp, Gossypium hirsutum
ctaatttaaaaggggaaaggcagagccaaacaatctccgatatgagcatcaatatattcccgattttattctgttcgataattgctttgtgttgtttaatccaaatggctgaatctacagacgcaacgaaatcatcttcggcggcggcggcggcggcgggtgggacggatgcggcggtccacatcgtttacaccgagaggcctcaggatgagcagcctgaagcctaccatatccggaccctctccaacgtcctcggcagcgaagaagctgctaaggaagccctgatctacagttacaagacggctgccagtggcttctccgccaagcttactccccaacaggttgccgaaatatcaaaacaacttggtgttcttcaagttgtcccgagcaggac

SEQ ID NO: 213822 - DNA, 391 bp, Gossypium hirsutum
gttttggcaaacaaagaaatataaaggaatcccactgtaaccaatatccccaagccttcttcctttcaagcaattatatcattgtaagttagcaatggagaatgatctcaaggcaacagaactgagattgggattacctggcagtgatgagcccgagagacaaatgatccctaggcctaacaagagaaccttatctgacattgtttctgagggatcaaggtcgaccacagaggaagatcatcaagacactgctcctcctgccaaggtgcaaattgtaggatggccaccagtcagatcataccggaaaaattgtttacaaggcaagaaagatgaggttgaaggggggacaggaatgtatgtcaaagtaagcgttgacggagctccttatctc

SEQ ID NO: 213823 - DNA, 421 bp, Gossypium hirsutum
tatgcatgaggtacgggatcttacacagttgccatttgctgaacgagaattaatgttgataaagattgctgtgaatgccgctgctcgacgggatgtccttgacattgccaacatttttagggccaaggctgtcgatgtttctgaccacactgtcaccctcgagcttacaggagatctggacaagatggttgcactgcagagattgttggagccctacggtatctgtgaggttgctcgaactggacgtctcgcactggtgagagagtcgggtgtcgactccagatatctacgtggttactctcttcctctataaaattttaaagtatttttaaggtattggtgtgatatgtatgacatattttgctctttatatacagtttgtgttatgttttgaataatcagaactctagtgaaatagacg

SEQ ID NO: 213824 - DNA, 419 bp, Gossypium hirsutum
cccacgcgttcgcccacgcgtccggttcctttctcacagatatcatcgaaatccactgcagaagagcttttagataaggagctccctttgaagtttgtagaggttgacgaggaacagtccaggcttgtcttcagtaaccgcaaggccatggctgatagccaagcacagctcggaattggatcggttgtcctcggaactgttcagagcctgaaaccatatggtgctttcatcgacattggtggaattaacggccttcttcatgtcagtcaaatcagtcatgatcgtgtttcagatattgctacggttcttcaacctggtgacactctgaaggtcatgatattgaaccatgaccgtgaaagaagccgagtaagtcttttcacaaagaaactagagcctacccttggagacatgattcgcaa

SEQ ID NO: 213825 - DNA, 419 bp, Gossypium hirsutum
gatttaacttattctgtttgattatattagaataagaaatgaaataaatgaaaagtttacaaaccatttcttctatttattacatgaatcttttaccatggtccatatttgccatgttgggtcacatttaggaaccccatgactaagggtttatgtagaacaaaagaggagagttaccccttattcttacaaactttggttatcagagaaaaggtagatttgggggtattggagtacctattcatttcttgacaaaggcaacccccttctcaatgctagtttctagttctttcttcgtcttctccaagccaaccctctcatactctattagtgggccaagagggtatatttcctcaactccgcaacgaccgagtcttaccttggatgcgaagaagggcaattcagtcacatgagaagcc

SEQ ID NO: 213826 - DNA, 424 bp, Gossypium hirsutum
ctcaacagctactgggtttcctaagtttgatctcatgcttctcggaatgggaccggatggacacgtggcttccctctttcctggccatcctctggtgaaggagaacgaaaagtgggttaccttcattaaggactcaccaaaaccgcccccggagagaatcacctttactttcccagttatcaactcatctgctcacattgcacttgtgatctgtggtgctggtaaagctggtgcggtgcattccgcattgggaaatagtcaaaattccgatccactgcctgttcagatggtttcaccagaaggggatcttgtttggtttttggacaaagatgcagcttccaaactataagttttgaagcctatagcttatctgagttgttactcgagacttactttgagtgtgttaaattggagttaactggtc

SEQ ID NO: 213827 - DNA, 386 bp, Gossypium hirsutum
cccacgcgtacgagaagactgatgctagagattgattgtggaggattatgcaagaaaagatgcagtcaacactcgaggccaaacagatgcaacagggcgtgtgggacttgctgcttgaggtgcaagtgcgtgccaccggggacttcagggaacagggaggtctgcgggacctgctatactggcatgaccacccatggaaacgttgccaagtgcccttaacctttacgtcgcccaatatgtgttgcagccatcaaggggaaaaatgaaatgtttgtttgtgtaatatgtatgttgtagctcagatgtctcacctactcctaaaattattagtacttgtaatatatatttttaaaatagtagtatgcatttagcctccgttcagtatt

SEQ ID NO: 213828 - DNA, 395 bp, Gossypium hirsutum
cccacgcgtccgcccacgcgtccgggaagaacgggacgtgcagggaagactggtgtggctacaacatttttgactcttcacgacaccgatgtcttcttcgatctcaagcagatgcttgttcaaagtggcagccctgtgcctcatgagctggcaaagcatgaggcttctaaattcaaaccaggaacaatacctgatagacctcctagacgcaatgacactgtttttgctcactgagaagctctgtactatggtattttagttgccaaattttctttcgttgctgcttacaagtgattgcttttgtacttttatcgcagcatttgaaagtggtatttgctgactttgcctttacttgctgctacaattgctgatcatagcaaaagtaacattttgaa

SEQ ID NO: 213829 - DNA, 394 bp, Gossypium hirsutum
cccacgcgtccgggcaataaatgttaacaaactgacctccgctgggtgtagagtaaaaatctggattgcagattggtttgcacagctaaacaataaaatgggtggtgacttgaagaaaatcaaagtagttggacagtatttgattgaaatctggaaggcagttggcatggacctgaatgaaaaggttgaattcttgtggtcttcagatgaaattaactccagggcatcagagtattggccacttgtgatggatatagctcgcagaaacaagctgcccaggataatgaggtgttgtcaaattatgggccgtagtgagcaagatgagttgtcagctgcccaaattctttacccatgcatgcagtgtgctgacatatttttcctcaaggcggacatt

SEQ ID NO: 213830 - DNA, 402 bp, Gossypium hirsutum
gatcaaaatacaatttaccattatattaacttataatattttaaaaattaaaaagaattaagagaatttttaattttggggtcaagaccactgtctctctccctctgcccttgtgttttggttaataaaaataaaaattatgcatattttcaaattgggttcgaagtaaattaatatttaatttcgaatcggattctattgaggcatattaagtcgagatcgtagaatggacatgctgggtttttgctatcatgttatgatgctaaacttagctatgattccaaaactgacacctttcaagcaagatactcgcctcacgtccggcaaacaacagagcagaacatatcatgggataggctaagagcgccgccggtcgatacttgctcatatgatcttcacatt

SEQ ID NO: 213831 - DNA, 403 bp, Gossypium hirsutum
ctgaagtccaaatctgaaaatccagtaactggaattgacttcaaacgcagagagacttatttgtccgatgaggagttcgagacggtattcgggatgccgaaagaagcattttacaagttgccaaagtggaagcaagatcttcaaaagaaggaagttgatctattctagagcttcatgcacttgaacaagtgatttaagtgtttccattgcattctacctagcaatccctcctatatttgatcttcaattccgcccaaaaatcatgatttcgtctacacgatgcctggattaccatttttgtccgtttttccttcttgataaacgtacgtgtaattagtattcggatggattccgatgttgcatggattaccatgaactcatattggaatgtttcgcaggtcaa

SEQ ID NO: 213832 - DNA, 393 bp, Gossypium hirsutum
cccacgcgtccggcaggatcaatgaggcgattacatcaaaaggtggacaattcctcgaggcccctgtttccggtagtaaacagcctgcagaaaccggtcaactggtgattcttgccgctggagataaggcattgtatgaagcagcaatgccagctttcgatatcttggggaagaagtctttcttcttgggacaagtcggaaatggagctaaaatgaaacttgttgtcaacatgatcatgggcagtatgatgaatgcattttcggagggactcacactagctgatcgaagcggactgaacccacgtgaccttcttgatgtgctggacttgggtgccattgctaatccgatgttcaaagggaaaggaccagcaatgctccaaaacaactattccc

SEQ ID NO: 213833 - DNA, 419 bp, Gossypium hirsutum
cccacgcgtccggctgtttaccgcaatgtttcctttgcttggataggtcaagatatactaggaattgctcttataatcacagttctgcaaattgtccatgtacctaatctcaaggtgggaacagttctactcagttgtgccttcttatatgacatcttttgggtatttgtttcgaaaaagttgttccatgaaagcgtgatgattgtggtagctcgtggggatagaagcggagaggatggcatcccaatgctactgaagatcccacgcatgtttgatccatggggtggttatagcataataggattcggtgacatccttttacctggactgttgataacattttcactcaggtatgattggctggctaacaagactcttcgagctggctacttcttgtgggcaatgattgcttacggctt

SEQ ID NO: 213834 - DNA, 407 bp, Gossypium hirsutum
cccacgcgtccgctaaaactaattggattatgcatgaatatcgactcattgaatcttctcgtaaaagtggtagctccaagttggatgattgggttttatgtcgaatatacaagaagaattcaagtggtcaaaaaccattgtcaagtgtttcaagcagagagcaaagcacgaatgggtcatcatcatcgtgttcttcacaactggataacatgcttgactcattgcccgagttggacgatcgtttctttgctttgccgcgcattaactcgttcaaaacgcttcaaaacgatgtgaaactggggtttcaaaatctgggtatagggaatttggattgggggagtcttggtgggcttagctcggtgcctgagctggtaccgagtggacaaactcaaacacaaactcaaact

SEQ ID NO: 213835 - DNA, 390 bp, Gossypium hirsutum
gcgcccacgcgtccgcccacgcgtccgcggacgcgtggggcaaaattggatttgagttttgatgttacggagaaccatttataggagactttgttttcttttccacaaggaaattagatttcttcggctcctttatcttatgtaaacccttcaatgccttagtttatcgggtaacgaaaggtttaaagatggtcactctcactcactttgtccttgttacaaaaagatcgattgggctaacccttcaatacacataaaaatttggactgcaaaaaaaatataccatctctaacaaaatatatattgaaaaaacactacatatatgacaccaacatactggattgattagaaatccacgattatatatatgcgtcatttttcatgtgcatt

SEQ ID NO: 213836 - DNA, 392 bp, Gossypium hirsutum
cgattattggcagcaatcttgttcaaggtaatgcatccacacgaagttcttcctcctgttctcggggcgtctgtatatgcaatagcttggattctatcttatgatgggttatcaggcatcccaacgccagcagaatctgtagattcactgacttcgagggtgcgttctactgatatcaacaaatctatgccagtgatgaaagatacaagtcccaatccaagtaggttccttttgtcacttttgaaccgaagcccattcagctgttcaagtttccagaaaggtgttaagggccctgcagtaggggctgtaacaaatggagttgagtccatgagttacaaccaacaggcacctgtaatgtcagctggaatgagcttatatcaagctgcgttgca

SEQ ID NO: 213837 - DNA, 390 bp, Gossypium hirsutum
cgaccgaaaaccctaattttcggaggtaaggaggaaaagaagaaatggcggtgccgcttctaagtaagaaaatcgtgaagaagagggtcaagaagttcaagagacctcagagcgaccgcaaaatctgcgttaagacaaactggcgtagaccaaagggtattgattctcgtgtcagaagaaagttcaagggatgtactttgatgcccaatattggctatggttcagacaagaagacccgacactatcttccaaatggctttaagaagtttgtcgtgcacaatgttggagagcttgaactgttaatgatgcacaacaggacatattgtgccgagattgcccatgatgtttcaacaaagaagagaaaggagattgtggaacgggcagcccagc

SEQ ID NO: 213838 - DNA, 394 bp, Gossypium hirsutum
cccacgcgtccgagtttttcaaccgggtttgaatgaaaagttggatcgaacttctccgcaaagggatgacatcccagagatcgttctggctgatgagccttacgtcggtcaggagtttgaatctgaggcatctgcacatgctttttataatgcatatgccacgagggtaggattcatcattcgtgtgagcaaactttcccgttcgaggcgtgacggatctgctatcggtagggctcttgtttgtaacaaagaaggttttagaatgcctgacaaacgagaaaaaattatgaggcacagggcagagacgagggtcggatgcagggcaatgattttggtgaggaaagtaagttctggtaaatgggttgtcacaaaattcgtgaaggaacacacacat

SEQ ID NO: 213839 - DNA, 394 bp, Gossypium hirsutum
cccacgcgttcgattttttcaaccgggtatgaatgaaaagttggatcgaactttttcgcattgggatgacatcccagagaacgagctggctgatgagccttacatcagtcacgagtttgaatctgaggcatctgcacatgctttttataatgcatatgccacgagggtaggattcataatgcgtgtgagcaaactttcctgtacgaggcgtgacggatctgctatcggtagggctcttgtttgtaacaaagaaggttttagaatgcctgacaaacgaaaaaaaattatgaggcacagggcagagacgacggtcggatgcagggcaatgattttggtgaggaaagtaagttctggtaaatgggttgtcacaaaattcgtgaaggaacacacacat

SEQ ID NO: 213840 - DNA, 402 bp, Gossypium hirsutum
cccacgcgtccgcccacgcgtccgcccacgcgtccgcagtttcaacaatcttcatcctctattgggctcctcttgccagtggatgggaatggaacaaagacaacatttgattgagttgctataaccaggcttcaactttaatttcaggaagccactcgattgtaagttgttattagtgcgtagcagtaatatatattgatttgatcgcctattgctactaatttcatatggacttcctattactgtatgatgaggcctgtaagcaagttgaatttatagtgtgtacccaaaaaacaattctaatatcaacttgttatggtgttccgtagaagatatgtaaggtagtgttaccctttagcttgtatgttgcttgcttgatttacagttcgaagttgttacaat

SEQ ID NO: 213841 - DNA, 396 bp, Gossypium hirsutum
cggacgcgtgggtggagctggtgtagtgaaaggattcgaaggagacagtagatatgagatgttgggtggtggagccaatgttgtgaaccatggctacaccaaaggtgatggtcttggtgctgaaatcgttggcacttttattcttgtctacactgttttctctgctactgatgccaagagaaatgccagagactctcacgttcctattttggctcccctacctatagggtttgcagtgttcttggttcatttggccaccattcccatcactggaactggtattaacccagcaaggagtcttggagctgccattatatataacaaagaccatgcatgggatgatcattggatcttctgggttggacccttcattggagctgctcttgctgcaattta

SEQ ID NO: 213842 - DNA, 353 bp, Gossypium hirsutum
gcaggaacttaggagggttaggtctgggattttaggtgagaaagataatatggtgaccatgcatgatgttatggatgctcaatgggtttatgataattatagagatgagacttatttgaggagggtgattatgcctcttgaagtccttttgactagttataagaggctggttgtgaaggactctgctgttaatgctatttgttatggggcgaagttgatgattcctggattactgaggtttgagaatgacattgaggttggggaggaagttgtgttaatgacgacaaaaggagaggcaattgctctgggaattgctgaaatgaccactgcggttatggctacttgtgatcatg

SEQ ID NO: 213843 - DNA, 397 bp, Gossypium hirsutum
gaaaaaagaggaagggcctcaggttccgaccatcgatttgacagaaatcgagtcggaggacaaagaggtccaggagagatgtcggcaggagctgaaaaaagctgccatggaatggggtgtgatgcaccttgttaaccatggcatctccgaggagctcatggatcgtgttaggaaagttgggcagaaattctttgaactccctgtggaggagaaagagaagtatgccaacgaccagagctttgggaatgttcagggctatggtagcaagcttgctaataatgctagtgggcagcttgagtgggaggactacttcttccatctaatttttcctgaggataagagagacttgtcaatttggcctaaaatccccagcgagtacactgaagttacaagtgag

SEQ ID NO: 213844 - DNA, 396 bp, Gossypium hirsutum
cggacgcgtgggctggtatagtcacagacgagatgctttccatgccaaaagctccttatcttgttattggtcttttggaggctcttgctgctgcgactggaatggcagctggagcaattctatctggggcatctattccaattctgtctcagacatttcttgtgtggcaaattctcctgtctactatttttcttgggaggagatatagagtaaatcaattacttggatgctttcttgtaactgttggtgttgtcataactgtagcaagtggatccagctctggtcattcattgaaggaagctggcatattttggagtctaatgatgatagtttcttttttgttgcaagcagctgatactgtgctgaaggaagtaatatttttggatgccgaaaagc

SEQ ID NO: 213845 - DNA, 382 bp, Gossypium hirsutum
cccacgcgtccgccctatcttcgcatcctcagctttagcttaatctcttgtaaaagccatttctttagctagttgtttatctaagtttttgctccaatgactgattctggtggttcagcctctgctaacaggatgttgtgttccgttcctgaaaggctacagctgcatatggccatgttggccttgcaatttggctacgcagggttccatgtggtctccagggctgccctaaacatgggaattagcaaacttgtattcccagtttataggaatatcattgcgttgcttctgctccttccctttgcatattttcttgagaagaaggagagacctcccattactctaaattttcttttacagttctttctcctcgctcttgttg

SEQ ID NO: 213846 - DNA, 405 bp, Gossypium hirsutum
caaaaaattatagctttcgagcaatctaaacactcattttctcatcaaatcgttttgacatatggctcgtaccaagcaaactgctagaaaatcaaccggtggtaaggctccgcgtaagcagctggccactaaagctgctcggaagtcagcaccggcgaccggaggagtgaagaagcctcaccgtttcaggccaggaactgtagctcttagggaaatcaggaagtaccagaagagcaccgaactcttgatccgaaagcttccgttccagaggcttgtgagagaaatcgctcaagattttaagactgatttgaggttccaaagcagtgccgttgctgctcttcaagaggctgctgaagcttaccttgtcggactgttcgaggatactaatctatgtgctattcatgc

SEQ ID NO: 213847 - DNA, 387 bp, Gossypium hirsutum
aactggggttccatcctgatgcaggggcttcattttatctttctcgcctacctggttacttaggggaatacttagctctaacaggagacaagcttaatggtgttgaaatgattgcctgtggccttgctacccactattgcttaaatgctgtttgttttttcttctgcttcttattgtgcttttcctcctttcctcttttctcaacttatttgaacaaactgccctatagagacttgcttggattgaagaacgtctcggcaacttgatgaatgatgatccagctgccatagattcttctcttgcacaatatggtgaccttgtttatcccgataggagcagcattcttcgcaggattgacacaattgataaatgtttcagccatgacac

SEQ ID NO: 213848 - DNA, 354 bp, Gossypium hirsutum
tagaccggtacctctcggggaataccatgaacaggcagcggctacagttacttggtgttgcctgcatgatgattgcttccaaatatgaggagatttgtgcccctcaggtggaggaattctgctacataactgataatacatatttcaaggatgaggttctagaaatggaatcatctgttttgaattacttgaagtttgaaatgactgccccaacagctaaatgtttcttaagacggtttgttcgtgctgctcaagggatcaatgaggttccatcaatgcaattagagtgcatggccaactacattgctgaactgtctctccttgagtacagtatgctttgctacccttcatcac

SEQ ID NO: 213849 - DNA, 404 bp, Gossypium hirsutum
cgcaaatccctagcccgactgccctccatttttttctcaaccttcaccttcatctccggcagcagtcctccaccgatccacctccagtcctccatttcagtcacctctatttaagatgaagctgatcgaatgcttgacatgggtttgaagaggatgttaactttatattgggaaagacatgttctgctcatcagatggtaatgttcagtgctacatggcctgcagcggttcatcggttagctcaggagtacatggaccctaatcctgttaaggttttagatgatcgtgcacattatgagcgattgactgcatttaaaatttctcttcattggctaaatagaatgggcagcattttaaaatttgcactttggttgtgtgtgactgtgtgttctctaacattttaa

SEQ ID NO: 213850 - DNA, 399 bp, Gossypium hirsutum
gaaaactgctaagaaaccacagagtgagagagtgaagaaggcgggtaatgaggcagctaatgttgatggtagtgggaatttgagtggatcgtccactgtgccagaaggtgtggtgactgctgaatcgagtagaagaggagttgttaatagtgggaggaagcagatggcgaggggcacaaagaatttggggaagttggatttgaatgtggagtttagtaatgaagttgaagagccggcaccgaggaggaatgaggggaatcaccccggctatggggaggaggataacattgaagggaatgggttctttgagggtcttgatgagtttttgagtagcttgcctatactttcagctgttggggatgataaagttaaggctacttaatgaagtaagatccttgc

SEQ ID NO: 213851 - DNA, 331 bp, Gossypium hirsutum
gaaaaaagatgaagggccttaagttccgaccatcgatttgacagaaatcgagtcggaggacaaagaggtccaggagagatgtcggcaggagctgaaaaaagctgccatggaatggggtgtgatgcaccttgttaaccatggcatctccgaggagctcatggatcgtgttaggaaagttgggcagaaattctttgaactccctgtggaggagaaagagaagtatgccaacgaccagagctctgggaatgttcagggctatggtagcaagcttgctaataatgctagtggggcagcttgagtgggagggactacttttttccaatctattttt

SEQ ID NO: 213852 - DNA, 410 bp, Gossypium hirsutum
cagagaagaagtggagggacaaacgtgagaaactcgaatgggaaactaacatcgtttacaaggaggccaaagagtccgtggatgctttgttcgtgaactcccaatatgatcagttgcaagccgacaccaacatcgccatgatccacgccgcagacaaacgtgtgcacagcattcgtgaggcttacttgcctgagttgtccgtgatccctggtgtgaacgctgccatcttcgaggaacttgagggacgtatctttaccgcattctccttgtacgatgccagaaacgtcatcaagaacggtgacttcaacaatggcctcagctgctggaatgtgaaaggtcatgtggacgtggaggaacagaacaatcagcgttccgtcctggttgtgcctgagtgggaagctgaagtgtcc

SEQ ID NO: 213853 - DNA, 402 bp, Gossypium hirsutum
cccacgcgtccggcttcctggatgcaaaaaccagaagcagaggattgtaatgtttctcaccttcaatcgaaagaaaccatttctgctcccagtttccagtcccaaccacagtaccatgcacccaaatcaagagctgctgcaattgatcgtcaacgcaggctacgaatagatgaaagtatcaaggcattgcaggaactgcttccaagttcttctgagcgtggcctaggaaatgcactggatgatattattgactatgtcaaatttctgcagttgcaagtcaaggaattaagtcgaagcagactggggggtgaaccaacttctaatccttttgttttttttgagggatatggtcactatgttctccatgaacagatgataaatgaacctcttgaagagatgatg

SEQ ID NO: 213854 - DNA, 390 bp, Gossypium hirsutum
ctgccttgttgctgcaacccatcaatgacaaagatcccaccgactcggcctccgcctcttctttatcttccaacttggttgagtcaatcaagaccatctgcaacgtgactcggtaccctgactcatgtttcaccgctctatcttctcttaacgcctctacaaaacctgacctagaggccttccttgacctctctctccaagtagccatcacccatctctccgacctctcttcctcattcaagtccctcaacgatctccactctcagcctgctttaaaagactgcttgaccctgtttgatgacgccctcagtcgactcaacgactcagtgtctgccatgaaggtgggtaccgggaaagagcttgtgttgactaaggagaagatcagtgata

SEQ ID NO: 213855 - DNA, 394 bp, Gossypium hirsutum
cccacgcgtccgtaggactatatatgaggaggctgatgcaaacaagcggaggaagcgatatgccagacctcttatcgatctgcatatgaagatatattactctgagggcatggagccatggagcttgaagaaaaatacgattagcgatgtgccagagggagccataattataagggaacatacagcactgaataatttgtttaactgcttgtggttcaatgaggtcaatctcttcacaccaagagaccaactgagctttggctatgttgtatacaggttaaaggggttgtttaagttctttatgtttcaaaattgcgagtactattcactttttatcctgcacccccatactcgggaacattcttctaaagtagagtgggtgaaaagcttgagt

SEQ ID NO: 213856 - DNA, 371 bp, Gossypium hirsutum
cccacgcgtccgcgctttgaagcagtccaatgagctcttacgcaaagtcggagctttcgatggtggtcgtgttaccatgcgcagaactgtgaaaagtgcccctaccagcatctggtatggccctgaccgcccaaagtacttgggtccattctcagaccaaatcccatcatacctgacaggtgaattccctggtgactatgggtgggacactgctgggttatcagctgacccagagacatttgctaagaaccgtgagcttgaagtgatccactgcagatgggcaatgcttggtgcccttggttgtgtcttccctgaaattctttcaaagaatggagttaagttcggagaggcagtttgtttaaagctggatc

SEQ ID NO: 213857 - DNA, 394 bp, Gossypium hirsutum
gaaatcatcaaattcaaaggctttcaagtgccaccagctgagcttgagtccctccttataagccatccatcaattgcagatgcagctgtagttccgcaaaaagatgaagttgctggtgaagttccggttgcatttgtggttcgatcaaatggttttgaactcactgaagaagctgtcaaggaattcattgctaaacaggtggtttactacaagagattgcataaggtgcactttgttcatgcaattcccaagtctccttcaggaaagattttgagaaaagatctgagagccaagctggctgctgcagcacctaatacccacattccatgaaaatttcttctataatctatttgcttttaaaatgcaacgccttttgctgattttgctttaactt

SEQ ID NO: 213858 - DNA, 401 bp, Gossypium hirsutum
cggacgcgtggtggtgagcgaaccgctggagaagaaattcaagaagttgatattatttccgcaattgaattcgataaaactggggatcatcttgcaactggtgaccgtgggggccgtgtggttctttttgagaggacagatgcaaaggatcatggtctatcaagaagggatctagaaagaacggattatccaattagtcggcaccctgagttccgttacaagacagagttccagagccatgagcctgagtttgactacctcaaaagcttggaaatagaggaaaaaatcaacaaaatcagatggtgccaaacagccaacagtgcactgtttctcctctccgccaatgataaaaccatcaaatttttgaaggtacaggaaaagaagatcaagaaaatttctaa

SEQ ID NO: 213859 - DNA, 395 bp, Gossypium hirsutum
cccacgcgtccgggacagtgttatcctatcaatgaagattttgatagtggagtggatgatcttcagcatccaaagtactatattatctggaacatgaatatcagcactcacatttatccagagtttgttgttagtttcaagatctccaatgctgaagggcgtttgattggaagtgagactaatcatgctgtttcaggcgtcactgcatctactccaggacttcagggtcgtttaccagtattatcatctgccggtgaattggggagtattaatcaccaaacctcagaatcaggtggatcccacgaaaatgatcctagcctgggttcaaacacttcaaagacccctaaatcttcttggatgcctttcccaatgttggttgctgctatcttaaacaa

SEQ ID NO: 213860 - DNA, 404 bp, Gossypium hirsutum
gcaatctatttagatgggccaattatccatctatttttgcagcaactgtattgtacttgccacaatttgcctctagcctagggttattaattttgtgattgtctatctacaggcttcttggaaatagcttccttgttcgttgctaatgtaaccaaatttgtgttttaggtgcttctgagccgattgagattgtttttgagtcctgggtatccatatgaggaaatattgagtacgtttcataatcaaaccagcataattatgtgctcattccttccagttttcactagctttaatagaacaaaaggaggtttgattcagttaaaccatggaaggcctcagccactgcaatacgtagtcaatgcagccttcttagccgccctatatagtgattatcttgatgctgc

SEQ ID NO: 213861 - DNA, 390 bp, Gossypium hirsutum
ctttctttttggggggtgggggtggaggactgaaatgtaatgtttttttttttgcaggagtgaaatcggtgaacataaacaggaaacagcagaaggtgactgtaacgggatatgttgaagctaacaaagtgttgaagaaagctaagtcaacagggaaaaaggctgagatttggccttatgttccttacaatctggtggctcaaccttacgctgttactgcttatgacaagaaggcacctcctggttatgttaggaaagtagacaacaatgtaagcagcactgctaccgtcactagatatgaagatccttacatcaccatgttcagtgatgaaaacccaaatgcatgttctgtcatgtgaagctgcaattttatattactatttctttttg

SEQ ID NO: 213862 - DNA, 348 bp, Gossypium hirsutum
ggccgctacttcactacgtgaggaaaatgtctacaaggcgaaactcgccgagcaagccgagcgctacgaggagatggttaagttcatggaaaccgtcgtttcctccgtcgttgctcccgacgaactcaccgtcgaggaacggaatctcctctccgttgcctacaagaacgtgatcggcgcccgccgtgcttcctggaggattgtttcttccatcgagcagaaagaggaaggacgtggcaacgccgatcacgtctccatcattcgtgagtacagggccaagatcgaggctgagttgtctgagatttgtgccggaattttgaagcttctcgaaaagaaactcgttccggc

SEQ ID NO: 213863 - DNA, 402 bp, Gossypium hirsutum
aagcgtctgatggatgagaatgccaccgcatatgttgaaatgaccaaccttattgaaaaggctaaaaataatgcatccgcatatgagaagaggtccgagtactgtgaccgtgacctcacaaaggcagatcttgagatggtcactcgaatagatccactcagggtatatccttaccgttatcgagctgcagtgttaatggatagccgcaaggagaaggaagccattgcagaactgtcaagggcaattgcatttaaagcagaccttcaccttctacacctacgagctgccttccatgagcatgttggtgatgtcttggctgcccttcgagattgtcgagcagctctctctgttgatcctaaccatcaagaaatgttggaacttgcagccgtgtcaacagccatg

SEQ ID NO: 213864 - DNA, 406 bp, Gossypium hirsutum
gcgtccacgcgtccgatggaggagattatcgttgccaggctgattcagggggccaaactcattttgctcttgcatttgaacttcctggtggttggcacaatgagaaggaagctataattttgaccgttcttcagattctaatgggaggaggtggatcattttcagctggtggccctggaaaaggaatgtattcaagattatatctacgtgtcttgaatcagtatccacaagttcagtccttttcagcattcaacagcatttacaaccatactggcttatttggaatacaagctacaactggttctgattttgtaccatctgccattgatgttgctgtcaaggagcttatttgctgtgcaactcctggacaagttgagcagaaagaaactgagcgtgctaaacagtc

SEQ ID NO: 213865 - DNA, 405 bp, Gossypium hirsutum
gagaactgatgctcttgatgctgcaggaaacaccactgctgctattggaaagggtttcgccattggttcagcagcccttgtgtcccttgccctctttggtgcctttgtgagccgtgctgctatttcaacagttgatgtattgacccctaaagtttttattgggttgcttgtcggggcaatgcttccttactggttctctgctatgaccatgaagagtgtgggaagtgctgctttgaagatggttgaggaagtgcgtcggcaatttaacacgatcccaggtctcatggagggcactgctaagccagactatgctacctgtgttaagatctctactgatgctttcatcaaagaaatgatcccacctggtgcgctagttatgctcacaccccttattgttgggatctt

SEQ ID NO: 213866 - DNA, 284 bp, Gossypium hirsutum
ggtatcctctaattttaaacctaagagttttaagttaacgaagcatttgggtcgtttcgaagtaatggaaacttcatgtaaagtaaagaagggagccggaggaaggaaaggcggtggcccgaataagaagcccgtttcaaggtccgtcaaagtcggtctccagttcctcgttggtaggatcggccgttatttgaagaaaggaaggtattcacagcgggtcttatccggagccccattttacttggctgcagttcttgagtacttgtcgtctgaagttttggaat

SEQ ID NO: 213867 - DNA, 412 bp, Gossypium hirsutum
  unsure (1)..(412): unsure at all n locations
cccacgcgtccgtgtagaagcagctgtgtgagcgtcctaagctacctagggtttccttcattcgaaaatgatttacgacgtcaattctcctctcttccgttctttcctcagccagaagggaggctcctccgacaagagaaaaatggaggagcagaagcctaaggaacagagacccaaagcaaatgagaataagcctgtcatgacagagtaacagctgcttttgtttagtatgcatggcaagttggtggatggttgttcttagaactctgatatgttcaagattgaaaatgcttgttgatgtattcaaatactgtcataacggtttttctttgagatggaatgatattcaactttgtggatgnnaaaaaaaaaaaaaattttttttatttttttttttttattatttaatttt

SEQ ID NO: 213868 - DNA, 408 bp, Gossypium hirsutum
  unsure (1)..(408): unsure at all n locations
gagacgggaatgggagaggaagaatccgaaacctgctccaccgcctaaacagaaatggaggtttatgcagaaatactatcacaagggtgctttcttccagacagatgctgatgatcctgctgcaactgctggagcccaaaatatttatcaccgcgatttctctgccccgacgggtgacgacaagatggacaagacaatattgcccaaggtcatgcaagtcaagcattttggtcgtagtggcagaaccaaatggactcatcttgtcaacgaggatacaactgattggaacaatccatggacatacaacgatccccttcgggcaaaatacaatgcanaaatggctgctgtgaatgtaccgatagcgaaaccaaaagaagcaagaagttgaaagatttggaaatgaaatga

SEQ ID NO: 213869 - DNA, 373 bp, Gossypium hirsutum
ggtaaagaagaataagattgtgaataggccattggctggaacaacaaggagaggaaagactcaggctgaagatgagctggcagaaaagctattgctaagtaatgaaaaggaatgtgcagaacacatcatgcttgttgatttgggtcgcaatgatgttggaaaggtctccaaatatggttctgtaaaggtggagaagctgatgaatattgaacgatattcccatgtgatgcacataagctccacggttactggtgagttgcaggatcatctcactagttgggatgtcctccgtgctgcgcttcctgttggaactgttagtggagcaccaaaggtgaaggcgatggagctaatcgatgagttagaggtgtcaaga

SEQ ID NO: 213870 - DNA, 324 bp, Gossypium hirsutum
cccacgcgtacgcaaccatcaaggcttgggacatgcttaagggaccgcaaaaaggggcccaaagggaggtgtcaaggtcgctgccccgcccgagaaggaacaggatacggttgtgaatacactgttcaagaagcgtgcaatgcactttgctcttcccggagcactagctctacagaaggatctacatcgatctgtagagtggcctattgatgggcgcattcagaggcaaaagaggatgcttaagctgacgctgaaggtcccaccagcatccaaccattttaccaagactcttgatacgaacctatctacgattctattcaagct

SEQ ID NO: 213871 - DNA, 253 bp, Gossypium hirsutum
ggaaaattatgaattcctttcaagatgtatcaaagaaaatttagggtttcacaatggtaaaccgctggctgcttgtatcatatataaatgtctccatcattggcattcctttgagtctgaacggacagctatatttgactacataatagaaggaaatcaatgatgttctgaaggttggagctgaaaatgaaaccttaccttattgggctgtcaacaccttagcacttttgtgtctgctgcagaaaaatttgcg

SEQ ID NO: 213872 - DNA, 341 bp, Gossypium hirsutum
  unsure (1)..(341): unsure at all n locations
tttaccctttgaacgagggtctcggagtaatagcttgtattggtgaattactagaagaaagagaagcaggcaaaactttcgatgtatgtttccagcaactgaaggcttttgctgatgttgtacccagttgggacaatatagttattgcttatgaacctgtatgggccatcgggaccggcaaagttgctacaccccaacaagctcaggaagtgcatgtagctgtccgtgattggcttaaaaagaatgtgtccgaggaagttgcatctaaaacacgtatcatatatggagggtctgttaatggaagcaactgtgctgagcttgcaaagcangaagatatcgac

SEQ ID NO: 213873 - DNA, 360 bp, Gossypium hirsutum
gggttccctgaagaaagagttttatggttccaaagggccaacttttggtaccaaagtcagcaactaccctccatgccctaaacccgacctaatcaaggggctaagggctcacactgatgctggtggaatcatattactcttccaagatgacaaagtcagtgggcttcaactcctcaaggatgaccaatggattgatgtccctccattgaaacactccattgtcatcaaccttggtgaccaacttgaggtgatcaccaatggcaagtacaagagtgtgatgcaccgtgtgctggctcaaacagatgggacccgaatgtccattgcttccttttacaaccctggaagtgatgctgttatata

SEQ ID NO: 213874 - DNA, 284 bp, Gossypium hirsutum
ctttgcctaagctcatgtttagaaggcttactcacaaacacaaaccgatggggggagcgtaggcgcctattaacatacgatccgaacgcatggctactgagaaactccgcatcgaatgtgaggaccagacccctcataatgcaagctctctcagcgtggtgcacgccagtggcccatgtggggatgtactgctagtaaagaacgctggtcatatactacaagagaaacatgttatctatatggagggaaaggccaggaataccctgctggtcgccatgactttg

SEQ ID NO: 213875 - DNA, 220 bp, Gossypium hirsutum
gggatttctagaaacttcgtgaaaactcgaactccgacacaagtagcaagccatgctcagaaatactttctccgacgaagcaatctcaaccgtcgtcgtcgcagatctagcctctttgatatcaccaccgatacggtgcaggcaattccaatggaagaagagcgaattgatcgacaagaaaactcaactcagccatctgaaaccaatgtgtttcccatta

SEQ ID NO: 213876 - DNA, 414 bp, Gossypium hirsutum
gcaagaaatcatggtaagtctcaaatcacttgtatctctcagttcccgatccgctgccgtagcactacttgttttggtggtttcagtggcagtgcagacccatactacaaatgcacaaagctgcccgaccgagctgacgagcctgaacgtgtgcgcacctttcgtggtgcccggtgcagctgtggctaaccctagcattgactgctgtaacgcactccaatcggtgcaccatgattgcctttgcagcactctaaggatcgcttctcgactcccttctcaatgcaatcttccaccactcacttgtgctttgaaagaaaagcagtggtgctgcatgctaaattgggtaggaaaatctaataacgccatggaatatggataccgccctgtttttttctttctttttaaaggggaaat

SEQ ID NO: 213877 - DNA, 448 bp, Gossypium hirsutum
ccggtacggaatggctcggacccacgcgtccgcccacgcgtccgcccacgcgtccgcccacgcgtccggcaagttttgggggttctaacattgatccgactgcttgggaagacaaaaagtgtaaaggcgagtcaagatttcctgctcaggtgagaatccgtattaggaaactctgcaaagcattggaagaggatgcttttcggccagtcttgcaccactatgatggtcccaagtttcgtcttgagctctcgattcctgagactttggacctactagacctctgtgaacaagctggctctccataagcaaaaatgttagctgagtgcaaatgtagcaagggttatgcaattcagctgcctgcttcttaaagaattttaatggagcacaagctatggcttgtagtccaagtggtgaaatcatctttgaaaaaaagtagtaggaaatgaca

SEQ ID NO: 213878 - DNA, 302 bp, Gossypium hirsutum
caagatcccatttgtcccaatctctggatttgagggtgataacatgattgagaggtctaccaaccttgactggtacaagggtcccactctccttgaggctcttgaccagatcaatgagcccaagaggccttcagacaagccgctccggcttccacttcaggatgtctacaagattggcggcattggaactgtgcctgttggtcgtgttgagactggtgtccttaaacctggtatggtagtgacctttggcccctctggtctgaccactgaagttaaagtctgtgagatgcaccatgaaaccc

SEQ ID NO: 213879 - DNA, 288 bp, Gossypium hirsutum
gtaccagctggacaggacaattatgtaaatgaaatgtatctcaagggatcaaaatattacctctatgtacacagttatttgcattatggcttactggcagctcgagcagaaattttgaaggccactgaagattctggcaacccttgcatcttggagggttttgatggtacttataaatatggaggagaagaatataaagcatcagcgccgtcatctggttcaagcatggaagaatgcaggagggtgactctcaaggctcttaaagtaaatgattcatgcacgcatatg

SEQ ID NO: 213880 - DNA, 365 bp, Gossypium hirsutum
agagaagagatataattgaaagaaaagaaaaatggttctgctagagaaactttgggatgatgtagtggccggtcctcaaccggaacgtggccttggccggctgaggaagatcaccaccaccccacccttgtccaccaaagatgaggcttcatcaatggcgatgccgacgagtccgacgacacctgggacaccatcgacgccggtgtcggctcgtagggacaacgtgtggaggagcgtgttcaatccaggtagcaaccttgcaaccaaaggtattggcgctgaagttttcgacaagcctcaacctaactcttctactgtttatgactggctttacagccggggagacccggagcaagcatcaccgt

SEQ ID NO: 213881 - DNA, 335 bp, Gossypium hirsutum
cgatttttgactgatcataaagcaagacaacagtttctgctagaagctgcccgccaatgccaagattctgggctgtacgacaagtctatagagattcagaagagaattggagcattttcgatggcattggatacgataaataagtgcctctctgaagcaatttgtgccttatcacgtggtagattggatggtgagagtcaaactgctggcctcattcactccgggaacgagatcttggagactttcaaatattatcctgaagtcagtttccaagagagggaacatgtttcggagcaacaaaccatattaagacagctcgagactatattatcgat

SEQ ID NO: 213882 - DNA, 433 bp, Gossypium hirsutum
aaaaaggaaaaagaaaaaagaaaaacaatagctgattcggacccccgaaaaccggatttcgaaaccctaatcggatctcccaaatagctccgtagaagaaagaagatgacgggagtaaccaatcaagaggaggacaagaaacccgctgatcaaacggctcacatcaatctcaaagtcaaaggccaggacgggaatgaagtgttctttaggattaaaagaagtactcaactaaagaaacttatgaatgcttattgtgatcggcaatcggtggatttcaactctattgccttccttttcaatggtcgccgtctgcggggcgagcagactccggatgagttggaaatggaagatggggatgagatcgatgcaatgctgcatcaaaactgtggtaccatggcctaactagctagcttatttatagggttactaccta

SEQ ID NO: 213883 - DNA, 423 bp, Gossypium hirsutum
  unsure (1)..(423): unsure at all n locations
cccacgcgtccggtcttgaagtctctttccttcctttttgagtatattggtgaaatgggaaaggattacatctatgctgtgactccattacttgaggatgctcttatggatagagatttggttcacaggcaaactgcagcttcagctgtcaagcacatggctttgggtgttgctgggttaggttgtgaggatgctttagtccacttgatgaactatgtctggcccaacatatttgagacttcacctcacgtaatcaatgcttgaatggaagccatcgaaagggatgagggtagccttaggtgctgcaattgtgctgaactactgtctncagggactcttncatcctgctcgtaaggttaggggaagtgtattgaaagatttataatcactttataatggatcccaagatgctctagttgcagc

SEQ ID NO: 213884 - DNA, 408 bp, Gossypium hirsutum
cccacgcgtccggtcatgcagtctctttccttccttttggagtatattggtgaaatgggaaaggattacatctatgctgtgactccattacttgaggatgctcttatggatagagatttggttcacaggcaaactgcagctttagctgtcaagcacatggctttgggtgttgctgggttaggttgtgaggatgctttataccacttgatgaactatgtctggcccaacatatttgagacttcacctcacgtaatcaatgctgtaatggaagccatcgaagggatgagggtagccttaggtgctgcaattgtgctgaactactgtctccagggactcttccatcctgcttcgaaagttaggggaagtgttttggaagaattattatttcactttatattggattccaaa

SEQ ID NO: 213885 - DNA, 359 bp, Gossypium hirsutum
cccacgcgtccgcccacgcgtccgcccacgcgtccgattttgtgaagtgctggttctggttggccttggatctcatttcatctgtgagtataagattaagatggatctctgtctgtctggatttgccagcggtgttggtttggttgtgatgtgttgggttgggttgcgtgactaaaacattattgagattatatcttatggagaaattacgatgataccaatatttatatgtacattgataccctttttttccatcaaggagaaaatgctatcctgtacccatttttcccaagaaaaagattactaacatgctatatgttaattgatgcaaattaaacttaacaattatcgtataatgg

SEQ ID NO: 213886 - DNA, 378 bp, Gossypium hirsutum
cggacgcgtgggcggacgcgtgggcggacgcgtgggaaaaaggcaataggagatgccggtttcatgcctgaacttctcaaattgctcgatgcaaagtcatatgaagtgcgtgaaatggcaaccgaggcactctctagcttggtctcggtcccaaaaaatcgaaaacgattcgttcaagatgatcggaacgtaggctttcttctccagttgcttgatcaagaggatggcatatcaggtaacaaaaagctcttactatctatattaatgtcattgacaaattgcaacagtggaagaagaaaaattgccagtccggatatctaaagacatagaaagctggctgaacttgaagtttatgatgccaaaaaacttgtcaggaag

SEQ ID NO: 213887 - DNA, 333 bp, Gossypium hirsutum
atttcaacaaccgccctaattctttcaaagtactctcaccagctcgcacatgtgtggtttattataaagtggatgaaagtgtagaagaaactaatggtatcaatgtaattagtgtcagtgagacattagaaatggatgcatcaaagcagaagaatgctgaggaatcggctatcttggttgatcatggagataaagaaaatccacaagaaactaatgaccgtgacaccgccagtttcgatgaggaattgcaaaaagatggagcaaagcaggaaagtattgaagaaccagcagcttctgtgctagacaaaaagattgtgggaagtaagttagatg

SEQ ID NO: 213888 - DNA, 408 bp, Gossypium hirsutum
  unsure (1)..(408): unsure at all n locations
gtaaaagcaatgacactttccctctcggttttagttgccatcgaaatgttcaactcccttaatgccctctctgaagatggaagtctcttgacaatgcctccatgggtcaatccttggctcctcctcgccatgtctgtgtcattcggcctgcacttcttgatcctctatgtgccattccttgctcaagtattcggtatcgtacctttaagctttaacgaatggctgctggttctggccgtcgcattccctgtgattttgatcgacgaagtgttgaagttcgtagggaggttgggacggcggatgagatcctccagtcaaagacctttgaaacccaaaacagagtgaagacagatatggtataaatncgataagtggatactagacagccaatgctagcctctaaaatga

SEQ ID NO: 213889 - DNA, 381 bp, Gossypium hirsutum
  unsure (1)..(381): unsure at all n locations
caaaaaccaggtccgacatcagagagaaactatgggttattttaccctaatgaacaaagggtatataacataccgttatcacaaaaggggctgaatggtaaccagtcaccaccggcgagcaacgtgaatcagacggcgcctgtgaacaactggggaggagtgtcaaaggcgacgtcagggcagacctggtgcatggcgagccccaacgctgaggcggaggagctgcangaggggttggattatgcttgtggtgagggaggggctgattgtgggccaattcaaccaaatggtgcttgttataatccaaattcactcgttgcacatgcctcgtatgcttacaatagttactatcaaaagagggcacgtgtgaagtggtcatgc

SEQ ID NO: 213890 - DNA, 199 bp, Gossypium hirsutum
aaggaatccactctccaccttgtcttgcgtcttcgtggtggtttctaagctctcctatgaaaatgaggtttctggattttatgtgaatgattgtgatgtctggccctgttaaggcctcataaataaacctaaactattttatctatgttttatcttatgtaatgatattatatgaataaaaattaccatgtttacctta

SEQ ID NO: 213891 - DNA, 388 bp, Gossypium hirsutum
  unsure (1)..(388): unsure at all n locations
gaaaccggcaattgagcttctcggaaaatgaaaaggagggtggtggtcgccgtcgttgtaaagctccggtgagtttttcgatggatttggggaactggttcgatgattgggaaggttatagaagtaggaaaacggtgttggaagtgttgagagaattggacgcagatatattgggtttgcaagatgtgaaagcggaggaagagaaagggatgagacctttgtcggatttagcagctgcgttggggatgaactacgtgtttgccgagagttgggcgccggagtacggcaacgccgtgctttcgaagtggccgattaaaccggtggaaagtgcagaagatatttgatgacgcagatttcatgaatgtnctaaaagcaaccattgatgtgc

SEQ ID NO: 213892 - DNA, 367 bp, Gossypium hirsutum
aaatcccctgagaaaccgaatcctggaggcatattctgggatttgccaagggtttaagaactcttccaaaacccagctggtgattccctatgcacctcacatcctacagttattggatggcatatacatggagaaagacatggatgatatggtcatgaagactgccattggagtccttggtgatctagctgatacattaagaaatcatgctagttctatgatacagcaatctgtatcaagcaaagactttctgaatgaatgcttgtcttcagaagaccttctggttaaagaatctgcttaatgggccaagcttgttattagtccatccatttctgtttgagggtggcgccatttggcattttttatt

SEQ ID NO: 213893 - DNA, 401 bp, Gossypium hirsutum
cttttacagtgggtgactttactgggtagataaagcctatcaaagaagatttctaccagaattgggctcatggaaaatccttcgttaaaggggatgttcttggtgagtttttgagctttaaaatctttgttaattgagcttgttgattcgaaatttgatatttttatgcgtgtggttttgcagggttcaaatccggtcttgaaaaatctgaaaaagttgcagaagtaacggaaaaggcttacgatctgtgcgaaattgccaatactatatcatccgccatccccataccgataaatattactcttaacaggaccggagcttattacttcatttctactatcgccgataactgttggaacgggcaaaagctcaacatcacagtcggagatgagagcaaccct

SEQ ID NO: 213894 - DNA, 117 bp, Gossypium hirsutum
cccacgcgtccgggagaatacagtgtcatttgtcacaatgaacaaggtcggaggattcctgcagagaatggatttggcccgcaagtttgcatttgggaagatgttggtgatcggtgc

SEQ ID NO: 213895 - DNA, 339 bp, Gossypium hirsutum
ttttgaactcactgaagaagctgtcaaggaattcattgctaaacaggtggtttactacaagagattgcataaggtgcactttgttcatgcaattcccaagtctccttcaggaaagattttgagaaaagatctgagagccaagctggctgctgcagcacctaatacccacattccatgaaaatttcttctataatctatttggcttttaaattgcaacgccttttgctgattttgctttaacttaagcttttaatgtttctaactcaagaggtcctgaaaagaaaaaattagtatggcgatgatcctatgtcatatttaagtttgttctctttttctcat

SEQ ID NO: 213896 - DNA, 375 bp, Gossypium hirsutum
aaattccctgagaaacggaatcctggaggcatattctgggattttccaagggtttaagaactctcccaaaacccagctgttgattccctatgcacctcacatcctccagtttttggatggcatatacatggagaaagacatggatgatatggtcatgaagactgccattggagtccttggtgatctagctgatacattaggaaatcatgctagttctatgatacagcaatctgtatcaagcaaagactttttgaatgaatgcttgtcttcagaagaccttctggttaaagaatctgctcaatgggccaagttggctattagtcgtgccatttctgtttgaagggtgttgccatttggcattttttattttctttc

SEQ ID NO: 213897 - DNA, 354 bp, Gossypium hirsutum
cccacgcgtccgcccacgcgtccgcggacgcgtgggcaaagattgatttttgctggaaaacaacttgaagatggaagaactcttgccgattataatatccagaaggagtctactctccatttggttctccgccttcggggtggtatgcagatctttgtaaagactcttaccggaaagaccatcactttggaggttgaaagttccgataccattgacaatgtgaaggcaaagatccaagacaaggagggtatccccccagaccagcaaaggctcatctttgctggcaagcagctcgaagatggtaggacattgggccgactacaatatccaaaaagagtctaccctttcattggt

SEQ ID NO: 213898 - DNA, 227 bp, Gossypium hirsutum
atcaaacgtgaaagcatgcatatcgaaagacaatggatatgcatggcctttggtgaaaagcagctttaatatggacgaacttttgccgattgtaatatccacaatgagtctagtgtgcatctggttctccgacttcggcgtggtatgcatacctttgtgaagactcttaccggatcgaccattactttggaggatgaaagttccgataccattgactgtgtgaaggc

SEQ ID NO: 213899 - DNA, 319 bp, Gossypium hirsutum
gccaaccgttggattgactgccagggactacaccaggatgtactgggctgttcatcctgggggacctgcaatcttgaacagaatagaaaaacgactatagttgtttccagagaaactaagtgccaagcgaagaacgttggtggatatgggaatgctagcgtaacacacattgtatgtgttggatacatgatagacgagatcttgatgaatcagcagcagcagatgaaagagtgccaagaagaacagagtgaatggggcttgattttagcttttggaccagcggttaccttcgagggtattctcgcaagacacctgacag

SEQ ID NO: 213900 - DNA, 417 bp, Gossypium hirsutum; identical to SEQ ID NO: 192571

SEQ ID NO: 213901 - DNA, 343 bp, Gossypium hirsutum
cgggggtcccagtcccgaacccgtcggctgccggcgcactgctcgagctgctcccgcggcgagagcgggtcgccgcgtgccggccgggggacggactgggaacggctccctcgggggccttccccgggcgacgaacagtcgactcagaactggtacggacaagggggggcatttttcatgttcaatctgttctctgtaatgggtgggtcctgggtcccaagcaggtcgattaaatttagtgtttgtgcttgtatgtttttattagaagaggcagtttgcatgttgtcttttacaagtgataatcatcaatcatagtgcgtttgtttaaaaaaataaaattata

SEQ ID NO: 213902 - DNA, 274 bp, Gossypium hirsutum
ataaggcaaaaataatggcagccatgggctgcgttgcaaagctcaatgactgctctttctctatcctcaaactcctttttgggccaacgtttctcaattcctccttctctctcccctcttcacatcaaaccaagagagaatccatgtctcattgtagtgaagcttaaacgatgggaacggaaggaatgcaaaccgaacagcctttcagatttgcataaaatgcacgttaaggttggagataccatcaaagtaatatccggtcgcgatagggcac

SEQ ID NO: 213903 - DNA, 422 bp, Gossypium hirsutum
aggaaactaacaagaaccaagaggtggttcttgccctctatgaggccttaaacactcgagacgtcgaaactgttcacaaaatccttgcccctgaccttgaatggtggttccacggtcccccgactcaccagtttttgatgcgcctgctcaccggtgcttcttccgacgattctttccgtttcgaggttgatcccctttcggttaccacctttgggcccaccgtcatcgtcgaaggctgcgatcacagccgttcaatctcttgggttcacgcttggaccgtaaccgatgggataattacccaagtgagggaatacttgaacactttttctcaccgttactcgccttggaaactctaccccatcttcatcgttcgactacaatccatcatcatcatcatcatcatcatcatcatcatcatcatc

SEQ ID NO: 213904 - DNA, 326 bp, Gossypium hirsutum
cgggggtcccagtcccgaacccgtcggctgccggcgcactgctcgagctgctcccgcggcgagagcgggtcgccgcgtgccggccgggggacggactgggaacggctccctcgggggccttccccgggcgacgaacagtcgactcagaactggtacggacaagggggggcatttttcatgttcaatctgttctctgtaatgggtggttcctgggtcccaagcaggtcgtttaaatttagtgtttgtgcttgtatgtttttattagaagaggcagtttgcatgttgtcttttacaagtaataataataaatcatagtgcgtttgttt

SEQ ID NO: 213905 - DNA, 368 bp, Gossypium hirsutum
aactgatactcatatcgctcatcatttgttttcgacaatgccgcattaccacgcaatggaagcaacaaaggcaataaagccaatattgggcgagtattattcatttgatggtacaccagtttataaagcgatatttagagaggcaaaggagtgtatttacgttgaaccagacgaaggtgagcagagcagcaaaggtgtattttggtttagaaataagatctaattttgccgatagcgttgcggttgccgatgatgatgcgtttaagaatgggttaaatttgttacattattgttaaggatttggggttacttctattttagatgcttttgaatttggacttcgatggttctcatcgactttgttgatc

SEQ ID NO: 213906 - DNA, 284 bp, Gossypium hirsutum
ctcagtatctttggctggtcgaattatgagcaaaagatcatcaagttcaaagcttttcttttatgacttgcatggtgatggtgccaaagtccaagttatggctgatgcaagcaagtcaggcttggatgaagcagaatttgcaaaattccattccagtgtgaagcgtggtgatatagttggtgtcactgggtttccaggaaaaacaaagagaggggagttgagcatctttcctaagtcatttactgctgtatcccattgtctccatatgatgccaacgcaaaaag

SEQ ID NO: 213907 - DNA, 347 bp, Gossypium hirsutum
gaccacgcgtccggcatccccagtccccattggttgccaacaatgggaaaagggggaggtgatgtatgatgtgtagcatggagaagagagtgagaatgggtcaacatggggatgagtgcatcattgctggcagcagcctgtgcagcaaccatgtcaagcccagccattgctctggtggacgagagaatgtccactgaaggaacaggacttccctttggtttgagcaacaacctcctcgggtggatcctgtttggtgtgttcggcctgatctgggcttttttacttcatctatactgcctccctggaagatgatgaagagtctgggttgtccctctaaaacccaaacc

SEQ ID NO: 213908 - DNA, 388 bp, Gossypium hirsutum
ctcccaatagttagctcagtccacagtcctcatcactcaatatcctttgaaactcagtgtttaagctttgattcccaagtttttttatttaagaaatggctcaggcaagaggcggtgcaatagcggtggcagcggtggcggcggcggtgctctgcttgttgctgagtcactttgagttggctcaagcagcaacgtatactgttggtggaaccggtggttgggccattaacgtggctggttggaccaaagataagcgttttaaggctggtgatacacttgtattcaaatacaacccatcaatccacaatgtggtagcttgtaaccaggcaggttacagttcatgcacaccccaaaaggtgctaaagttaccagtcgggcaaggatcaaa

SEQ ID NO: 213909 - DNA, 394 bp, Gossypium hirsutum
cccacgcgtccggctaaagataaggccttgaaggtacgacagtacatggactcgcgggcttctgttagacagggggttctagctcaaagaaggtctaatttccaggggaaccggtttccttttgtggctgaggctgcacgtagagctgcagttgctccatttcgcaatagagcatttaatagtaggagggtggctaatttgaacaaaccaagggttggagcaccacctgtccaaaggagggctacaaatgggggttttactgccaagccacaagcggcagcaaccaacaactacaggcaggaccacaagaggacaatagtacaaaacaaaggcctaaaacattggattccctctttgccaatatgaaagaagagcgattgagggtattgtcaca

SEQ ID NO: 213910 - DNA, 211 bp, Gossypium hirsutum
caccttatttcttaccctctaacagcctcaaacccaaacattcaccgtttcgtcgtccttgggggcctattaacataagatccgaaagcatggctactgaaaaactcggcatcaaagttgaaaccaacccttaaaaatccaagctttttaaccttggtgtacgccaggggcccaagtggggttgtcctcctagaaaatccccatggacata

SEQ ID NO: 213911 - DNA, 350 bp, Gossypium hirsutum
attttccattcatctttcattggtcgagcatcttcgaagaacaagggccgaatggcacgctatcttgcaaacaagtgttccattgcatctcgtatagattgtttttcagagaggggttccactgtctttggggagaaactgcgggaacaggtggaggaacgacttgaattctatgacaaaggtgttgcacctcgtaaaaacatcgatgtaatgaaatctgcaattgaaagtactcagaacaaagatactgaaatggaagaagtggaacctgaagaagcttccgcaaagaaaagcaagaaaaagaaagtccaaaacccgaagatgctccagctgctgctacaaatggagat

SEQ ID NO: 213912 - DNA, 285 bp, Gossypium hirsutum
gccaaaccaagttattgaggagaagcttggtgagccaaccgagagctctgacgatagcactaaaggtcttactgatggtgaatgtcgtgatgcagggtacgatgctgagtacgtaacggacgagaacgcgccaaagagcagaatctatagcattgcatggtctatcgattcatctacgatcacgagcaagatgatgtacgctagcatctacgacagattcaagcacaaactggatcgaatacaggttggattgcaagcgacatatccaaccgcaaatgctatcga

SEQ ID NO: 213913 - DNA, 346 bp, Gossypium hirsutum
ctcagcagcattcatagcattcggcagagattactgataagcttggccttcactcccttcgtcagcgccactggtatatccagagtacttgtgccacctctggcgaaaggctgtatgagggactggactggctttccaacaacattgctaacaagggttgagggttggttgaattccagtcatatcttcaggcagctatcctattattttctgggtccttttttaagttttacaggaaatgtatcagaatgtgttatataattaatatatattcaccgtactactgaaattaggcatttgcctgctttgtagattgatttctcaaataatttttttctatatgatc

SEQ ID NO: 213914 - DNA, 295 bp, Gossypium hirsutum
gaaacagtcaagaaaatgttgtccttggcattgcagggcaaggaagaaaagaacggccactttgagatcaaaactcatgggttgaggtctgaggttggccccgtcagtttagttgtcaatgcttgtgcgaaccgggatctccatgaaaatgttgtgggggtttgttttgtggctcaagatataactggtcagaaaattgtaatggacaaatttacccggatcgaaggggatttccaaacaattttgccaaattcaaacccggttgtttcaaccattttttgaaccaaataaattt

SEQ ID NO: 213915 - DNA, 358 bp, Gossypium hirsutum
ctgaaattttatagcaagactccttatttctccgatgtcgatcttcgaatgcaacgggagtgccctaatagccatggtaggcaagaactgcttcgccattgccagcgatcggagactcggagttcaactccaaactatcgccaccgatttccagaggatttataaagtccacgatcggctcttcctcggtctctccggcctcgccaccgatgctcaaaccttgtatcaaaagcttgtctttcggcacaaactggatcagcttagaaaagaaagaaaccttgaacccgggaactttggttaactggtttttgcattctttacaaaaaagggtttggtccatacttctgccaacctgtaa

SEQ ID NO: 213916 - DNA, 403 bp, Gossypium hirsutum
accacgcgttcgtccaagcgtacgcacacgcgttcgcggacgcgtgggtgcggaaacatttgcatgtgtttttttttaaataattttttgttaaagtgactgtaaactaattaaaaaactagttgtgttttgatattgataaacacgcttacgttcagcaactagaagtaagtggaataaagctagctcaacttgtacaagatctgcagagaacaagatcccggtgatttttcgtgggtgggtgtgctgctgctttcggaaatatcagctcacgagctgcaatgtttgacatggaatattcaagatggttagaagatgatcacacgcacttgtcggagcttacaactgggttacatgctcaccttcccgacaccgatcttcagaccatcgtcgacggttacat

SEQ ID NO: 213917 - DNA, 371 bp, Gossypium hirsutum
cccttttgcaggctggtgcttctttggaatctcttgctaaaggtactaagaactcaatgggcttgtcaacaattgcactgaattgcacagaaagtagctattagtttggagaaggccgcattatctgacgaatattttattaagaggaagctttatccaaatgttgatttctattttgggttaatatatcgggccatgggatttccaccagagttcttcactgtgttatttgcaatccctcgaatggctgggtacttggcacactggcacgagtctctagatgatcccgatacaaagataataagaccccaacagcaaaaattgtgagagtgaaagaaggggaaagaagatgaaagcaaaaagggaacttg

SEQ ID NO: 213918 - DNA, 400 bp, Gossypium hirsutum
cccacgcgtccgctcgattatcttgttggagctgtggcaaatcccaacacgccatttgctgcaattgacggtggttctaacgtatcaaccaagattggagtgattgaatcactcttggccaaggctgatattctcatactgggtggaggaatgacgtttaccttctacaaggcccaaggatatgcggctggatcttcacttgtgggagaagacaaacttgatctaacaacatcactccttgagaaggccaaggcaaaaggagtctctctcttgctccccactgatgtggttgttgctgacaagtatgctgctgatgctaacagcaaggtggtgccagcatcaaggatcccagatggttggatgggcttggatattggacctgactccatcaaaaccttta

SEQ ID NO: 213919 - DNA, 400 bp, Gossypium hirsutum
  unsure (1)..(400): unsure at all n locations
attcaaaccatagggaaaatcgttgaatcggagtcattctctaaattcagatatgattacatgtcttggccaggactcgttaacatgacagaacattccccaataaacttgctgcctagacattacaactcctcaatcccacttgaaacgttctgcagagacaccgtgatgactatatggcactatcatggtggctgccaagttagtagggttgttgaccccgattataaggttcttggtgtcgaagctctaagggttatcgacggttccactttcaactattcgcctgggactaatnctcagccactgtcatgatgcttggaaggtagtacataaattaatcactagcagaaatattcattttatgttgggttttttaaaattgacattttagtttgat

SEQ ID NO: 213920 - DNA, 239 bp, Gossypium hirsutum
cggacgcgtgggcttgaagaatgatttcattaagtacggtcaagatgaagaagcggctgatgatcaagaagagactggatggaaatatattcatggagacgtattccgtttcccaaagtacaaatctctctttgcttctgctctcggatctggaacacagctgttcactttaacggtcttcatttttatgcttgcactggttggtgtcttttatccatacaaccgaggagctctattta

SEQ ID NO: 213921 - DNA, 257 bp, Gossypium hirsutum
tgctcttaaagtttctggtgattctgaagcagcttcagccctcaacaagggcttcttggctacccattttgccactctccatcctggttcagtcactgtcaatcttggttcttctggtttcatggcttactctcttgataaacaaaacccacttctccccaggctctttgcagttgtggatgacattttctgcttgtttcaaggccacattgagaatgttgctgttcttaagcaacaatatgggttgaacaaaactg

SEQ ID NO: 213922 - DNA, 353 bp, Gossypium hirsutum
attttgctcatcatttatgagcttgctaataaaatgtaagattgcagtattttgttcttgatattgaattgaattgaattgaattgttcatcacttgtaaagtcctgaaaatgtagaaaagttgcatacaagtggtaaaagctgtgaacttgatgaaagatgccatctaaaattagcagatactaaaatgaaatggtaaatgtaggaatggaatccaacagaggaagaattcttatgaatatggtgtatatggaacaacctgtcctattccaccaggaaagaactttacatacattcttcatgtcaaggatcaaataggaagattcttttacttgccctatcttgcattccat

SEQ ID NO: 213923 - DNA, 393 bp, Gossypium hirsutum
  unsure (1)..(393): unsure at all n locations
caaagagcaggaaaacaagaaaagcagagccgcatcactttttgctagctaagcggctgtgggagttattggtcttcanaacagcttctgcagtagctaataataacgttatatattatataaattttatacatcctttttaccctacgactccatatataagcaagtaaaaataaatatggctcgctctgtttcttcctttaagttccttggtgcttctgtttttgatgctctttatgtctccatatcaaggagaggttactcaagtgcacctccggcggcagtgacagctagctttggtggcctggagcatggggaaagtggaacgaagatatgctatgaaagagtcgtcgtcgtcggagacaaaggcttattcttcagcttgggcgcctg

SEQ ID NO: 213924 - DNA, 405 bp, Gossypium hirsutum
cattttcattgatgctgaccttcttatacttaggaatattgatttcttatttgagatgcctgaaatttcagctatagggaataatgctacgctcttcaactctggtgtgatggtcattgagccatcgaattgtacattccagattctaatggatcacatcaatgaaattaaatcctacaatggtggagatcaggggtatcttaatgaaatcttcacctggtggcatcggattccgaaacacatgaacttcttgaagcacttctgggaaggtgatgaggaggagaagaaacagatgaagactcgactcttcggagccgatcctccaatcctttatgtcatccattatctgggaaataaaccatggctatgcttccgggactatgattgcaactggaatgtggacat

SEQ ID NO: 213925 - DNA, 399 bp, Gossypium hirsutum
cccacgcgtccgaaaatttctaaaattttgaagcttcgttgaaggaattatcgtgtttttttttttcccttttcttctttgattttttttttggggttttttgaggtgcaaattgcaaaagcaggcaaaattaatggctactgaagaggtcaataagcctccttcacttccttcatacccacagctgattatgaacgccatcgaagcattgaacgacaagaatggttctaacaagacatcaatatccaaatacattgaatccaagtatggagatttgcctgctggtcacactactctccttcacaccaccttaatcgtatgaaacaaacaagggaacttgtcttcttgaaaaacaattacatgaaagctgaccctaatgcaccacctaaacgtggtcgt

SEQ ID NO: 213926 - DNA, 404 bp, Gossypium hirsutum
  unsure (1)..(404): unsure at all n locations
agcgacatgctggttgcaaaacaaagcatccaaataatcacatatactttgagaatgggaagaccatttatgggattgtccaagagcttanaagcacacctcagaatatgttgttcgatgttattcagacaataactggctcgcctattaaccagaagtgcttccggatttggaaagagtcgtttttagctgccactcttgaacttcagcgtatatatgggaaggatgaaatgaaacaattgtcataaaacaaccattttcatttgcaagcttgttaatggtgacagcgccgggcgtgggtttttttttttttaatttacgggagtagggactatgttaaaaagtagggagttaatgcctgaaagagagatacttgttatttgtgtatttgcttgtatctctgc

SEQ ID NO: 213927 - DNA, 290 bp, Gossypium hirsutum; identical to SEQ ID NO: 196496

SEQ ID NO: 213928 - DNA, 310 bp, Gossypium hirsutum
accacacgtccgaaggaattctgtatgaacctggtgaacattcagatcatgtcggggtcatcaagtatgtgccatatgtgggagacagcaatagagccattgatgtgtattcatcatagatattcatgggaggctagaacaccattgtgttgcacaacaaatgttagtatatgctgttagacgctactaatattctataaatggttctacttgctgaacttaacaccacgaatcaagttaatgctgatcgagaggggatgttacacttttttcatacttgggctacaatgctaatttacctaatcaaaac

SEQ ID NO: 213929 - DNA, 331 bp, Gossypium hirsutum
cattttatgggaaaatcgctggccggcgcaaccaagcttcaacatctcgcaaaggtgtaccggcgccgcccaccatcttaacacaactgggaaaaacccaaaacccactactctgaaccggcggattataagtgaagacaacaaacccaattccaagaagaagatggagagctccagtgccagtcaacgcctcccactttccgaagtcgtctccgattgcgttaaacgttggttcaaagatactctcaaggaagccaaagccggggacgttaacatgcaagttcttgggggtcaaatgtattattaccgtatggggttccccggaatggcc

SEQ ID NO: 213930 - DNA, 403 bp, Gossypium hirsutum
accatttcatggcagaacaactggcagtgattgccaaagaacatggtggtatcatgagattgattcaagtttcttgcttagggtcttctctgtcatctccatcaagatttctaagagctaaggctgctggagaagaagctgttttgaaagaacttcctgaggctactgtcatgaaacctgctgtaatgattggtaccgaggatcgtattatgaatcgatgggcacattttgcaaagaaatatagttttcttccactcattggtggtggatctaccaaaatccagccagtatatgttgttgatgttgcttctgcaattgttgcggccttgaaagatgatggaagcagcatgggaaacgtttatgaattgggtggaccagagatctatactgtgcatgaactggc

SEQ ID NO: 213931 - DNA, 307 bp, Gossypium hirsutum
cctggatgcacggttggatgttgcattcaataagaaacttccagagatccgcaagtggctttttggtcaggttgctgcttgaaggctgaagatggtattgtttttctcagcagcttttgtcatcggccatagagcatagtgattaagttatttgttccatgtatttgctttctcatattgttctccccgaatagtttatttgtttgataaaagtcagtgaaactcttgttcgattggtccgtatatcattttctgggattgtgaaagtactgtttttaaataatgaataaaatttgaaagtttgctt

SEQ ID NO: 213932 - DNA, 299 bp, Gossypium hirsutum
atccattgccgccgctgtcgtcgcaatggtgaagtttctaaaaccgaacaaggccgtgatcgtcctccaaggccgatacgccggccgcaaagccgtgatcgttagatccttcgacgaaagcacacgcgaccgcccttacggccattgtttggtcgccgggacaaagaagtacccgagcaaagtcatccgcaaggactcggccaagaaaacggcgaagaaatcgcgtgtgaaatgcttcgtcaagctagtgaattaccagcacctgatgcccacgcgctacaccctcgacgtggatttga

SEQ ID NO: 213933 - DNA, 386 bp, Gossypium hirsutum
cccacgcgtccgtgcaaaccctgatggtcgtaagagagcccttctcattggagggggcattgctaacttcactgatgtagctgctactttcaacggaatcattcgagcattgagagaaaaggaagccaagttaaaagcagcaagaatgcacatctatgttcgaagaggtggtccaaactatcaaactggtttggcaaggatgcgtgctcttggggaggaactaggagtaccccttgaggtttacgggcctgaagccacgatgactggcatatgcaagcaggctatagattgcattatgtctaagcataaaagggtattatttttgttctccaaaatcgaagtattctgcccatgcaatttggtattctttggtcaaagtataaact

SEQ ID NO: 213934 - DNA, 401 bp, Gossypium hirsutum
agaaaatatcacaaatcttcttctccttctcagaaatcttagtatcatcactatggcctcaaatcccaaggtcttctttgacatgacgatcggtggtcagcccgctggtcggattgtgatggagcttttcgcagattgcactcctcgcactgcggagaacttccgtgccctctgtactggcgagaaaggcgtcggccgcagcggtaagcccctccactacaaaagctcttctttccatcgtgtgatccctaactttatgtgccaaggaggtgacttcaccgccggaaacggtaccggaggtgaatccatctacggatcaaagttcgctgacgagaacttcatcaagaagcacactggtcccggtattctctcaatggctaacgctggaccgggaactaacg

SEQ ID NO: 213935 - DNA, 392 bp, Gossypium hirsutum
ctttttacaacagttatgtacatcattatatggaaggggagtccatgagagtaagttttgagccatggtttgtggagtacaaggttgatgttgtattcgctggacacgtccatgcctatgagagatccgaacgcatatcgaatattgcgtataacattgttaatggattgtgcactcccataaaggatccatctgctccagtgtacttgaccattggagatggaggaaatctggaaggattggtgaaagagatgacagagccacagccgaactactcggcgtatcgtgaagctagtttcggtcatggaatactggaaattaagaacaggactcatgcttactttggctggcatcgaaatcaagactgttatgctgtggaagccgattcccta

SEQ ID NO: 213936 - DNA, 362 bp, Gossypium hirsutum
cccacgcgtccgcggtgctgcagatgttccatcgcgggcatgttgtttgggtgctgaaactattgcttacgaagcacagaccaaagatgaccgacgggctatctgcgagtgccttgttaatgcattagcaaatattggcacatctgactccttcactgcgcggatacctttaattgctacccaatgcggtgttgatgtttctcttccgccaattaccagcgacaaagattattgttccaagctcttcccttgacttcgtttgatataccatcgtgttgtgccacactagggaagatattaattatatctagctcaatccatcatcctttaaatttctttaagtaatttacattgtacttagt

SEQ ID NO: 213937 - DNA, 383 bp, Gossypium hirsutum
attcaaaccatagggaaaatcgttgaatcggagtcattctctaaattcagatatgattacatgtcttggccaggactcgttaacatgacagaacattccccaataaacttgctgcctagacattacaactcctcaatcccacttgaaacgttctgcagagacaccgtgatgactatatggcactatcatggtggctgccaagttagtagggttgttgaccccgattataaggttcttggtgtcgaagctctaagggttatcgacgggtccactttcaactattccgctgggactaaatctaagccactgcattattcttggaaaggtggtccttaattaatcacttgccgaaatattcaatttatggtggggtttttaaaaat

SEQ ID NO: 213938 - DNA, 383 bp, Gossypium hirsutum
cccacgcgtccgcccacgcgtccgcccacgcgtccgcaataccctctaattttaaagctaggagatttaagttaacgaagcatttggtcggttcgaagtaatggaaactaccggaaaagtaaagaagggagccggaggaaggaaaggtggtggcccgaagaagaagcccgtttcaaggtctgtcaaagccggtctccagttcccagttggtaggatcggccgttacttgaagaaaggaaggtattcacagcgggtcgggaccggagccccggtttacttggctgcagttcttgagtacttggccgctgaagttctggaattggctgggaacgctgcacgtgacaacaagaaaaacaggatcatcccaaggcacgtgctacttg

SEQ ID NO: 213939 - DNA, 398 bp, Gossypium hirsutum
cggacgcgtgggctgaaaaggcaccttatgtagctaaggcagaaaagcggaaggttgagtatgaaaagaacatgaaggcctacaataagagacaggctgagggtcccaaagacgaagatgttgagtctgacaaatcagtgtctgaggtgaatgatgaggatgatgatgaagaaggcagcggagacgaggaagatgatgagtaggaaggtccgtggtggatagcataatcaatgtaggctgtgatagtgtttgatcaaaaccttatgttaatgctttagatgtttccatgttattcttttagatgcgcatgccatctaaaggagaaatgtacctctgaatcctgttggttccttttgaccttcagaaattaatagttgtagatgggataatctgcttct

SEQ ID NO: 213940 - DNA, 385 bp, Gossypium hirsutum
aaaaaatgactggttggatgtattttgtcttcaagacaatggcagagcaagcagcctggaaattcgctaaagaaaataacattgattttgtcagcataataccacctttggtggtcggtccatttattatgcaatcaatgccggcaagcctaataactgcactttgtcctatcaccgggaacgaagctcattattcgatcataaaacaaggccaattcattcatttggatgacttgtgcagagctcatatctttctattcgagaatccaaaagcggaaggtcgccacatttgcgcctctcaccatgctaccattatcgatcttgcaaaaatgctcagtgaaaaataccctgaatataatgttcccaccaagctcaaagatgtgga

SEQ ID NO: 213941 - DNA, 400 bp, Gossypium hirsutum
attttggtcactggtgtacatgaggaagcacaagaggatgatttgcacaatacatttggtgaatttggtgagatcaagaatttgcatttaaatcttgatcgtcgcactggatttgtcaagggatatgcactgattgaatacgaaaagtttgaagaagcaaagaatgccatatctgcaatggatggagcagaacttcttacgcagactatgaatgttgattgggcctttagcaatggacccagtgttggagcctctaagagaaaaaatattagagctggacggacacatcgctcgcgaagtcctaggagaagatactaacttgaactctattacgagaatcaatttgtaacaagagattttaagatttggtgcttgaaatttactggaattatggaatttt

SEQ ID NO: 213942 - DNA, 406 bp, Gossypium hirsutum
cagggtaaccaaggagaacagggctgctggggttttggacaactttgctgagggagaaaaatattctgaacatttcttgagaaaatatgtccgcaacaagacgccagaaatcatgcccagtatcaacagcttcttcactgacccaaagtgaggcttcactcttgctttatgctgaaactaaaataaaaaaatagaagaactaagtcttattcaatcaataccaagttttgccctttctttctgctgactgtgatgcaaatttgtgttggttttgcacttggatgaggtgtgttttttaagagaataaaaggtgttgtggatttttcgaagaagtgttgttttagcttaaatgaatgacccttatttgcaataatatgattttggtaagtgggcaattatgggttct

SEQ ID NO: 213943 - DNA, 279 bp, Gossypium hirsutum
ggaagagcagactacaagcaccaaatagaaagtaaatgcatgagtgttctaccaaggccttgtgacttcaacctattcatggttcaaactgggtaaaggcccacgagaggcagcttcggctctatgatattagattgaggcataccgaactgcattcttttgggtggaaacaagaaagtagtgactcacaatcagctttgataaatcaagcttggtctcctgatggtttatacctctcatctggttcagcagaccctgttatccacatatttgatatta

SEQ ID NO: 213944 - DNA, 401 bp, Gossypium hirsutum
gctaaagttgtttcgatcaatgattatgaggatgttccggtaaatgacgagaaagcattgaaaaaggcagtcgcgaatcaaccggtgagcgttgccattgaggcaggaggaaggagtttccagttatatcaatcaggtatatttgatggaaaatgtggaacacaactagaccacggtgtcactgctgttggatatggcacagagaaaggtaaagactattggattgtaaagaactcatggggaagcagctggggagaagcaagctatctcatgatggcaaggaatgtggccaataccgtactggcaaatggggatcgcgatggaagcctcttatccgatcaaaacaggtgaaaatccccccaatcccggaccgtctgcaccatctcctataaaacctccga

SEQ ID NO: 213945 - DNA, 393 bp, Gossypium hirsutum
gggatcttgtcggtgcatgaaggaaatgatgtcacaaaatatttccttagcagtggttttgctcttatccatgccaactctgttgcggatattattgctgtggaagcagtgccagtcgaccgccttgacccagccttggtccagaagggtctggctgactttactcaaaagcttgtctcggctacaactgatctggagaaagctgaagcccaaataggtgttgacgttcacagtgctatgaattcagctatcacaggttaatcattttcttaaccagctttggttcaatcctaagactttttttctcatattgcttcccttttttgtatgtgttcatgatcaacaaatgactgagatatctcaagatgcctaaattgttggttttcagagttt

SEQ ID NO: 213946 - DNA, 402 bp, Gossypium hirsutum
ggtttcttgacattttcagcaggttgaagagaaagtgcgattagctattgaaatggcggcggtgagaggagttgtgctaaagcacctgagaatgaatgcaacatccttgtccctgcttcgtaaccctaaacccatccctaacggccactgtgctctcaccttcaacgccatacggcgccgatattccgacgacgtcatgggctcattccttgacaaatctgaagtcaccgatcgcgttgtctccgtagtaaaaaacttccagaaaattgatccatccaaggttactccaaatgcccattttcaaaaagatctcgggttagatagtttggacacttgggaagttgttatggctcttgaagaagaatttgggtttgagatacctgataatgaggcagacaagat

SEQ ID NO: 213947 - DNA, 394 bp, Gossypium hirsutum
cccacgcgtacgcaaaatatctgctttttcttagttttcctttttgtcccttgtggatttgatatttccccctcatggccgccgctgatgtcgagttccggtgcttcgtcggagggctcgcatgggccaccgacgaccgggccctcgaagaagccttcagtgcgtttggtgaaatcgtcgaatcgaagatcattaatgatcgtgagactggaagatcccgaggctttggattcgttactttccgtgacgagaaagctatgagggacgcgatcgaaggaatgaacggtcaaaatcttgatggaaggaacatcaccgtcaacgaagcccaatcgcgcagaagtggaggcggtggcggaagatttggaagaggaaacggtggttacagccgcggtgg

SEQ ID NO: 213948 - DNA, 391 bp, Gossypium hirsutum
cggacgcgtgggcgcgggttctacaccctgatgtctcggctaatggtcgaaacgacgccgctgccaacgagttcatcaaagtacatgaagcttactctacgctatcggatcctgagaaacgggcggattatgatcgaacgttgttgttcaggccaagacggtccttttctgtttccatcgaatcgatggccggtcaaacgtcttcagggttttctggttattcgaaacgaacatgggaaaccgatcaatgttggtgatactggagattaactgtgaaatccatagatggattttggtttattttcattctttttggcttctgaggaattactgattttgtgctaatttcgcctgtaaatatagaaatatgttaactgaaaaaggctgtttt

SEQ ID NO: 213949 - DNA, 372 bp, Gossypium hirsutum
ctgaatacagtggagcacccaacgaggtggaagtgttgcagtatgccagagtcgtgattgattgtgccactgctgaacctgatggtcgtgaaagagcccttgtaattggtggaggaatagccaactttactgatgtgggtgccacgtttaatggcataattcgagccttgaaggagaaggaatcaaaactcaaagcagccaacatgcacatatatgtgaggagaggaggtcccaattaccacaatgggcttgcaaaaatgcgggcactttgagaggaaattggcatcccaattgaggtttatggtcctgaatctacaatgtcgggtatatgccaggaggccatccagtacatcactgcatctgcataatgtg

SEQ ID NO: 213950 - DNA, 295 bp, Gossypium hirsutum
ggctgttttaatggcctttgccgaccatcctgttatatcaccacccatattccgagtcccctttttaaaaaaaaaaaaaaaaaaaaaaaaaaaaaaaaaaaaaaaaaaaaaaaaaaaaaaaaaaaaaaaaaaaaaaaaaaaataaaaaaaaaaaaaaaaaaaaaaaaaaaaaaaaaccaaaaaaaaaaaaaaataaataataaacaaaaattgaaaaaaactgaaaatatggattacattacccaaacttaaaaaaaaagccccaaataaccaccatccaaagaatggaataaaa

SEQ ID NO: 213951 - DNA, 400 bp, Gossypium hirsutum
  unsure (1)..(400): unsure at all n locations
cccacgcgtccgcgagcacagcagctttgagcactgcacttttcaacaatggctggagctgcggtgcctgctacgagctccggtgcaacaatgatcctcaatggtgcattagtcgaaccataaccgtgacagccaccaacttttgtccccctaactatgctttatctagtgacaatggcggttggtgcaatcccccacgagaacactttgatttggccgaaccggcattcttgcagatcgcggaatatcgagctgggatcgtccctgttatgttcagaaaggtgtcatgtgtgaagaaagaggcatcangacaccatgaatggacattcgtacttcaacatggtgttgataaccaacgtgggaggtgcaggggatataacgtcagtgtccatcaagggtt

SEQ ID NO: 213952 - DNA, 398 bp, Gossypium hirsutum
ctaaaactaagtggtagtgccaaagaagctaatgattgctccccgcttagtggagcaacctctggtgaatacgagggaaatgttcataatcttcatgttgatattgtctcttcctgcaatggtgatgtaaaccatatcaatggctccaattctatatcagaagaggaaaatgaggatttacttgctgacttcattgatgaagatagccaactccctagtcgaatatcacaacccaactttccaagaagtcgctcgttgcatttcagtaatgatgagtttacagcacaaactggatcatctgtttgtcttctaaggtcaatggataaatatgcaaggttgatgcagaaacttgaaatagtaaatgttgagtttttcaagggcatatgccagttatttga

SEQ ID NO: 213953 - DNA, 311 bp, Gossypium hirsutum
cggacgcgtgggctgtagggcttcgagctattcagagtttttcaaacatgcttgggcggccacatttacttacgcccatgatagcccttcgctcatgcacgactgttcttccccacgtgagctaaaagttatcttctgtcactagaggaagacgataatgggtttgagtttgttgaataatctgtagtgctatgctagagatatggtgaatgtttgattgttgggattgaagcattaatggtgtttgaagaagttgaagtgtgtaattgcttatttttagacaaaattaatgaaggttgtttttcatcttc

SEQ ID NO: 213954 - DNA, 393 bp, Gossypium hirsutum
gcaactgaaagaggttaacacgaacctgtgcaaagagattaggaaacggatgggcgactgcgtgtatgattagagcattgaaaatcttggtgctatgcaacacgagattgacagctctgacactattattctctattgaaagtataggaagatcttcaaccagatcgatactttcaataataaggtgaggtatgttgaagatatacacaaagatctattacatgaactggaatccttgaaagaagatccatatggattagtgtataatggatgatattatgacaccatgaacgaatgtcaaaatggatgttctcgtatatttgctttacgcctgcagccaaaccatcctagccttcacagtggcggaggctccgatctcaccacctctccctt

SEQ ID NO: 213955 - DNA, 277 bp, Gossypium hirsutum
tcgcggacgcgtggggagaaatttcctaaaaaaaaaaaatgttttctccaaataaacggccagagatggacttgatgaaacttgttattagtgacttcaaaagtggggatgatgaatgatggcgttcagaattttatgttgaattcaacggaccaaaagacagtccttaccatggtggtgtgtggaggataaaggtagagctcccaaatgcttatccttacaaatctccaataattggatttgtgaacaagatttaccacccaaatgttgatgaaat

SEQ ID NO: 213956 - DNA, 249 bp, Gossypium hirsutum
gcaaagcagcggtgggatggagcacgcttgttgcgtttgcatggttaggcataagggtgctgcgtttattccatgcgggcatacattttgtcgtctctgttcaagagaactctgggttcagcgagggaattgcccactttgcaatggctccatcttggaaattcttgatatcttttaatctatatttaaatccgcgttatcgtttgttcttcataacaattttatctattctttttcttcattatcagt

SEQ ID NO: 213957 - DNA, 387 bp, Gossypium hirsutum
  unsure (1)..(387): unsure at all n locations
tacaagggtacatcaagatttcctaaaggtagttcttactttaaaaggttgccaaaatctagtgccattaaggtaatagattttggtagcactacttatgagcgtcaagatcagacttacattgtgtcaacacgacattatcgtgctccagaggttattcttggaatgggatggagttacccttgtgacatatggagtgttggttgcatcttanttgaattatgcacgggtgaggcattgtttcaaacacatgagaatctggagcaccttgccatgatggagcgggtgttgggcccactacatcagcacatgttgaagagagtagatcgacgtgcggagaagtatgttagaaggggtagactggattggccagatggtgctgcatca

SEQ ID NO: 213958 - DNA, 351 bp, Gossypium hirsutum
agacagagagacatcaacattagaccttaatagaaagatgttagattctcgttgcgacagtcaagaagtagagaaaaatgcattatcaaaagatgagaagaagaatgcagcaggccggtactatccgtaaaaacggctacatcgtcatcaaaggccgtccttgcaaggttgtcgaagtttccacttccaagactgggaagcacggacatgctaagtgtcactttgttgggatcgacatcttcactgctaagaagctggaagatatcgttccttcttcccacaattgtgatgtgccgcacgtaaccgtactgttaccaattgatcgacatttctgaggatggatttgtgagc

SEQ ID NO: 213959 - DNA, 264 bp, Gossypium hirsutum
cccacgcgtccgccttaacggagatttcgggcccatcctgctcgcccaaggaaaaggagatcttccggggaggcggcgaataggagccgctcattcaatactgcgtagtgtcgcatttgccaagaagaagattccgctgagaatatcgagaccccttgtgcctacaccgtctgcctcaactattctcataggaaatgcgtgcaacattggtgcaacgtgataggagttatcatttgcgagatatgtcatctgccttatcaacct

SEQ ID NO: 213960 - DNA, 401 bp, Gossypium hirsutum
ctcgtcgcaagaacattggaatctgcgtgctcacgggatctgggaccgtttctaacgtgacgctccgtcaaccttcttcagcaactccgggagctaccataactttccatggcagattcgacatcttgtccctctccgccacgttcctatcccaaacgacgtcgtgtcatgtgcccaacaggttctccatctctttggctggtcctcaaggccagatcgttggtgggttcgtagctggctcgttggtagcagcgggcaacgtgtttatagtggctgctacgttcaacaacccttcgtaccatcggttacccgttgaagaagaagcgagaaacgcggtgtcgtctggtggtgccggtggacagtccccacctttatccggtggcggcggggatagtagtcac

SEQ ID NO: 213961 - DNA, 147 bp, Gossypium hirsutum
gttagaactgataagacctaccctgctggtttcatggatgttgtttccattcctaaaacagaggagggctttcgtcttctttacgacactaaaggacgtttacgtctccatgctatcactggcgatgaaaccaaatttttaactttt

SEQ ID NO: 213962 - DNA, 230 bp, Gossypium hirsutum
cccacgcgtccgtaagaaacttgctcagaggaagcatttcccttctgtcaactggcttatttcatactcgaagtattcgggggcattggaaagtttctatgagaaatttgatccagattttattagcatcaggacaaaagcccgagaggttcttcagagagaagatgatctgaatgaaattgtccagcttgtcggaaaggatgctctagctgaaacagacaaaatcacac

SEQ ID NO: 213963 - DNA, 376 bp, Gossypium hirsutum
cccacgcgtccggatacatttgttagtgctatggccttccctaggtggaagaggcttgtagaaactcaaaaaaatcaaagactatcaaaagatcctatgagaaatttgatccagattttattagcatcatgacaaaagcccgagaggttctttatagataagatgatcttaatgaaattgtccagcttgtctgaaaggatgctctatcttaaacagacaaaattacacttgaaactgccaaacttttaagggaagattatcttgctcagaatgcttttactccatatgataagttatgcccatttctacaagttcgtttggatgatgcgcaacattgttcatttcaatgctttggccaaccagtcagttgagaaag

SEQ ID NO: 213964 - DNA, 292 bp, Gossypium hirsutum
  unsure (1)..(292): unsure at all n locations
gtcgagacttacaagatttacatcttcaaggtattgaaacaggttcatcctgatatcgggatctcgagcaaagcgatggggataatgaacagtttcatcaacgatatctttgagaaattggctcaagaagcatcgagattggctaggtataataagaagccgacgattacatctagggagatccaaaccgccgttcgattggttttgcctggtgaattggctaagcatgccgtttctgaaggaactaaggcggntactaagttcactagttcttagatttatctttcttttt

SEQ ID NO: 213965 - DNA, 225 bp, Gossypium hirsutum
cgcatttgcatatggggatgggggttatttttgctcaagatgcccatcgtgtaagtcaaataccaaaagaggctcttgcttgtggattaacaggaaacaagcagaactgagagactgatttgagctaatttatgtattaagctatttggtgtcaggctttttttctttatttgctggtgtttgttagatggggttggtcttggttaaagaaaaagggtaggctac

SEQ ID NO: 213966 - DNA, 399 bp, Gossypium hirsutum
cggacgcgtgggtttcttttcaattaaacttctgccaagatccagagaactcaccagctggaacacactaacactcctcaaagcttctttaatctgaaactagtttactaccatgaacaatcataacaacctcctgctgccattctgtatcctttccggttctgctgtagtttacagtgatggtaatgccagaatctttgatataactcacaaaatcacttcccagttgcccacttttgactcccagaagggacttggtcacttcatttggcttgtttccagcattaaaaatgggtccatggctaatatttccgagtttaagctgggaacccacactggaactaacgttgatgcccctagccacttttttcaaaagtattatgaggagggctttgatgt

SEQ ID NO: 213967 - DNA, 404 bp, Gossypium hirsutum
tcccaacccttgtcactcaccaggaatcactagagtcgaaggtgaatgagacaaaggcagtggttaagttccagctgaagaaagttttatgcatgggagttgctgttgggaatgttgcaatggaggagaagcagatcttccaaaatgtgcaaatgagcgtcaatttccttgtttccttgttgaagaaaaattggcaaaatgtgaggtgcctctacttgaagagcaccatgggtccttcaaacaggatcttttgagttcatatttttaccttctgttatgtacggactgaaagtagtagtggggatttaatactaaaatcagtttttttcttctcttttacttagaatgtttaagtttatgttatgttctgttgttccctagaaatgttatgaatacgagacatt

SEQ ID NO: 213968 - DNA, 343 bp, Gossypium hirsutum
cccacgcgtccgtgggttcatttctgcagccgagctgcgccatgtcatgacaaaccttggtgaaaagcttacagatgaggaagtcgacgagatgatccgcgaagccgatgttgatggtgatgggcagatcaactacgaggagttcgtcaaagtcatgatggccaagtaaaggacctctccaactataaccaggattaaaaaatggggtttaaaaaaaaggaagaaagtaacagggcagataagtttgctaaaatatctattaatgaataggacatcaatgtttttaagttacaaagcttttgttggatggtttcttttgttcatgttttgcattttttttggg

SEQ ID NO: 213969 - DNA, 430 bp, Gossypium hirsutum
  unsure (1)..(430): unsure at all n locations
caccggnccggaatccgcgcggctcgacagcacgcgtccggtggaattgctgccttgatcaattccagactcccagattggagtgccgcagcgggtaaatttgctctaatgacaaccgcttatgttcatgataacatccataatccactccaagactcttccactgcagcatcttccactccctatgatcatggagctggtcatattaaccctttgaaagctctagacccaggtttgatctatgacatttcagcccaggattacttttttttcctctgcacacataaattgactgcaatgcatctaaaagcttatagcaagcatttcaatatgttttgccattacaacacctctgccactacatgagatttgacattacccagcaatcttaattgtctttctcagatgatacattcattttaacattgat

SEQ ID NO: 213970 - DNA, 287 bp, Gossypium hirsutum
gggagaaatgaaaggttctgccattactggtccaattgggaaggagtgtgctgatctgtggccaagaattgcaagtgcagccaatgccattgtttagggatttgaatttttctagagttttttgttcccttgagtcatggctttttgctggatcaagattttgttatgtgttttttagggtttcttgaaaaatatcgtatggatagttttgatttggattttgatgctgggatgtagttaatggatttcttccatgtttaagcttattatttcgtttttcattgagg

SEQ ID NO: 213971 - DNA, 412 bp, Gossypium hirsutum
gaagaaatgaagcttctggctgaggtggaccaaccaggcagccacattgacaattatgtgacccagctgagcttcgttctttcacgcaaggctgctagtctggtgagtcttcaagctcgccttgcccggttccagcatcgactgaaagagcaggagatactgagtcggaaaagagttcctcgttgatgccagctctttgttctctgctttcattgctgcatcagactctgtccatcgatgcacggagctgcattagggtcttgagaggaaattcagcagtgtgcaaagatcctgatcctatttcccccagcatcaaacgttgcagatcgcgtttccttcaaacgcaatggcaaaaataattcacgtgcagatacttgtgtgatgcttgatttatcaaaatgcgtattgttta

SEQ ID NO: 213972 - DNA, 405 bp, Gossypium hirsutum
ataaactgtaattccacaaagccaacttctttttatacatagaaaaaggagaatatgaaggcgtcatatattgcattgtgtgcagtgatggtgatcctcttggcagaagcagtagaggtgtcaacggcggtgacatgcagcccaacgcagctgagctcctgcgtgagcgccataacatcttcatctccaccatctcaactgtgctgtagcaagatcaaggagcagaagccatgcctttgccaatatcttaagaaccctaaccttaagaaatttattaacactggcaatgccaggaaagttgcttccacctgtgggactcctttccctaagtgctaagctagactctttgctgaaagctttctttctctctattttcactgcagaatggatagagagaaagtacta

SEQ ID NO: 213973 - DNA, 402 bp, Gossypium hirsutum
gaaggagaggaaggcggcggacagctgagacctagcaacactgggagaagacaagagtgggagattgatccgtttaagcttatcatcaaaagtgttatagctcgtggcacttttggaaccgttcatcgtgggatgtatgatggccaagatgttgctgttaaacttcttgactggggagaagagggtcacagatccgaggccgaaatagcttcacttcgagcagcttttactcaagaggttgcggtgtggcataagcttaatcatcctaatgtaacaaagtttataggggcgacaatgggctcatcggacctgaacatacagacggaaaatggtcaaattggcatgccaatttgttgtgttattgtggaatattgtcctgggggtgcactgaaatcctacttg

SEQ ID NO: 213974 - DNA, 321 bp, Gossypium hirsutum
ctgttactcacacttccacatttgcaaagggatggaccgttccaagtttggtgaagtttttgacacctgcatcgggtctccaaggatactgggacccttatcccattgatatggaatttcgaccaccttgtatggtgttatcaaccattgggatatcaaagccgggaaaactcgaaggacaaagtaccaaggaatgcacaacacaccttcaccagcttcatgtatgcataccttcatcgagaaataagacgagattattatatagaatgtcactcgattttgctcccgtgttgaagcacatttcctttatgcattatttat

SEQ ID NO: 213975 - DNA, 409 bp, Gossypium hirsutum
gtttttctttttcctacttcggtacttccttcctcattctatctcgatttctccctctttctccccgaaatgacgaagttcaagaagcttaatcgacccactggtcatcgcatgtccatgctcagaacaatggtttcccagttggtaaagcacgagcgcattgaaactactgttgccaaggcaaaggagattcggcgacttgctgataacatggtacagcttgggaaagagggttcactttgtgcggcaaggcatgctgctgcttttgtccgaggagatgatgtcattcacaagctatttacagaactggcatatcgatacaaagacagggcaggtggatatacaagactgcttcgaactcgcatccgagttggtgatgctgccccaatggcctatatagagttcattg

SEQ ID NO: 213976 - DNA, 394 bp, Gossypium hirsutum
aagaggtgcccccgaggacatagttgagaaaaatgttgaaaggagacaaaagaggatgatagaagaatagggaatctgcagcacgttcacgagcaaggaagcaggcttacactaatgaactggagaacaaagtttcatgtctagaagaggaaaatgagaggctgaggaaacggaaggagctagagaagctgctgccgtccgcacctcctcccgagccaaaatatcagcttcgtagaacatcatcggccccgttctaacaatcccgtagcagttagtgtgaaagttttgcatatacaaaccagcttctggcatctgtttctggtttcaatttaggcataaggttaaagtcaatgcatcttccagaggcagccattgtttcatttgccggtaatgg

SEQ ID NO: 213977 - DNA, 284 bp, Gossypium hirsutum
cacagaacaagaggctcaacaagtttgcatcaactgtggtgtttgtatggggaagtatttctgcaactcctgcaaactttttgatgatgatacatcgaagagacagtatcattgtgacggttgtgggatctgtaggattggagggcaggagaacttcttccattgccacaagtgtggttgctgctattcaattcttctgaaaaaaagccatccctgtgttgaatgagcgatgcaccatgactgtcccattatgcttgagttcttagtcggatcgagacagaatg

SEQ ID NO: 213978 - DNA, 360 bp, Gossypium hirsutum
cacagttcaagaagctcaacaagtttgcatctactgtgttttttgtatggggaagtatgggtgcaagggcggcttactttttgatgatgatacaccgaaaagacagtatcattgagacggttgtgggatctgttggattggagggcaggagaacttcttccattgccacaagtgtggttgctgctattcaattcttttgaaaaaaagccagttcctttgtttaatgagcgatgcaccatgactgtcccatatactatgagttcttgctcgaatcgagacagaatattactgttctgccatgcggacatacaattcacacaaattgtttcatggtaatgtagaaccattttccaatatgcc

SEQ ID NO: 213979 - DNA, 392 bp, Gossypium hirsutum
  unsure (1)..(392): unsure at all n locations
gcgcaaggtcgcaaagacccgaaccaaccgactggcttctccatccagttctgcaacatctcggccgatacggacttattaccttcagttaactccactcctacatacttgggaagaccatggaaactatattcaaggaccattatcatgcaatcctacattagtgatgccataaggccacaagggtggcttgaatggaaccaagattttgccttggatacattatactatgccgagtacatgaataatgggccaggggctagccttagggagcgagttaagtggcctggttaccatgttttaaataactcagctcaagctgttaattntacagtagctcaattcattgaaagagacttgtggttgccgtcaactggtgttaaatacacttc

SEQ ID NO: 213980 - DNA, 63 bp, Gossypium hirsutum
gttagactgattagacctaccctgctggtttcatggatgttgtttccattcctaaaacaaatg

SEQ ID NO: 213981 - DNA, 398 bp, Gossypium hirsutum
gtgctatttctgctcatatgtggcctggaatggttctgaaatctggtgatatgataactgaaccttggcttcctgagaaagaagattcatcagaggaagagcctggttatcagtttgaatatgaagtgttatctgcaggttcagctgaaccaggggatgacattgttgaagaatggatttctgcaagtccggctaacacattcctggatagagggaaatcagttgatgtgggaaattctggttcagattgtgttcaaggaaacataaccagatgcgaaaaggacgagtcacatacctttcccagaggttctgctttaggggagaaaattgacagaatggaacccaatgctgaagaacctggtcgagcttcagcttcagaagtagatgatggcccccat

SEQ ID NO: 213982 - DNA, 333 bp, Gossypium hirsutum
gtaaacttgacatctttagcaacggaaatggggagacttgtttcagaaggatatgttatggcagtcttggctcccaacgacgaacccatggcaaagcttactacggatcagttaagcgagccaggggcgccggagcacattatttattatcatatcatccccgagtaccagacggaggagagtatgtacaatgcggttcggaggttcggtaaagtgaaatatgacacactgcggttgccgcataaggtagtggctcacgaggctgatggttcggtgaaatatgggcatggtgagggttcagcttatttgtttgacccggatatatatacggat

SEQ ID NO: 213983 - DNA, 363 bp, Gossypium hirsutum
cgattcggccaggtatttcagcatctagagtttctgtcaatgttggagaagagcgttgaaggaatagcttcagatcctaaagtgcacactttcgaggaggttgccaaccacaacaaaaccaaagattgttggctaattatttctgggaaggtttatgatgtaactccgttcatggatgatcatcccggaggtgatgaagttttgctgtcagctactggttactaccattgccttgctgctgttttactttttttagctatagttttagttcccggagatattcacagtggctttaaacatggggattgaatggaagagaaatgaattgaaaagctgtgatttttttaaaggaagttgggtttt

SEQ ID NO: 213984 - DNA, 215 bp, Gossypium hirsutum
cccacgcgtccggagaagcccatgtttgaactagtctcagcagcccaaacgaggttgccagatagtgatggtgcaattgatggtcaccttcgtgaagttgggcttacatttcaccttcttaaggatgttccggggcttatttcgaagaatatagaaaagagcctggttgaagcattttcaaccattggggatatccgattggaacttcctttttt

SEQ ID NO: 213985 - DNA, 287 bp, Gossypium hirsutum
gggagaaatgaaaggttctgccattactggtccaattgggaaggagtgtgctgatctgtggccaagaattgcaagtgcagccaatgccattgtttagggatttgaatttttctagagttttttgttcccttgagtcatggctttttgctggatcaagattttgttatgtgttttttagggtttcttgaaaaatatcgtatggatagttttgatttggattttgatgctgggatgtagttaatggatttctcccatgtttaagcttattatttcgtttttcattgagg

SEQ ID NO: 213986 - DNA, 217 bp, Gossypium hirsutum
ggagggaatcctaaggaaattctaaatgaataagatgagaaactaacaaatctgaagctggaatggggtgaagagatttataatgcactggtaacagctttgaaagaactgaacgagtataatcccagtgggagatatgtaatttctgagctctggaacttcaaggaaaacatgaaagccacacttaaggaagtctttgggtatgttgttaggaaca

SEQ ID NO: 213987 - DNA, 217 bp, Gossypium hirsutum
cacataacaagatgctcaacaagtttgcatctactgttgtgtttgtatggggaagtatttgtgcaagggctgctaactttttgatgatgatacatcgaagagacagtttcattgtgacggttgtgggatctgtaggattggagggcaggataacttcttccattgccacaagtgtggttgctgctattaaattcttttgataaaaagccatccctgt

SEQ ID NO: 213988 - DNA, 355 bp, Gossypium hirsutum
cccacgcgtccgtaagaaacttgctcagaggaagcatttcccttctgtcaactggcttatttcatactcgaagtattcgggggcatcggaaagtttctatgagaaatttgatccagattttattagcatcaggacaaaagcccgagaggttcttcagagagaagatgatctgaatgaaattgtccagcttgtcggaaaggatgctctagctgaaacagacaaaatcacacttgaaactgccaaacttttaagggaagattatcttgctcagaatgcttttactccatatgataagttctgcccattctacaagtccgtctggatgatgcgcaacattgttcatttcaatgctttg

SEQ ID NO: 213989 - DNA, 392 bp, Gossypium hirsutum
agctgacaaactccgaaatcaaatccggaatttgcagaatgcaaacaggcatatgctgggagagtccatagggggattgcctatgaaagagcttaagagcttggagagtcgtttagaaaaaggaattagcagaatccgttccaaaaagaatgagctgttgtttgctgaaattgagtatatgcagaaaagggaaattgacttgcataacaataaccaacttcttcgagccaagatagctgagaacgagaggaagcagcagagcatgaatttgatgcccggaggttcaagtgctaacttcgaggccctacattctcaaccatatgactctcggaactacctccaagtcgatgctttacaacccgccaccaattattataacccttaactgcagc

SEQ ID NO: 213990 - DNA, 397 bp, Gossypium hirsutum
agaatatcgacaaaatctcattggtgaagtgtcctgtgctgataatccatggaactaatgaggacgttgttgactgctctcatgggaagcaactttgggaactgtgccaagaaaaatacgaaccgttatgggtgaaaggaggaaatcactgtgatttggaactgtacccggattatattaggcatctcaagaaattcatctcaacagttgagaagtcaccttctcgaagaaatgcttctcggaaaagtacagatggtatcgaacagtctatgcaaagtactgaatatttcgaggctccgagaagaggtatcgaccgcagggagaaaccaaggaaaagccccgttccccgggacaggccaaggaaaacaccctttccccgggaaaaaccagggaaaac

SEQ ID NO: 213991 - DNA, 395 bp, Gossypium hirsutum
cgcttatagactcaagatcctctgatgttgtgttcaaccctgctaatgcacagactatatggggaatggacaaactggtttcaatgaaagcatctttgcgaactgtgccacaaaaaatacaaaccggtatggatgaaaggaggaaatcactgtgattaggaactgtacccggattatattacgcatatgaagaaattcatctcaacaggttagaaagcaccttctcgaagaaatgctctttggaaaagtacagatggtatccaacagtctaagcaaactacttaatattgctaggctccaagaagaactatctaccgcatgtagaaaccaaggaaacgcaccgatacccggtacaagccaatgaacagcttctttaccctggaaaaaccaaggaa

SEQ ID NO: 213992 - DNA, 395 bp, Gossypium hirsutum; identical to SEQ ID NO: 192897

SEQ ID NO: 213993 - DNA, 378 bp, Gossypium hirsutum
ggacgcttcaccatttgacggtggaagctgtcgacgccggcaaaaagaagctttatgaaggcaaagtttgggttaaaccttggatgaattttaaagaattgcaggagtttaaacatgctggtgatgctgatagttccgcttcttttaccgcttgtgatcttggtgccaagaaagatgtccatggaccaatgctgcaagcggtggccacaaatgatcccgtagttcaggatgctgcggatcatgctgtgaagaccatacaacagagatccaatttctttctggcctacgaacttaaagaaatagtttatgccaacgcttgagtattggaaaattttgcaaaactaaacatggtttttaaagggaaaagagggaacaagg

SEQ ID NO: 213994 - DNA, 369 bp, Gossypium hirsutum
ggaccctttaccatttgacggtggaagctttttacgccggcaaaaagaagctttatgagggcaaagtttgggttaaaccttggatgaattttaaagaattgcaggagtttaaacatgctggtgatgctgatagttccgcttcttttaccgcttgtgatcttggtgccaagaaagatgtccatggaccaatgctgcaagcggtggccacaaatgatcccgtagttcaggatgctgtggatcatgctgtgaagaccatacaacagagatccaattcccttctgtcctacgaacttaaagaaatagttcatgccaacgcctaagtattggaagaattttgcaaaactcaacatggtttttaatgtgaagaaa

SEQ ID NO: 213995 - DNA, 405 bp, Gossypium hirsutum
gtggctataaagaaggttttacaagacaggatatataagaatcgtgaactgcaattgatgcgtgtgttggatcacccgaatgtgatttccttgaagcattgtttcttttccacgacaacgaaaaatgagcttttccttaacttggttatggaatatgtaccagagagcatgtatagggttttgaaacattacagcagtgctaatcaaagaatgccacttatatatgtgaaattatacacatatcagatattcagggggcttgcatacctccatagtgttgttggagtttgccatagggatctgaagcctcaaaatcttttggttgatcctctgactcaccaggctaagatttgtgattttggaagcgcaaaagtgcttgtcaaaggtgaagctaacatttcatac

SEQ ID NO: 213996 - DNA, 214 bp, Gossypium hirsutum
gatctgtttgttgagaggtacagaggaaaagatatatctgtcgttgcaagtatagaagcaaggggattcatttttggcccacctatagcattggctattggggcaaagtttgttcctatgaggaaacccaataaattgccgggggaggttttatcggaagagtattctttggagtatggaaaggacacaatggagatgcatgttgatgctttca

SEQ ID NO: 213997 - DNA, 395 bp, Gossypium hirsutum
cccacgcgtccggttggaaactccgagacacagtgcccaggtcaatgcgcatggccattccaccagcccatctacggaccacataacccacctttggttgcacccaacaatgatatcggtcttgatgggatggtgatcaacctggcaagcctattggctgggacagtgaccaacccgtttggaaatgggtactaccaaggtccaaaagaggcaccactggaggctgcatctgcttgtcccggtatttatggtaaaggatcatacccaggctatgcttgagaccttcctgtggacgccacaactggcgctaactacaacgcacattgtgtgaatgggagaaagtatcttcttccggctttgtttgacccttcaacctcaacttgctctacactggc

SEQ ID NO: 213998 - DNA, 160 bp, Gossypium hirsutum
cccacgcgtccgatcgacgccggtgtcggctcgtaaggacaacgtgtggaggagcgtgttcaatccaagtagcaaccttgccaccaaaggtattggcgctgaagtttttgacaagccttaacctaactctcctactgtttatgactgggtttacagcggg

SEQ ID NO: 213999 - DNA, 396 bp, Gossypium hirsutum
gaagaaagaaagaaaattatatgtgaaagtatggcggggaaagaagagaatcgaatatttgtgggaggtttgtcatgggatgtcactgaacgacagcttgagcatgcgtttagtccatttggcaaaatccttgaatctcagatcatgttggaaagagataccgggcgtccacgtggatttggatttatcacatttgctgatcgccggtccatggatgaagctatcagggagatgcatggacgggagctgggggagcgcaccatttcagtgaataaggctcaacccaagatgggtgaagatcttgatcacggttatagaggaggttactcatcaagtggcaggggtcgctatgcacgtggagacaggcctgtagcacaagatgaatgcttcaaatgt

SEQ ID NO: 214000 - DNA, 309 bp, Gossypium hirsutum
gttagagagagccaaaaaatgggtccaggaacttcaatcgcaaggcaatccgaatatggtaacggcacttgccgggaacaaagctgatttacttgatgcaaggaaggtgacatcagaggaagcaaataagtacgctcaagagaatggtcttttcttcatggaaacttccgcaaagaccgcatccaacgtcaacgatattttccacgaaatagctaaaagattacctcgagcacaaccagcacaaaaccctgccggaatggttcttatggatagacctacagaacggacggcaagctcatcatgttgctt

SEQ ID NO: 214001 - DNA, 382 bp, Gossypium hirsutum
gtcaaagaagggcaagtaatcgttagggctcggaatttacgaggtgctgcaaattttatccctcccaagtcttttcgatctcggagggtttatttcagcaatgaggaaaatggattactgtttgtccccaagggccaggctcaaaatgcgcaagcacaaatgttctctgaccctaacatggctatggacatgatgaagaaaaacctctctatgattatacctcagactctcacttttgcctgggtcaactttttcttctctggatttgttgcagccaaaatacccttcccattaactcagaggttcagatcgatgttgcagaatggaattgaccttagcacagttgatgtgagctatgttagtagccgctcatgggatttcc

SEQ ID NO: 214002 - DNA, 459 bp, Gossypium hirsutum
gaagaatctcatattacaaccattgttgcaggaacttttggttatttggctccagagtatatggcaagtgggagagcaactgagaagactgatgtctatagttttggggttttggctcctgctttcttccttcttctccttcccttcttttcccttttttcttcttcctttcttctcatctttatttcttcttttcttctccctcttctttttctttatcttctttctttctttttccctctttttcttctttcttttctcctcttcctcccttcccttcttcctcctcccctctctttccctccttctctccctccttttcccttcttccccttctttcaactactttactctcttcttctattcatcctccttcttttcctctttttctcctccccctcttacttttctttctatctcttcatctttcctcattttctcttctcttccttttttatt

SEQ ID NO: 214003 - DNA, 227 bp, Gossypium hirsutum
cccacgcgtccgttcatttcttcggcgtacgttgccccagaaaccagagaaagcaaagatatgagtgaaaagagagatatatatggattcggcctgattctgatagaattattaacggggaaaagccctgcggatgctgaatttggagatcagcaccaaagcatggtagagtagggcccgttattgctactcagattgtcatcttgatatgagggttgatcccatga

SEQ ID NO: 214004 - DNA, 336 bp, Gossypium hirsutum
caatgtcataaggagaagaaaatctgagattaaagaaattcgagaatcttgcaaaaccaggggagataaagcatgacatattgtcaagatttattgagctaagtgaagatccagaaggaaacttaactgacaaaagtcttagagatattgtcctgaattttgtgattgctggccgtgacacaacagctacgactctcacatgggccatatacatgataatgaccaatgctcgtgtagctgtaaagctctactcagaacttaaagcttttgaagaagctcaagcaaaggaggagaggttttcatttctaccatgtgactcgtaagtccttgtttcct

SEQ ID NO: 214005 - DNA, 396 bp, Gossypium hirsutum
gttaggccctgaagcctggaaagatagctagtcttgcaaaatctgttcgtgtacttgctgagatggaagagcctattggtcaagtgttaaagagaacagagcttgcagatggactcatcttggaaaaaacgtcttgccctctaggtgtcctgctgattgtatttgagtctcgacctgatgccctagttcagatagcttcactggccattcgaagagggaatggccttctgctgaaaggaggcaaagaagctaagcggtcaaatgcaatcttgcacaaggtcattacttcggccattccaaaaagcattggaaacatactaattggacttgtggcttcaagagaggatattcctgatttacttaaggctaggtgatgggatagatctttggatcccc

SEQ ID NO: 214006 - DNA, 306 bp, Gossypium hirsutum
agaaaatggagataggaaccgtcatgggcgccgggtttgtagcagtttagccgttacccagttgtaggttctcgctttagggaagagaagtctcattttagtctatgtaatcaatgctacagtgagggaaaagttccccctagctttaaacaggatgaatataaattcaaagagtatgggagagtagccgaagcgatgtaagataagtgcatgtactttactttgcaatcccacaaaatttccgtaactagttgggtttataggtcaattttacttcattcatagttcccattttccatttggtgt

SEQ ID NO: 214007 - DNA, 271 bp, Gossypium hirsutum
cccacgcgtccgatcgtaatgatgaggacagtcgctgtagttgcaatagcaccgagaggagccgtgctcggaatagagacagggaacatggacaggatagggtgaaaacaacagttaaccagatgcttttggatgccaaacaactaatagatttgattcctatgaccaaggaggaactattatcatacgagataaactggaatgtgtatgatcagcatgcattgtatgagagaatgagaccctggatctcaaagaaaattatggagttttt

SEQ ID NO: 214008 - DNA, 399 bp, Gossypium hirsutum
agacaacaaattcgagaaccttaacttcaatatgttaaacttggactccaagattggagataatgtaagcaaaagctcattccgaaatggtacctacaatataaatgctgtttaccagaaaaataatagcaatagcctgggaaacctggctggcaacaaatatagcggcaataatcatagcagcaaatatgtcaataataacagcagcaccagcaataacaacagcaacgagaacagtgcaaacaatgctgttgacaaacggttcaagacattgcctccagctgagacactcccgagaaatgaggtgcttggaggatacatttttgtttgtaacaatgatacaatgcaggaagatctaaagcggcagctatttggtttaccaccaagatatagggactc

SEQ ID NO: 214009 - DNA, 186 bp, Gossypium hirsutum
gaaattccgggtacgactgccgcgtccgatctacacaaaatttccagatgagaaatcacttagcgtctcccacagggatgctggtgtgagctatggaaaaacagctgggccagattctcaactattagatgaaaattctcttgattctgattttccggaaatgaaatctttgcgtactatgaagaa

SEQ ID NO: 214010 - DNA, 296 bp, Gossypium hirsutum
ctgaaagtttgctcacaaataggtttgtgttcatttgatggaactcgagatgtaagtatgggaattgaacgtgttgtgaatgagaatgctggaaaagcctctggtaatgtccatgatgcaatgtgttctgtttgtgagatggcagtcatatgggtgcaaagccaacttaaacagaaccagactcaggagcgtatacttgattacgtcaatgagctctgtgaccgtttgcctagtccaatgtgagaattacttgttgattgttacaccctatcttttattcctagtgtctccttcac

SEQ ID NO: 214011 - DNA, 409 bp, Gossypium hirsutum
ggcacaccaatgcaaagttgcacaaaaaacaggtgagaattatgagcacaaaataaaatccccaattttgctgatcattagcaatggcaaccaacaccacccaagagcaacatcctgcagctggtaggcaccaagaagtcggccataagagcctttcgcaaagcgatgctctttaccagtatatatgggagactagtgtatatccaagggagcctgaacccatgaaagagctcagagagttgaccgctaagcatacatggaaccttatgactacatcagctgatgaaggacaattcttgaacatgcttattaagctgatcaatgcgaagaataccatggaaattggagtttatactgcttattctttgttagccaccgccctcgctttacccgatgatggaaagatctt

SEQ ID NO: 214012 - DNA, 385 bp, Gossypium hirsutum
ataaatggaccgttacagatcgctttcaacgttagtgcgcatcgagaaaatacttggggctgtggttagatgactaatgactatcaacacaacccaaaaccagcagcgtacaactggatggctccaggaacgtcgccataagagcctttacgcatagcgatgctctttaccagaatatattggagactagtgtatatccaatgtagcctgaacccatgaaagagcttagatggttgaccgttaagcatacatggaaccttatgactacatcagctgatgaaggtcaattctcgaacatgcttcttaagctgatcaatgcgaataataccatggaaattggagtttatactgcttattctttgttagccaccgccctccctttacc

SEQ ID NO: 214013 - DNA, 198 bp, Gossypium hirsutum
acgtcacgcgtacggaatactcatcagattcttgcatggagaggatcctcgaacgggatgagcggtatgtgttatgcatagaggcaacttgctgcaaatgaaaatgaacgaactggtagttggactttgtaacatgcaaaacttaaagtcaggatggaggtgttacaaacaaaccaatcgctttatatgggagaagat

SEQ ID NO: 214014 - DNA, 265 bp, Gossypium hirsutum
cccacgcgtccgcccacgcgtccgcccacgcgtccggtacttttcaacgaaacccaagccggaaatgaagccaatcgagttgaaaacgtcgctagagcaaacgcagaccataagcagagtcacctttgacattctcaaggagcatgggcccctcaccgtcggtgatacttgggaacgagtcaaggtcagttgtttagtagactataatctgtattcattgcgtatctatatttgttgtttccacatctaattaagccaagcccat

SEQ ID NO: 214015 - DNA, 410 bp, Gossypium hirsutum
acgcccacgcgtacgcccacgcgtacgaccacgcgtacgagtgagtttgtggatattttgatgcattacaatattccaatggctttggtttcgactcgaccaagaaaaactctagaggctgcaatgagaacaatcggcatcgaagagtgcttcagtgccattgtggcagcagaggacgtatgtcgaggaaaacccgatccagaaatgtttctatacgctgcacaacttctagaattcattgcagagcggtgcattgtattcggaaactttaaccagaccgttgaggcagctcatgaggcacggatgaagtgcgttgctgttgctaacaagcatcttgtctatgagctcaaggctccagacttggtggtaagacggttagacgagctttttattgtcgatttaaagaacct

SEQ ID NO: 214016 - DNA, 407 bp, Gossypium hirsutum
gtcaattactcttcagtctcagccgatcttaaaccatgggccgagttcgcacaaagacggtgaagaaatcgtcccgtcaggtaatcgagcggtactattctcgaatgaccctcgattttcacaccaacaaaaagattatcgaagaagtagctataatcccatccaagaggctacgtaacaagattgccggcttctcgacccatcttatgaaacgtatccagaaaggaccagttcgcgggatttctcttaagcttcaagatgaagagcgcgagcgtcgcatggattttgtcctcgatgaatcggcacatcaaggtcgaccaaatcgaaggtgataaggaaacactagatatgctttcggttcttggcatgggtgatattcccggccttgataaggttgatccggttgc

SEQ ID NO: 214017 - DNA, 401 bp, Gossypium hirsutum
  unsure (1)..(401): unsure at all n locations
cccacgcgtncgnccacgcgtncgnccacgcgtncgctcttagaatgagaacatccccaggcccttattctgacctatcaatatcaatggctgaattggggctcaagaaagaagtaagagagatgctacccgtcattatatacaaggagaccttctctatacgagatactcaatgcgccgtatgccttggggaataccaagcggaggataaacttcaacagatacctgcatgtggtcatacatttcacatggactgcattgaccattggcttgccaaccacaccacttgtccactctgccgtctttctgtcctcacttctgataaattgcctgttattcaagctgcaaatcctcaggtgtcatctaatccagtcaatagtaatggattagctgttcaaaca

SEQ ID NO: 214018 - DNA, 305 bp, Gossypium hirsutum
ttttcctcactgactcacctaattcattgctcgaatgcgacacgttcgaagaggctaaagttcaaccccaaaacgatccgaggtattgataggaagagttcaatgattagagtaaagacagagaggctgccaagttttatatacatggaggccgtgtgtatacgacctgctcaatccgccgtaagcttagttgagttccatgagttggataaacttaaacagatacctgcatgagtgcatacatttcacatggactgcattgaccattggcttgccaaccacaccacttgtccactctgccgtct

SEQ ID NO: 214019 - DNA, 402 bp, Gossypium hirsutum
tggaaaattcggagctgttttcgcatcaattccaggtccaatcattgcagctttatattgtcttttctttggatatgttggttcagggggtctcagcttgcttcaattctgtaacctaaacaacttcaaaataaagtttatattaggtttctctgttttcatgggactatcaataccgcagtacttcaacgagtacacagcaattaacggtttcggtccagttcacaccggcgccagatggttcaatgacatgataaatgtaccgttctcatccgaagcatttgttgcgggttcattggcgatgtttcttgatgtgacgttgcacgggaaagacaatgcgactaagagggaacgtggcatgcacttgtgggagaagttcaaatcatttaaaaaagatgcaag

SEQ ID NO: 214020 - DNA, 386 bp, Gossypium hirsutum
gctagttttattaagactcacatatttagccggaggagacctattgatgggtggaaatacatgatagattagatagggcctaatgcaaggaatggcaagggcagtgttttaaggttaccgagtttgtctgatgcatagaggcaaccagttaaggaggagaagttacaattgaaaccttgattggtggttgagacttgacaccttgagaggtcacataatcaactataccccagttgcagaatctgttcattttgagtagttcttacaataagagcaagcagttatggggaagcaggatgctctggttacaaaaggaggtcctaaaggaaaaagagtagatggcattctatttaagcattggaagggagaggaagagaggataatgt

SEQ ID NO: 214021 - DNA, 241 bp, Gossypium hirsutum
aagaaaaagattgagccaaaagaaaatggtcgatcagcttaccgacgatcagatgtatgcggtcaaggaggcctttagcctgttcgacacggacggagatggttgcattactaccaaggagttgggaactgtgatttgaatactggcggaaaaccccattttgggcatattgaaagtattaagaattgacgtacatgctaatggtaatggtgacattattaacactgaatcacttatactg

SEQ ID NO: 214022 - DNA, 377 bp, Gossypium hirsutum
cgccttactttagagcaccaacagggtacctccacgtttgccggacaacaaaggccattagctttaccatcaacctcaggaggaggaggacacagcagagaagatcaagaggatgcttcgaatcaaggaagctcaaggaagagatttagaacaaagtttacgcaggaacaaaaggagaagatgctgagtttagctgagagactagggtggcggattcagaaacatgatgaagagattgttcaacagttctgcaacgaaactggggtcaaaaggcatgttttgaaagtttggatgcataataacacgcacacttcttgtaagaaaccctagaaacagattatgagggaactttagatgtgtacattttttagggttga

SEQ ID NO: 214023 - DNA, 388 bp, Gossypium hirsutum
aaaaacgaaatcattatatctgcgggagcattgggaagcccacagctgttgatgctgagtggagtaggaccggttgctcatcttagatctcacaatatcccagtggtgttagaccaacccttggttggccaaggcatgtgtgataaccccatgaacgccgtttttgtcccgtctcctattccggttgaggtttcacttatcgaagtcgttggtatcacacattttgggagctacattgaagctgcaagtggtgaaacctttagtgcttctgttactactacttcaagaaactatggcatgttctcacctaagattggtcagctatctacggtgccacctaaacaaaggaccccagaagccattggcagagctgttgaatacttggata

SEQ ID NO: 214024 - DNA, 394 bp, Gossypium hirsutum
gagagagaagatagaaagattgagcgtgagttacgtcgccgtcgtgctcaagctcaggctggatatgataaggcgaagaagcacgagcaatcatacttcagacgaaaacctggaggcatgcctggtgggtttccaggtggaatgcctgggggttttcctggaggtatgcccggaggtatgcctggaggtatgcctggaggcatgccgactggcatgcctgatggcatgccgggtggcatgcctggtggcataccataagggatgcctggaaatgctgaatattagaagatattgcatgatcccgaattgttggcgagacttagtgagccagaaacaatgcgtgttattcaagacgtgatgtgcactcgtgctagacgtgcaaagcattaaacaa

SEQ ID NO: 214025 - DNA, 398 bp, Gossypium hirsutum
gaatggagcgaggcctaatagagctgcaacttctggttattggaaagccactgggaccgaggagccgattgtaactcaaatggaaatcaaaaggttggggttaaaaaggctctagtgttctatagaggtaagccttccaaagggattaaaacgaattgtatcatgcatgaatatcgcctcatcgacaacaattccacttacaaacctcaaattgttgatcttgccaacaggaaagcttctttacggcttgatgattgtgtcttatgccggatttacaagaagaacaatacccagagacctatggagacagacaaagagtacaccatggagggcatgctggcaacacaactgccaacttctagccatcaaaatctaaacgcttttacattaaaagctac

SEQ ID NO: 214026 - DNA, 414 bp, Gossypium hirsutum
  unsure (1)..(414): unsure at all n locations
cttgttcggaaccaatggctttgatagatcccaaggtaatggcttttgatagatcccaagatagagtttcttatgtccgaagtaaacgaagagaaaacatctggagactttagagaaatggactaaggttggcgcatgaagtcatttcttttgttaaaaagaaaatggataaagcttctagatctggagacttgagagatatcaaacttagttttatcgggcattctatcggaaactttataataagaacagcattagcagagagtgctatggaaccttacctgagattcctccatacatttgtgtctctatctggtccacatttgggatatctatacagttcanattctttattcaattctggactgtggcttttggagaagctcanggngacacaatgcattcatcagctca

SEQ ID NO: 214027 - DNA, 367 bp, Gossypium hirsutum
cccacgcgtccgcccacgcgtccgctttttgttcaactaggcctatgcgcatagggccggctactaacaagaagactggtgctgcacagcaatatccagcagcttcatctcaagggactcagaacgagaatgatccaaataatacaactatatttgttggtaatttggattctaacgtgactgaagaccatttgagagaggtcttcagcccatatggtcagttggtgcatgtgaagattccacaaaacaagcgttgtggatttgttcaatttgctgataggagttgtgccgaagaatctctccgaatattgaacgggactcaggtgggtggacaaagtattcggctttcatggggtcgtagcacatc

SEQ ID NO: 214028 - DNA, 179 bp, Gossypium hirsutum
catttttctcacttatttattctttcatttatttatttggaaaaactcacacaagtttaggaagaagaagaagatgtcgtggcaaacgtatgttgatgatcacctggtgggtgatatcgaaggcaaccattttttttgcggttgtattattggcccaaaacggaggggttgggcttaaa

SEQ ID NO: 214029 - DNA, 412 bp, Gossypium hirsutum
cccacgcgtccgattgtttagaagcaatgacatggttcaagacggtcagttgatgtatggcaatctgtttgaagcgagcttagatgcagtggttcatgcaatggagaaagaagggtttgcagaagttgaagtggtcgtgtcggagacagggtggccaaagggcggaggggaggcagccagcgtggagaatgcattggcttacaacgagaatgtggttaggagagtagtgggaaatgtagggacaccaaggaggcctggggtgggaattgagatttacttgtttgatatgtttgatgagaatagaaaaggaggagatgagtgtgagaggcattttgggatatttggacttgatggtgtcaaggcctatgatcttagatttaattcagaaaataagttggatgtaaccataaat

SEQ ID NO: 214030 - DNA, 414 bp, Gossypium hirsutum
gacaggtttcacatctcaggtttatgagttatctcctgtctttttgcataaggaatggataatggaacaatgggagaagaattactacattacttcagttgctggtgcttgcaatggcagtgcactggttgtaatgtcaaagggtacaccctacacgcaacagtcctacaaagttagtgacgtatttcctttcaaatggattaataagaagtggaaagaaggcttctctgtgacctcaatgaccgctgcaggcagcaaatggggcattgtcatgtcccgtaatgcaggctatcctactcaggttggtgaactcgatttcctttatccaagtgaggggattcatagaagatgggaaaaaggatatcggattaccgcagcagctgctacagaggatcaagctgcattcatacttag

SEQ ID NO: 214031 - DNA, 294 bp, Gossypium hirsutum
acgagcccctcttgataaagtttgtaccatttgatgtgggatatctaccgcatgtttggccagtggaaatggatctcaagccaaacaggtgaagactgtcaccgcttttgtactgatgaccgcagccatctctgtcgctgtggtttcatgggccaatacggcagcttgtgtcctcagtgctgcagtgtgcctcagatgaagcacggagagctcgatggcatcgtgaacgacttttgtgaacccgaaacacttggctcaaccggattgaaccttgatgtgtctatatacatggtg

SEQ ID NO: 214032 - DNA, 430 bp, Gossypium hirsutum
cccacgcgttcgcccacgcgtccgatcccctacttccactgcttagtctgctgaaggtgaatggaaaattgctcactgagggattgcctaataagccactcgaattgcctgtttttcctttagtcatgggtaaacttccctctttataggccttaaattccaccaaaacatttacaaaataaagttatatatataattcccatatcagaactttgcattggtaatgaaggtaatcacctattggctgctgtgaacttggcttgattattttggcttacaggacggaagcttattggaggaagtgatgttggagggatgaaagaaactcaggagatgctagacttctgtgctaagcacaatatcactgcagatatcgagctgattcggatagaggaaatcaatacggccatggaaaggcttgctaaatctg

SEQ ID NO: 214033 - DNA, 293 bp, Gossypium hirsutum
  unsure (1)..(293): unsure at all n locations
cccacgcgtccgggagggtccgntaatggaagcaactgtgctgagcttgcaaagcaggaagatatcgacgggtttctcgtaggtgnnnttttcttgaaggggccggaatttgctacaggaggcaaccccnnnncatccaaaanngnngccggccaaaatatatatgaggcggatggaaggaaggaattaagggcccaaataaagaagctatttgagggtggagctcatgtgacatatttagtgttatatacccccatggaggtttttgattacttattgaggtccattttccc

SEQ ID NO: 214034 - DNA, 415 bp, Gossypium hirsutum
cccacgcgtccgcccacgcgtccgcccacgcgtccgccctgacaaagcaaccccaaagactattatgagaacaatgggagtaaaaggccttaccctctatcacttaaaatcacaccttcagaaataccggctggggaaacaatcttgcaaggaatcaactgataattctaaggatgcttcttgtgttgcagagagtctggacactggttcgtctacaacatcatcatcgaaactggtagcgcaagatttgaatgatggctaccaggttactgaagctcttagagtacagatggaagtgcaacgaagactacatgaacaattagaggtacagcgtcatcttcaacttcggattgaagcacaaagcaaatacctacagacgatactcgagaaagccttgtaagctttgagcgatcat

SEQ ID NO: 214035 - DNA, 424 bp, Gossypium hirsutum
  unsure (1)..(424): unsure at all n locations
attcttactattcttaatggactttacattgttttaagcccttcctgtaaagagacttggactggtttgtctactaaagctcttaaagggatttggccttatttcaagattactgctgcttctgctgttatgctttgcttggagatatggtataaccaaggactggtgcttatatctggtcttcttcctaatgcagcaattgcactagactccatttctatttgcatgaactactggaactgggatatcaactttgttttaggctttagtgcaacagccagcgtgcgagtgcgtaatgagctaggggcagggcatcccaagctgaccaaattttcagtcatagtagtgaatgctaccagcattttcattagtacaggtttcactgccatngttatcatatgtcgatccctatttatcaaagctt

SEQ ID NO: 214036 - DNA, 319 bp, Gossypium hirsutum
atgggttccattgacacgccgacaattacagagaacggatcgacccagtctcaagccgccgatccttccggcggcgaccacaagcctacggcctcagctaacggagcgcaagtggcggtgtcggcggagcctgaatgaactaaaaagaggcggtcgagtatgctaccgctggaggggggtacttgagggatgcgccgctgaagggacgacagatatgatcctggcaaagttatcgaacgccgaaagatgccctacgctgtgccctatgatcacgaatactacgctgattacaccaaatttaatatgaggcttggggaat

SEQ ID NO: 214037 - DNA, 290 bp, Gossypium hirsutum
caaaaaacagcgtaggctacaatccaagttcaagattcgaagatgtcgggaagaggaaagggaggcaagggactgggcaagggaggagcaaagcgccatcgtaaggttctccgtgataatatccagggtatcacaaaaccggcaattcggcgtttggctcgtagaggaggcgtcaaacgtatcagcggtttaatctacgaggaaacccgtggggttttgaagatcttcttggagaacgtgattcgtgatgcagtaacctacaccgaacatgcgaggaggaagactgtgac

SEQ ID NO: 214038 - DNA, 392 bp, Gossypium hirsutum
  unsure (1)..(392): unsure at all n locations
aacaaacaatatggttattctttagggaccttatcaaaggaatatgtcttgctattgtacttggtccaccaattgtttctgctattattgtcatagtacagaatggaggtccatatctggctatctatctttgggcatttatgtttgtcctttctcttgtaatgatgacaatttaccctgttctgatagctccactttttaataagttcacccctcttcctgaaggagagctcagacttaagattgagaaacttgcttcctccctcaaatttcctttgaagaaactatttgttggtgatggatccacangatcaagtcatagcaatgcctatatgtatggtttctttaagaacaagcgtattgtcctttatgacacattgattcagcagtgc

SEQ ID NO: 214039 - DNA, 387 bp, Gossypium hirsutum
cgaatggtcaacgaatccgatctacctcaccttaactacctacgctgcgtaatacgtgaaacattccgcatgcacccggccggaccgtttttaatcccacacgagtcccttcgggccacgaccatcaacggcttttacatcccggctaagacacgtgtcttcatcaacacccatgggttgggccgaaacactaaattatgggacgatgttgaatcgttcaggcccgagaggcattggctggctgatggcgctcgagtcgagatcagccacggagctgatttcaaaatcctgcctttcagcgccgggaaaaggaaatgtcccggcgcgccacttggagtgacactggtgctcatggctttggctcggctctttcattgctttgattgg

SEQ ID NO: 214040 - DNA, 406 bp, Gossypium hirsutum
gaaaaagaacgcagtcttttgatctctgccccaaagcaaaaagttgtcatcttttacaatcacaactactggttatttattttcatggctcaaggagattctaacttccagcaagacatggctaaagaggaagaagaacagaggctgaaatacttggagttcgtgcaagtagccgccgttcacgccgctttgtgcttcaccaacctttacctttacgctaaggaaagatcggggccgttgaaacctagcgtcgagaccgttgagggaacgggtaagagtgtggttggaccggtttatgataaataccatgatgtccctgttgaattccttaaattcgttgattccaaggtgggtgaatcagtgaccaagcttgatcgtcgagtcccttcagtcatcaaacaagtct

SEQ ID NO: 214041 - DNA, 400 bp, Gossypium hirsutum
cccacgcgtacggccacgcgtccggccactcgttctatacttcctacattatatgaaaactctgattccccaaaattaggtttatctcaacccctaaaagatgccggccaccgcagggagggttctaatgcccgcgaacaaccgggtgcatagtagcgccgccttgcaaacccacgggatttggcaaagtgcaatcgggtatgacccttatgctcctaataaagatgattcaaaaaattcatcgagtcagatgactgccgctgctgaacccgatggtgaaaacgcatacgctagctttcaagggctcctagcccttgcccggatcacgggttcgaatgcagatgaggctcgtggagcttgtaagaagtgtgggcgtgttggtcaccttacttttcagtgc

SEQ ID NO: 214042 - DNA, 407 bp, Gossypium hirsutum
  unsure (1)..(407): unsure at all n locations
tcgtccatctcgtgcgaccacgcgtccgatcccctacttacactgcttagtctgctgacggtgaatggaaaattggtcactgtgggattgcctaataagccactcgaattgcctgtttttcctttagtcatgggtaaacttccctctttataggccttaaattccaccaaaacatttacaaaataaagttatatatataattcccatatcagaactttgcattggtaatgaaggtaatcacctattggctgctgtgaacttggcttgattattttggcttacaggacggaagcttattggaggaagtgatgttggagggatgaaagaaactcaggagatgctagacttctgtgctaagcacaatatcactgcagatatcgagctgattcngatagaggaaatcaata

SEQ ID NO: 214043 - DNA, 365 bp, Gossypium hirsutum
gcctgcgctactcgtacgaccacgcgttcgaaatcctgaacatttgcagtcaaaaacgttggatccatgtgaaaaaggatcaagttctgaagatcaaaccactaaatcgccagaatggatttcaccaaaaggatgtccaaatcaaagcattgaaaccaagaaagtttgtgctgattgtggtacctctaaaacccctatttgcagaggtggcccatctggtcccaagtctctatgtaatgcatgtgggatcagaagcaggaaaaagagaagagcaattctgggattaaacaaaggagaagacaagaaatcaaagaaagggaatatcaatggaaacagctacaacagaaaaagtagttcaagcaaca

SEQ ID NO: 214044 - DNA, 393 bp, Gossypium hirsutum
ctctcttgtttctctcatttcatttgtttaagaatgtctttcatggcggctgcaaaggtttttgcgtgtccttttgtctttgttgccctcttcagcatggttgcttctgatcctgatcttctccaagatctctgcgtagctaataaagctgctgggataaaggttaatggatttccatgcaaggacgaatccaatgttaccgaagctgattttttctttagcggattagccaatccaggagtcatcaacaactctgctgtatcagcggcaacacgagccactgtcgagaaactcccaaggctcatacaccctcggcgtctcgcttgctcggatcgactatgcaccatgtggtcttaaccctcctcacactcacccacgagccaccgcgatcat

SEQ ID NO: 214045 - DNA, 317 bp, Gossypium hirsutum
atcacctggtacacttacaggttctgtttgtgccaacgatgttgatttgatcgctcaggttgccggtgcggactggaatggggagagtgtggtttatgctcatagatcaggagagctggtacggttacctaaaggtgcttcagtgccgtaaacacttaaggttctcgagtatgaactattacacttgtgtcccgacaaggaaattttccacaccatttcatttgcaccaataggccttcttgacatgttaaacaacagcggcgccagtgagatagttgaagtacaaacgacatccgatgagaaactgcagctctttg

SEQ ID NO: 214046 - DNA, 443 bp, Gossypium hirsutum
  unsure (1)..(443): unsure at all n locations
ggcctcccagaggttgcaaactactggaaacaagtcattaagattaatgactaccagaaaactcggtttgtgaaccggattgtttcctcaatgtttaacacagtttcagggaagaagattgccattctcggatttgctttcaagaaagataccggtgacactcgggagaccccagggatcgatgtatgcaaagggctgttgggcgacaaggctcttctgagcatatatgaccctcaagtcaatgaggagcagattcagagggatcttgcaatgaaaaagttcgattgggaccatccggttcatcttcagccgatgagccctacttcgatcaagcaagttaatgttgtctgggatgcctatgcagcaacgaaggatgctcatggngtttgcattctgacagagtgggatgagttcaaaaccctcgattaccagaagatttacga

SEQ ID NO: 214047 - DNA, 392 bp, Gossypium hirsutum
acggttcctagtacattaaagatggagaaggaatgcaatccattcctccggacatcaaatgcagaaatccggaaagcattaaaaattccggtgacagcgaatgaggcagaagccttgggtatcatacgcagagcaaaggataatttctaggattacttacatacatagatacatatatgatacttcattcctgtttgtgtatagctgaagtcatggttgctattccatttctgaaatgatcaaacagcaccaatgtttactacttccatgtccatatgcttcattttttccccttaatttttccaagttttttgaaaattaaatctgttaatcaaatctctacttttttgctttttggtaaaaaaaaaataaaaccccttttttattaccaa

SEQ ID NO: 214048 - DNA, 411 bp, Gossypium hirsutum
  unsure (1)..(411): unsure at all n locations
cccacgcgtccgctgaacccaaggaggacatgcagcagcagccacagccacagccacagcctgttaaggaagaagagatggagaatgaagatgaagcaggtgcagagaagaagagtgtgatcatccctcttcctcaaaaagttgcagcagcagaaacaccaccatcagttacagagaaaagtccaaacaacagagattccgtgcttgctcgagttgagacagaaaaaagactagctttagttaaagcatgggaggaaaatgagaaggcaaaaatagacaacaaggcatataagaagatatctgctattggatcatgggagaataccaagaaatctgctgtagaagcacagctaaagagcattgnaggaaaactggaaaagaagaaggaagaatatgcagagagaatgaaaa

SEQ ID NO: 214049 - DNA, 448 bp, Gossypium hirsutum
ccactttggaagtcgatgctgtgattggagctgatggcgctaactctcgtgttgctaaagccattaatgctggcgattatgattacgccattgcatttcaggagagaatcaaaatccctgatgacaaaatggtttactacgagaatcttgctgaaatgtacgtaggagatgatgtttcaccggatttctatggttgggtttttcccaaatgcgatcatgttgcagttggaaccgggacagtgactcacaagaatgatatcaagaagttccagctagccactagaaacagagcaaaggacaagatccttggaggtaaaattatacgagttgaggcacacccaatccccgagcatccccgtccacgcaggttatccgggagggtagccttagttggggatgcagctggatatgtgacgaaatgctcaggtgaaggtatctactttgcagc

SEQ ID NO: 214050 - DNA, 380 bp, Gossypium hirsutum
gttttccttctaagccaaacgaaatctaatcatttttgaaaaatggcaccaaaagctgaaaaaaagccagccgagaagaagcctgcggaggagaagaaagccgtagctgagaaagccccggcagagaagaagcctaaggctgggaaaaagcttcccaaggaaggcggagcggctgccggagacaagaagaagaagagagttaagaagagcgtcgagacctacaagatctacatcttcaaggtcctgaagcaagttcaccctgacatcgggatctctagcaaagctatggggatcatgaacagtttcatcaatgatatcttcgagaagcttgctcaagaagcctctaggctcgcgaggtacaacaggaaacccaccatcac

SEQ ID NO: 214051 - DNA, 324 bp, Gossypium hirsutum
  unsure (1)..(324): unsure at all n locations
ggaaggaanggccggggcgacccacgcgttcaaaatttatgaaaaccctaattctacctttgttctttatcaaagagcaagtctaacaatgagggccaagtctgacccagcacaagctcgtcgctcacctttgatcgaaagaaaatgcagaagccggtgctatatagccgcggaatgggatctatgcttcaaatattgcggcatatgttgcgatgagtgtaaatgtgttccttccaatacttttgggaacaaacactatgttccttgctacagagacaaggtgaattactagggcaaacccaaatgcccttgaaaatgaaatat

SEQ ID NO: 214052 - DNA, 357 bp, Gossypium hirsutum
ggcgacgtgggcggttcgctgcccgcgacgtcgcgagaagtccactgaaccttatcatttagaggaaggtgaagaatattgatgtgcttatgcaaaatcatctattttgaagatcggttcaccgtgtgagggtatgcccaccctcttttcctatatccttcctatcgttctttatttgtgaggtttgcgaaattatgcatgtaataggcctaggatcttttcatgctattaatggaataaatttagagttgtgtttgcatgtcatttttgttagaaatgcttgtcttttacttttgaaagatgcttcataagaacatgaatagcctaataagctatcctatttttcatgtttaaaaa

SEQ ID NO: 214053 - DNA, 380 bp, Gossypium hirsutum
ggaaaaaaaaatgaagctcttgtttctaactttgctgctttgttctcttcttctatgttcttcagtttttgaaccaacaatggctcagcctcgttcacctttttgtgaagggaaatgcaaagggaggtgcaataaagcggcggtttgggatcgatgcttcaaatattgcggcatatgttgcgaggagtgtaaatgtgttccttccggtacttttgggaacaaacacgagtgtccttgctacagagacaaggtgaataacaagggcaaacccaaatgcccttgaaaatgaaatatattcgagttcgggatttcatcaagcttaaagatcgaggacgaagaggctatatatatatatgcatgctgatggggtaataataaaa

SEQ ID NO: 214054 - DNA, 448 bp, Gossypium hirsutum
gtcagaaatgatcagccccggtttgagacttgctaccagattgccttggccatcaaggacgaagtggaggatcttgagaaggccggtatcaatgttatccaaattgacgaggctgctttgagagaggggttgcctcttagaaagtcggagcacgccttctacttgaaatgggctgtccactccttcagaatcaccaactgtggtgtacaggacactacccagatccacactcatatgtgctactccaacttcaatgacatcatccactcaattatcgacatggatgctgatgtgataaccatcgagaactcacgttcagatgaaaagctcctttctgtattccgtgaaggagtgaagtatggtgctggaatcggccctggtgtctatgacatccactctcccagaataccatcaaccgaagagattgctgaccgaattaacaagatgc

SEQ ID NO: 214055 - DNA, 413 bp, Gossypium hirsutum
cccacgcgtccgcaagaaatcatggtaagtctcaaatcacttgtatctctcagttcccgatgcgctgccgtagcactacttgttttggtggtttcagtggcagtgcagacccatactacaaatgcacaaagctgcccgaccgagctgacgagcctgaacgtgtgcgcacctttcgtggtgcccggtgcagctgtggctaaccctagcattgactgctgtaacgcactccaatcggtgcaccatgattgcctttgcagcactctaaggatcgcttctcgactcccttctcaatgcattctcccaccacttcacttgtgcttgaaagaaaagcagtggtgctgcatgcttaattgtgtaggaaaatctaaatacgccatggaatatggataccgccctgtttttttctttctttt

SEQ ID NO: 214056 - DNA, 403 bp, Gossypium hirsutum
gaagcacttgagaggggagacgttcgagtttcagatgagtaatgcgcggacatgggtgagtgcggcgctgacgaatgaggacacgtgtcttgatgggttcgaaggagttgacggcaaggttaaatctaatgtgaagaggaagatcacgaatgtggctaaagttaccagtaatgctctgtacatgatcaataggctcaatgaaagtcgtggtaggcaccgttgaatctttgatgatgatgatgatgaataatggatggttgtgatttatctagcttattatggttcttaaatatagtttttattttgattttggttgcaagctgtatatgtaatgttttctatttatatattaagcataaggtgatatgcgtttttttcttgtaaaacaaaaaaatataaatat

SEQ ID NO: 214057 - DNA, 299 bp, Gossypium hirsutum
ggccgacgccacgcgtccagggcacttctctcgaactggtctaagatctatatctcatataagaatgtctcgtctttaggaggagttatttatggatctacaaataccacactaaacgatatgttatgtgaaagataatttgccgcttcaaactttaaaaggccattcaaattaaaaaaattttttatgcctcactgtatacagtgaatattatttatgctgctactaaacaaatgaagtgaacttgtaccacatggaaatatcgaaacctttcacatggcatatatttttttcacaag

SEQ ID NO: 214058 - DNA, 397 bp, Gossypium hirsutum
ggccggccgacgcgtgcgtgaaaaaaaaatgaagctctcgattctaactttgttgttgtgctcacttattttatgtactggggcggtgtgaaccaacaatggctcaccctccttcacctttttgataagggaaatgcaaaaggagttgcaataaacacggcagtttggtatcgatgcttcaaatattgcggcatatgttgcgaggagtgtaaatgtgttccttccggtacttttgggaacaaacacgagtgtccttgctacagagacaaggtgaataacaagggcaaacccaaatgcccctgaaaatgaaatatattctagttcgggatttcattaagcttaaagattcgtggccaaaaaggctatatttatatattcatgcttgaggggttaatat

SEQ ID NO: 214059 - DNA, 428 bp, Gossypium hirsutum
cccacgcgtccgcggacgcgtgggcaagaaagcagtctcatatgtgaaattcttgtctgaaaatgaacttgcttctgcatctacagatagcacactaaggttatgggatgtgaaggagaatttgccgcttcgaacttttaaaggccattcaaatgagaagaatttcgtaggcctcactgtaaacagtgaatatattgcatgcggcagcgaaacaaatgaagtgtacgtgtaccacaaggaaatatcgaaaccggtaacatggcatagatttggttcacaagagatggaggatgcagatgaagatgggggtggatcgcacttcataagtgcggtgtgttggaagagcgatagccctaccatgctaactgctaacagtcagggaaccataaaagtgctagtccttgcggcttgacaaaatcgaagttcaa

SEQ ID NO: 214060 - DNA, 383 bp, Gossypium hirsutum
ggcacctgcccctggctaaggcctgatggtaaaacccaggttactgttgagtactacaatgacaggggtgccatggttcccgttcgtgttcacactgtcctcatttccacccaacatgacgaaactgttacaaatgatgaaattgctgctgacctcaaagagcatgttatcaagcctgtcatccctgaaaagtacctagatgagaaaacaatcttccaccttaacccatctggccgctttgtcattggtggtcctcacggtgatgcaggtctcactggtcgtaagatcattattgacacctatggtggttggggagcccatggtggtggtgcttttttttgaatggaccctccatgtttgtacagtagtttcgttttcatttc

SEQ ID NO: 214061 - DNA, 425 bp, Gossypium hirsutum
gcccgtaccaagcagacagcccgtaagtcgactggtgggaaggctccaaggaagcaacttgctaccaaggctgcccgtaaatctgccccaaccaccggtggtgtgaagaagcctcatcgctaccgtcctggaactgttgctcttcgtgaaattcgaaagtaccaaaagagtactgagcttcttatcaggaaattgcctttccagaggcttgttcgtgaaattgcccaggacttcaagactgatttgcgtttccagagccatgctgttctagctctccaggaagctgcagaggcataccttgtgggtctttttgaagacaccaacctttgtgcgatccacgccaagcgtgtcacaattatgcccaaggacatccaagtggctcgtatgatcagaggagagcgtgcttaattccatgtgtgtggatc

SEQ ID NO: 214062 - DNA, 416 bp, Gossypium hirsutum
  unsure (1)..(416): unsure at all n locations
cccacgcgtccgcccacgcgtccggaggaggcaatgtgaagtggagggcattgagattgggtgacaggcaactattcatggggtagcgaagctgtcacccgcaagacccgtattcttgatgtggtatataatgcctcaaacaatgagcttgtcaggacacagaccctcgtaaagagtgctattgttcaagtggatgctgctccctttaagcaatggtaccttcaacactatggtgttgatattgggaggaagaagaagacagcagctaagaaggaagctactgaggacggagaagttgctgccgaggaaactaagaagagtaaccatgtgctaaggaagcttgagaagcgccagaaggaacgtacacttgatgctcacatngaagaacaatttggctctggtagattgttgcatgc

SEQ ID NO: 214063 - DNA, 399 bp, Gossypium hirsutum
gaagaggatggtgagtgggaagcccccaaaattgataacccgaagtgtgagacagcccctggttgtggtgaatggaagaggccaatgaagatgaatccagcttacaagggaaaatggtctgctccactaattgataaccccaattacaagggtatttggaagcctcaagagattccaaaccccgactactttgagcttgataagcctgactttgagcctattgctgctgttggtattgagatttggacaatgcaagatggcatattgtttgacaatattttgattgccaaaaatgacaaggttgctgagtcatacagggagaccacatggaagcctaagtttgaggttgagaaagaaaaacagcaggctgtggatgagtccactgattcagatggattt

SEQ ID NO: 214064 - DNA, 326 bp, Gossypium hirsutum
  unsure (1)..(326): unsure at all n locations
catttttctcacttatttattctttcatttatttatttgtaaaaactcacacaagtttaggaggaggaagaagatgtcgtggcaaacgtatgttgatgatcacctgttgtgtgatatctaaggcaaccatctctctgccgctgctatcatcggccaagacggcagcgtttgggctcagagctccaattttcctcagtttaagcttgaagaaatcaanggcatcatgaatgacttttctgaacccggatcacttgccccaaccggattgtaccttggcgtcactaaatacatggtgattcaaggtgaaccaggagctgttattccag

SEQ ID NO: 214065 - DNA, 386 bp, Gossypium hirsutum
cccacgcgtccgcccacgcgtccgctcttcaagacatccccagctgtacccagtgtgaatgcgactcctcttcgcttcttcaaacggccattccctcccccctctcctgcaaagcatatcaagtcattgctggcaagaaggcatggctcaattaagcctaacgaggcctcaatccctgaaggaagtgagtgtgaggttggtttgaataagagttttgggttttcgaagcattttacgcttcattatgagcttggtgaggaagtggggcgtggacattttggatatacttgctcccctaaggccaagaaaggaagcctcaaaggcaatgacccccctgccaaagttatttcttagtccaagatgaccacctgaattgccctatagga

SEQ ID NO: 214066 - DNA, 407 bp, Gossypium hirsutum
aacaggctttggtggctgtcgacaagggcactcccatcaaccaagatcttctcagcaacttcttgtcagacccagtgcatggtgccatcgaagtctgtgctcaattgaggccgacggttgacatttcagtgacccccgatgctgattttgtgcgaccggagttgcgtcaatctggcaattgagtcggtagaatctcagaactggaatgagcaactatatttatagtgtgtttgagccagaacttgctcgtcatgtatgtagtgatgtagtttttgcaatgtcttggggctggctgtctttttatgtttcatttttaaatgttttatataattgaaggaccaaaaccatcagctgttttgagataatgagacttaataatgcatatctagcttggttttgggtagttg

SEQ ID NO: 214067 - DNA, 425 bp, Gossypium hirsutum
cattcatcaaagtccaaagtcccgaaatatctgtatatttcaacatgcctaaaaccttctcaaaattatcttcctctactttcttctttcactttactctgctcttcttctctgcaacctctagcggttccttctccaacattttgtctcccaaaaagttcggtctcaagcgagagaagctcacccatcttcacttctacttccacgacatagttagctcacgaaacccaaccgctatccctgtcgccagtgccgcctcgaccaacaaatcccatactggctttggcgttgtcatgatggccgatgaccctttgacggccgcacccgaccccaactccaagctcgtgggaaaagcgcaagggatttacgcatcagcagcgcaagacgaagttggtttattaatggtaatgaacctggctttcatg

SEQ ID NO: 214068 - DNA, 336 bp, Gossypium hirsutum
caagaccagctaattgacaattctcagcaaccacaaagctcaaaaaacgataccaatgttgttgggctggctcttggtcctccacaatcatctatcatagggttccaaaatattggttcttcaatgcagccatcaaatcttaatcctttcaacgattggacgaagaaccacgataagggagttgaggactttttatcagaggaagagattcgcgtaagaagtaatgaaatgctcgagaatgaagaaatgcagcaccttctccgtctttcaatatgggaggtaatgcttccattaatatgacagaagacagtgggtacgggttccccaaattacata

SEQ ID NO: 214069 - DNA, 325 bp, Gossypium hirsutum
acggaagacttatgaagcggcgcttgataaagggttgactatttttgcgccgtccgatgaagcttttaaagccgacggtgtacctgatctgagtaagttgaccaatgccgatcaagtttcgctgttagaataccatgcctcgccggattataaaccaaaggggactttaaagacgacgaaagatccgattactacattggctactagaggtgccgggaagttcgatttgacggtcaccggcgccggtgatttcgtcacgctttatactggaatcagtccatctagagtcgctgaagcagtttttgacttcccaccggtcgtgata

SEQ ID NO: 214070 - DNA, 436 bp, Gossypium hirsutum
cggacgcgtgggtgatgcctttgttgaaactagcggagccctaaacactgttgctacatccctgatgaaggttgcaaatgacatacgcttactgggaagtggcccccgatgtggccttggtgagctcattcttcctgaaaacgagccaggcagcagtataatgcctgggaaggtaaaccctacccagtgtgaggctatcactatggtctgtgcccaggtaatgggtaaccatgttgctatcacagtgggcggatccaatggccactttgaattgaatgtgttcaagccaatgattgctaatgcactcctgcattcattaagattgctgggtgacgcatctgcttcattagagaagaactgcgtgaggggaattcaagccaatagggaaagaatttctaaattactgcatgagtctctaatgcttgtcacatctttg

SEQ ID NO: 214071 - DNA, 360 bp, Gossypium hirsutum
cccacgcgtccgttttcattgggcactctttcaaactaaccaaaacgaggccgccggattttggtttcagcagcttgtatttagaaggatggtgagggtcagcattttgaatgatgcactgaagagcatgtacaatgcagaaaagaggggcaaacggcaggtcatgatcaggccatcctcaaaagtgatcatcaagttccttttggtcatgcagaagcacggtttgtttcaacattcaatctaatctctacccttatatttgttccatcgatatgctaacattgggattgcaggttacattggagagtatgagtacgttgatgatcacagatctggtaaaattgtagttgaactgaacag

SEQ ID NO: 214072 - DNA, 394 bp, Gossypium hirsutum
cacagttactggggatattgtatttgtcctccaacagaaagatcatccaaaatttaaacggaagggtgatgacttatttgtagaacatacgttgacacttactgaggcactttgtggcttccagtttatactgacccacctagatggcaggcaacttctcattaagacccatcctggtgaagtggttaagcctgatcaattcaaggccataaatgatgaagggatgcctatgtatcaaaggccattcatgaggggtaaactatacattcactttactgtcgattttcccgactccttggcccccgagcagtgcaaggcactcgaggctgtgctacctccgaggacctcagtccagctgacagacatggagctggatgagtgtgaggaaaccact

SEQ ID NO: 214073 - DNA, 433 bp, Gossypium hirsutum
  unsure (1)..(433): unsure at all n locations
tttcctccaacaggagttatgattcggctgtttaaagtaaaggaaaagcagagagaacttgctgaaaatgcaaatgggggagctcctaccaaaaagcaaagtccaggagagttgcgtttgcacaaagatatttctgagcttaacttacccaaatcttgtgctataacatttccaaatggaaaggataacctgatgaattttgaggtttcaattcgacccgatgaaggatattatttctgtggcacatttttattctcctttcaagtttctcccgtctatccgcatgaggcacccaaagttaagtgcaagaccaaggtctaccatccaaatattgatttggaaggaaatgtttgccttaacatcttacgtgaagattggaaaccggtgctcaatataaacactataatctatggnttatatcatcttttcacgg

SEQ ID NO: 214074 - DNA, 382 bp, Gossypium hirsutum
ctttgaggtttttcaattgtatcctacaatcttgacaggttggctttttgtgatgaataaaggtgagctgagttgttcatttattactttgttttacttttaggcttttatatcgaaatcttattcagaatgagttttatccactgaattaactctgttttaccccttcttatgactagatttagatactgcgaaaggctctataacagtggagctcttcaaggacagttctcttgcagttgttgatcaattccttgatttatggtggtcagatgttgcttggagcatgcagcatcagtggccaagacattcttggtgtccgattgtgtggttgtggaaataaaggaacccgagcccgtgcctgctgggaaccccatggata

SEQ ID NO: 214075 - DNA, 380 bp, Gossypium hirsutum
tcgtccacgcgttcgggctatggcatccatcaatgagaaacctcttattatggttctatcgaaccctacctcgcaagctgaatgtacagcagatgaagcatatacatggagtgagggtcgtgcaatctttgccagtggaagcccatttgacccctttgaatacgatggcaaagtctttgttcccgcccaggcaaacaatgcttacattctccctggattcggtttgggagtgataacgtctggtgcaattcgagtacatgacgatatgctattgacagtctcggtagctttggcacgcacaagtgacagtggaacacttcaaaaagggactaatttacccaccattctgcgatattagaaagatttcagccaacattgct

SEQ ID NO: 214076 - DNA, 380 bp, Gossypium hirsutum
gaaaaaaaaatgaagctcttgtttctaactttgctgctttgttctcttcttctatgtgcttcgagcttttgaaccaacaatggctcagcctcattcacctttttgtgaagggaaatgcaaagggaggtgcactaaagcggcggtttgggatcgatgcttcaaatattgcggcatatgttgcgaggagtgtgaatgagaaccttccgccacttgcgggaacatacacgagagttcttgctacagacacaaggtgagttacaagggctaacccaaatgcccttgaaaatgaaatttcttcctgttcgggattgcatcaagcttaaagatcgaggacgaagaggctatatatagatatgcatgctgatggtgttttataaaac

SEQ ID NO: 214077 - DNA, 395 bp, Gossypium hirsutum
cccacgcgtccgcccacgcgtccgatcaactcgcaactgatttggctgaggctgcaggcgctcatgttcagttaattattgattccaagttcattgagaaattgcaccaagacatacccggaaagggagtaaaaagacagttggagatcctatttaatgtatatgctttaagtctgttacacaaacatcttggtgactttgtcacctccggctgcattaccccaaagcaaggtgcactagcaaatgaacagctgagattattgtactcccaggtccgtccaaatgctattgcacttgttgatgcattcaactacactgaccattaccttggctccgttcttggtcgctatgatggaaatgtgtatccaaaactctatgaggaagcatggaaagat

SEQ ID NO: 214078 - DNA, 436 bp, Gossypium hirsutum
atgggttccattgacacgccgacaattacagagaacggttcgacccagtctcaagccgccgctccttccggcggcgaccacaagcctccggcctcagctaacggagcgcaagtggaggtgtcgccggagcctgaaggaacgaaaaagaggcggtcgagtatgctaccgctggaggtgggtactcgcgtgatgtgccgctggagggacggcaaatatcatcctgtcaaagttatcgaacgccgtaagatgccctacgctgtgccctatgattacgaatactacgttcattacaccgaatttaataggaggcttgatgaatgggtgaagcttgaacagcttgatcttgattctgtcgaaactgttgtcgacgaaaaggttgaagacaaggtaacaagcttaaaaatgacacgccaccagaagcggaagattgatgaga

SEQ ID NO: 214079 - DNA, 446 bp, Gossypium hirsutum
cgatgggaaggcagggcctggtgctttgtttgtgaaggttagcatggatggtgctccgtatttgaggaaagtagacttgaaaaactacactaaatatcaggagctgtcttctgcacttgagaagatgttcagctgttttaccataggtcagtatggatctcatggaacctcgggcagggagctgctgagcgaaagcaagctcaaggatctacttcatggatcagaatatgttcttacttacgaggataaagatggtgactggatgcttgtgggtgatgttccatgggagatgttcactgacacctgcaaaaggttgaggatcatgaaaagctctgatgccattggactcgctccgagggccatggaaaaatgcaggaaccggaactagctaccatcatacatgatcttttcccacacacccgagattattatttctgaaagagatg

SEQ ID NO: 214080 - DNA, 346 bp, Gossypium hirsutum
cgccagaattttcaatacttacggacctcgtatgtgcatcgatgatggtcgtgttgttagcaactttgttgctcaggctttaaggaaggagcctttgactgtgtatggtgatgggaagcagacaaggagtttccaatatgtttctgatctggtggagggtctcatgcgtttaatggaaggagaacatgttggaccttttaatcttggaaacccgggcgaattcaccatgcttgagcttgctgaggtggtacaagaaacaatagacccaaatgcgaagatagagttcaggccgaacacagaagatgacccacacaagaggaagcctgatatcttaagagccaaagag

SEQ ID NO: 214081 - DNA, 404 bp, Gossypium hirsutum
cgccgattctaccaccaccatgaccacctattgtgaacccaccaacgcctgctatcgtgaagccaccttcaccgggaacaccgtgtcctacaccaccacctccggcacaacaaacatgccccatagacactctcaagctaggtgcatgtgtggacgtgttgggtggcttagtacacatcggcataggtagcagcgccaaagacacttgctgccctgtactacaagggctggtggatttagacgctgccatttgtctctgtactacgatcaaagccaaccttttgaatatcaatattataatccccatagctcttcaggtcctcatcgactgtggcaaaactgcaccttcagggttccaatgtccagcacaatgatgaaaaacataaaaaccccatgtttttttt

SEQ ID NO: 214082 - DNA, 402 bp, Gossypium hirsutum
  unsure (1)..(402): unsure at all n locations
cggacgcgtgggtaaatattcacgataaagtaccgacagttccggggatattcgccaatgaaaagcttcaatttcaaaagtatttggaagagacggtatcttttccatggagttacgcacatgtcggcgttgaactgacattggatcacacccatagcccgtttctgaaacccgcaagcgacctcggttgtgcacacaatctcgaggctcatttacacttgcttgacggataccatggcaagagggacattgcgcttgttaacaaggacagcaacttcttgaagaaagagtacggngtgccaccgcactggcgccaggacgagaacaaagggatggtaaaaaacaacgacggccgttgggttttgccggagcgggcgagagtggaggctgatccacatgaca

SEQ ID NO: 214083 - DNA, 224 bp, Gossypium hirsutum
gcgcggacgcgtggatagtgcatatacaaggccggcgatgactgtggtcatgatgaatgggatgttcaagtgatagctgttttaggagacatctttacagctgtcggacttaatctctcatgattgcgctatgctgacattgcaacacacccatagagaggtattgtagccgctgtgcctactacacgtgtgcacacgctatatgggcgaaacaactcatggtg

SEQ ID NO: 214084 - DNA, 440 bp, Gossypium hirsutum
atttgttgaggatcctcgtgatgctgaagatgcaattcgtggtcgagatggttataaatttaatgggaatcgtctaagagttgaacttgctcatggtgggcgaagaccttcttcatctgtggatcgttatagtagttacagtggtagcagtagtcgtgggccttccaggcgctctgattatcgtgttttggtgactggtttaccttcttctgcttcatggcaaaacctaaaggcatgatagggattgtagattacacaaactatgatgatatgaaatatgttataaggaagcttgatgactctgagtttcgaaatccatttagccaggcttacatacgggtggagtatgattcaagatatgattctaggcgcagctactttagaagtcctagtcgtagcccatatagtcgaaaccctaatctagaattgaatctatcaat

SEQ ID NO: 214085 - DNA, 391 bp, Gossypium hirsutum
ggacccttaagggtgctttttatggcaactataaaccacgcactgatattcccatggttgtcgacaaatatttgaacaaggagctggggctggatatggacaagttcatcacacactctgtgccttttgccgatattaacaaggcattcgactacatgctccagggtataggtctgagatgcatgattcatttggatgcttaaggaaatgttgctgctgtatatttgcccatccaaggatcaaaactctaatgttttgtcctactatgtgttatattatgtgcctacttaagctacctttcccggttatcaagagtgcctatatagaactctctctctctcaaaaaaaaaaaaaaagagaaaagagttctttatatggagttttatattat

SEQ ID NO: 214086 - DNA, 326 bp, Gossypium hirsutum
caatggcggatgccgaattggttcaggcttatatgcacaacaaactcaaattaagtttcagacgatgtcacaaatccgacatgaggaacaaccgcagcatcagaattctaggaaacaaaggcggcgctggtcgcctgagctccatagacgatttgttgagggactgcaacagctgggaggctctcaagtggccactcctaagcagattagagaactgatgcaagttgatggtcttaccaatgatgaagtgagaagccattagcagaaatacagactttatatccgaaggcttccaattttttcttccgggcatgggaatgagctgt

SEQ ID NO: 214087 - DNA, 324 bp, Gossypium hirsutum
ggttgcaaactactggaaacaagtcattaagattaatgactaccagaagggtgggtttgtgaaccggattgttttcttcatgtttaacacaatttcagggaagaagattgccattctcggatttgctttcaagaaagataccggtgacactcgggagaccccaaggatcgatgtatgcaaagggctgttgggcgacaaggctctttttagcatatatgaccctcaagtcaatgaggagcagattcagagggatcttgcaatgaaaaagttcgattgggaccattcggtttatctttagccggatagccctactttgatcaagca

SEQ ID NO: 214088 - DNA, 445 bp, Gossypium hirsutum
agggaggaaaatctaagtcagatactaagagtgccaagctatccgtgaaatccaaagctggaaagaaatcggggaaggctgccaaggatccaaacaagccaaagaggcctgctagtgccttcttcgttttcatggaggagttccgtgagcaatacaagaaggatcaccctaaaaacaaatccgttgccgctgtcggcaaagctggtggagataaatggaagagcttgtctgaagctgaaaaagcaccttatgtagccaaggcagaaaagcgaaaggtcgagtatgaaaagaacatgaaggcctacaataagagacaggctgagggtcctaaagacgaagatgttgagtctgacaaatcagtgtctgaggtgaatgatgaggatgatgatgaagaaggcagcggagacgaagaagatgatgagtaggaaggtccgtggtggatagc

SEQ ID NO: 214089 - DNA, 433 bp, Gossypium hirsutum
cccacgcgtccgcccacgcgtccgcccacgcgtccgagaaatcatggtaagtctcaaatcacttgtatctctcagttcccgatccgctgccgtagcactacttgtgttggtggtttcagtggcagtgcagacccatactacaaatgcacaaagctgcccgaccgagctgacgagcctgaacgtgtgcgcacctttcgtggtgcccggtgcagctgtggctaaccctagcattgactgctgtaacgcactccaatcggtgcaccatgattgcctttgcagcactctaaggatcgcttctcgactcccttctcaatgcaatctcccaccactcacttgtgcttgaaacaaaagcaatggtgctgcctgcttaatgggtaggaaaatataataacgccatggaatatcgatacctccctgtttttttctttctttt

SEQ ID NO: 214090 - DNA, 438 bp, Gossypium hirsutum
ggcctcccagaggttgcaaactactggaaacaagtcattaagattaatgactaccagaaaggggcggtttgtgaaccggattgtttcctcaatgtttaacacagtttcagggaagaagattgccattctcggatttgctttcaagaaagataccggtgacactcgggagaccccagggatcgatgtatgcaaagggctgttgggcgacaaggctcttctgagcatatatgaccctcaagtcaatgaggagcagattcagagggatcttgcaatgaaaaagttcgattgggaccattctgttcattttaagccgatgagtcttactttgatcaagcaagttaatttttttttgatgcccatgcagcaacgaatgatgcttatgggggtttgatttttacagagtgggatgttgttaaaacccttttttccagatgattt

SEQ ID NO: 214091 - DNA, 368 bp, Gossypium hirsutum
cccacgcgtccgctaaaagggaaacaaacaaatatacgcgcgtacagatcaccggatggcgagcggtgacgtggaggccgtggattttgaaccggaggacgatgacctcatggacgaggacgccgccggcgatgcctcccctcaagctcccttgcctaagctcaagtccgccatcactggcgccgcttccacctctctttctgctcataagaagaccaagggtcgtggcttccgtgaggacgatgctgaccgccactcccgtctcgcctcccgcgacttcgagtccctcggcactgacggcggccccggtccccagagatctattgaaggatggattattttggtcagtggtgtacatgaggaagcac

SEQ ID NO: 214092 - DNA, 340 bp, Gossypium hirsutum
ggaaatggaaagtgactggatatccctgaccgatgagctcaggatggatctggaatctaaccgctgccgtgccgaaaaagtagagatggaactgaaattagagaagaagtgcaccgcggagttagatgatgctcttagcagagctgttctcggtacatgctagaatggcagaacactatgctgatcttcaagaaaaatacaatgatctgggaccgaagcaccgggcgatactggaaggcatagcagagataaagaaggcagtagcataggcaggaagcaaaggtcatggtgcacgttttgccaaaggcctggaggctgagctctcagctattagagtgga

SEQ ID NO: 214093 - DNA, 420 bp, Gossypium hirsutum
gaaacaactccatctggaatgtttgctagaggatcttattcagctagaagtaagtttgtggacgatgacaacaagtgctacttggagatcaactacactttcgatatccgtaaagaatggcaatcgtagactacatacgaaggaatcattgtcagcgaattggtttgctttgtgtccattgtttgtcaagtctcctttaggtgtgaccatagttcattcatttactttgttcttattttgccacccatatcctgtgtgagagtgagactaagaatggtctacacaatgaagagagtttagtcgaatagctttctgttttgctccgagtccgagttgcagttagacattcatttctttaggaatggattaataaaaaaaagttaaagcttttgctttttaaccttccttcacgggaaccac

SEQ ID NO: 214094 - DNA, 401 bp, Gossypium hirsutum
cggacgcgtgggctgcaataaagggtcacctatctttggtgcccatagacatgaagcctcaaccaattattcttgcctatattgatctcaatcttgagactttggctgcggcaagaatgttgacatcaactggccctggtcaaactcattggggtgattctggagccaacaatccagcacctgccacaaattctgctgatgcccagctaaaacaagaactcgcagcaatatttaagaaaattggtgacaagcagacatgcacaattggtctctatgagctttatcgcatcactcagctataccctaaggttgatatatttgctcagctccaaaatgctagtgaggcatttcggacttatattagagacggcttagctcagatggagaagaatgctgcagca

SEQ ID NO: 214095 - DNA, 412 bp, Gossypium hirsutum
  unsure (1)..(412): unsure at all n locations
cccacgcgtccgcccacgcgtccgctaaagcagaaacaaaggctaaaatgtctgcaacatctgcttgatctcttatcctcccatctctcaaacccaaaaccatatctttaccaaacccaactcccatttcactgtcccccttctctctttcccaccgcctccatgcaaagcctctcttttcttccgctcttcaaagtttcacgcttttaacaaaaaagtcttcttcttttccttctaattttgttagaaacgtttccgtttcatctgagtacggtcaggaagagggtttatttggtagtgatgatgaagaggctactagtttctcccctgactttgaaacttttgtgggcaatctttcttttagtgtggacagtgctcagctngcccgnnttgtttggaagtgctggaaatg

SEQ ID NO: 214096 - DNA, 418 bp, Gossypium hirsutum
acgcccacgcgtccggttgccgaggatggcaaagtgaagcaattccgtgttattttgttaccgggggaaaagcttgctgatacaaatgccgcaggtgatgcctttgttggaggctttctttcacaattggttcaagggaagtccatagaggattgcgtaagggctggttgctatgcatccaacgttatcatccaaaggtctggatgcacatacccagaaaagcctgaatttaaataaagctattccactttcctgaactcctcttcactgttgttttcaagtttctgattgtaaagaaccctcttgctaattgaatattgttattatttatactatatgccggtgtaatttcgatgcctgcatattgaaatggcatatgagaataacattttaatgttattcaaaaaaaaaacaaaag

SEQ ID NO: 214097 - DNA, 380 bp, Gossypium hirsutum
cccacgcgtccgcccacgcgtccgacacaattatgtggaaccatcaccatattgtgttctatgttgatgaagtgccaatccgagtacatctgtgtccaaggagaaaaccagcaaaagggctggaaaggggaaggacaaagctaaagagcaaaaactgaagccaagtgatcatgaactaagggatacaatttgtaaaattcttaaggaagtggacttcaatacggctacattcactgacattctgaagcttcttgctcaacatttcaatactgacctcaccccgaggaagtcatcaatcaagctcataatccaggaagaacttaccaaactagctgatgaggccgatgacgaagacgacgaaggagatgccgagaaagatg

SEQ ID NO: 214098 - DNA, 428 bp, Gossypium hirsutum
cagaaatcctagtgctgatattgttctttccgacttccacaaagcatggggaagaagatctcgcattctttccctctaagcaatgttttgatggtggggcctgtgatggttccatcaaccttgtttcccatggccgggccgccatccaacgttccagccaactccaaccccagctgttttcgtcgaattcttgatatttggtatataaacctgagctatttgtttggttagttgaactaggctttgatctccattgctgtaaaattaaagaactttgaattacttagggtatctttcagtttatgatgtaaacaagcgcacggaatttagaacgttttgataccttctgagcaagagaataggctagagctctttctctcttgaaggtccttcttgcttcatttgcagctttgttttaacatcttcta

SEQ ID NO: 214099 - DNA, 262 bp, Gossypium hirsutum
  unsure (1)..(262): unsure at all n locations
gctaagtttcatgtctgatcttgacatccagattcctactgcctttgatccgtttgctgatgcagatgctgaagacgctggtgctggtgccaaggaatacgttcacattcgtattcagcagcggaacggtaggaaaagcctgaccactgttcagggattgaagaaagaatttagctataacaaaattctcaaggacctgaagaaagaattttgttgcaatggcaccgttgtccaggacctanaattaggaaaggttattcat

SEQ ID NO: 214100 - DNA, 381 bp, Gossypium hirsutum
attatgctttggacatgggggtaattaaaaagtctgactatgatcgtatcaacaagctggtcccagtttgtgaaatggcaataaagctttgcggcactgatggtacaatctcttgcatggcttcatattttgtctgcaataacatattcaatggcatcatggcacttgctggcgatacaaattactatgacgttagaaagaaatgtgaagggagcctttgctatgacttctcaaacatggagtcatttctgaacaagaaatctgttagggatgcccttggtgttgggaacatagatttcgtgtcctgcagccctactgtgtatcaggccatgctggttgactggatgaggaatctcgaattggcattcctgttctcctcga

SEQ ID NO: 214101 - DNA, 442 bp, Gossypium hirsutum
tcaccgatttgcgcttttcgtcgctgtctcagtcggtgctaacatctcctgtggccatgtgaatcccgccgttacattgggtgctttcgttggcgggaacattactcttttacgtggtatcctttattggattgctcaactccttggctcaaccgtcgcttgcctgttacttaagttcgccactagtggcctgggagtaccagctttcggactatcatccgtcgtggaagcattatacgcggtcgttttcgaggacgtaatgactttttgactgatgcacaccgtatacgccacagtcgtcgatcctaaacgaggcaacttgggagtgatcgcaccgttggcgatcggtttaatcgtgggagccaatattttagctgggggggcattcgacggagcctttttgaacccaaccgtttaattggaccagcccttgttagctggt

SEQ ID NO: 214102 - DNA, 252 bp, Gossypium hirsutum
attatgctttggacatgcaggtcataaaaaccactgactatgatcgactaaaccaagcgtgggcgggctggctaaagggccatcaagctatgcggcactgatggtacaatctcttgcatggcttcatattttgtctgcaattacatcttcaacggcatgacggcactcgctggcgatacaaattactatgacgttagaaagagatgtgaagggagcctttgctatgacttctcacacatggagtcatttctg

SEQ ID NO: 214103 - DNA, 453 bp, Gossypium hirsutum
  unsure (1)..(453): unsure at all n locations
cggaanacccgggctcacggatttgcgcttttcgtcgctgtctcagtcggtgctaacatctccggtggccatgtgaatcccgccgttacattcggtgctttcgttggcgggaacattactcttttacgtggtatcctttattggattgctcaactccttggctcaaccgtcgcttgcctgttacttaagttcgccactagtggcctgggagtaccagctttcggactatcatccggcgtgggagcattaaacgcgttcgttttcgagatcgtgatgactttcggactggtgtacaccgtttacgccacagccgtcgatcctaaacgaggcaacttgggagtgatcgcaccgttggcgatcggtttaatcgtgggagccaatattttagctggtggggcattcgacggagccctaatgaacccagtcgtttcatttggaccaggcttggttagc

SEQ ID NO: 214104 - DNA, 274 bp, Gossypium hirsutum
gataaggcttctctttacttgacagcaattgaggatgcagagtacaaagatgacaagatcgaattttggaataatgtttacgggtttgacatgagttgcatcaaaaagcaagctatgatggaacctcttgtggacacagttgaccagaatcaaattgtgacgaatagccaccttctcaagacaatggatatattcaaaatggctccgggtgatgcttctttcactgcatcttttaaagcttgtgcacaacgtgatgattacatccatgcttttg

SEQ ID NO: 214105 - DNA, 366 bp, Gossypium hirsutum
cccacgcgtccgagagtgttgaagtattgaagctgtctggtgttttgtttgttttttgaaatctgatgtctccgccgcttcttggcgtggaggaagggggtcagaacaatgtgactttactgggttcttctggctctattgatagtgtgtgccagaataatgctgaattgaaggagcgcaattacatgggcttgtctgattgttcttctattgattgctctgttgtcacccttggttccgacgatagcaacgtaagtttgaatctgaaggcaacagagctcaagcttgggcttcctggatcacagtctcctgaaagaaatcctgagctttgcttgttaagctctgctcaacttgatgagaaacccc

SEQ ID NO: 214106 - DNA, 448 bp, Gossypium hirsutum
cgccctacggaccgggcactgaacgggctgggacccacgcgtccgcggaattgtagtgtggagtgggaacgatgatcagtgtcatgatgctaggtggagccatggggctaccggggtaatttctgttactagtaatctggttcccggtttgatgcacgaactcatgttcaatgggaaaaacgcttcacttaatgcgaagctcttacctttgattcaatggctctttgaggaacctaaccccattggtcttaacacagcccttgcacaactcggggttgtgaggccggtttttaagttaccgtatgtacctcttccgctggaaaagagggtcatatttgttgaactggtcaatgaaatcgggcgagagaactttgctggagaaaaagatgttcaggtacttgatgacaacgatttcatcttggttggtcgatattagtttttttttttt

SEQ ID NO: 214107 - DNA, 320 bp, Gossypium hirsutum
gacaaaaaaaaatcttttatagagtgaacctaaattcaatttactgggcgggggttttacaaaacggtgaactgggaaaacacgggggggacccaaattaaaccccttttaaaacaccccccttttgccagatggggttttattgaaaagacccccacccattgccctttccaacagtttccacaccctgaatggggaaagagactcgccctttaccggtgcattatatgcgccgggtgtgctgtttacacgcaccgtgaaaactataaattgccccgccctaaagcccccccccattggtgttttgcctttttttttaa

SEQ ID NO: 214108 - DNA, 297 bp, Gossypium hirsutum
atcgaatcatggtccaaagtcatacccaacttagaccctcccaagacaccatcttcttttatgacccctcgccccggcaccccttttggtattccttctaaactcaccggtaactttggtcttccttatgcatctgagcttttcgcttaagagggtggcatggtaataggttcagcaaccactgggcaaatgggtattttggctggacattgtcctacaattgctgaacttgaacctgggatcttgtcggtgcatgaaagaaatgatgtcacaaaatattttcttagccaggggttt

SEQ ID NO: 214109 - DNA, 402 bp, Gossypium hirsutum
  unsure (1)..(402): unsure at all n locations
ccaacgcgtccgcggacgcgtggggggaactataaagcacatgctgataatcactatgatcccaatgcattgccggtgattcaggggattaattacagagacatcatggcggataatgtgtcgattgctgccaagttggaagggattgaaggggatcctttcaactaaatttggataatccatggtacgattggaatggccagttaaggctaagaaggtgccatggacttgcacagacgtcgaggggatctcgagtggagtaagtcctcggccatgtgaccaactaccagatcaagggccggagaaaatcacggcttgtgacttccctgcagagnccttgtccattgatagagtggtgctcaaaagttgtacctataggatgaaatacacgtgactgatggt

SEQ ID NO: 214110 - DNA, 213 bp, Gossypium hirsutum
gacaaagaagggatcccaccagaccagcatttgcttatctttgctggtaaacagctggaggatggccgtacccttgctgactacaacattcagaaagaatccacactccatttggtccttcgattgaggggtggtatgcaaatttttgtcaagaccctcaccggaaagaccatcacattggaggtggagagttctgatacgattgacaatgtc

SEQ ID NO: 214111 - DNA, 410 bp, Gossypium hirsutum
cccacgcgtccgcccacgcgtccgcccacgcgtccggtcgagtccaccactgaaggtgttgaaccagggcccaaacctgtaataatatccgaggcgcttgccaagtttttgggtactggaggaagagaaatgctagcaaccgaggcagaaaatcgtgtttgggagtacataaaggttaatcgtttggaggatccgtcgaattcaatggtggtactgtgtgatgccaatcttcgtgaacttcttggatgcgaaagcatatcggtgatgggcgtacgggagacgctactacgacatcatttatttaagcagtcttaagatctctgatatatgtctgctagtattaactggtagaacaaatagtgacgacccttttctctttagtacgcggttcttttgttatgtaggttctt

SEQ ID NO: 214112 - DNA, 278 bp, Gossypium hirsutum
ctcagtttgtgattgacaacaaggtgctccctcatctctatcaacttcttgtacaaaatcacaaaaaaagtatcaagaaagaagcctgctggacaatctccaatataacagctgggaataaagctcaaatacaggcaggtattggggccaatattattcttcctcttggacaccttcttcaacttgcggaggttggcattaagaagggggctgcatgggccatctcgaatgccaactctggaggatctcatgagcagattcaattccttgtgagccaa

SEQ ID NO: 214113 - DNA, 338 bp, Gossypium hirsutum
  unsure (1)..(338): unsure at all n locations
tccaaatgtggcgttgctgtggcttaatcttttgatcataagcctgagagagcagatgagggggagagaattgaagccggcggcggatgggtgataaaatggaatggacatcgcgtgcttggagtactcgccacttcaagatccataggcgatgggtgcctcaaaccatttgttacatccacaccagaagtgacggtaagcgagcttaccaatggagatgaattcctgatactggcgagtgatgggctgtgggatgtggtatctaatgaagtggcttgtggagtantgaggcgatgtttgaacagccaaatgacgaagaggaaatcatcgcttcagtt

SEQ ID NO: 214114 - DNA, 347 bp, Gossypium hirsutum
ctagactggctaaggatccccttatccaagcagctgtaatgttacatccttcatttgtgaatgtggatgatatcaaaagtgtgaaggtgcccattgcgatattgggagctgagcaggaccatatatctcccccagagcttttaaaacagtttgatgagatcttaaaagcgagtgaggttgatagctttgtgaagatatttcctaaagttggccatggatggtcagtcagatacgatgtcaatgatccgacagctatgtcgagtgctaacgaagctcaacaagatatgctggcgtggttcgcaaagtacgttaagtgagaaacttattcgatggtgatggagtttatg

SEQ ID NO: 214115 - DNA, 397 bp, Gossypium hirsutum
atcatactggtaaacaatattcatctccggaagaaatgaagaaggttgctctagaaagatacaacaaaatgaaaggtaatgccccagagagattggtatcaggatctgatgactttaccatgttcctatgggaacctgctgtcagcaaacaccacaaagttcggatgactggtcatcaacagcttgtaaaccatgtttatttctcacctgatgggcaatgggtggctagtgcgtcatttgataaatcagtcaagctatggaatggtactactggagaatttgttgctgcattccgaggtcatgttgggcctgtttatcaaatcaacttgtctgcagatagcaagcttcttttaagtggaagcaaagattccacctttaaggtttgggatattcgaac

SEQ ID NO: 214116 - DNA, 401 bp, Gossypium hirsutum
atcatactggtaaacaatattcatctttttaagaaatgaagaaggttgctctagaaaggggaacttaatgaaaggtaatgccccagatagattggtatcaggatctgatgactttaccatgttcctatgggaacctgctgtcagcaaacaccacaaagttcggatgactggtcatcaacagcttgtaaaccatgtttatttctcacctgatgggcaatgggtggctagtgcgtcatttgataaatcagtcaagctatggaatggtactactggagaatttgttgctgcattccgaggtcatgttgggcctgtttatcaaatcagctggtctgcagatagcatgctttttttaagtggaagcaaagatttcaccttgaaggtttgggatattcgtacaaaaa

SEQ ID NO: 214117 - DNA, 393 bp, Gossypium hirsutum
aacaccaactaatatcatatccaaactgtcattacttgttctgcattttccccgcctacgaatcatctggtctcggagcttacatgcaactgctgatatatttgcttctcttaaggcaaatcaggatgaacccgatgagacaaaggcaatgagagttggtgtaccctcagaagagggtatcatagaaaatgatgttagagctgaaaactacaatacatcagctgttgagtttttgagacgactcccaggagtaacagattccaactacaggactataatggatggatgtcaaagcttggctgaacttgcacttcttcctatagagaagctagctgaactaatgggtggtcgaaaagctgcccagacattaagagatttcctcgatgctaagta

SEQ ID NO: 214118 - DNA, 379 bp, Gossypium hirsutum
acccttccggttttttttaaaagggttttttttagggaagttccggcgagggcaagagctgaggctgagggcaattgcgaggaaagggatagggaaagatcacgccaaatggtcacctgctgcgacagtgacttttatgtatgaacctgagattcatattaatgaggatttgatggaaagcttgacgcttgaagaaaagctaaactttggtgagagcagtccaactaaagtctttgacattgacccaaatacccaacaagttgtggtggttgatccaaaggcgtatacctatgacgatgaagtgctaaagaaagctgaagctatgggaaagccaggtcttgtggagatatatgccaaagaagacagtttcatctttaca

SEQ ID NO: 214119 - DNA, 392 bp, Gossypium hirsutum
gtgacaatggtgtgtcgaacatcgaaggtggttgctatgccaagtgtattgatctttcaagggagaaggagcctgatatctggaatgccattaagtttggaactgtgttggaaaatgttgttttcgatgaacatacgagagaggtggattatggtgacaaatcagttacagagaatactcgtgcggcctatccgatcgaatacattccaaatgctaagataccatgcgtcggtcctcatcctaagaatgtcattcttttggcatgtgatgcctttggtgtccttccacctgtgagcaagctgagcctggctcaaaccatgtaccatttcattagcggttacactgctctggtggctggcacggaagatggtattaaggagccaacagcaacg

SEQ ID NO: 214120 - DNA, 409 bp, Gossypium hirsutum
ggaggatccacaggtggtttacatggctagtgtgggatcatttcctttcaactcttttctttctggagtgctttcttgtgttgggactgctgtccttgctgtttgtcttcgcattcaggtgaacaaggaaaacaaggaattcacggatctaccacctgagagagcttttgcagattttgttctttgcaacttggtgctccatttggtgatcatgaatttccttggataaaatcataatttccaggttttgccggactgcgtgttttctcagtttccggccgtgattcataattttagcatgaaatgaagttcttagatcatcattatgagcttgagcatacatccagaactgtagtaggaatttgatattttatctttggctaaagagtttcaagataacttgatgaga

SEQ ID NO: 214121 - DNA, 313 bp, Gossypium hirsutum
cggacgcgtgggccgacgcgtgggcagatgatcctgggagattgtcgatgctcgtaacgaacgccttaagcgtgcaatggatctcttcatgaagcacgagtatctgccagaagatcttcagaaaatgcagacaccatttaggagctatcttcaagatatgcttgctcttgtgaagaaggagagagcagagcgagaagcattgggagctttgcctctgtatcagcgaaccattccttaagggttttcatgccgtatctcataggcattgctggtgaaaattgcgttcgattatctgtatgggcgtatggtattt

SEQ ID NO: 214122 - DNA, 253 bp, Gossypium hirsutum
caaccgaattcgaggagtctgttgcacaggcattctttgatttggagaataccaaccaggacctgaaaagtgacctcaaaaatctttacattaattcagcactgtgagagtgtgttgttgggatacagtaactgtaaagttacttctgtatttatcaaccatatgactatattacttattcacttgcagccaaatcgatgtttcttggagccgcaaagctgctgttattcatgttccctacaaattgaggaaa

SEQ ID NO: 214123 - DNA, 352 bp, Gossypium hirsutum
ggaaactagaatgtagcacgaaagctttgaaggactgcagaaatgtgagcagcaataccattttctatgtgatggaatacatgagggaagagttgaaaagaggaggaggagaagaatgggggcttgcctttcaatcagggcgggaactactggggaaggcctcttgcgtatcagcctgaaactacatgacatgcatatggggaagttgttgctttgttttctaatctttataatgccggcggccacttgagaacatctcatcgctatctctctctctatatatatatatatatatattcatatatcgcgcttgttttagttgacatgacatggaaaatgacattgagctcgt

SEQ ID NO: 214124 - DNA, 369 bp, Gossypium hirsutum
atcacagagaaaagttcacaaagaacccaaagttgttaacttttttgataacccaaaacacaaaaatgggtgcttctgaatcagttcctcaaaaatcaatccatgaatttacagtcaaggattacaaaaaccaagatgttgaccttagtatgtacaaaggaaaagctcttcttgttgttaatgttgcctctaaatgtggactcactgattcaaattatacccagttgactgatctttacaacaaatacaaggaccaaggactggagattttggcattcccatgcaatcagtttttgagccaagaacctggtaccagtcaagatgcacaagaatttgcttgtacaagatacaaggctgaataccctattt

SEQ ID NO: 214125 - DNA, 309 bp, Gossypium hirsutum
cggacgcgtgggattggtgtcacttctggtgcctccacaccagataaggctgtggaagatgccctcgtcaaggtgtttgacataaaacgggaggaggccttgcaagtagcataaaagtatgtatgtatatatgtatgtaggtttacacaggtgggtcagccattggtgctcgtttggtactgatagtataatgttgtcaatgtatagtttaagtgaaggactctttaatctttaagatctgcgcgtacttgaaatcagacaatgttgagtaattatgtatcatgaaatggtttttatttttggcttttt

SEQ ID NO: 214126 - DNA, 396 bp, Gossypium hirsutum
cggacgcgtggggcgcggtaaagtaccatacggagcttaaggaagctgacgatctactcatgcattatcgatcggaaccgagctgttacccgtcgaaagcttacttacgcggaaatgaaaagtgcaggcttgcgttaacggggtttcccgatgagttttacgatactgagtgggatttgataatgatcgatgctcctcgtggatacttcccggaggcaccagggaggatggcggcgatattctcggcggctgtgatggcgaggaacaggaaaggaccgggtgtgacgcacgtgttcttgcacgatgttaatcggcgagtggagaaagttttcgccgaggaatttttgtgccggaagtacttggtgaacagcgaggggagactttggcatttcgaga

SEQ ID NO: 214127 - DNA, 406 bp, Gossypium hirsutum
  unsure (1)..(406): unsure at all n locations
gcagaagctgctgttgctgctgctcaagcagcggctaaagttgttcgattggctggttatggacgccactctatggaagaaagagctgcaactcttatacagtcgtattacagaggctacctggtaaaacctctcaatctatgaaggcactattgtaagacggggttaagtaaaaaatcactgcatatactttcgttttcaaacgagtttgattctgtaggctcggagagctttgcgagctttgaagggattggtgagattacaggcactagtgagaggctataatgtgcggaagcaagcacaaaacacaatgcggtgcatgcaagcattggtacgggtgcaggcaagcgttcgagctcgtangttgcaactaactcaagagaagcttcaaaagagagtggatgat

SEQ ID NO: 214128 - DNA, 409 bp, Gossypium hirsutum
cccacccgtccgggagttcaagcgacacgtggatttgataggacggctcaggcacccaaacttggtcccacttagagcttatttccaagccaaagaggaacgcttgctcgtatatgactatttccccaatggaagcctcttctctcttattcacggaacaagaacttgtggtggtggaaagcctcttcactggacatcatgtctgaaaatagccgaggacttggctactggactgctttatattcaccaaaatccaggcttaactcatggaaatctcaaatcatctaatgtgttgttaggtcctgattttgaatcttgcctcactgattacggtctcactatattccgagacccagattcagtcgaagaacctggtgctgctacatttttctacagggcacctgagtgc

SEQ ID NO: 214129 - DNA, 403 bp, Gossypium hirsutum
accggttctcattcgactggtctgtaaataatacctctgttagtccagacgggaagttgcttgcagtccttggagacagtaccgactgcctaattgccgatgctcagtctggcaaagtcactggcaccctagaaggacatttggactattcttttgcttcagcttggcaccctgatgggaacattcttgctactgggaatcaggacacaacttgcagattgtgggatgtaagaaaaccagcccagtccctagctgtattgaagggaagaatgggagcaattagagctctcaagttcacatcagatggtcgatttcttgccatggctgagccagctgacttcgttcatgtcttcgacaccaagtccgggtatgtgaagtgccaggaaattgacttttttggtga

SEQ ID NO: 214130 - DNA, 425 bp, Gossypium hirsutum
gaccaagccgtccgccaacgcgtccgatcatggtaagtctcaaatcacttgtatctctcagttcccgatccgctgccgtagcactacttgttttggtggtttcagtggcagtgcagacccatactacaaatgcacaaagctgcccgaccgagctgacgagcctgaacgtgtgcgcacctttcgtggtgcccggtgcagctgtggctaaccctagcattgactgctgtaacgcactccaatcggtgcaccatgattgcctttgcagcactctaaggatcgcttctcgactcccttctcaatgcaatctcccaccactcacttgtgcttgaaagaaaagcagtggtgctgcatgcttaattgggtaggaaaatctaataacgccatggaatatggataccgccctgtttttttctttcttttttaat

SEQ ID NO: 214131 - DNA, 411 bp, Gossypium hirsutum
gggagagctggaaagtttgttgtattacatcttcgctttgacaaagacatggctgctcattcagcttgtgattttggtggaggcaaagctgagaaactggccctagctaaatatcgccaagttttatggcagggaagggttttaaactctcaattcactgatcatgagctgagaaatcaagggcggtgcccattgactccggaggaaattggattgctgctaactgctttgggcttcaacaataatactcacctctatcttgcttcacacaaagtttatggaggagaggcaaggatctcaacattgcgtgctatgtttcccctcatggaagataagaagagccttgcttcagcgattgagctcgctgaggttgaaggtaaggcttctttgatggctgctgttgattattat

SEQ ID NO: 214132 - DNA, 417 bp, Gossypium hirsutum
gaattgtattcatcgaagagattttcagtgcaaagcgatatatatagctatggagtcttcctcctggagttgattagcggacgtgaagcaatttgtagagatccatcaaacttggaaacaacattaataatgcaggccaaggattcgaaagatatcagcagttttgtcgataaaaccttgggaggtaaatcaatgcgtggggcaaaacaagtagtagatttggcattgcagtgtgtgaacataagaccaagaagaccattgatgagaagcatcattgaagagcttgaacgaatccaagagacagagattggtggtttgccgtttgaagcacgcgaggagattggagatgtaacattggggagcgagctctttaggtgacctctgctcgcccgggtataataatcattcttttattaa

SEQ ID NO: 214133 - DNA, 250 bp, Gossypium hirsutum
cccacgcgtccgcccacgcgtccgcccacgcgtccgagagcatcgataatgatgaaccttatggcgaggcaaggatgacaaaagcacaacctagtaggattcagttatagaaacctaatggtaatggaggacatcgcttttatttagaagatatgtttgtatgtatgttttaggttttggatccatattttatggtcggtttgacaaatgaacttgaatttggttttgttttaagagtgtgggtttctgt

SEQ ID NO: 214134 - DNA, 271 bp, Gossypium hirsutum
cccacgcgtccgcccacgcgtccggacccacgcgtccgcccacgcgtccgctgcgaagaaagcttcgtgagcatccacttttctttggcataacaatggggctgctagctgaggttataaattctaggctttttacaaccgtccgggactcccttgggttaacatatgatgtatcatttgagttgaacttgtttgatcgacttaagcttggatggtatgtcatatctgtaacatcaactccaagcaaggtatataaatctgttgatgcttg

SEQ ID NO: 214135 - DNA, 397 bp, Gossypium hirsutum
cttgaaactactcccaaaaattccactaacaaaaccagttcgtgtgtgagacaatgaagggtaaggcaaccaagaacccaatcttcgccttcaccacatggatccgacgacaaccaccgaagatgaaagcgtttttagcgactatctcagggatggcagctcttttgttcttgagaatggtggtggaagatcacaacaatctttttgttgctgctgaggctgttcatgctttgggtacttttgtccttatttacaagcttaccaaagagaaagcttgtgctggtacatccttttttttctttgattgatgttcttttggatgtttatgcataatcagtgatattttgtagctataaatgcctcttgctgtaagaaaaaaaatagaatctttgacctt

SEQ ID NO: 214136 - DNA, 418 bp, Gossypium hirsutum
cccacgcgtccgctggtctcaacaaagcaggtaaattcccaacccttgtcactcaccaggaatccctagagtcgaaggtgaatgaaacaaaggcaatggttaagttccagctgaaaaaggttctatgcatgggagttgctgttgggaatgttgcaatggaggagaagcagatcttccaaaatgtgcaaatgagcgtcaatttccttgtttctttgttgaagaaaaattggcaaaatgtgaggtgcctctacttgaagagcaccatgggtccttcaaacaggatcttttgagtttatgttttaccttctgttatgtacggactgaaagtagtagtggggatttaatactaaaagcggtttttttcttctcttttacttagaatattcaagtttatgttatgttctggtgttccctaaaa

SEQ ID NO: 214137 - DNA, 413 bp, Gossypium hirsutum
gccctcattgccgagggaacgtacttcgctgggaggttgtggaagaggccacaaagtatctaaattcgaagaagagaacttgttctagggaatcttgctcctactctggaagttaccaggaattgcgtcggcatgccaggagagtccatccgacaatacgaccttcagatattgacccatccagagaacgagcctggcgccgccttgagcaccaaagagaatacggtgacattgtaagtgctattagatctgccatgcctggtgcccttgtggttggagactatgttattgagaatggagataggttggcagctcgaagggagaatagcaccggtgaagcgagttcaccatggtggactactttctttctgtttcagattggttcagtcgacaatgttggtgaatcaagagcc

SEQ ID NO: 214138 - DNA, 197 bp, Gossypium hirsutum
caaaccaccagtgtatgaacctccaaaaaaacctccaatgtacgaacctaagccaccaaaagcaccggtttatacaccttcaaagaaagagaaacctgaacccaaaccaccaatgtatgaaccttcaaaaaaaccttcaatgtatgaacctaaaccaccgaagccaccggtttatacaccttccaaggaaggaaaac

SEQ ID NO: 214139 - DNA, 334 bp, Gossypium hirsutum
ccaacccttccgccaacccttccgggataatgttaaactcccccaatggttttttaagattggggaaattttaaggattattttaattctttccggccttaaacccaaataaaaaggaaaccccctaaaccctttaaaggtcaagaacaagaattttctgaaaggggggttgaatttgctagaaaagggattgcaaagagggttgctaatatgttaaacggtgaacaaattggggggaggaagaggtcatcgttctattatgacatttggaatatcaaatacttgagttaattcaaatgggatgatcttactgaagaaattgcttacaagagtg

SEQ ID NO: 214140 - DNA, 407 bp, Gossypium hirsutum
ccgaatgatcccaaaagttactcggtttttatccaccgggacgaggtgaaaaatggggcgagcattcaaagcgtgcttcaacgttacagtagagaagaagtgaagaaaatgagggagaaagtgattgaattcattcccaagataatttatgcaaagcctgagaatggtttggagagtattaaggatgcatttgatgtcgccattgatggagtgttgaagagaaataaggagcatgagcagcctggttacaagtggaaatgatggttttaatggaaattggaagctcggggtgaaaaaaattagaaatgcagagaatatacagaaatttatatttattactttttaatttttaaaggatgggataggggcatgactcccccctgacactgttaactttttgtatataa

SEQ ID NO: 214141 - DNA, 307 bp, Gossypium hirsutum
gagagatatcaaacttagtttgatcgggcattctatcggaaactttataataagaacagcattagcagagagtgctatggaaccttacctgagattcctccatacatttgtgtctctatctggtccacatttgggatatctatacagttcaaattctttattcaattctggactgtggcttttggagaagctcaaggggacacaatgcattcatcagctcacttttgctgacgaccgtgatattcgtaacacattattccacaaactttgcgaggtattgagaacaaagttgcaaaatggtcttgag

SEQ ID NO: 214142 - DNA, 250 bp, Gossypium hirsutum
gaccaagccgtccgccaacccgtccgacacaatagtttgtaactatgatgggagggagcttcccaaggttttgggtcagaattcggttgatagagtgttgttggatgccccttgtagtggtacaggagttattaccaaagatccattcgttaaaacctctaaaagtttagatgacatacaaaaatgtgcccatttgcagaagcaattgatacttgctgctattgatattgttgatgcaaattccaaaact

SEQ ID NO: 214143 - DNA, 312 bp, Gossypium hirsutum
gtcccgccaaaccataccacgcaataatcagtaacttttattgatgggagcttgacaaggttttgggtcggaattttgttaatagaatgttgttggataccccttgtagtggtacaggagttataaccaaagatccatccgttaaaacctctaaaagtttagatgacatacaaaaatgtgcccatttgcagaagcaattgatacttgctgctattgatatggttgaagcaaaattcaaaactggcaaatacatcgtttactcaacatgctccatgatggttccagaaaatgaagctgtcattgactattcac

SEQ ID NO: 214144 - DNA, 333 bp, Gossypium hirsutum
gtaatgcaatttgtatttctaacatttattttcgtggcactcagcacaatggctaaggggggcttttttatcaagcatgactttcacaaaaggtgcgcttaggctgcaagaattagggtaaaatacccacatagaattccagtgattgtggagaagactaaaggaaacgacatccctaacattgacaagaagaaatacttactaccatctgacttgacagtgcgtcagtctgtctatgttatcctaaaaagaataaaatttaatgctgaaaagactatctttttattttttttacaggcaactccctccaacaggagcaattatttcaaccat

SEQ ID NO: 214145 - DNA, 372 bp, Gossypium hirsutum
  unsure (1)..(372): unsure at all n locations
taataattagggcaaaaatttttgaacttccgggaaaaaaaaatgcgtcgggagatctcgattttggtacagcctcggtgccttcttctcttcatttctctctcaattctcctcattttcgctttctcaggagccaaacgggaggaagagaagatcgtagaagaagagcatgaaatcactcacagagtatacttggatgtggatattgatggccagcgtgtaggtagaatagttattggattgtatggcgaagttgtaccaaaaactgttgaaaatttcagggctttgtctacaggagagaagggccagggttctaangggaaagcacttcattataagggaaccccattccatcgcataatatctggattc

SEQ ID NO: 214146 - DNA, 263 bp, Gossypium hirsutum
cttgtcttcataattatcctgcatatgttgcatgaagttgtgaagattgaagggtatttgcaggcaaccttatctgttttgtcttctatatctcggttaaagttttaagactgtttgagatgtttgtctagtactattagatattatgttggggatttgtggtttgatctgtgtaagcagttatcttaacatcctaaatgtttgaaattgaaacttttgttcttcttatatggtctataatatgcgagatagattgtttcctt

SEQ ID NO: 214147 - DNA, 427 bp, Gossypium hirsutum
ggcaccaccaattgagactccaaccaagtcctctggctctcaccacgcttcacattcttctttgaatgaaaggattctttcatcgatgagcagaaggtctgttgctgctcacccatggcatgatcttgagattggacctggagctccaatggttttcaactgtgtgattgaaatcccaaaaggtagcaaggtgaaatatgaacttgacaagaaaactggtctgatcaaggttgatcgtgtgctttactcatcagttgtgtatcctcacaactacggattcatccctcgcactctttgtgaagacaatgatcccatggatgtcttgatcattatgcaggaaccagttattccaggatgctttcttcgcgctaaagctataggtctgatgcctatgattgatcagggtgagaaagatgacaagattatt

SEQ ID NO: 214148 - DNA, 313 bp, Gossypium hirsutum
cccacgcgtccgcccacgcgtccgcccacgcgtccgctccactactcgatgaacgatattcggaacctccccaaccagttgctatattggtgtggattactgattttgaagccaaaatctcccctccctcacctcgaacaatcaaacctgaagcagatcttgcttgttgttgatcgaaagctacatcaaagaagactgacacacttgttcttctttcttcagttctcggaccaccatttcctgccaaattacccaaagcctacaacaaaaaagtcggcactgttcatttgaccctcgacaaaaacccatgaca

SEQ ID NO: 214149 - DNA, 326 bp, Gossypium hirsutum
ccaccaattgagactccaaccaagttctttttctctcaccacgcttcacatcctggttggaatgtatttgatactttcatcgaccaacaaaaggtctgttgctgctcacccatggcatgatcttgagattggacctggatcttcaattgtttttcaacctgttgattgaaatcctcaaatgtatcaaggttaaatttgaaccttacaagaaaactggatcttatcaagtgttatcgcttttcttttactcaatatatgtttatccttacaactacagtattcatccttccactctttttttaaacctttaaccttttgattttttt

SEQ ID NO: 214150 - DNA, 414 bp, Gossypium hirsutum
tgcagttggaaactggagcagggacaatgatagaaacaaaatccttcttggtataggtggtggtcactacgtacctaggcatatggatattgttcagaaagatggtgtttgggtaggccatatgctgcctgggtattctctgttgatggaagatcctagagaagcaaaatcactaacaaattcagctgttgttggtggaacttggagggaaacaatcagagttgcatttgagaccaccaaattggctttccctggaggagaagttctagcacatctagatcacaagatttttaaggggtggcaaagaaatgcaattataaggttcttcacagaacagaacataaagattggcaaaccgagtgacttctgtccttgttaatagctgtctatcgcttgttctgtaactatacatta

SEQ ID NO: 214151 - DNA, 391 bp, Gossypium hirsutum
cccacgcgtccgcccacgcgtccgaagtgataagtggtatgggacgagatgttaccgttttgatctatcttgatgttagaaaagctttggaaagtaagcatgcttgcttctttcaagtttcagtccggtgatgattctatgaaccgaagcaataactgcaaaaggcatgaagctttacatttcagacaacaaagcgatattgactgagggttttgatggggtggtacgtgtcaagtgctttgagaaaatagaatcatggccagatagaaaacctatacctttctcaaatgtttaaaattggatgatgaaatgatcagttttttttctctcttttatacctgtgtgatgacaaatttgtattggatcttatgaaattcattttgtttgatat

SEQ ID NO: 214152 - DNA, 385 bp, Gossypium hirsutum
agccttccgtgggcttgaaccttgaaaggtggaaggtgtccttgctgtttttcgggcatttggtgacaggctcttgaagcagtatgttgttgctgatccagaaattcaggaggaaaaaattgacagctcacttgagttccttattcttgcaagtgatggactgtgggatgttgtttcaaacgaggaggctgtggcaatggtaaagccaatacaggatcctgagcaggcagccaagcggcttatgcaggaggcatgccagagaggcagtgcagataatatcacctgtgttgtcgtccgtttcttggctaatcaaggtggttcctcacatactgttcctgcataatccatccattctcagcatggttttaggctttggttcttctag

SEQ ID NO: 214153 - DNA, 433 bp, Gossypium hirsutum
  unsure (1)..(433): unsure at all n locations
tgcacgtacncgtcccggatttcccggccaaaagataaaaaagtttatgtcattggtgaggatggcatcttaaaggagcttgagcttgcgggattccaataccttggtgggccggaggacggtggaaagaagatagaactgaagccagggtttttaatggagcatgataaagatgttggggctgttgttgttggatttgatcgatacttcaactactacaaagtccagtatgggacactttgtatccgtgaaaatcctggttgtcttttcattgctacaaatcgtgatgctgtcactcatctcacagatgctcaggaatgggcaggtggcggttctatggttggtgccatctgtggatctactcaacgtgagccacttgttgtgggaaaagccctcacttttatgatggactacctcgcaaacaaaattggca

SEQ ID NO: 214154 - DNA, 428 bp, Gossypium hirsutum
ccggaagttagcgatgccattgccctactcgaagcagcatcattcaaagcttgtttgctacataaccaaagagttaatggatacagagaacccacctcaagtcctgcctaacggctatgtctacagctctaaggctctcaaagaaatggctgagaaaaacaatggtaaaattacatgtccgagaaccggtctggtctgcaattattctgacctggttaaggcctatatctcataaactacactatcaacactgcaaaggtaaaaaagaaaactcttcctggcctgtttcctcttaatgttagtgctaaattttatgcatcatctgtagatatttctcttttgctttcgaaattttcggaacttctcattgtaatcttcttgcacctttaactcgttcacctcatgtaaataatgcatccttttttttt

SEQ ID NO: 214155 - DNA, 294 bp, Gossypium hirsutum
cccaactgcatgaagttgtggaggatctgaatactaaatatgtggaagtcaagctgataggagaggatcaaaagaagcaaattctgaaactctctggagactatgatattcaaaacaaggagattgaaagcattcgtcaggctaatcagagttttgaggctgagttatcaaaattgcatgaagaacttgaagaatggaaatgtatggaagagagtttgtgtgttgaactacaaaagggaagaaatgaggttgaactttgggagactcaagctactgcattgtttgatgagctac

SEQ ID NO: 214156 - DNA, 316 bp, Gossypium hirsutum
cggacgcgtgggttgggaaagagttgttcgaaaaagaacaagaggaccttctttccgacctgaaagacattccaaagaaggcttgtgatcgtcgaataaatgagtttgtgaagctgctagagctgccaagatacatgcttatatcatcgctcaccttaagaaggaaatgcctgctatgattgggaaagcaaaaactcaacagagactgatcgataatttggaaggcgaatttggaaaggttcaaagagatcatcacctaccaccaggggattttccaaatgtggaacattttaaggagattttgtctggttacaac

SEQ ID NO: 214157 - DNA, 344 bp, Gossypium hirsutum
cccacgcgtccgccttattatgaccaacttacagccatctacgcaaaagatcgagccacggggaatgctcaaacaaccgctgatattattgaagaaatagatgccgatgatgtagctactgcaaatactcatgaagaaagaaactattacaatggatgtgaagctgatatttctttggatgagatgaatctctaagctacacaaccgcaaccatctagaaactacgatgattccacattttcaaagaagaaaaaaatgattttctgatgcaagtgaataaaattcttctacttcattaactgatgctgccacattattgggggaaaacatatgaactattagct

SEQ ID NO: 214158 - DNA, 85 bp, Gossypium hirsutum
ctgaacgggaaattgtccgtgacatgaaggagaagcttgcttatgttgccccggactattagccggaactggggactgcgaaaag

SEQ ID NO: 214159 - DNA, 366 bp, Gossypium hirsutum
ggattcccggccggacgccgtgcgctgaacgggaaattgtccgtgacatgaatgataatcttgcttatgttgccctggactatgagcggtaactggagactgcgaagagcacctcatctgttgagaagaactatgagttgcctgacggacaagtcattactattggagctgagagattccgttgcccggaagtcctcttccagccatctttcatcgggatggaagctgctggaatccatgaaactacctacaactctatcatgaagtgtgatgtggatatcaggaaggatctctacggtaacattgtgctcagtgggggttcaaccatgttccctggtattgcagaccgcatgagcaaggagatca

SEQ ID NO: 214160 - DNA, 420 bp, Gossypium hirsutum; identical to SEQ ID NO: 196580

SEQ ID NO: 214161 - DNA, 306 bp, Gossypium hirsutum
cggacgcgtgggcggacccgtgggccgacgcgtggggtagaagcattggatgttaaaaaaacaggagaagagatgatgaaactacagaaacaagaagcacttcaattgcttaaaaagaaagagaaaactgatcatatcattaaaaaaacccaagagaaacgtcaacaaaagaagcagcagaattcagatcctaataaacctaaaaagcctgcatcttctttccttttgttcagcaaagaagccaggaaaactctggtacaagaacgacaaggaatcaacaactctacacttaatgccctgatttca

SEQ ID NO: 214162 - DNA, 326 bp, Gossypium hirsutum
ctaaaatacgccgatccccgttcgtcttccgatcatatggggctgcttgaccagttgtgggatgataccgttgcgggtccccgacccgataatggtctcggcaagctccgaaagcactccactttcactttccggcctaactctgccaaggaatcggatggcgggagtgtaagatcgtacggtgatgaagcgccggaggaagcgacgagagtgacacgtagtattatgatcgtaaaaccgcctggttaccagagcggatcgcctccggtttcgccggccggatcgacccctccggtatctcctttttccggaggcagagaatcata

SEQ ID NO: 214163 - DNA, 350 bp, Gossypium hirsutum
caggatcctgagagcaaggtggcttgcgagacctgcagcaagacaaacatggtgatggtgtttggtgagatcactaccaaagccgacgtagactacgagaagattgtgcgtgacacctgccgtggcatcggtttcacatctgacgatgtgggtctggatgccgacaactgcaaagtgctggttaacatagagcaacaaagccctgatattgcccaaggtgtccatggccatctcagtaagcgtcccgaggaaatcggtgctggtgaccagggccatatgtttggttacgccacagatgaaacccctgaactgatgcctttgacccatgttttggcaaccaggcttggtgc

SEQ ID NO: 214164 - DNA, 363 bp, Gossypium hirsutum
cccacgcgtccgcccacgcgtccgaaggacttccactcttactgtcttctttggaaccagcgccaagttgtatttctagtggatgagacaccaataagagtgcacaccaacatggaacacaaaggaattccttttcccaaagaccaagccatgggtgtttatagctcaatctggaatgctgatgattgggccacacagggtggcctagtcaagactgattggagccatgcaccatttgttgcctcctacaaaggcttcgaaatcgacgcatgcgagtgcccggtttccgtgacagtagatgagatcgccaagaaatgcagcagcagtgctgagaagaggttctggtgggacgagccgacaatg

SEQ ID NO: 214165 - DNA, 394 bp, Gossypium hirsutum
aggagtttgattttagtcagttaaatcgatcacttctgcaggatcgaaggccttctgatagggagaagcttgaggcagaattcaaacaaaaaattgatgctctagtgtcggaaattgaaagaactgctcccaatttgaaggctcttgaccaatataagactcttcaagagaaggaaagagatgtaactgaagagtttgaattagccagaaaagaggagaagcaagtagctgatgaatacaattcagttaagcagaagagatatgagttgttcatggatgctttcaaccacatttctagtaatatcgataggatttacaaacagctaacaaagagtggtacgcatccattgggtgggacagcatatttgaactttaaaaatgaggatgatccttt

SEQ ID NO: 214166 - DNA, 409 bp, Gossypium hirsutum
cggacgcgtgggtggacaacataccaaaccctctcttggacagaatggaggtcattgctattgctggttacatcgctgatgagaaaatgcacattgctagagattaccttgagaaaactgcacaagaaacatgcggtgtcaaacctgaacaggttgaggtaactgatgcagctcttcttggcttaatagaaaattactgccgagaagcaggagttaggaaccttcaaaagcacatagagaagatctatcgtaagattgctcttcgacttgtgagagaaggatcatccaatgaatttgtcattagtggagaggtagtccaacctgctgaagccaaagcagaagttgatgaaactgatcagcatgcagctccaaatgagactgctactgaatcctcagttcagacaagtga

SEQ ID NO: 214167 - DNA, 234 bp, Gossypium hirsutum
aaaaggaaagggtcatgatcgttcatcattcataataatcttctcatacacacaaacgaacaaatggagaaaatagaaaaagagtgaagtggagacaaagctattagggctggtccatttgttggagcacttgcagcacctatatatcatcagtacatccttagagcagcagctatcaaagctttgggatccttacgcagcaaccccaccaactaaaaaaaatcaacccaaata

SEQ ID NO: 214168 - DNA, 339 bp, Gossypium hirsutum
cggacgcgtgggcggacgcgtgggcagagaaccaagtgatcgaaccatcggaagtaaggacagagagtgatccttggcaagattgaagtgtcaaaatttaaataaaaattttcctgtattatctgattgctattaacaaaagaatccagaaggaaagaagagttgtgggttcggttggggaagatgaggaggttagtgataatggctgttcctatggtggattaaagtcacttatacgtgatgattttaaattttaaagcattcaagtaaagttgtcttttgagttgctgtttttcttcacttggatgataatggtggcttaaatttcgaggagttttg

SEQ ID NO: 214169 - DNA, 426 bp, Gossypium hirsutum
gctcgggtactctcatcttcagccgcagccatggtacttccccccccccccccgggtgaacgtacctaagacgaagaagacctactgcaagagcaaggagtgcaggaagcacactttgcacaaggttacacagtacaagaagtgacaaagccggatgacaaggccgaaggagatgcaaagcctgaggagcatggcatcggatcttcagagaaaaaggaggctgaaccgagcacgtgaaatcattttagctgaaacccgaaatgctgttaactatagttatgggtgatattttgctctttccctgtcatggatgggggagaggggatcaaagcctgatgtgtttttaactgcgtgagattaaaaaatttgcggaaaagatatgtgttgttgtgttaggtggaaaaacaatgttagctctttgacatg

SEQ ID NO: 214170 - DNA, 273 bp, Gossypium hirsutum
cccacgcgtccgagcaaccaaacaaaaccttccattgtcttctagaactatccaagcacactggtattaatcaatggctcgtacaaagcaaacagccaggaaatcaaccggtggaaaagctccacgtaagcaattggcgaccaaagccgcgaggaaatcagctccagccaccggaggagtgaagaagcctcaccgtttcaggccaagaacagtggcgttgagagaaatcaggaagtaccagaagagtaccgagcttttgatccgtaaactttc

SEQ ID NO: 214171 - DNA, 414 bp, Gossypium hirsutum
cgcctctcttcttcccaaaattctctctagatttcttccttaacatttatccccaaatcaagtcaagcatccattcacccttcatcttcatctccttaaatacagtaaaggttgcttctctttggctctttggacttatgcaaaaggctttccctataggttggagataaagtgcaaaagggtcaggtgttttgcatcattgaagcaatgaagttgatgaatgaaatagaaatgaaaaatcattgtttcaataagctgatcaatcaggaaccatagtcgagatccttgtagaagatggcaaagcagtcatcgttgcctctgtttgtgattgaaccttgaaataagactgtcgagtagcaaaataaaaggtgggaaggataggcaagcaagcaagtttgagttggtgggattttt

SEQ ID NO: 214172 - DNA, 398 bp, Gossypium hirsutum
ctccgttgctttatatatttatttcgtctgtgattcagcaatcccaaagtttctttttttttcaaaaaaaagaaagaaaaaaatagtctttttttttcgtactcttttattttataacataaatattgttataaatattgttaatagcctctggtgtgaaaagaaaaaaagtttgtgacgctgagatgggcccacgaaagctaagataaaattggaaatgccctttctctcatactactctttcgatacataatctaatggtttgaaaaaaaaaagaaatcaaaaaaaatatcatatcgaattcgaagtgccatgctattattacttactaattcatatttcatatggcgaaagcatagtcttcttttttctttccatcaaataaaaaaaactcattg

SEQ ID NO: 214173 - DNA, 423 bp, Gossypium hirsutum
cccacgcgtccggccacataatacgacggcaaggacacattcaggcgtaaacagtgaactccacacgtctccctggcattcgccggtgccgtacttgttcggcgggttagctgccatgttgggtcttatagcgtttgcgcttctcgtccttgcatgttcttattggaaactattgggttacaacgagaacgacggtgaagggggaacggagagagacttagaagccggagaaggtaaaggtgaagctggtcggccggctatggaaccaaaggttcttgttataatggcgggagaaaaaaagccgacgttcttggccaccccaattggttttaacgggtcgtattatttcggtgacaatagtgaaaagcgatgttgctgtagtgatcaaaagggagaggaaggcaagcaagatgagaaagaggt

SEQ ID NO: 214174 - DNA, 421 bp, Gossypium hirsutum
gttcaggcatggcttttaataagctgaccgacggcggtgcaacaactccggctggtctcgttgccgcctctctagctcacggatttgcgcttttcgtcgctgtatccgtcggcgctaacatctccggtggccatgtcaatcccgccgttacattcggtgctttcgttggcgggaacattactcttttacgtggtatcctttattggattgctcaactccttggctcaaccgtcgcttgcctgttacttaagttcgccactagtggcctgggagtaccagctttcggactatcatccggcgtgggagcattaaacgcgttcgttttcgagatcgtgatgactttcggactggtctacaccgtctacgccacagccgtcgatcctaaaagaggcaacttgggagtgatcgcaccgttggcgat

SEQ ID NO: 214175 - DNA, 427 bp, Gossypium hirsutum
tcttgcttccttgcgtatgcttcgggtatatttgagaacttatgcacttgagcaaatggtccaagctgcaagctcctctgctggacttcggaccatcaagcgggttgagcaaaccttacaagatcttggggttaatttaaagccaaaggttccaacaaaggccgtttgtgctgagcatcttgaattaagaaaagaaattctaacgttgctaaatctccagaaacagttgcaatacaaggaggcagaaggttcatctttccgtgatggttcctatggtgatatgccaggcactgcaaagcgatcacaacgtgctgctgatcaggaccgcacatttgtccccgacaccattagttttggagtaattccaggtgatagggttgtcaaaagggagcaaaaacgaaagggacctgggagaacatctgagact

SEQ ID NO: 214176 - DNA, 287 bp, Gossypium hirsutum
  unsure (1)..(287): unsure at all n locations
cccacgcgtccgcccacgcgtccgcccacgcgtccgaatggatcttccagagaagttacttcctcgcatttcaagccgaatgggtattcaaagactctgttttggtccctacaattatcagcagctacaggaaattatatcaagtcgtttgaaaggaatcgatgcgtttgaaaagcaagcagtagaatttgcttcaagaaaggtagcagccatttcaggggatgcacgccgtgccctagagatatgcangcgtgcagctgaaattgcagattataatatgaagaatc

SEQ ID NO: 214177 - DNA, 406 bp, Gossypium hirsutum
cccacgcgtccgcccacgcgtccggacattttgaggaggaatgaatatgatctggagaagtctgttgatgatctttgtggggtggctgaatgggatccgatacttgaggagctgcaggaaatgggtttctgtgatgctgaaacgaacaagaagctgctgaagaagaacaacggaagcatcaagggagttgtcatggatctgttaacaggagaaggtgcttaaattattaattatggatgatggctcgtggtttctaggcattttattatatataaataaatgagtgtgcgcatctaaaccatgtctttatgaagcagctgccttttaatttcttgtcttctgaagtatgcgggggctaaagaaacgagctgtaaacgttttgctgtttatttgaactatgaagcct

SEQ ID NO: 214178 - DNA, 385 bp, Gossypium hirsutum
aattaagtaatgttttgttgttttcattttcagatcattaatgatcgtgagactggaagatcccgaggctttggattcgttactttccgtgacgagaaagctatgagggacgcgatcgaaggaatgaacggtcaaaatcttgatggaaggaacatcaccgtcaacgaagcccaatcgcgcagaagtggaggcggtggcggaggatttggaggaggaaacggtggttacagccgcggtggaggcggcggcggatatggtggtcgccaaggaggatatggtggcggacgccgtgaaggtggatacggaaatggtggaaggtatggtggtggtgggtaccgaggtggacgccgtgaaggaggatatggtgacggcggatctcgttact

SEQ ID NO: 214179 - DNA, 420 bp, Gossypium hirsutum
cggacgcgtggggccaacgatcggtgtggaggttcaccctttggacttcttcactaactgtgggaaaatccgattctactgctgggatactgctggacaggaaaagtttggtggtcttcgagatggttactatatccatgggcaatgtgctataattatgtttgacgttactgcccgtttgacatacaagaatgttcctacctggcaccgtgatctttgcagggtgtgcgagaatattcctattgttctatgtggtaacaaggttgatgttaagaacaggcaggttaaggcaaagcaggttacattccacaggaagaagaatctgcaatactatgaaatctcagccaagagcaactacaattttgagaagcctttcttgtaccttgcccggaagcttgcaggtgatcctaatcttcactt

SEQ ID NO: 214180 - DNA, 393 bp, Gossypium hirsutum
ctggaattaccattctcccgctattttctcaagccacaccaaaagccaatttacccgaagaggatatcaaggctctcacaaagaggacacaagatggaggcactgaagttgtggaagccaaggccggaaagggttcagcaacattatcaatggcctatgctggagccatttgctgatgcttgccttaagggactgaatggcgttcctgatgtagtggagtgctcatttgtgcagtcaactgtcactgaactccctttctttgcttccaaggtgaggctcggaaagaatggtgtggaggaagttttggggttaggccctctctctgagtacgagaaagaagggttggagagcctcaaaccagaacttaaatcatctattgagaagggaatcaag

SEQ ID NO: 214181 - DNA, 421 bp, Gossypium hirsutum
tagaggtgatgctatagcaagcttgagaaaagaatgggagggtgtgaagctgatggaggaagtcgtacctttctttcagtcggtgaggttgtcacgggaagctacaacaacagaggactgtgtagctgaggtggcaaatgttgttaaagagcagctagaatcgaaagatcccatgtttgctcgtgcagctaaagccatggtggattgggtaaagctgtggaaatcagttggatctagcacatcctcaccgggggcataggattaagacatggttataatttgtgtgtttttgctttttggtttgctagaattatttctatcatacactcttccatgatggtgatattacgtggaatatctgtttgtaattgagctgcaacctgaaatggtttgcttgctagtgatattacgtggcaaaact

SEQ ID NO: 214182 - DNA, 398 bp, Gossypium hirsutum
cccggttctataccgaccggatcaaccagttggtttacggttcatgactttaaacccgggaacagttccccgaatgtaccattcaaccgccaacttgttacccgatgggcgggttttaattgcaggtagtaacccacattatttttacaaattcggtgctgaatttccgacggaattaaggctggaaacattttcacctgagtatttatccccggatcgagccaatgttcgaccggtaatcgagggaattcccgagacggtacgttatggcgaggcgttcgatgtatttgtgtcggtttcactaccggtcgtgggaatcatcgaggtcaatttcgggaacgcaccttttgctacacattcgttttcacaaggtcagagattagttaaaattaacgtta

SEQ ID NO: 214183 - DNA, 417 bp, Gossypium hirsutum
gttctttactgagggacccaaaccctgatgatccattggtgccggagattgctcacatgtacaaaaccgacaagaacaagtacgagacaactgcaaggagctggacccagaagtacgccatgggctaacgagcattgttgtgtgcaaggggaaacccccccccttttttttttcttttttcgtatattctggtttttaaaaaagggctatgcatgatgaatgtttgttctgtcatttgaatcctaaaatgacttaaaaggaggtcaacaacctggcttgagtttgaaaaaagaagaagcaattgttgctttttctaatgttgaatgaatgcataaacgtgaactttggaacaagaaaatttgtgtcctaactctgaaaatgttaacaattctccttaatcatagttatatatttgat

SEQ ID NO: 214184 - DNA, 425 bp, Gossypium hirsutum
cccacgcgtccgaaaaaagccacccaagggccagctcatttctttctttcttatttatttagttggattttttgcaccctattcatggttctgctcctgatattgctggacaggacaaggcaaacccgcttgcaacaattctcagtgctgcaatgcttttgaagtatggcctaggggaagcaaatgctgcaaacagaattgagaacgcagttctggatactcttaataggggtttccgaacaggcgacatatactccactggaaataaactagtcggctgcaaggagatgggagaggaagtactgaaatcagttgactcaccagttccaactgctatatgaataaaaaacagctgagtaccaaaacaggaggcctccatctgggttagccattgttttctcttcttttctgagttctcaaagctc

SEQ ID NO: 214185 - DNA, 377 bp, Gossypium hirsutum
gtttaatccatttggctcaccctccaagcatcaatctccacggggttcttggtcaaatccttttcgatgcatgtgttccgaagaacgttgaaggctgggatctaaagtcatcagactcctcacgcaaacacccatatacttctcggcggaattcccatttcaatccaatcaaatgcattcgaagatccaggctataaacatattctgcttttccagcttgaagaaggaatgctttgaagtggggcatagagcacaatgaaactcctaaaaggataaaaaaaagaagggggcaatgtgtgatttattaaatttctgttttgtggaacaataaaaggttaattctatgttttgagctgttagacccgtgttctaacctt

SEQ ID NO: 214186 - DNA, 343 bp, Gossypium hirsutum
  unsure (1)..(343): unsure at all n locations
gctgatttgagcagcagcagctaaagcagatcccanaatgaagtttaatatcgcaaatccgactactggttgccagaagaagctcgagatcgatgacgaccagaagcttcgggcatttttcgacaagcggatctcgcaggaggttgctggagatgctttaggcgaggaattcaagggctatgttttcaagatcatgggaggttgcgacaagcaaggattcccgatgaagcagggtgttctgactcctggtcgtgttcggctcttgcttcatagaggtaccccatgcttccgtggatatggaagacgtaatggtgagcgtagaaggaagtctgttcgtggatgc

SEQ ID NO: 214187 - DNA, 343 bp, Gossypium hirsutum
cccacgcgtccgggttcaaatgctatgggacttttccatgagtttgttaatgacaaggatgttaggttgattggtgtagaggctgctggttttggtgtggacagtggcaagcatgctgttacttttaccaaaggagaagagggagttttgcatggagctatgtcctacttattacaagatgaagatgggcaaataatcgaaccccattccattagtgcaggcttggattatcctggggttggaccagaacacagttttctgaaagacgtaaggcgagctgagtaccacagtgtcacacatgaataagcattggtagctttcaagaaattatctcgactggagg

SEQ ID NO: 214188 - DNA, 349 bp, Gossypium hirsutum
aatcaaaggaagatggacttggaaccacgggtgaagggctcgagtggggtgtcctgtttggtttcggaccagggctcactgttgagaccgtggtgcttcatagtatctctgcttaaacaaggttctaatgttcatgttggctagcccaggctgcactaccatttgctttgcatttttatttattttattttcctttttattactgaaatttgtgatttgtatggttatttgaaagagagtaaagctctcacatatggtgtttaacgcctgtagaatttatgtaccaccttatattttatggtaataataaattgccttttttttaggtgaaaaaaatgaagggcaactg

SEQ ID NO: 214189 - DNA, 302 bp, Gossypium hirsutum
cccacgcgtccgcccacgcgtccgggaagaatctgcaagcacgagggtcggatcttgtggttcggattgggaagccggagtgtgttttggttgagttagctaaagctatcggggccgacgctgtctatgctcatagagaagtttctcatgatgaggttaaggctgaggaaaagattgagtcggccatgaaagaagagggtgttgaagttaagtacttttggggaagtactttgttccatgttgatgatttgccgtttaaattggaagatatgccttccaattatggtggatttagggataaa

SEQ ID NO: 214190 - DNA, 424 bp, Gossypium hirsutum
ctttttcttttttttctttatattttctcttccactaatactaataacccccaaagctaaaacctttgagcttctctttcatggcgtcctcaagggaaggtcactacagaggtgtaaggaagagaccgtggggaagatacgcagctgaaatacgtgatccatggaagaaaacaagggtttggttaggtacattcgacacacccgaagaagctgcactcgcttacgacggagcagctaggtccctccgtggtgccaaagctaaaaccaacttccccacaccgtcttcctcttcttctccgccgccggctctttctcttgatcttaatctcgcttctcataatccccatcgttgggctttagcttcacctcatcaccatcaccgttttgccgccgtcggtgatttccttcaagctggtggtattaa

SEQ ID NO: 214191 - DNA, 401 bp, Gossypium hirsutum
cccacgcgtccgcacagaagtggtagggatttggtcaacatggctaagaagcgaacgaatgttatacctatcattgaagatgctaggcatcctgctaaatacaggatgctagttggcatggtggatgtgatattttctgatgttgcgcagcctgatcaggcaagaattctggctttgaatgcatcatatttcctgaaggctggaggtcattttgttatttcaatcaaggcaaactgcattgactcaacggtccctgctgaggctgtattccagagtgaagttaagaaattgcaacaggagcagttcaagcctttcgaacaagtcactctcgaaccatttgagcgtgaccatgcatgtgttgttggcggctaccgcatgccaaagaaacagaaagctggtgc

SEQ ID NO: 214192 - DNA, 422 bp, Gossypium hirsutum
acctagtatgccagtatggtggagatggtactattggatttgtccagtatcttggaccttgtatggattgcttgtttcacaatttggagatataaacgaattgcttgaagatggaaacaatgagacagtgaagcagcacttgagaaattattatggtttcaggcatgattacctgggatttgttgctgctgtgattattagtttcgcagttctctttggaacaatctttgctgtggccataaagatgttaaatttccagagacgatagaatttttttgttttattcttataaaatcaatgctatttgaattttatgcatttattacaaggtccaaattctgtcattgtaataaaaggttttttcttgtatgcaactatgaaccaatgtacacctttttagatataaaaagtttatggtttga

SEQ ID NO: 214193 - DNA, 411 bp, Gossypium hirsutum
cccacgcgtccgggaaccctgggtagggagctgctgagcgaaagcaagctgaacgatcttctgcatggatcagaatatgttctcacttatgaggataaagatggtgattggatgcttgtgggtgatgtcccatgggagatgtttactgatacctgcaaaaggctgaggatcatgaaaagctctgatgctattggactcgctccgagggccatggaaaaatgcaggaaccggaactagctaccatcatacatgatcttttcccacacaccgaagattattatttctgaaagagatgacatgatgctggagtgggtaggagatcatcatgtaagcctgtttttgttctactgaaaaaagtcgtatccagtgcgtaaggctactgctataagcaagaactagaaattcccattg

SEQ ID NO: 214194 - DNA, 418 bp, Gossypium hirsutum
ctaaccctaaccctacttgccggttcgaatctcccattcaccatcatcccttttagccattctccccatttcatactgtgattataattatgccatgcgaagcttcatttcttgcatattgtgccagatccacacgaagaatctgaatatttatcattgtattttatgatcgggttaaattcgtggattttgatcggcgggttcatctcagtgggcatctgattgggtggtgacgatgtcaaacttatatggcgattataatcaaaggattgattatgtattcaaagtggttttgattggggattcagcagttgggaaatctcagctgcttgctcgtttcgccaggaacgaattcagtgtggattcaaaagccacaattggtgttgaattccagactaaaacccttgtaattgataac

SEQ ID NO: 214195 - DNA, 420 bp, Gossypium hirsutum
aaggacttatttttgtggttgatagcaacgatcgtgatcgtgtggttgaagctagagatgagttgcacaggatgttgaatgaggatgagctgagggatgctgtgctgctagtattcgcaaacaagcaagatcttccaaatgctatgaatgctgctgagattactgacaagcttggccttcattcactccgccagcgccattggtatatccagagcacatgtgctacttccggtgaaggactgtacgaggggctggactggctctcaaacaacattgcaaacaaggcataggtgtgacatgactgagttggcagtcttacaacccttttggattttatgaatgtctgcccccgttttatgtgttattttttatggtttttcacgtttgttgcaaacactgccatttgttacttatagttta

SEQ ID NO: 214196 - DNA, 394 bp, Gossypium hirsutum
gaccgctttaacttgtataggatcgaacaagaacttgggactgaaattaagcaaatccctccacatatcgaccaggctatttactgccggtgatttttgtgggatgtttccttagcctactatggtaacaacggttaatgatgctggtctttcaaggtctcggtccctagtcatgggtgtgcattctaaaaactcaggtgttgttataagacttttagtttgtgctgtttatgcattaacgttagccaggattgtaggaaagaagtttagataagtcctgctttcctttcttttatatttcttttattaacaaatggtttcctgtcgcctacttcgatgctattccaatcatccgaacatcgtggaatggttttaaagttgtaccttgtgcaag

SEQ ID NO: 214197 - DNA, 427 bp, Gossypium hirsutum
caaggcttaaggagcacatgcaatattgtatgaaccatccagaagaaatgagtaagctctcgaagttaaaagctcaaatcactgaggtgaaggggattatgatggataacattgagaaggttttggatcgcggggagaagattgaacttctagtggacaaaactgagaacttacaattccaggctgatagcttccagaggcaagggcggcaactgcggcggaggatgtggctgcagaatctgcaaatgaaactgatggtagggggagctattcttgtgttgattatccttttgtgggtttttgcgtgtggaggtttcaaatgttaacgttgataaccattgcattgcattgcctatgttttcttttatatatacaaaaaataataattctacatttgtttagatgtacaaaatataattatgctctt

SEQ ID NO: 214198 - DNA, 413 bp, Gossypium hirsutum
gttacaacaaggcaacaggttttggtggcacggggatttacttgaagctgcctggtcttacacaaacccggatagtaaattcatacctagattacactgggattgtggctgaagacccagtgcaacttcatatctctagcagttttttcctcggtgatgcatttatcctcttgaaatcaataaatggggtagcaaatggagtgactatagtggataacatgttcagtggatctaataagggggttgatatagttcagttagagggtcctttcacacaaattgatcaggttgtagttgataggaatagtgccaaggggatgaacattaaagcaacagttgcgagagggtctgttgaaaggaatagcagctcctggacggttgatttaatcctgttcttttatttcctaacctga

SEQ ID NO: 214199 - DNA, 419 bp, Gossypium hirsutum
cgatggttttgagaaaagccttctgctttttaagcaaaagaaggaattgtacccaattttgcaaggggtcttggatgtgaattcaacaggcccaatcccggacctggaaaaacagcgactttttgctctggattctccaacacttgactatgctgtagtccaatgccaggctctgttttggcacccacgagggagttgcacaacagattgagaagtcatgcgagcacttggtgattaccttggtgttaaggtccatgcttgtgttggtggaacaagtgttcgtgaggatcagcgcattcttcaaagtggtgttcatgttgttgttggtactcctggtcgtgtctttgacatgttgagaaggcagtcacttcgtccagattatatcaagatgtttgtcttggatgaggctgatgagatgc

SEQ ID NO: 214200 - DNA, 430 bp, Gossypium hirsutum
gacatattgtcgggttttgtcctgtcaagcattgtaaaaccaatacctgctgtcactgaatttacagcccagctgcagattcttgagttgcttgagaatgctatttttacagctggctataaggctgtcttgcatgttcattccgttgttgaggaatgcgagatagttgaactattacagcaaattgatccaaaaacaaggaaacccatgaaaaagaaagttctttttgtgaagaatggtgctgttgttgtatgtcgtgttcaagttaacaactcaatttgtgttgagaagttctcagattttcctcaacttgggatgttcactcttcgtacagaaggaaaaaccattgcagtgggaaaagtcactgatcttcctgttgcttaaaacaattttgttcttagaggcgagaatataaaggtacaaactcgta

SEQ ID NO: 214201 - DNA, 418 bp, Gossypium hirsutum
  unsure (1)..(418): unsure at all n locations
cccacgcgtccggttttggagtggatttagctggttggttggtatgacactcatcattgctttgctatctgagtatgtggtgggcacaattgaggctgcatcagaaacatggggcatttccattagcttcatcagcataattttgatacccattgttgggaatgcagctgaacatgctggagctatcattttcgcctttaaaaacaaactggacatatctttgggtgttgctttgggttctgcaactcaaatctccatgtttgctgttccattatgtgttgtggttgggtggattatgagaatcaaaatggaccttgatttcaatcttctcgaaactggttgtcttgctttaacaatacctngttgttgcctttacgctacaggatggaacttcacattacatgaaaggagtggtact

SEQ ID NO: 214202 - DNA, 426 bp, Gossypium hirsutum
ggcctgttggtcaaagagccacagcataggttggcgtacaagcgaggagcaacagagattaagcaacatcctttctttgaaggtgtaaactgggctttaatccgttgtgcaagtccaccggagattccaaaaccggttgagatagaacggattcgaacccctacctcatcagctggtgataaaccttctgttcctgctactaaggatcagagtaactatcttgaattcgatttcttttaattattttctgaaccatttttctttttcttatttcgagggaatgtaagagttcatgatgatgtgcaaattagagtttctagaaatgataatgatcatatatgcttgattgtcttaattttcaaatttgtattttgcataagtgaaaacatcatttgattttgcatattgaaaggctatgggcttggt

SEQ ID NO: 214203 - DNA, 391 bp, Gossypium hirsutum
ggagagcagtccctaggaacaattaaaaagaaccgaaaaaaaaaacacagattaagacagaagcatggccagccagctcgtaggaacaaagagagcttgtgtcgtgggtggcagcggattcgttgcctcattgctggtcaagttgttgctcgagaagggttacgccgttaacactacagtcagggaccctgacaaccagaagaagatctctcaccttgtaacactacaagagttgggagacttgaagatctttcaggcggatttaactgatgaagggagctttgatgcccctattgctggttgtgaccttgtcttccatgttgcgacacccgttaactttgcttctgaagatccagagaatgacatgatcaaaccagcgactcaaggagtg

SEQ ID NO: 214204 - DNA, 322 bp, Gossypium hirsutum
  unsure (1)..(322): unsure at all n locations
ctggaattgctttgaatgaaaactttgttaagcttgtgacttggtatgaacaacgaatggggttacaggttcccgtgttatcgacttgatccgacacatgtctaaggcttaagtgagtgagtgattgtgcttggtgtatccaagctntagcaattttaatttagaagagatgttatgagagaataaacgaattgtacggagcatatttttgtgtgaagaagggttgtttcagttttattacccaagtacttgaatgtttcaagtttcattgcagttgtttttctactttaatgcatacgtggtgattattggttctctactt

SEQ ID NO: 214205 - DNA, 405 bp, Gossypium hirsutum
cccacgcgtccggcaagcccaaactgcgattacaaacttctgtgggggaaaacatggcgggagcagctgaaccacaaaaacgccagagcgggagaccgttcccaccatcggcgagaggtccgcctcctcctcctcgccctcgctttgaacctgttgatcgcgaaaagacttgtcctctattgcttcgcgttttcactaagattggtggtcatcattctaaagaagattttgcagtgagaggcaaggaacccaaggatgaggttcagatttatacatggaaggatgctacgcttcgtgagttgactgatctggtgaaagaggtagctccagcagcaaggagaagagatgcaaggctgtcctttgcatttgtatatcctgacaagaatggacgttttgtggtgagag

SEQ ID NO: 214206 - DNA, 432 bp, Gossypium hirsutum
cggacgcgtggggtgtctttgcagagtatcgggtagtcctttcaatcctcagccatggcggaacagacggagaaagcatttctcaaacaacccaaggtgtttttaagctctaaaaaaaatgggaaaggaaagagacctggaaagggcgggaatcgcttctggaaaagcattgggttaggctttaagacacccagagaggccattgaaggaacatatattgataagaaatgcccatttactggcactgtttctattagaggccgtatccttgccggtacttgccatagtgcaaaaatggtaaggactattatcgtccgaaggaactaccttcactacatcaagaaataccaaagatacgagaaaaggcacagcaatatcccagctcatatatccccctgctttcgtgttaaagaaggagatcatgttataatc

SEQ ID NO: 214207 - DNA, 318 bp, Gossypium hirsutum
catccgggtcctccacttacagcccggttacttgcgaatcaaaacagtgctcttctcttgaagtttccgcttgccgtagcgggaaatgcctataccaagtctcgtacggtgatggatcttacacggtgggtgatttcgttaccgagacagtgtcgtttggaaactccggtaacatgaatggagtggctttgggttgtggccatgataatgaaagcttgtttgttggagcggcggggttgcttggactcgggggtggacccttgtctttaacatcccaaattaaagcgacatcgttctcttactgcttagtggatcgtg

SEQ ID NO: 214208 - DNA, 357 bp, Gossypium hirsutum
atcttcaaaagcagttgtttggtcaattgggtcaaagccaaaatcagagaagaaggcaaattcggggacttgggtacaagtttacagtaacggggatgtgtacgagggtgaatttcacaaggggaaatgttcagggagtggggtttattattaccatatgaaagggaggtatgaaggggattgggttgatgggagatatgatggttatggtgtggaaacatgggcaaaagggagccgatatcgcggtcaatataggcagggattaaggcatggaattggggtgtataggttttatactggtgatgtttatgctggtgaatggtctaatgggcagtgccattgatgtggagttcatgc

SEQ ID NO: 214209 - DNA, 366 bp, Gossypium hirsutum
ctttgtctcaatttcactgaattttcttaccgacttctctgcattttccctcttctctcccttcacattggaggaactgaaccaaaagccaagaagcagtaggattgaacaaaggaatagaaaatatgcactctttcgggcacagattaaatggtctcttaaccttttccgtgacgatactggcaataatgtgtgctatcgcgtctctctcggacaaccttaatactccttctcccacggcagaaatcaagattatgaacataaactggttccagaagcagccgcagggtaatgacgaggtcagcctgacaatgaatatatcggctgatttgcagtcattgttcacatggaaacacaaaacagctt

SEQ ID NO: 214210 - DNA, 398 bp, Gossypium hirsutum
gctgagtttaagcatatcaataagcggaggaaaagaaacttaccaggattcccctagtaacggcgagcgaaccgggaaaagcccagcttgagaatcggtcgccatcggcgtccgaattgtagtctggagaagcgtcctcagcgacggaccgggcccaagtcccctggaaaggggcgccggagagggtgagagccccgtcgtgcccggaccctgtcgcaccaagaggcgctttctacgagtcgggttgtttgggaatgcagccctaatcgggcggtaaattccgtccaaggctaaatacgggcgaaagaccgatagcgaacaagtaccgggagggaaagagaaaactaattggggggactggattatgagggcctgtattttcttattggcattcttta

SEQ ID NO: 214211 - DNA, 321 bp, Gossypium hirsutum
  unsure (1)..(321): unsure at all n locations
cccacgcgtccggcatatcctcaagccagactcgacgcttgctactgcaagcaatgcagaggatggtgagccaggacctgttgctgcaattcggttgccaatgcttcgaatttgcaattttaaagggggaactcctgagcaagtccagacatacttttccatattggtatgtgttcttccgaatgaccaacgaagatcgtggtgcaacccagaactagaaatagtaaggtggntgccgatcangtgggccgtgcaatctctcatgccgcagttctcgaagaatctcactcatganggataactagccgagcaaatcgggcg

SEQ ID NO: 214212 - DNA, 385 bp, Gossypium hirsutum
cggacgcgtgggttctaggggcattagtaagtgggaagactgtagatctcctcggtcgtaaaggcaccatgtgggttttgtacatattctacatagtgggatggcttgcaatagcatttgcaaaggttccttggttgcttgatgtaagaagattattgctgggattcagcaatggaattgctggttatttgttgccagtatatcttgctgagataacaccgaaaaaccttaggggaagatttactgctggagtacagatgatggctatcttaggcctttcaacgatgtatatagttggtcctttcatcaattggcgcatcttggctctaatcggtataattccgagtcttgtacaactccctcttctaatctacattccagagtc

SEQ ID NO: 214213 - DNA, 395 bp, Gossypium hirsutum
ccacgcgtccgctcgtctgcaagatcggtgccgtcggtggtggtcgcgtttccatgcgtagaaccgtcaaaagtgctccaaccagcatctggtatggccctgaccgcccaaagtacttgggtccattctctgaccaaatcccatcatacctgaccggtgaattccctggggactacgggtgggatactgctggattatcagctgacccagagacatttgccaagaaccgtgagcttgaggtgatccactgtaggtgggctatgcttggtgcccttggctgtgttttccctgaaattctttcaaagaatggtgtcaagttcggagaggcggtttggttcaaggctggttcccaaatcttctccgagggtggccttgactatctcggcaacccaaac

SEQ ID NO: 214214 - DNA, 390 bp, Gossypium hirsutum
cccacgcgtccgcccacgcgtccggtgaacaacatggtgttgtttgaccaggctacttatgataagcttttatctgaggctcctaaatataagctcatcactccctcaattttgtctgatcgtatgaggattaatggatcccttgctaggaaggctataagggaattgatggcaagaggatcgattcgtttggtgtctgcccattcaagccagcagatttacactagggcaaccaacacctagatgttttgttatagttttgcttaaattagttctatgtagtatttgcctttcttgactttctgtgaacgatttttccttttgctaaagacctccatctataatgtgtgagctacagtttcttggtggtctggtttaatggataatttt

SEQ ID NO: 214215 - DNA, 392 bp, Gossypium hirsutum
cggacgcgtgggtttgaacaaggagctggttctggatatggacaagttcatcacacactctgtgccttttgccgatattaacaaggcattcgactacatgctccagggtataggtctgagatgcatgattcatttggatgcttaaggaaatgttgctgctgtatatttgcccatccaaggatcaaaactctaatgttttgtcctactatgtgttatattatgtgcctacttaagctacctttcccggttatcaagagtgcctatatagaactctctctctctcaaaaaaaaaaaaaagagaaaagagttctttatatggaagtttatattatatgctgagagaataaattatcttgtaaaagcttgcttttgtaatgaaataaatttctatt

SEQ ID NO: 214216 - DNA, 398 bp, Gossypium hirsutum
ctgtagccgccgcctgcgtctctctcttcatctctctgaaccaaaaagtctttagcttttcgcttcgagagagaccatgttggtttaccaggatctcatctccggtgacgagcttctttctgactcattcccctacaaggaaatcgagaatgggatgctgtgggaagttgagggaaagtgggttgtgcaaggagctgtcgatgttgacattggtgccaatccttcagccgaaggtgctgatgaggatgaaggtgttgatgaccaagctgggaagggtggtgacattggtgacactttcaggcttcaggagccaccccctttcgacaagaagcagtttggcgtgttcatcaagaagttcatcaagaacttgacacccaaactggatgccgaaaagcaag

SEQ ID NO: 214217 - DNA, 403 bp, Gossypium hirsutum
cccacgcgtccgagaaaatatctcaaatctcctcctcctcctcggaaatcttagtatcatcaccatggcctcaaatcccaaggtcttctttgacatgactatcggtggtcagcccgctggtcggattgtgatggagcttttcgcagattgcactcctcgcactgctgagaacttccgtgccctctgtaccggcgagaaaggcgtcggccgcagcggtaagcccctccactacaaaggctcctctttccatcgtgtgatccctaactttatgtgccaaggaggtgacttcaccgccggaaacgggaccggaggggaatccatctacggatcccaggtcgcttaccagaacttcatcaagaagcacactggtcccggtattcttttaatggcttacgcttgtccc

SEQ ID NO: 214218 - DNA, 256 bp, Gossypium hirsutum
gtaaaagcgaaaccctagccactctctgctcaactcgccaatgggggcttataagtacgtgtcggagctatggaggaagaagcagtcggatgtgatgaggtttttacagagggtgaggtgctgggaataccgccagcatccgtcaattgttagggtcaaccatcctactcgccctgacaaggcacgccgcttgggttataaggccaaacaaggttatgtggtttaccgtgtccgtgttaggaagggtggtcgcaag

SEQ ID NO: 214219 - DNA, 390 bp, Gossypium hirsutum
cccacgcgtccggatgagcattaacgagatactgagggaactaaacatgaagtttgaagcagccagtggtgcaaccatggtgataacagactggaggcggttgggtctagtggaagacatagattttggatggaaaggatgtgtgaacatgataccattgccgtggaacatgtttgggtacgtggatttggtgtttttattgcctccttgcaaactggaccaatcaatgaaaggcggagctagggtgttggtttccctacctagggctgctattgccaaattcagggaagaaatggatgctctcaagcatggtgacgatgctgctggccattagttgaacttgtctaccgatgtatgcatatgttgttttaacattttaagtagataatg

SEQ ID NO: 214220 - DNA, 385 bp, Gossypium hirsutum
atcccgtaacaggctcttgatatttgcacgtctcagtcagtaataagaagcttataattcatctatggcagccgacggtaacaagagaaagaggcccaacatattggtgacgggcacgcctggaactggcaagacgacgacctcttctgctttggcggaggccaccaatctgcgccacatcaatattggtgatttggtcaaagagaagaacttgcacgacggctgggacgatgatctccagtgccacattatcaatgaagacctcgtgtgtgatgagcttgaggatgtgatggaagaaggtggaaacattgtagattatcatggttgggatttctttcccgaaagaagggttgatctttgtgtagtacttcaaactgacaacacc

SEQ ID NO: 214221 - DNA, 354 bp, Gossypium hirsutum
cccacgcgtccggcgggttccgaaaattccagcattactgatagggtgttggatagggttttttctaatgctgggactggttttgtatctgttgttgttggtagctttgctaggaatctggttttggggttttactcaagtgttggagaagtggagggtttgagtgggaataatgggtcatctgatgtacccaaatggattaatgtgctttatgatgataagtctaaagagctaattgcttgttggcattaaagattaataagcacaagttgtgcagtctatcttgacaagacaatggacattaatacttattatgaaatttttgctgggatgaccaatcccaagccataaaaa

SEQ ID NO: 214222 - DNA, 400 bp, Gossypium hirsutum
cccacgcgtccgcttcaaaggatgatatcactcgtctacacagctctatctggggccccatcgtctagctatctgaatgtttctcgatggtacaaacacatcgatgcccttttgaggatctcaggtgtttctgaagaaggctgtggtgtgactgttgagggatttgctcccgctgaggctgtggccactcctccaactgcagattcaaaggctgcagctgctgaagatgacgacgatgatgatgtagacttgtttggtgaagagactgaggaggaaaagaaggcagctgaagaacgtgcagctgcagttaaggcctcttccaagaagaaagaatccggaaagtcctcggtattattggatattaagccatgggacgatgagacagacatgaaaaagcttg

SEQ ID NO: 214223 - DNA, 291 bp, Gossypium hirsutum
cccacgcgtccggctctaactgcggtaaatgttgccctaaggataagtcaatcaagaggtttcttgtgaggaacatcgtggagcaagctgctgtcagggatgtccaggaagcctgcgtctatgacacgtacactctgcccaagctgtatgtgaagatgcaatactgtgtttcatgtgcgatccattcccacgttgtgagggtccgatcccgcactgacaggaggaaacgtgacccgcctcagcgcttcattagacgccaggatgatatgccaaagcccggtcaacctggtc

SEQ ID NO: 214224 - DNA, 393 bp, Gossypium hirsutum
cggacgcgtgggttttgttgctacccaggatgctgatctccgaaagaaactacagaaggtacctaatgttcctttaatatttggcctacgaaatgcccttttccttgagcaaccatctaagtctcagcgtgattttgtcaaatcttctgaagaaaaacgccttcatttgactgagaaggaatataaggcattagagaagaggacgactagtgtttcagcaaatgcggatgaagaagattcaggtgatgaagaaggtttgggtcatcacaatccagggttgcaggcacatgataccaggaattattcagggaaggaaagagatgtaaaggatagagttcgatttaaaagaaagaaagctaagggtccaaatccgctttcagttaagaagaaaaa

SEQ ID NO: 214225 - DNA, 391 bp, Gossypium hirsutum
ctggaattggctgggaacgctgcacgtgacaacaagaaaaacaggatcatcccaaggcacgttctacttgccgtgaggaacgacgaagaattagggaagcttctcgccggcgtaacaatcgctcacggtggtgtgttgccgaacatcaacccagttcttttgccgaagaagactgaaaaggccgccggcaaagaacccaaatctccatcaaaggccaccaagtctcctaagaaagcttaatttgttttaaaaaagactagatccacagggctttatttttcttagttgtatgtccttttggggggattgttttcatagtgtaggggaagaatgctgtaagcaaattggaggaattggtagaatgttatcatgatgtatgttactttaatgg

SEQ ID NO: 214226 - DNA, 366 bp, Gossypium hirsutum
ttgtacgcgtgggcggacgcgtgggcggacgcgtgggcggacgcgtgggcggacgcgtggggccgttcgatctcctgggttcacgcttggactgttcgtgatgggataatcacccaagtgagggagtattttaacacttctcttaccgttactcgccttagagactctccaccgtcagcttgcagttcttcgacggcggggattgcgccagtggattgcccttaaggttgggagaggtgtcttttcaaccgggtggggaaatcgggtccaggtcttggtcttgcaatttaattttcttctcccacgtgtggctaagataacaaatggtagttccatgagttgagtttgggctggtggtaaaaatta

SEQ ID NO: 214227 - DNA, 348 bp, Gossypium hirsutum
gcatattttcatatcaaattgttctacaaatggctcgtaccaagcaaactgctaggaaatcaaccggcggcaaggcgccacgtaagcagctagccacgaaggccgctcgaaaatcagctccggcgactggaggagtgaagaagcctcatcgtttcaggccaggaactgtggctcttagggaaatcaggaagtaccagaaaagcactgagctcttgatcagaaagcttccattccagaggcttgtgagaaaaaatcgctcaagaatttaaaaactgcctggaggttcaaaaccacgcttgtggttctttttaagaagccggtgaagcttattttgtccgactatttgag

SEQ ID NO: 214228 - DNA, 360 bp, Gossypium hirsutum
cccacgcgtccgcccacgcgtccggatgagtgtaagaaatcaagggaagatgggcttcagaccacaggagaagggttggagtggggagtgctctttgggtttggacctggcctcactgttgagactgttgtgctccatagtgttgctgcttaaagttaaacaaacatgctttttaagtaattggtcgtgctccacttggcttgcagttttatcttcttcttttttcctttctagattatttaaatcccatgaatttgtgtgtttattgttaaagactagaggtctttgatggtgtgggcgggaagcttaacgcctattcaattcatgtatcaacttatattaaatgtatggcaatcataa

SEQ ID NO: 214229 - DNA, 394 bp, Gossypium hirsutum
cccacgcgtccgcccacgcgtccgctttcattgctcttcttctccaccgccatgtctcacttcggaaggtcagggccgcccgacattagcgatacttactctcttctcatcctcaacatcacctttcgcaccagtgctgatgatttgtttccgctcttcgacaagtacggcaaggtggtcgacatcttcattcccaaagatcgaaggaccggtgattctcgaggttttgcatttgttcgctacaagtatgcggatgaggcacaaaaagctgtggataggctcgatgggagaagtggtgattgtcgggaaataacaagtcaatttgcaaaatatgggcctaatgccaagaggattcacaaagggaggataggtggatcaacaccaagaacggggc

SEQ ID NO: 214230 - DNA, 344 bp, Gossypium hirsutum
taagagatgacagacagttccacttggattatcctggggcgtgtactatttctacagaacagggtcttgaactgaagaagcaaataggagcactggcatacatagagtgcagctcaaagacacagcagaatgttaaagctgtatttgatgctgctatcaaggttgttcttcagcctgcaaagaaaaagaagcaaaagaagagaacaggtatatgccttgttctctaaccagaaattcccaagtagaaaagccagtgtgaagctgacaatgtgattctcttcttataattctgtgcattcttgatcttgtttattacaaatctttttcgagttgattttgagtgc

SEQ ID NO: 214231 - DNA, 281 bp, Gossypium hirsutum
taggactactgcggaacagacagcactatgaaatgggtcaagtggaaaattggctagaggttgaggcacacaatttcaacccaccaatttacgccttgaccctacatttgatgtttgcttccaagatggggttccctcctgatgaaaatttgatcaaggaaagcgaggaaaagctaggcaaagttctggatatttatgaggagaggctgtcaaagaacaagtacttggccggtgatttcttcagccttgctgatctgagccacctaccatttactcagtac

SEQ ID NO: 214232 - DNA, 395 bp, Gossypium hirsutum
ttagtggtgggggaaaagagcagagaagaataaacaaagatgagcagcatcggaactggctacgatctctctgtcaccactttctctcccgacggacgcgttttccagatcgagtacgccgccaaagccgtcgataacagcggaactgtgattggaattaaatgcaaagatgggatcgttatgggagtggagaagctgatagcatcaaagatgatgttacctggttctaatcgtagaatccactcgggtcatcgtcatttccgcctgggcggtggttgattaaccacttgccggaaaacaaatggggcccgggccaaatctgaagctactaattaccaaagtgggtatgggggacccattcctggcaaaaaacttgctgaacgtggtgcaaggta

SEQ ID NO: 214233 - DNA, 423 bp, Gossypium hirsutum
cccacgcgtccgggactggcaaggtgctccagcaagcccaagttcatacactgtgaagaggattttgcgtcttgaaattcctgttgatacatatccaacagtaagccttatatgaaaaatgctagtgctttggattaaaaaatttattattttctaagatttcaattgaatgcacaaacctttttatgcttattgattacaagactctgcttttcctttgtttttagttcaattttgttggtcgacttctaggccctagaggcaattcattaaagcgggtagaagctactactggctgtcgtgtatacattagaggcaaaggatcaataaaggatccggacaaggaagagaagctgagaggtcggcctggagatgagcacctgaatgatcctctccacattttgattgaggctgatttacctg

SEQ ID NO: 214234 - DNA, 393 bp, Gossypium hirsutum
gttcttttacaggatggcgacatggcaagtgcgggagggttattcattttggatgagatgaggaagaaatcaagggaagatggacttcagacaacaggagaaggactggagtggggagtgctctttgggttcggacctggcctcactgttgagactgttgtgctccatagtgttgctgcttaaagttaaacaaacatgccttttaagtaattgggcgtgctccacttggcttgcaggtttatcttcttcttttttccttttttagattatttaaatcctatgaatttgtgtgtttattgttaaagactagaacactttgatggtgtgggcgggaagcttaacgcctattcaattcatgtaccaacttatattaaatttatggcaataataagt

SEQ ID NO: 214235 - DNA, 419 bp, Gossypium hirsutum
ccaacctccgctctgttcagcccgtgatcttttgatctttctccatggctaccatttccaagctcgctaaccccaacccagtcgcttctctttcattatctttcaaacccagatcttcttcatcgcttaaatgcttcgttgggttccctaccaggcctgctttcagctctaagctggtttcatcttctagcttgtcctcgataaacacccaccctttcaggggctccttggttgtcaggtgttctcttgctgatggaaacggtagttcagtgaagacgactactttgcatgatctgtatgaaaagaagggcagagtccatggtatgacaacctttgcaggccagtgaccgatttgctgccactgattgcaagtggggttagaggtgtaactagcaacccagcgattttccagaaagctt

SEQ ID NO: 214236 - DNA, 381 bp, Gossypium hirsutum
  unsure (1)..(381): unsure at all n locations
gtgaaccccagaagatttgaagaagctaagaggtttgggattacagaatttgtgaatccaaaagactacgataagccagttcaagaggtgattgtggagatgaccggcggaggagtggatcgcagtgtggagtgtacagggagcgtccaagccatgatttccgcttttgaatgcgtccatgatggttggggtgtttgtgtgctggtgggtgtgccaaagaaagacgatgcattcaaaactcatccaatgaatctactaagtgagaggacccttaagggtgctttttatggcaactataaaccacgcactgatattcccatggttgtcgacaaatatttgaacaaggagctgnngcttgatatggacaagttcatcacacac

SEQ ID NO: 214237 - DNA, 350 bp, Gossypium hirsutum
ctccggcggcggttgtcacggtagtgttgaaggtttacatgcattgtgaagcttgtgcaatggaaatcaggaaacgtattcaaagaatgaaaggggtggaatcagctgaaccggatctaaagagctcagaggtgacagtgaaaggagtgtttgaaccgccaaaactggtggagtacgtctacagaagaaccgggaagacggcggtgatagtgaaactagaggcggagacaccgaagacggaagaagaaaaagccaaagatgccaacaaggacgagaaaaaaagtgaagaaagtggcgaaaaagacaagaaagaagccggtggagaagaaaaagacgacggtgaagacaag

SEQ ID NO: 214238 - DNA, 391 bp, Gossypium hirsutum
atgctattgaggccatcaagctgggttcaactgcaattgggttgaagacaaaagaaggtgtcgttctggctgttgagaagcgtattacttcaccactgttggaacccagcagcgttgagaagattatggaaattgatgagcatataggatgtgctatgagtgggttgattgctgatgcccgtacacttgttgaacatgcacgagttgagactcagaaccacagattctcatatggtgagccaatgacagtagaatccacaacacaagctctttgtgatctggcccttcgatttggtgaaggagatgaagaatcgatgtcccgaccgcttggtgtatcacttctcattgctggtcatgatgagaacgggcctagcttatctatactgatcca

SEQ ID NO: 214239 - DNA, 415 bp, Gossypium hirsutum
cggaagtatcgagagtctctcacggagggcttctacatttcaagatggaatgaaccaggacgagcggaggctgatttcggacgattcgatgctaaaaccgttgtgaggaacatctacatactgttctcgagaagtgaaataccaatcgcagatgaaaaacaggaggtcatggatatggtggatgcttctgttcctcttccaccttggttcaccgaggaagatctcgcaacatacggagctttatatgagaaatccggattcaagactgcattacaagttccatataggtcattcgatgaagactttgggataacagatccaatagttaaagttccggcattactgataatgggttgcaaagattatgtcttgaaatttcctgggatggaagaatacataaagtttgggaaggcaa

SEQ ID NO: 214240 - DNA, 394 bp, Gossypium hirsutum
cccacgcgtccgcgcggttttcatttcccctccgcaagtagccagccgtttcacacactcaagaagagagagagctcgtaaatcatggcggaacagaccgaaaaagcttttttgaagcaacccaaagtgtttttgagctcgaagaaaggtgggaaagggaagagaccaggaaagggtgggaatcgcttctggaaaagcattggattgggcttcaagactccccgtgaagctattgaaggaacctacatcgataagaaatgcccgttcactggcatggtttcaatccggggtcgtatcttagccggtacttgccatagtgccaagatggtcaggacaatcattgttcgacggaactaccttcattatatcaagaaataccaaaggtacgagaagc

SEQ ID NO: 214241 - DNA, 319 bp, Gossypium hirsutum
attcagaccgctgttaggctcgttcttccttttgagcttgcgaaacacgccgtctctgaaggtaccaaggcggtgactaagtttactagctcttgaatttaatgaaatttggggattttaggtttagcgttttttatggaggttcctttttgaaattgcgttgatgtatgtaactccttgttactgatggttttgaaattgttggaaccatgaaatgaaagtgtatccttttgtctatgttaaggaatcgaaatgtttctttgtttaaaaaaaaaagcgtattccgcataactaaataaagactccgcctaattcttcc

SEQ ID NO: 214242 - DNA, 421 bp, Gossypium hirsutum
  unsure (1)..(421): unsure at all n locations
cggacgcgtgggcgattataagagaaatagcggtaagcttcctcaactggtcccagatcaagttctcaagttaaagcaacttactgtccttacacttgccgagacaaaaaagggtctagttagaggaaagctggatcagctgcgaagatattttgaggttcaatttgctgctgggagggatttgaggccaggacaacttggaagtatgatacaaacactatcaaactggttggctacgtcagataacttacttgtcacaattcaagacaagataaaatgggctgatacaatgagtgagttggacaagaaacaccgaaaggagcttgaagatagggtgatggaagtaaggaaagctgtctccgtcaagtatgactcggccattctagggtccattgagaaactcanaccacccagaggggag

SEQ ID NO: 214243 - DNA, 415 bp, Gossypium hirsutum
gaagaagaaaaagggaaagataattaatatatcatcagttgttggtctggttggcaacatcgggcaagctaactacagtgctgctaaagcaggtgttattggtttgacaaagactgttgcaagggaatatgccagcagaaacattaatgtcaatgctgttgccccaggatttattgcatctgatatgacagccaagcttggggaagacctcgagaagagaatcttggaaacaattcccttaggaaggtatggtcaaccagaagaagttgcaggactggtcgaatttttggccataaaccctgcgtctaattacatcactggacaggtgttcaccattgatggaggaatggtcatgtaaaattgcattaccgtcactcgataagctgctatatcgccactagaaattcgttagttt

SEQ ID NO: 214244 - DNA, 400 bp, Gossypium hirsutum
cttcaaacttggcagagaccttcccctgattatcgaagacaacattgaggaattctggaggaaactcatgtcaaaggctagtttgacagatttcaatgaaatgttttgggcagttcatcctggaggaccggcgatacttaaccgcttggagagcactcttaaactgaacaaggggaaactagaatgtagcaagaaagctttgaaggacttcggaaatgtgagcagcaataccattttctatgtgatggaatacatgagggaagagttgaagagaggaggaggagaagaatgggggcttgccttatcatttggtcctggaattacttttgaaggcatttttcttcgcagcctgtaactacatgacattcatattgggaagttggtactttgtttctaatct

SEQ ID NO: 214245 - DNA, 403 bp, Gossypium hirsutum
gagctgagaaagagagctgatgctgacaagtatgacttgtctgtgaaggaccttggtctggtcctctgtgagactgctctcctcacctctggcttcagccttgatgatccaaacaccttcggcaacagaattcacaggatgttgaaacttgggttgagcatcgacgaggatgctggtgatgcagatgctgatgctgacatgcccccattggaggatgcagatggcgagggcagcaagatggaggaagttgactaaaatcttaaccattattttgatgccaacatttactagtatgatctctattttgaacgttcccttagcttttatggttttgcaacctacagaggttttggttattttgtcaaactcttaaaatgtagtttggttttggaatatattatat

SEQ ID NO: 214246 - DNA, 396 bp, Gossypium hirsutum
cggacgcgtgggcgaagatgctcctttatctgaagcgtttacatccaaaggtttgaagtatgtttctattttgatcagtattggagctgttgctgggcttacaacaacccttctagctggtctatatgtccagtctcgcttatatcttgggcttggaagggacggtttactgccttcaatatttgctaaagtgcatccgatacgccacacacctattcattctcaaatctgggtcggtatcgttgctgctgttttgggagggctgtttaacgtgcatatcctatcacacattctttcagttggctcactgaccggctattctgttgttgcagcctgtgttgtaacgcttcgctggaaaaataacaccggcaatcgagtttcttcaaagtgcatctc

SEQ ID NO: 214247 - DNA, 397 bp, Gossypium hirsutum
  unsure (1)..(397): unsure at all n locations
cttacacagcgggcaatatgtgtccacacacatggttctcctcgccagattaccaaaatgcggcaccagattattaacaagtctccaaatgtgtattttgattttatcgggaatacttaatgaccataaatcattgtaaaaatctgtgtaaatctcatcaatagcaggcatgtaaatagtacgctgtagatgatctacaatcagtacccgatacccactcttgactgtatactccccagagccttcatgtttccagaccaacctatcctctggccgactttcagatatgggaatagcaagaattcggtccactgtactctcatcaacaatctntagaagcagcgctctatcccaggatcttgtttctccttgaccaaattgcccaaatgctacaaaa

SEQ ID NO: 214248 - DNA, 394 bp, Gossypium hirsutum
gattgatatgccagggcttggaaaagaggaagtcaaagtgtctgtggaacagaacactctggtgatcaaaggcgaggccaaagaatccaaagaggaggaaaatggcgggaggtacaccagcaggatccatttgcctgaaaaagtttacaagactgaccagattaaggctgagatgaaaaacggtgtgctcaaagtggttgttccaaagatgaaggaggaggagaggaatgatgtgattcaggttcaaattgactgagttaactggttgcgtccggatgaggctaagtgggttttcgttggtttggggctgtgggtcttgtacgtatttagttttgataataagggcttggaatataatacgagtaatgttaatgtagaactttcattttgtgtt

SEQ ID NO: 214249 - DNA, 415 bp, Gossypium hirsutum
cccacgcgtccgcaaatagtgagcacaagactgagctgaaagagaaattcaagcgcatgtgcgaaaaatcaatgatcaaaaagcgttacatgtatctaacagaagagattttgaaagagaaccccaatgtatgtgaatacatggcaccatcactagatgcaagacaagatatggtggtagttgaggcaccaaggctattaaggaatggggtcagcccaaatccaagatcacccacctcgtgttttgcaccaccagtggtgtcgacatgcccggtgccgattaccagctcactaagcttttgggccttcgcccgtcggttaagcgcctcatgatgtatcaacaaggttgtttcgctggtggtactgtgctccgtgtggccaaggacttggccgagaacaacaagggcgctcgcgtg

SEQ ID NO: 214250 - DNA, 373 bp, Gossypium hirsutum
caatttagttgatgcttccaagtattgctgttgcaatgcggcttatggatgttgctggtcgaaggtagattgattttcttttccgtgtatttggagtatcatatatccgagttcatgctgaagctctatcaacgtttgttctttgcttcctgtgcatgcaagagtttgctactcactactgtcccactcctgataatatctctccgtgtattagtcatcggaaccatcgccaaaatgcgtaacgtcacgtatgccgcattatcaaccattagagtcgtgctctgcttatttttctttgttatgagggtttggtcctatcccaaacatactctgcaccgagatcttcccaacgcgtgttcgtggcattcgcatt

SEQ ID NO: 214251 - DNA, 374 bp, Gossypium hirsutum
  unsure (1)..(374): unsure at all n locations
attaaatgagacccttgaaatgcttgagaagaaggagaaagtacttgcgaaaaagagctgctgctgaggttgaaaaggccaaggaatttgccaaagggagaaacaagagagcggctatacagtgcttgaagaggaagagactatatgaacagcaaatagagcagcttggaaacttccagcttcgtattcatgatcaaatgataatgttagaaggtgctaaagccacaactgaaactgtagatgcattgagaactggagcagctgcaatgaaagcaatgcagaaagcaacgaatatagatgatgttgacaaaacaatggacgagatcaatgaacaaactgaaaacatgaaacagattcangaagcactgtcaact

SEQ ID NO: 214252 - DNA, 420 bp, Gossypium hirsutum
ctctctctctctctctctcatcttttacatggcatctcaagccagcctcctccttcaaaaacagctcaaagatctttgtaagaatccggttgatgggttctcggctggattggtcgatgagaacaatatctttgaatggagtgtaacaattattggacctcctgatactctttatgaagggggatttttcaatgctatcatgagttttccaccaaattatccaaacagccctccaacagtcaaatttacatcagagatttggcatcctaatgtttatcctgatgggcgtgtttgcatatcaattcttcatcctccgggcgatgatccaaatggctatgagcttgcaagtgagcgctggatgccagtccatacagttgaaagtattgttttgagtatcatatcaatgctttccagccctaa

SEQ ID NO: 214253 - DNA, 362 bp, Gossypium hirsutum
gtggcccacaagtgcttaatcatgttgctccaccaaagtcatcaagcttctttgcggaatttggaatggacagtggttttcagaagaaatcaagctcaaattcctcaaaagtgcagattcaggaaactgatgaagctaggaaaaaattctcaaatgctaaatctatttcatcagcccaattttttggtgaccaaaccagagcagctgacaatgaagctcaagttactttgcagaaattctcaagctcaacagccatctccagctctgatctatttggtcaaggtgcagataatgctcttgaccttactgctagtgacctcatcaaccgactctctttccaggcacagcaggatatctcaagc

SEQ ID NO: 214254 - DNA, 427 bp, Gossypium hirsutum
gtctcaggtgaaacgaagttgggtgaaaaaggttcaacaagaatggagtatcctagagaaaaatctccctgaaattatctatgttcgtgtttacgaggaaaggatggatctactacgagcggtacttgttggtgcccctggcacgccctaccatgacgggctgttcttttttgacatttttctcccttctaactatccgtacgaaccacctttggttcactaccattcatgggggctacgcctcaatccgaacctgtatgaatcagggaaggtttgcttaagccttctaaatacgtggacaggttccgacactgaggtctggaatccaggaagctcctcgattctacaagttcttctgtccctccaggctcttgtgcttaatgagaaaccctatttcaacgaagctggatacgataaaacagtagga

SEQ ID NO: 214255 - DNA, 335 bp, Gossypium hirsutum
cccacgcgtccgctctaagctcccaatatggccaattcccaccaaccgtttgttgcactcatcgtcggcgtcaccggcatggcggggttgagcctagctgaagccttgaagagccccaatgccctcggcggtccttggaaagtttatggctctgcttcacgtcccataccaacttggttcccttcctcgcttctcgataaatacatcgcttttgatgccaccgacgccggaaacaccgctgatacgctcactccaatctccagcgaagtcacccatgttttctgggtggcaatccaagttcgtgaaagtgaacaagtaactgttacagttaacgc

SEQ ID NO: 214256 - DNA, 379 bp, Gossypium hirsutum
atccccactgacaaggaacaaacgaacacatcggttgatcacaatggtgtttgggggtctcttgcagctgcgtctcatattgatcagaatccagaaacagctaaacagaagcatgttgcagcagaggcctcgtccaaggagatgcaggctaagcagggtgcatccaccacttcaaccagaagtcgtactaaggtacaaatgcaagggattgcggttggtcgtgctgtggacttaactgtgttgaaaggatatgatgatctcattaatgaagtggagaaaatgtttgatatcaagggagagcttcgccccagtggtaaatggtcccgtgttttcactgatgatgagggtgatatgatgcttggtggcgatgatccatgga

SEQ ID NO: 214257 - DNA, 402 bp, Gossypium hirsutum
cggacgcgtgggttctgttcgatttctcggggaaccaagtttaacttaaaaccacaacttctgtagaaatataaatatgatagactcaactcaaatattgagctgctttagctggtttcctcgactgtagacgatttaagttgcgatttatcaactgctgtgcttcggttggaatggctaccaagcagccaaatactggcctctttgtgggactgaacaagggacatgttgtaaccaagaaggagttggctcaacgtccctctaatcggaaaggaaaaactagcaaaagagtccattttgtgaggaacttgattagggaagttgctggttttgcaccatatgagaagaggattactgagcttctgaaagttgtaaggacaaacgagcgctcaaggtgctaaa

SEQ ID NO: 214258 - DNA, 415 bp, Gossypium hirsutum
aacaaaccgtcagccgtcgcagtggatagatatgtcctttatgggacgaggacgagggcggggaaggggatttggtgggcgtggctttggtgggtacgtaccgccagaaccctttgtgcttttccctgatattgaacttcctgatgtaaaaacttggcctgaaaaaaaaatcttaatcgtttggaattcaagggtgcttaactattggaaaggctttccttactatcttgaagaacatgtttcaaagaaaagcccgaggatggatattgaaagattttctgactgggggaagccaaagaacacctcaaaacgtgatagccttaaccaggttctacaactccaatctcataattttcctaaagaattgattggagattcaaagagagcgcagcgaagtgccaaaagaatgcgatgg

SEQ ID NO: 214259 - DNA, 393 bp, Gossypium hirsutum
gcagttctatcactgaggcaactcaatcggttgatcttattagtgggactaaactgctggcaggtgggatgacatcagatcagatggaccttcttgttgagcaagttaagatgcttgctggagagattgcatttagcaccagtaccctgaaacgcctggtggaccagtctgtaaatgatcctgatagctcaaaaactcagattcagaatttggaaagagagattcaggagaagagaaggcaaatgagggtgttagagcagcgtataattgagagtggtgaagcttcaatcgctaatgcttcatttgtggatatgcagcagacagttatgagattgatgacacaatgtaatgaaaagagttttgagctggaaataaaatcagcagataatcgta

SEQ ID NO: 214260 - DNA, 399 bp, Gossypium hirsutum
gtaccaccttatgggtcttcccttttcaatggtccttctattcctccatatgaagctcctttttctggaggatcagcttatcattacaattatggcaatcgtcttcccggtggcagtccctttcagccgttgcatatgtctggaccacccccttattctagtggctctatgattggaaatggtatcggtgggatgtatggcatgcctcctttgatggaccggtatggcttgggcttgcccatgggtccccctccaatgggaccaaggccagggttttttccagatgataaatcacagaaagggtgctgatgctacacgtgataatgattggacatgccctaaatgtggcaatattaacttctcttttagaactgtctgtaacatgcggaaatgcaacac

SEQ ID NO: 214261 - DNA, 382 bp, Gossypium hirsutum
cggacgcgtgggcggacgcgtgggctgggattgcaataaatggtacctctgaacacgtccgcgcctcggtcgaggctagcctgaagcgccttgatgttgattacattgatctctactaccagcacagggtcgacactaaaacaccaatagaggatactatgggggaactgaagaagctggtagaagaggggaagataaagtacattggtttatctggagctagccctgaaactataagaagggcacatgttgttcatcccgtctctgccataaaaatgaagtggccgctttggactcgcgatagcaaggacgaaataatccccctctgcagggaacttgggattgggatagttccatatagcctgctcggtcgtggtttctt

SEQ ID NO: 214262 - DNA, 330 bp, Gossypium hirsutum
  unsure (1)..(330): unsure at all n locations
cccacgcgnttcgcggactccgtgggcgagacgtctttgtttatatgtggtaatctcaacgacatcacgagcagtgatctaatatgatacaccttgaaacaccttgtatgaaaaaacatgaatctctactaccatgacacatgtcgacactaaaacacctatataaaatcctatgagagaactgaataagctggtacatgaagcgaagataaaagacacagatttatctaaaggctgccctgaaactataagaatatcgcatagcgttcatgatgtctctgacataaaaatgaaatggccgctttatactcgcgattgcagggacgaaat

SEQ ID NO: 214263 - DNA, 424 bp, Gossypium hirsutum
cccacgcgtccgcggacgcgtgggtccggactcgtgggtgaagacccaggacattctcgaaagacgtggaggctacctttagccgctaaactacatcgaggacatctgtcatttgaaacaactctcctgattctgaggttaacaaagtttggtaaaaaatcccaagagatccgccagattgtaaatgaaatttttgatggcatctgtaggttccacagttttttgtaaaattcttttatttcggtttgtaataaatagtaactaggatccgagttagcaatttgtaatagtttataggcactgcggactgagaactcaccagataattctcctttccaaacttgaaaatcttcatgctcaatctctgcaaggagaatttgaagaattttccgagcaatatcctcttgaaagctattatcccata

SEQ ID NO: 214264 - DNA, 424 bp, Gossypium hirsutum
aaacatagcagccatggcagtccgtatgcttcttgggttaggtgtcctgctactctgccttgcaaaggtttcatctgatctgaaagcagaagaagttataaccaatgtcggtgaggtgggttctttggttaccagaggcggaaacagaagactgatgctagagattgattgtggaggattatgcaagaaaagatgcagtcaacactcgaggccaaacagatgcaacagggcgtgtgggacttgctgcttgaggtgcaagtgcgtgccaccggggacttcatggaacagggaggtctgcgggacctgctatactggcatgaccacccatggaaacgttgccaagtgcccttaacctttacgtcgcccaatatgtgttgcagccatcaaggggaaaaatgaaatgtttgtttgtgtaatatgtatg

SEQ ID NO: 214265 - DNA, 423 bp, Gossypium hirsutum
tggcctcaaatcccaaggtcttctttgacattactatcggtggtcagcccgctggtcggattgtgatggagcttttcgcagattgcactcctcgcactgctgagaacttccgtgccctctgtaccggcgagaaaggcgtcggccgcagcggttagcccctccactacaaaggctcctctttccatcgtgtgatccctaactttatgtgccaaggaggtgacttcaccgccggaaacggtaccggaggtgaatccatctacggatccaagttcgctgacgagaacttcatcaagaagcacactggtcccggtattctctcaatggctaacgctggtcccggaactaacggatctcagttcttcatttgcacggctaagactgagtggctcgacggacagcacgttgagtttggacaagttgttg

SEQ ID NO: 214266 - DNA, 422 bp, Gossypium hirsutum
caggaggaaatgcacgttgtattgcaatgcttcaggcatttcaagaggctatcagagactattccacaccacctgaaaaaaccctcaccagagatttaacttccaaaattggtggttttgtttcttttctgattgaatgccgcccactttctatgagtatgggaaatgcaatcaggtttctgaagagtcgtattgccaggttaccactaactctctctgaatcagaagcaaaaacaaccctttgttctgacattgatcgtttcataaatgagaagatagtgcttgctgataaggtgatacttagacatgctgctacaaaaatcagagatggtgatgttcttctgacatatggatcatcatgtgttgttgaaatgattcttttgtatgcccatgagcttgggaaacaatttcgtgttgtggtg

SEQ ID NO: 214267 - DNA, 385 bp, Gossypium hirsutum
cgggattacccgctgagtttaagcatatcaattagcggagggaagaaagcttttactggaatgtaaggtgtaactgttttcaatcatagttcgggttgtaggaacataaggagaagacattaaaatccctgaactgcctctagatatgaagaacctgggactattagatgtttttatgtttttgtttttcctttcctattacttgttatgtttggatttgtcttgttatgacaactggaattttgaaggtatcccctattctagtatgatcctgttctctgaaaataagataataaagagaacattaaaaatgctgctacaaaaatcaaaaatgaggatggtcttctgacatatggatcatcatgtgttgtaaaaaagattcttt

SEQ ID NO: 214268 - DNA, 414 bp, Gossypium hirsutum
  unsure (1)..(414): unsure at all n locations
ggctaaatatgacaaagacactcctgaccgctggcataacattgccaaggctgtgggtggaaagtcagttgaagaagtcaagctgcactatgagatcctagtcagggatctcaaagacattgagtctggccgctacccttatccatatccaaccaactaaagcgctatgagtttactacttactattcactacctatccacaatcactatagataaccaagaagtgaaggccactttcatatgcatgaatcacattcctaaaaatgcagctgtcatgcttttttgttgatgtagttgtggatttaaagaaaacgtggttcttagaattatcatacatgcgcatatccatgacgtccttgtccttccagctccacacacccacaaccncaaagtccttaagcattgaaaactctc

SEQ ID NO: 214269 - DNA, 383 bp, Gossypium hirsutum
gagcaaccccatttgcttacggctcatgacatgttagaccgaaccgtgcaatggatcccggtcttgtttacgacctaacagttaacgattacttgaacttcttgtgtgcccgtggctacaaccaaagccttttaagtctattttcggacaagccgtatgcatgtccgaagtcatatggtgtaatggacttaaactatccttccatttcggtttctcaactcaatggctcaatgacggttagcaggacagttaagaacgttggttcagcaaggtcaacatataaagcacgtgttagatcgccagctggagttactgtttcggttaaaccatcgacattaaagttcgagaagatcggtgaagtgaagaaatttgaattaaaattc

SEQ ID NO: 214270 - DNA, 398 bp, Gossypium hirsutum
  unsure (1)..(398): unsure at all n locations
agcaaacattagaatcgttgtccacttctcttgtctgtacagttggagagatctcaacctggccaagtgcaagtaatgtcattccagggcaggcaagaaattcttccgtgaacgaatctcagtgtcagcgtaaacagaaaatgctgataagcagtaaaatatgaactctaatgcaggtaactttcactgtggatttacgtgcaattgatgatgttggacgtgaggctgttgtttacgaattatctaatcagatgtataaaatatgtgatagacgttctgtatcttgcatcattgaacggaagcatgatgcaaatgcagtaatttgtgatcaagaactgagttcacggctaanatctgcagcttacagtgctgtcaacaaaatggtagggcagattcat

SEQ ID NO: 214271 - DNA, 412 bp, Gossypium hirsutum
cccacgcgtccgcccacgcgtccgcccacgcgtccgttgagatccaaatcttgtctattctgctaggttttctggaccggtaggtgaaccaatcaggccatgagttcacctggcagattggtctgtttagttagattaaataaataattaaaaaattcataaaagtaaatgtatattaaaaatttgtggcttatataacgatagaatgtctctcaataaggcatttcttttatatatttaaccagctttctgcaggtaaatttttccttcatcttgcagggacgtgtcttgtgagtacatgaattcatctaaagacattacaaaagaaattcttttatcatgttctcggtagcatcacctattaagaaaacatttcattagcatgtctctcaataaagcatcttttttggta

SEQ ID NO: 214272 - DNA, 283 bp, Gossypium hirsutum
cccacgcgtccgcggacgcgtgggtgtgcgtggaaaatgagagtactcggtaggtggatgggtcatataaactcgggatctaatggtgtgctaatgggggagggggtgtaggaaacttggtgtgtggcaaagccaggaacaagtgatgagctactacagctgaacataaactttgcctgtaacctggtcgattgcaacgccactcattccggcggcgtttgctattatcccgcaacactcattaaccatgcatcgtacgccatgaatctttattaccagatca

SEQ ID NO: 214273 - DNA, 390 bp, Gossypium hirsutum
ctcggtttctgctgagcaaagggatcgattgtcaatgtcagtggagagactaaatcagtcaagtgagagaattaaggagagtagaagaactgttctggaaacagaagagctcggtatctcgatacttgaagatttgcatcaacagcgacaaactcttttacatgcccacaacaagctttatgatgtggatagcgccattgacaagagcaagaaagttttaacaaccatgtcaagaaggattaccaagaacaaatggatcgttatctcgataatcgtagcacttgtccttgcaatcatcttaatcctgtattacaagatttcacatggctgatgaaatcttttgaaccattaatggtctgcaatttgtatatgttgatccgcatttgatac

SEQ ID NO: 214274 - DNA, 403 bp, Gossypium hirsutum
cccacgcgtccgcccacgcgtccgcccacgcgtccgtccacgcgtccgaaaatattgaaatcaaccttctaaagtttctttttttttctctggtgcatatgaaaataaaatgttttttttgtattcaaaatccccccttgaatccccccatttttaaggctcttatagcctaatattacaatatatctactctttttgtcctatttctctgctttgtgtgttcgtttctcttttgcaggtgatggaacgggagtaggttgtggcagcaggctaggaggctactggtacggtgcacatgggcagcggcacgtgtggggagggctgaagtgacctagtacggcgcctaaggttctccctccctccattgctggaaaatattttgtgggctcgggctgttagggct

SEQ ID NO: 214275 - DNA, 318 bp, Gossypium hirsutum
ggtgatttgaaccatttgatatctgcaacattgtctggagttacatgctgcttgcggttccctggtcagctcaactccgatctcaggaaacttgccgtgaatctcatcccctttcctcgtcttcactttttcatggtgggttttgctccactcacttctaggggatctcaacagtaccgagctctaacagtacctgagctcacccagcaaatgtgggacgcaaagaacatgatgtgtgctgctgatcctcgtcacggtcgatacttgactgcatctgctatgttccgtggtaaaatgagcaccaaggaagtggatgag

SEQ ID NO: 214276 - DNA, 381 bp, Gossypium hirsutum
gttaacaccaactcatcttgccatagtcatggaatatgcagctggtggagaactttttgaaagaatatgcaacgctggtagatttggtgaagatgaggcaaggtttttctttcaacaactgatatcaggagtgagttattgccatgcaatgaaaatttgtcatagagatcttaagctggaaaacactctattagatggaagcagtacacccagactaaaaatatgtgacttcggctactctaagtcgagtgtgttacattcccagcccaaatcaactgtaggaaccccagcctatattgcaccagaggtcttgtccaaaaaagaatatgatgggaagattgcagatgtttggtcatgtggggttactttgtatgtcatgct

SEQ ID NO: 214277 - DNA, 288 bp, Gossypium hirsutum
ggagaagagacgaaatcgcagttgaccctttaaccatttatttcttataaaccgaatcactccttcggagatgttgattattcccccatctacctaaatctcctacatctcggacatggccgatgctcaatccacatacgtgaagctgacagaagatcatgcgcctttagaggatatccaacctggtgaacttaatcagcccattgatgtttctcagatgcatgtactaaagtgcaatgaatgtggacagcctgtacctgaacactttgaacctcctgctgttgaacc

SEQ ID NO: 214278 - DNA, 415 bp, Gossypium hirsutum
cggacgcgtgggtccggacgcgtgggttttggcagttgggagatgatcttcggggactagcaaaagtcgcagaggatcacaaatggttgatggctgcatcgaaactggctgaacagacgaggacaaagggtgaacgcatgaacaatctggatctttccaagggtccagctgaaatgaggacaagggataaattcgggttccaggaagacaacaagctcgagaaccttaactttaatatgttgaacttggactctaaggttggggataatgtaagcaaaagttctttccaaaatggtatgtacaatatgaatgctgtttaccagaaaaataacagtattagccttggaaaccctactggcaacaaatatatgagcaacaatcagagcaacaaagatgtcaacaataacagcagcac

SEQ ID NO: 214279 - DNA, 391 bp, Gossypium hirsutum
cgagtcgggttgtttgggaatgcagcccttttcgggcggtaaattccgtccaaggctaaatacgggcgagagaccgatagcgaacaagtaccgcgagggaaagatgaaatggactttgaaaagagagtcaaagagtgcttgaaattgtcgggagggaaacggtggggggtatggtggaggtggatacagaggtggacgccgtgaatgaggatacagagacggaggttctcgttactcaagaggcggaggagcatctgattgctactggaggtcttaaatttattgtttcaaagtgggcttgcccctatattgttatgggtcaggaatgggtttggtggttggtaattataaaaacactctgctactgtttggttagaggtcactcgttttt

SEQ ID NO: 214280 - DNA, 406 bp, Gossypium hirsutum
agaactggagaaaacaaaagctgataatgttaaactttatggaaagattcgttatgtccaggattataaccaggagaaagtaatttctagaggatcaaagaagtatgccgaggatcttgaaagtggtttcacctcagatgttgaatccaagtacaagaagatatatgaggatgatattaatccctttgcagcattctcaaaaaaggagagggatcaaagatacaaggagctgggcttcagagacagaatcacactcagcagcggacgttttcttctgggaaacaagtatgctcgaacgtttgcatttttctacacaattggtttgcatatcctagtgtttacttgtctataccgaatgtccgctctaagctacctcagccatggctctgaggaaactgccgtcgtt

SEQ ID NO: 214281 - DNA, 422 bp, Gossypium hirsutum
gtgcatctttcattttccatgttctttctagggttttgaagtgtttcccctttctggctcatttcaattctaattcaagttccagttttcatcatctgggtagtctgggatctcccttccaaatttgggttccttttattttttcatcaaagattcgatgtcacaaggcttttcaattgagctttactttgatccagcactcgaaaaccaagtcttgaaagcttggaatgtattggctcgtcgccaaatcagcactcagttaattgaaattgagtcaaggcctcacattactctcttctccagcccttttctagaccctgccaagcttgaatctgttgtcaagtcttttgcttcaaaacaaggacctttacctctatcttttacttcaattgggagtttcccaaatgacaaaaatgttcttt

SEQ ID NO: 214282 - DNA, 411 bp, Gossypium hirsutum
cggacgcgtgggtggctatcgagttctttgtttaagaataaggatcttttaagatacgccggatccgctaaaatacgccgatccccgtccgtcttccgatcatatggggctgcttgaccagttgtgggatgataccgttgctggtccccgacccgataatggccttggcaagctccgaaagcactccactttcactttccggcctaactctgccaaggaatctgatggcgggagtgtaagatcgtacggtgatgaagcgccggaggaagcgacgagagtgacacgtagtattatgatcgtaaagccgcctggttaccagagcggatcgcctccggtttcgccggccggatcgacccctccggaggcagagaatcatatcggtttcggaagaggtccacatcggatgcatac

SEQ ID NO: 214283 - DNA, 415 bp, Gossypium hirsutum
cggacgcgtggggagcaatctttacagagcttaacaggagtttctctaggggaaggaacaggtgcaacaatgtcggatgatgatgaagagcaaatagacagtgatgccaatttgtttgatggaagtatggagggtccagattcattgggatttgggcctctggttccaacagagagtgaaaggtctttgatggagcgtgtgaggcaagaactcaaacatgaactcaaacagggttacaaggagaagattgttgacataagggaggaaattttgcgcaagagaagggcaggaaaacttcctggtgacacaacttcggttttaaaagcttggtggcagtcacattccaagtggccataccccactgaggaagataaggcaaagttggtacaggaaacaggtttacaattaaaacaaa

SEQ ID NO: 214284 - DNA, 372 bp, Gossypium hirsutum
gcggcagctgctgctatattaaattattattaaataaagggaaggggtattgaacgaacggggtcgggtttgtttgataattatgcatacctaatagacacagatgccgatttgtttgatggaagtatggaagatccatattcattgcgatttgggcctctggctccaacagagagtgaaacgtcttttatggaccgtctcaggcaacaactcaaacatgaactcaaacagggttacatggataacattgttgacataaggtaagagattttgcgcaagagactcgcattaatattttctgcagacacaacttagaccataacagcttggtatcagtcacattgcaagtggccataccccactgaggaatat

SEQ ID NO: 214285 - DNA, 417 bp, Gossypium hirsutum
caaagaagactgacacacttgttcttctttcttcagttctcggaccaccatttcctgccaaattacccaaagcctacaacaaaaaagtcggcactgttcatttgaccctcgactaaaaacccatgacatccacgaaagatatgattgcaatcctcctcttcttggttgcatcgaggacaccgggcatcagcaactatacgtttaatcttcagattagcaaaagtaggaatgtaattccaagaaattccccatattgtaattttgactttcgaggggatttataaattccatagttttttgtaaaaggctttagtttcggtttgtaaattaataggattttgagtaccctcctgtaatagtttgtaggcgcttctaaccgaaaaattaccagatggttctcctctccagacttggaag

SEQ ID NO: 214286 - DNA, 414 bp, Gossypium hirsutum
aaacaactgcaccaaagagttgttacatgcgacctccggaaggtatacttggtcccggagaaagccttatcgcaaccgtattcaagtttgtggaaccaccggagaacaatgagaaaccaatggaaaaaaagagcagggttaagttcaagatcatgagcttaaaagtgaaaggagaaacagattatgtcccagaactggtataattctgcagatacatttagaacatacaatttcttcatgtcaaatagtgaaactgaaaatgtgtggtataacaatcttgcaacagtttgaggagcagaaggatgaggtcacagttgagcagatattacttgtagtttttctagacccagaacgttcttgtcctgtaagtaatcaaaacataatcacaactggattacttggtttattcgtagt

SEQ ID NO: 214287 - DNA, 421 bp, Gossypium hirsutum
agaaaatatctcaaatctcctcctcctcctcggaaatcttagtatcatcaccatggcctcaaatcccaaggtcttctttgacatgactatcggtggtcagcccgctggtcggattgtgatggagcttttcgcagattgcactcctcgcactgctgagaacttccgtgccctctgtaccggcgagaaaggcgtcggccgcagcggtaagcccctccactacaaaggctcctctttccatcgtgtgatccctaactttatgtgccaaggaggtgacttcaccgccggaaacggtaccggaggtgaatccatctacggatccaagttcgctgacgagaacttcatcaagaagcacactggtcccggtattctctcaatggctaacgctggtcccggaactaacggatctcagttcttcatttgc

SEQ ID NO: 214288 - DNA, 406 bp, Gossypium hirsutum
  unsure (1)..(406): unsure at all n locations
cccacgcgtccgcggacgcgtccgcccacgcgtccgcccacgcgtccgcccacgcgtccgggcgagtgttcgatctggtctcctacgagcagcccttcgcggcggctctcgtcctactgctcctcccacgcgtggcttcgcttcctcttctcatcacgatgatgcttatgaaaccgcaaaatgggaaaagataacatatttaggtgttgctacctgcactgttttagcgatttataacctatcaaaaggtcatccccaccatgaagagcctcctgcatacccatatttgcacattcgcaacaaggagttcccatggggtccggatggtctgtttgagaaaaaggagcatcactagggatggccggatggatgcatatctttccgagttcggcgcattnttatcatt

SEQ ID NO: 214289 - DNA, 402 bp, Gossypium hirsutum
cccacgcgtccgcagggaattccaaattcctacagactggatgcttgataatgggattatgagcaagattaagcttggatcagtgaaactggcgaagaggtacatgaaacgggtagccatggaactgcaggtgaaggcaaccttggagaaggatccttcaatggactatatgctacttcaaggagtcagatttgcattcagaatacatcagtttgcaggaggatttgattctgaaacaatgcatgcatttgaggaactccggaaccttgccaacctccttaacaagaagtagtagtagtagtaaagcagcagtatgggttgtgtgacaggatggaaggtgtgaagtttgtcagaagaagaagatgatgatgattggatggactgaaggatagctgttgctgc

SEQ ID NO: 214290 - DNA, 422 bp, Gossypium hirsutum
  unsure (1)..(422): unsure at all n locations
gcgatgacccagatctcaggaagaagctaagccgactctgcaaaacaactactgttaaaacaaggtatgtggtaatgtcagaagaaatcctgaagcagtatccagagcttgccattgaaggactccccactgtgaagcaacgattggatatctgtaacgatgctgtcacggagatggctgttgaagcctcacgagtttgtatcaaaaaatggggacggcctatatcagacttaacccacttagtctatgtttcctcgagtgaagctcggctgcctggtggtgacctttacttggccaaaggacttggactcagccctgagacgcaacgtgtgatgctctatttcatgggctgctctgggggtgcagctggccttcgtgtagcaaaagacattgccgaaaacaatcccngaagtcggatctta

SEQ ID NO: 214291 - DNA, 410 bp, Gossypium hirsutum
ctgcaaggaaggctagaagaagaattgcaaggcaaaagaaggccgtgaggatcttcccaaggccaactgctggacctctacgccctattgtccatggacagactttgaagtataacatgaagttgagagctggcaagggtttcacccttgaagagcttaaagctgcgggtatttcaaagaaacttgcacccaccatcggtatatcagttgatcaccgtcgtaagaaccgatctcttgaaggtcttcaagccaatgttcagaggcttaagacttacaaggccaaacttgttgtcttcccaagacgtgcacgcaagtctaaggctggtgattctactgctgaagagcttgcaactgcaacccaagtgcaaggaccatacatgcctatttctcatgagaagccttctgttgag

SEQ ID NO: 214292 - DNA, 416 bp, Gossypium hirsutum
gtttcgtttaccaaatgccacaaattgatgggtttctctacaggaccaagatcgcgagctacccattggaagcaaacagtcctatatctagaggatgtgttaaccatctgtgaaggggagacaataattgggagcatgactgttgcaccaaacaagaagaatccccgagacgttgatataatggttaaatattcattgagcggacgacgttgtgtggtttcgagagttcaattctataagatgcgctgattttgttgcagagtatttcatcaccactactagctgtaggataccttgtttgcatgttcctcaaatgtttcaccaacatttttttaattccttttctactttcttttttctcgaaaggttttccctgagaaagaaaaacacataagatgcatgtacttcattaactt

SEQ ID NO: 214293 - DNA, 399 bp, Gossypium hirsutum; identical to SEQ ID NO: 196621

SEQ ID NO: 214294 - DNA, 391 bp, Gossypium hirsutum
cccacgcgtccgcccacgcgtccggttcatttcttcaaatattctcaaatccattgctttctattcatttatagtcataaaaaaaaaaaaaaaaaaaaaaaaaaaaaaaaaaaaaaaaaaaaaaaaaaaaaaaaaaggggtatttgaccatgagggaattccatttggtcatacgtctatttcttcaaaaaaaaatgtcatggaaaaaggttaaaattttcgccatactttatttccttaatacaaaagcaaccgccctcctacaccggataccatagggcagggacttcaatatttgaaggcatccatcaaagctatgtccattaaggtgataaaggtacctggtgtaaaagctgatgatgtgattgggacactggctgcaaggagtgtt

SEQ ID NO: 214295 - DNA, 413 bp, Gossypium hirsutum
  unsure (1)..(413): unsure at all n locations
cggacgcgtggctgcatttataattgcttcaacacaaacagaggaagagatgcttaactggtatcgtgaacgtgtcgtgtggggtgacaaagacctaaggcttaaactcttgagaaaggggattttaactcgcatatatgctccaatggccataatccaggggctaagagagtccggtgtcttcagctctgttattgctaacgcccccactactatttcaaaggacaagtttttagcatccattgatagtagtaactcatcaagagtcgtttcccccacgactcacacttcaagaaagattggtagaagcagacagcaacaaacatctgctaggaaggtgctggaagttgaaactaatgcagctgatgaagcagcagctgttccgccattgtcacccnctgcatggacaatga

SEQ ID NO: 214296 - DNA, 418 bp, Gossypium hirsutum
  unsure (1)..(418): unsure at all n locations
gtaagatcaataccttcttattttggggttggtgaagacgaagaagatatacccgacatggctgattatgaagaagctgacaatcttgttgagactgatgcggctactttacaaccgacatatcttgttgctcaagagcctgataatgacaatattttacggacccgaacctatgatgtcagcatcacgtatgataaatactatcagactcctcgtgtgtggcttactgggtatgatgagtcaaggatgctcttacaaccagagcttgttctggaggatgttagtcaggatcatgcacacaaaacggttactattgaggaccatcctcacttacctgggaagcatgcatccgtacatccatgcagacatggngctgtcatgaaaaagatcattgatgtgcttatgtcacgtggagtag

SEQ ID NO: 214297 - DNA, 410 bp, Gossypium hirsutum
gcgattacattgtcagagacattgggaattccactcctcgttatatgagatgcaccaccaatcagaggttgtggattttgatgaaagtggtcctgttcgatgttcccattgcaaaggttacataaatcctttcatgaagttcattgatcaggaaaggaagtttatctacaatttatgtgtgccgccagcatttagatacattgcttgaaaacatcccaacaatgtttcagagtagtacaactgctaagtcatgttttggtgctgcaatcaaggttcattggcatcttgtcctgatgagagtgtagtttatgaagctttaaactttgcattgtcctccgaggtattagaattcctagttcaaaacatagcaatttgtcttttataaaagaccaaatttccaattttcaatg

SEQ ID NO: 214298 - DNA, 413 bp, Gossypium hirsutum
cccacgcgtccgtttctatccaacatccattctttggtcgcaaaatgattaaaatatatatttttttttcaatctaatgttcttcattgatattagtatgttccactttttctttctttcattgttgcagaccatttttctatggcaccacaaaaatcagtggaaactattgggaaaaacttgagagatcaatatgagaagtggcagcccaagtaaggtcaaagttgatcctacagtggatgaagtgaagaaactttgtaatacatgttgcagatatgccaagttagagagttttatttcattacaatggacatggtgttccaaagccaactgcaaatggtgaaatctggctgtttaataagatgttcacttgtttaactgttaggaatcaattcttgttgcttttcttttgc

SEQ ID NO: 214299 - DNA, 398 bp, Gossypium hirsutum
ctgacagactccatagtgttaccagaaaatgtggaatttctaggacaaaaaattgatctcactcctattaagggcttgctgacctctgtgcaagacacagcttcatctgttgcaaagaccatttccagccaaccgccattgaagatcccattatcaaacagcaatgctgaatcatggttgcttacaacataccttgacgatgaactgcggatttcaaggggagatgctgggagtgtgtttgtgctcgtcaaggagggcagcgctctcttgaactaaactctgggttccggttcttcttcttcctcagctatttattagagttatctgttgtcttggtttttattaagacagaatgtaagaactatacacttatatgggcaatacatggtcatggactc

SEQ ID NO: 214300 - DNA, 263 bp, Gossypium hirsutum
cccacgcgtccgtccatttcggaggctctttaagcagctcgaatcgatgctcctaatgcagcacatcaccctgccttgaaaagcaatggaagggtccttagctttggcctagatgcacccatttgtgattccatggcctctgtcttaaaccttggggagaaaaaagttttgaatggtgcccgagatggatttcatggtcttgaagaacaaagagtttcggttccaaacaaaaaggaaaacggtgatgattgctcgagtggatc

SEQ ID NO: 214301 - DNA, 420 bp, Gossypium hirsutum
gttttcaaggtggatctccgtacatatatccactgtatggattaggcgagctgcctcaggcttttgcacggcttagtgctgtttatggtggaacatatatgttgaataaacccgagtgcaaggtggagtatgacgatgaaggcaaagtttgtggtgtcacatctgaaggtgaaactgccaggtgtaagaaagttgtttgcgacccttcctacttgccaaacaaggttaggaagatcggcaaggttgctagggcaattgctattatgagtcacccaattccaaacaccaatgattctcattctgtgcagattatcctgccacaaaagcagttgggtcgtaaatcggatatgtatgtcttctgttgttcatattctcacaatgttgctccaaagggcaaattcattgcatttgtttcaacag

SEQ ID NO: 214302 - DNA, 420 bp, Gossypium hirsutum
aaacacagtaacattaccaatggcaaccctgtctagcgtgaacctcgtaaccccaagaatcatagccaatggaccagacgccccaaccgtcaaggtcccatgccttaaccggccttggaaaagggtatccccaatgaagctgcgtgtcgggcctgttagagctgcaccggatggaatatcggagaaggtggagaaaagcataaaagaggcacaagagatgtgttcggatgatccggcgagtggcgagtgtgtggcagcttgggacgaagtggaagagctgagtgcggcggctagccacgctagggacaagaagaaagacgatgatcctttggagaattactgtaaagacaacccggagacggatgagtgtcgtacttatgataattgaaaatgtttggtttttctagtttcttagattat

SEQ ID NO: 214303 - DNA, 415 bp, Gossypium hirsutum
cgaaagttgaaacacaaaagatcgaagagatggatagatcaagattgcggtctctcaccttgctttgcactttggttcttcttggatctctagcttctactcaggcaaagaagtccaaggaagatctgaaagaagttactcacaaagtttactttgatgttgaaattgctggaaaacctgctggtcgaattgtcattggactcttcggaaaggcagttccaaaaacagcagaaaacttccgagcactatgcacaggtgaaaaaggtgttggaaagagtgggaaacctctccacttcaaaggaagtgctttccaccggattattccaaacttcatgattcaaggtggtgattttacacttggtgatggaagaggtggagaatcaatctatggtgagaaatttgctgatgagaattt

SEQ ID NO: 214304 - DNA, 418 bp, Gossypium hirsutum
cttgcatcatcaatcatggttcctttcatttatgttgttcttttcttagccatgtctggccattcaagtgccaactattgcttatgtaaagatggagtgaatgagcaaacacttcagaaaaccctagattatgcttgtggagcaggagctgattgtactccaattaatcaaaatggtccttgctataatcccaacactgtgaaagatcactgcaattatgcagtcaatagctatttccaaaagaaaggtcaagctcaaggaagctgtgatttttcaggcactgctactgttagtgttaatcctccttcaaatattccctctacttgcagttttccttccagtggtacaagcacaacaccatccacagggactccgacgacaccgaccacagggacgcctacctcaacaccaaccacag

SEQ ID NO: 214305 - DNA, 417 bp, Gossypium hirsutum
tgtaattggtggaggaatagccaactttactgatgtgggtgccacgtttaatggcataattcgagccttgaaggagaaagaatcaaagctcaaagcagccaacatgcacatatatgtaaggagaggaggtcccaattaccagaaggggcttgcaaaaatgcgggcacttggagaggaaattggcatcccaattgaggtttatggtcctgaagctacaatgacgggtatatgccaggaggccatccagtacatcactgcagctgcataagttgtgggttcttcaatacaatctctcagtttgttttaccttttttttttttgttcccggtgggacatgttcattagatttccattgaaattgtgctacaaacttcataaaataatgtttagttcatggtacggcaccatctgtaattt

SEQ ID NO: 214306 - DNA, 379 bp, Gossypium hirsutum
aatgttttcttctccgaagaaagaagatgatgattcaggccaaggctttcgttttgacaagtctctccaggaactgagagatttgcggtctcagcttcattacgctgcggattactgtgaaacaacatttttaaagtctgaagagaagaaaactgtggtggaaaacacaaaagaatacctatgcaaggcacttgtcactttcgttgatcatctgggaaacgtctctgctaatctaaatcactccatttcccagactaattcattttccgaggctgagctccgcatcaattgcctccatcaaagacttctctcatgccaacaatttgctcacaagcttgctctaaccagagtcaaatggaaccccattttccaagacata

SEQ ID NO: 214307 - DNA, 409 bp, Gossypium hirsutum
ccggcttcgtggagaagttgaactaaagcatgtagacttctcttacccttcacgtcctgacgtcccaattttccgggaccttaatctccgcgcccgagccggaaaaacccttgcccttgttggtccaagtggatgtggtaaaagctcggttattgcacttatacaaagattttacgagccctcatccggacgtgttatgatagatggaaaagacataaggaaataccacctcaaatcgctgagaaaacacatttcaatcgttccacaagagccttgcctctttgctaccactatttacgaaaacatcgcctacggacatgaatctgcaagcgaggctgagatcattgaggcagctacactagccaacgcccacaagttcatatcctcaatgcctgatggttacaaaacg

SEQ ID NO: 214308 - DNA, 424 bp, Gossypium hirsutum
cggacgcgtgggcggacgcgtgggcggacgcgtggggaaatcccaagaattccagaaatccgacaaaggccacagatcccacaaatcccacaaattccactaatcccacagatcccacaagtcccacagatcccacaagtcccaaaaatcccactaatgccaggacagtcgggatgtgagagtggagagtgttgccgtcagggttgtggtgggacttgtgctgagtgtggtcagcccaggtgcgcatcaggatgttgccaggctgaaactgtaaagagcaaagggatagaagaggttatggacagtgaacccagtccaccaaagtagagagatgataccatattaagatgaaataacgaggaagagttggttgtcgtcttattaattatacaaaataagaagtaatgatgttgcagaagggttt

SEQ ID NO: 214309 - DNA, 392 bp, Gossypium hirsutum
aaaaagcttccccaaaattgagacgataaggtttcggattttgggcttgcaaaattagctttggatttaaaaatccatgtaaccacatgtgtgatgggaacctttggatatatggctccagagtaggcaacaagtggcaagttaactgaaaaatccgatgtttatttctttggtgttgttctcttggagttaattaccggacgcaaacctgttgatgattcttagccgttaggtgacgagagcctggttgaatgggctcgatctttgcttgctgaagcgattgaacattaagattttgatatgttggtggatccgaggctggaaaagaactacgtggatcacgaaatgtttcgaatgattgaggcagctgctccttgcgtgtgacattcagc

SEQ ID NO: 214310 - DNA, 415 bp, Gossypium hirsutum
cccacgcgtccgaaaaaagaaaaacaaaaaacaacctttcatgggttccaggaagggcaacgacaacgatggtgctagccctgggaaaatatttattggaggcttagctaaagacacaactctgggttagctgagctttttttttacgtgttttttttgttgatgaatgttcctcaaattactgacttttttttctgggttcttgttggtggggatttatttttcagagacgtttactaagtattttgaaaagtatggggaaataacagattacgttataatgaaagatcgacatacgggtcggccccgtggttttgggttcattacctttgcggatccttctgttgttgacactgttatgcaagaggatcatgttattaatggcaaacaagtaagcaaaagtttcactttccat

SEQ ID NO: 214311 - DNA, 406 bp, Gossypium hirsutum
ctctaattctaaagctaagagttttaagttaacgaagcatttgggtcgtttcgaagtaatggaaacttcaggaaaagtaaagaagggagccggaggaaggaaaggtggtggcccgaagaagaagcccgtttcaaggtctgtcaaagctggtctccagttccccgttggtaggatcggccgttacttgaagaaaggaaggtattcacagcgtgttggaaccggagccccggtttacttggctgctgttcttgagtacttggctgctgaggtcctggaattggctgggaacgctgcacgtgacaacaagaaaaacaggatcatcccaaggcacgttctacttgccgtgaggaacgacgaagaattagggaagcttctcgccggcgtaacaatcgctcacggtggtgtg

SEQ ID NO: 214312 - DNA, 414 bp, Gossypium hirsutum
cccacgcgtccggcaatcaatgttgtttgctcatcaccagaggcagctgcaagggtaaagagccaactgaaaagaatagctcgaccaatgtactcgaatcctcctgttcatggggcaagaattgtcgccaacattgttggggattcagctctcttcaaggaatggaatgctgagatggaaatgatggcagggagaatcaagaatgtgagacataaattgtttgatagtctttcttccaaagataaaagtgggaaggattggtctttcgttcttaagcagatcgggatgttttcgttcacaggcttaaacaaagctcagtgcgataatatgacaaacaagtggcatgtttatatgaccaaggatggaaggatatcacttgcaggattatctttggctaagtgtgaatatctagca

SEQ ID NO: 214313 - DNA, 225 bp, Gossypium hirsutum
caaagttcgaaggatttattagcctatctgttctggaaaggagatctgcaagtagatattatttcttccaatttattaatgtttttcttgggagcataataaccggaactgcgtttcagcaacttaatcattttatccaccaatctactagtcagataccaaagacaattggggtctcaattccaatgaaggcaacattcttcattacttatataatggttgatg

SEQ ID NO: 214314 - DNA, 259 bp, Gossypium hirsutum
cccacgcgtccgcccacgcgtccgtccacgcgtccgcccacgcgtccgggatcgcaattggttttccgtctctctggaactggttcagaaggtgcaactatccgcctctacattgaacaatatgaaaaggactcattaaaaactggaagagattcccaaggagcgcttgctccttttggggaggttgctctaaaactttctaaaatgctggagttcactggccgatccgcacctacagttattacataaactcataccc

SEQ ID NO: 214315 - DNA, 404 bp, Gossypium hirsutum
  unsure (1)..(404): unsure at all n locations
gtgattctttaagcaagggtgcatttgtccccaatgacatcagtattgctggttctggccatgcaagttttattcttcttactgggcctaatatgggtggaaaatcaattcttcttcgccaagtttgcttggctgtgattttggctcaggtaggagctgatgtccctgcagaacaatttgaactatctcctgttgaccgaatctttgttcggatgggttccaaagatcatattatggctggacagagtacatttttaacagagctttcagaaactgcattaatgctgtcctctgcaactcaacattcacttgtggcgttagatngaactggacgtggaacatcaacttctgatggacaagccattgcggaatcggttctagaacattttgtacacaaggtgcag

SEQ ID NO: 214316 - DNA, 417 bp, Gossypium hirsutum
cccacgcgtccgcccacgcgtccggcgatggtgttggtcttttgggtattgcttgggcttttggtggcatgattttcattcttgtttactgcaccgccggtatctcaggtggtcacattaacccggcggtgacatttgggttgtttttggctaggaaggtgtcgcttataagggcggtggcttacatggtagctcaatgtttgggtgctatttgtggtgttgggttagttaaggcattcatgaagagtgaatacaactcccttggcggcggtgctaacacggtggcgactggttataacaaagggactgctttgggagctgagattattgggacattcgtgcttgtttacactgttttttcagctactgaccctaaaagaagtgcccgtgattcacatgtacccgtgttggctccac

SEQ ID NO: 214317 - DNA, 411 bp, Gossypium hirsutum
cccacgcgtccgaggagctgtgacacccgttaaaaatcagggttcatgcggatcatgctggtcttttagtacaacaggagccttggaaggagctaactttttggcaactgggaaacttgtgagcctcagcgagcaacagctcgtggattgtgatcacgagtgtgatccataagaagcaggttcatgtgattctggatgcaatggggggttaatgaatagtgcttttgagtataccctcaaagctggtggactaatgcgtgaggaggactacccttacaccggcactgatcgagggacctgcaaatttgacaacaccaaggttgctgccaaggtggccaacttcagtgttgtttctttagatgaagatcaaatcgctgctaatcttttcaagaatggtcctcttgcagtggc

SEQ ID NO: 214318 - DNA, 424 bp, Gossypium hirsutum
ccgccgtcatcggtagtgtttctctgcttcgggagcggggggagcttcaatggggatcaagtgaaagagattgctttcgcgctagagcagagtgggcaccggttcttgtggtcattgcgccaacccccacacccatccaagggtccgagggcaagcccaaccgactacgatgatgcatcggaggttctgccagaagggtttttagatcgaacgcatggcataggtaagatcattggttgggcaccgcaagtggcgattttgggccacccagcgactggagggttcgtatcgcactgtgggtggaactcgacgctggagagtatatggttcggagttcccatagcggcgtggccagtttacgcagaacaacaactgaatgcgtttgaattggtgagggagttgggattagcagtggaaattaaaa

SEQ ID NO: 214319 - DNA, 408 bp, Gossypium hirsutum
gcggctaggtttatctggttttgaagcagatgaaaccttatatagcaatcaaggggtcatctctgaactggttggtactcgatctattacttttgccataaaccttggaacttgtagggaccatatccagaggcttgcatgtggaataaagaatctatctgaagcgtccttgttgtcatttgaaaaaataaaaggccaaatagaggaccattgtggttcagcaccatttactgatattactatgtgtcttaatcctagagaagccttctttgcaagaaaaaggaaagtgtcaattggagagagccttgggaaaatttgtggggaactcatatgtccatatccgccaggtatacctgtgatgatcccaggtgagaccattacaaagaaagctctggagtatttggtgct

SEQ ID NO: 214320 - DNA, 414 bp, Gossypium hirsutum
gcttgtttcctatgcaactgaagtcacagctgttgttgagaaaaacaagatcaagaagctcactggggtgaagaccaaggagcttctggtttggatcacactcagtgatatctatgttgatgatccaccaactgggaatatcactttcaagacacctgctgggctgttcagaactttccctgtatcagcgtttgaggttgaaggtgaagttaagggtgctgttaaggacaagaaagaagaaaaggataatgtgaagcctgctgctgtggaagcagtgaaagaggtctagagtagtgagactagaattaaatttccaaattccatccatctgcggggttgtttttggacttgctatcttttaacaagcctcttctattaatatcatcaatagcagcaatcaataaaaaataacag

SEQ ID NO: 214321 - DNA, 346 bp, Gossypium hirsutum
ctttccagaggctggtgagggaaatcgctctagatttcaagactgatttaaggttccaaagcagcgccgtcgctgctcttcaagaagctgcggaggcttatctcgtcggattgtttgaagacactaacctttgtgcaattcatgctaagagggttactatcatgcccaaggatatccagcttgctaggaggatcagaggtgaaagagcttagatcgtttgtatttacttgattgattgtgaaattaggttagatctagtgtttggtatccgtttttggaatttgctttttcgcaaaagtccttatgtaaacggtcgtctttctatggagttctcatattttcgttt

SEQ ID NO: 214322 - DNA, 406 bp, Gossypium hirsutum
agctcacaccgatataagtgcactctctttcattctccacaacatggttcctggcgtcgagctcttttaccaaggcaagtgggtgaccgctaaatgtgttcccaactccatcatcatgcacattggagacaccatcgagatcctcagcaatggaaagttcaagagcattctccacaggggtctggttaataaggagaaggttaggatctcatgggcagttttctgtgagccaccgaaggataagatcatccttaagccactcccggagactgtctctgagaccgaacctccactgttccctcctcgtacctttgctcagcatatcgagcataagctgttcaggaagacccatgataatctgtccaactgaaactagtatttttatttgtcgcgataacctatttct

SEQ ID NO: 214323 - DNA, 409 bp, Gossypium hirsutum
cccacgcgtccgctagatttcccgcgacttgttcgctatcggtctctcgcccgtatttagccttggacggaatttaccgcccgattagggctgcattcccaaacaacccgactcgtagacagcgcctcttggtgcgacagggtcctttttccatctttttggctggtaaaagagaagtagaaatattattctgaaaatgtcttgttctctctctctccctatatatataaatattggtttactgtctgagctgatcttgttaactggcgtacaaactaccttcggctgcaaatcagtcattgtattaactttggtgtttgtactaatgtggaactggtatatgtattattttcttacagagaagtgttgtaaaacaagttcttgaaatggaaattgtaagaaacatgtt

SEQ ID NO: 214324 - DNA, 410 bp, Gossypium hirsutum
ggcaatagttcgtttgcgatttcctttgggttgaaggagaaaagtaaaaggggtatttttgatgtagaatttgatacctccaaagatggaaagtatggtgatttgaatgaaaaccatgtggggattgatgtgggtagtcttgtttcagttaaagtgagaaatttatcatctgtcaatttggtattaaacaatggggaaaagttgcattcttggattgattatgaggcaacttcaaagagactagagattaggttgagtgaatctagtagtaccaggcctaatgaaccattgctttcacactcaatcgacttggccaccctgtggaaggatgaggaagtgtttgtgggcttaagctcttcaaatgggaactcttctcagacatgctttattcacttgtggagctttaagct

SEQ ID NO: 214325 - DNA, 410 bp, Gossypium hirsutum; identical to SEQ ID NO: 190670

SEQ ID NO: 214326 - DNA, 408 bp, Gossypium hirsutum
gtaagggtacgaagagagcagttctggtgtgattcaactaccccaagacccaattcagcgtggggtggatgcatcaatgatgtgaaagccataagaggtgtgatcctggacattgggtttaaagaaagcgatgttaatgtcctcaccgatgcgccagggtcgccggttctgcctacgggtgtaaacattaaggatgcactcaatagaatggtgaacaaggctaaagcaggagatattctatttttctacttcagtggacatggaacacgcgttccaatctttcaacctggccagcctttcaagcaagatgaagcaatcgaggcttgtgatttaaatcttgtcaccgatgtggacttcagacgtttagtttatcggctaccagaaggagcaagctttacaatcctatca

SEQ ID NO: 214327 - DNA, 409 bp, Gossypium hirsutum
  unsure (1)..(409): unsure at all n locations
gccttanaattaattgctgacagtttgttttgaagagctaagtctgccacaaccggtgtgatgcttaatacaaaacttacagcaatcgagtatgatcaaggaataggacaagaagagaaagaagattcattactgcaagacaagactatttaccagaggctaataggcagattgctatatttaacacacacaaggccggatataacatatgctgttcattgcttgagtcaattcatgcaatatcctaaggtctcacatctgaatgctgcactaagggtggtcagatatattaaaaatagtccggggcagggaattttattaagttcttcaagctcttgtcaacttattgctttttgtgactcggattgggcctcatgtcctatgtcccgaaagtcagtcacaggttttt

SEQ ID NO: 214328 - DNA, 433 bp, Gossypium hirsutum
aaaacccggcccgacccacgcgtccgaaagatgaaatgcaaactagagaagttcttgatgaacatggatggcttcataccggaaagatatgtctataagcatactggtggccatctaaagattattgataggaagaagaacatttttaagctggctcatggagagtacatagctccggaaaagattgaaaatgtatatgctaaatgcaaatttatagcccaatgttttatatatggagacagccttaattcttcattagtagcaattgtatcggaggaccaagatgctcttaaagcatgggcttcatctcaaggcattaagtacaaagatttagaacagttgtgcaatgacccaaaggcaagagctgccgtacaggctgaaatggatgccgttggaagagatgctcagttgagaggctcctaattatcaaaat

SEQ ID NO: 214329 - DNA, 391 bp, Gossypium hirsutum
cggactcttgtttcgtcccacgctttcctatcacccactacccgactttcacagggcagatctgtttgttctagttgttcggctgtttctatcctctaagtttcatgtctgatcttgacatccagattcctactgcctttgatccgtttgctgatgcaaatgctgaagacgctggtgctggtgccaaggaatacgttcacattcgtattcagcagcggaacggtaggaaaagcctgaccactgttcatggattgaagaaagaatttagctataacaaaattctcaaggacctcaagaaagaattttgttgttatggcactgttgtccaggacccagaattagggaaggttattcaacttctaggagatcagaggaagaacgtctccacttt

SEQ ID NO: 214330 - DNA, 413 bp, Gossypium hirsutum
cccacgcgtccggtttggagacatgggcatcacatttggcttacatccaagatggtcaattgaagagatctgcgaagttaacagaaattaatgagttgaaaagctcagaaaatttgctctctgttgttgaagcctggcttcgctctgaaaccaagtgcgagaaaaagaaaccgtccaattcccctgcccaagtccagaagtcctcgccttttggtacttctcctttcatgtcgtcgaggcacatggcatactaccgttgatctttctgaatccagctgtttttcaataatttttgaaggccaaaaccagatacacgagcggaaaactttctttctagtcatcttctattaacgtggagttggccattgtggatttatatacttgttagcttgcggttgcctgatggatggcta

SEQ ID NO: 214331 - DNA, 410 bp, Gossypium hirsutum
cccacgcgtccgcccacgcgtccgcgacgtttttatacaaggtggatcgtaaatttagggtggcacatcacttataaatcaggagccttttcttccttgaaatcaaaataaataggagacacaggcttggaagggaactaagctagaggtagagagaaagaagggagttgccaaaatgtcgtcgttcttgcagtcatttctggatcccaagaaaagctggttggcagctctgcacatgaaatccctttccaagcgcctccgcaaatacggccttcgctatgacgatttatacgaccgttactatgatttggatatcaaggaggcgttgaatcggctgccccgtgagatcgtcaatgcccgcaaccaacgccttaagcgttcgatggacctctctatgaagcacgagtatc

SEQ ID NO: 214332 - DNA, 416 bp, Gossypium hirsutum
cccacgcgtccgcccacgcgtccgcggacgcgtccgcccacgcgtccggtagcccatcaaggaagcagctctcggaaacattccaaccattgctttttgtgatactgactcaccaatgcgatatgttgacattggtatccctgccaataacaagggaaagcacagcattggttgccttttctggctgttagctaggatggttcttcagatgcgtggaacaattgctcctggacagaaatgggatgtcatggtaaaagagaacacaaccattatgttgtgattttgatgtttctgagatttgcacattcttatgcgtgagttgtatgtatgcaggttgatctattcttctacagggagcctgaggaagctaaacagcaagaagaggaggaagcaatcgctgctcctgattatggaat

SEQ ID NO: 214333 - DNA, 303 bp, Gossypium hirsutum
ctcctgctgatgctgactatggtgaagctttttacgtatttggaaagccaaaaacagacacggagtttatgccatacaatggggatggattcaagctgtcgataccatctaaatgaaacccaagcaaagaggtggagttcccacgtcaaatgctgaggtatgaggacaactttaactccaccagctattagagcgtaatgatcactcccaccgacaagaagtccatcaccgacaacagttcccctgaagagttactctcttcagaggatatattttcttggaaaacaagcttacttagataaa

SEQ ID NO: 214334 - DNA, 409 bp, Gossypium hirsutum
cggacgcgtggcggacgcgtgggtgttgttgcacttatggtctatgacataacgaagaggcaaacctttgataatgttcaaaggtggcttcgtgaattgagggaccatgcagattctaacattgtcatcatgatggctggaaataaatccgacttgaatcatctcagagctgttaccgaagaggatggtcaagctctggctgagagggaaggtctttcatttcttgagacatcagcactggaagcaaccaacattgagaaggcattccgaactatattgactgagatctaccatatcataagcaaaaaggcattggcagcccaagaagcagctgctagtaccgcaattcctggccaaggaactaccattaatgtcactgatacatcaggaaacactaagagaggatgct

SEQ ID NO: 214335 - DNA, 403 bp, Gossypium hirsutum
ggaagatttctcaccgacttcaatcatttcaactgatgctggacaagaggagggttcaaaaaggaagagagggtatgatgctgatgacatatctaggggtgctgcaaaggctcacaagtttttaaaggagtttgctgagctgccattggagaccatggacctgaaacaggctctgcaacaagtaaccaagctaaaggatgacttacaaaaagatgtaaacaactctgagtggcttcagcaattcttctagatttggttaaattaaagttgcttgtgttggaatactgaattggtaatggaagcagctgctgaactggttttgtcttcattttttacgtgggctgtggggggcatgaagccatattctaggccgctttgtaatttatttcatttcctcattctt

SEQ ID NO: 214336 - DNA, 404 bp, Gossypium hirsutum
cccacgcgtccgcccacgcgtccgaaattttggtaagtctcaaatcacttgtatctctgagttcccgatccgctgccgtagcactacttgttttggtggtttcagtggcagtgcagacccatactacaaatgcacaaagctgcccgaccgagctgacgagcctgaacgtgtgcgcacctttcgtggtgcccggtgcagctgtggctaaccctagcattgactgctgtaacgcactccaatcggtgcaccatgattgcctttgcagcactctaaggatcgcttctcgactcccttctcaatgcaatctcccaccactcacttgtgcttgaaagaaaagcagtggtgctgcatgcttaattgggtaggaaaatctaataacgccatggaatatggataccgccctg

SEQ ID NO: 214337 - DNA, 396 bp, Gossypium hirsutum
cttggctttgactgttgaaaacttccttgagcgtcgtttgcaaactctcgtgttcaagactggtatggccaagtcaattcaccatgcacgtgtgttgatcaggcaacgacacataagggtcgggaggcaggttgtgaacatcccgtccttcatggtgagggtcgactcccaaaagcatattgatttctctcttactagtccgtttggaggtggccgccctggaagagtgaagagaaagaaccagagagcagctgccaagaaggctgctggtggagatggtgatgaagatgatgaagagtaaaccttaggctactatcaaccaccactaggaaccctttaaaagcctttgtttggaacttacaatatcctccattggtagacatggttttgagtttt

SEQ ID NO: 214338 - DNA, 410 bp, Gossypium hirsutum
gtggctgcaagcggtaatgaagttgttaaacaatcattaatggacttacgagtcgatgagctgattctacaagttttgagtggacaaactcagggaagcattcaaagtttgtatgatgctatacgtgttttgttaacctccgatgataatcgggttgttgcttccgaagtttatggttatgcacgaagatttgcgaaaattggaattgcaaaagctcttgtggaaactcttcatggggggattagttcacctagtcttgtttccgctagcatagcactaaaagccgttgctgtcaatgatgaaatatgtaagtccattgccgatgctggtggtatcgatgtgcttcttaagtgtgttgatgatagtggtgaacaacgcaacaaaactgtagctagaactttgtgttcatt

SEQ ID NO: 214339 - DNA, 396 bp, Gossypium hirsutum
ctgacgcgtgggctcattaccactcgctcgaggaacaagacaggcaagtccagatcgatcgaagttcttatttaacgaagtacatggttgagttaggcattcaaatcccaacaacttttgatccttttgcggaggccgaggaattcggaagaacaggaaccaaagactatgttcatatccgaatccaacagagaaatggcaggaaaagcttgacaactgttgaaggtctgaaacaagaactgagttccgataagatccttaagtctcttaaaaaggagttctgctgtaacgggaatgttgtgcacgacaaagagctgggcaaaatcattcaattacaaggtgatcagcggaagaaagtagcacacttccttgttaatgctggaatagtgaagaaag

SEQ ID NO: 214340 - DNA, 406 bp, Gossypium hirsutum
cggtacttgtatgggctcttcattgggcctttttagattcatgctggaaaatcagctcctagtgtgaaaggaggggagcaaacaaaaatggaagagggtgaattttatgccattgaaacctttgcttctactgggaaagggtatgtcagagaagatctagagtgcatccattatatgaaaaactttgatgcaggacacattccactgaggttgcctagagctaagcaactactagctacaataaacaagaatttttcaacattggccttctgtagactgtatttagatcgtttgggagagactaaatatctaatggctttgtagaatttatgtgatgtcggcattgttcagccgtatccttctctctgcgacatcaagggcagctttgtttcttagtttgaacaca

SEQ ID NO: 214341 - DNA, 429 bp, Gossypium hirsutum
ggcgccgctcttgcttgcaccggtcctcccaatatcgaccccaaggtggcaatgctgattgctagggaagttgcaattgcttgccgcctcggtgtagaggtagcaattgttgttggaggtcgcaatttcttttgcggagacacgtgggttgcagctaccggtttagatagaagtactgcatatcaaattggcatgatggcatccgtgatgaattctatactactgcaatcgttgttggagaagatgggtgttcaggcctgcgtgcaaacggcattttctgtgcaagaggcagaaccgtacagccgggtaagggccatacgtcatcttgaaaaaggtagagttgtaatatttggtggcattggtgctggcactggaaacccactcttttctactgatacagctgcagcgcttcgagcttcaaaaattcat

SEQ ID NO: 214342 - DNA, 409 bp, Gossypium hirsutum
caacaattcagatatataatgtccgtgtggatgaagtgaagagtaaactcataggtcactccaaaagaataactggccttgccttctctcatgcactgaatgtgcttgtctcatccggggcagattctcagctttgtgtatggaacactgatggatgggaaaagctgaagactaaattcttgcagattcctgttgggataacaccaactgcacaatcagagacacgcgtacaattccatcaagaccagatacgtcttcttgttgtacatgagactcagcttgccttatacgaaacaacgaagttggaatgttttaagcagtgggtccctcgtgaatctttcgcgccaataactcatgcaacattttcatgtgatagccaactggtatatgccagctttttggatgcaac

SEQ ID NO: 214343 - DNA, 410 bp, Gossypium hirsutum
acccacgcgtcctcttactcttagcccgtttcttttttacggacatgcacgtcccgtgcggaagtttatcaacacaagcttctcccatattagagcaaataatacgaccatctctttagtcgaaaaatgatatccactcaacaattctacgtagaaaaaagagcaagatgtgttgatagacctacttcgacatgggatcatcacccaattagcatctacaagtaaggttcctagagactaggcatttcagtgacttttgtgaagacagtcgagacgtcagctacgtaaccacggtccatacgaattgttgccgccacataaatgcaaaggttaaggatctaacatccgtcctccgcgattggaataagttcaaggcggcttgaaccatatatcccaatactgctggtaat

SEQ ID NO: 214344 - DNA, 408 bp, Gossypium hirsutum
ggggaaacaacaatggtgtctttgaagcttcagaagcggcttgccgctagcgtcctcaagtgtggtcgtggcaaggtctggttggaccctaatgaaatcaatgaaatctccatggccaattccaggcagaatgttaggaaactggtgaaggacggttttatcatcaggaagcctacaaagattcactcccgttcacgtgcatgtaggatgaaggaggccaagagaaagggccgacactctggatacggtaagaggaagggtacaagagaggcaaggttgccgacaaagatcctttggatgaggagaatgcgtgtactgaggcgattgctttgtaagtatagagaatccaagaagatcgacaagcacatgtaccatgacatgtacatgaaagttaagggcaacgtgttt

SEQ ID NO: 214345 - DNA, 393 bp, Gossypium hirsutum
tgaatccacaagcagcttctgaagctgttataattctggcctcatctctttcgaagctagagtccttttggctcaagggttatggacgtctcttgctaggcgggaaccaaccatccatagcagatcttagccttgtttgcaagttaatgcaacttgaagttttggatgagaaggatcgcactaggttattgggtccgcacaaaattgcagcaatggattgagaacacaagaaatgccacaaatcctcactttgatgaagtacatagagtgatcatgctggccaaagaaagacaacaacatcagcgattaaaagcagcaaaaaatgaaggcggatccaacatgaaaaagccgttcgtctttagaatgtgaaggaaaaccgtattaccaagtact

SEQ ID NO: 214346 - DNA, 422 bp, Gossypium hirsutum
ctaagcttaaatggaaccgaggatattcaaataagcgtggataaattttacggtgatccacgacccgagcataagttgatcaacacaggcttctaccatattagatcaaataataggaccatctctttgttcgaaaaatggtattcactcaacaattctacgtggaaaaaagagcaagatgtgttgatagacctacttcgacaagggatcgtcacccagttgcatctccgagtaaggttcctagagacgaggcatttcagtggcttttgtgaagacagtcgagacgtcagctacgtaaccacggtccatgcgaattgttgccgccacataaatgcaaaggttagggatctaacagccgtcctccgcgattggaagaggttcaaggcggctgtgaccaagtatcccaatgctgctggtaatat

SEQ ID NO: 214347 - DNA, 416 bp, Gossypium hirsutum
cggaacttgaatgggcacagcattgggccctatcagatacatgctggaaaatcagttcctattgtgaaaggaggggagcaaacaaaaatggaagagggtgaattttatgccattgaaacctttgcttctactgggaaagggtatgtcagagaagatctagagtgcagccattatatgaaaaactttgatgcaggacacattccactgaggttgcctagagctaagcaactactagctacaataaacaagaatttttcaacattggccttctgtagacggtatttagatcgtttgggagagactaaatatctaatggcattgaagaatttatgtgatgtcggcattgttcagccgtatccttctctctgcgacatcaagggcagctatgtttctcagtttgaacacaccatcctact

SEQ ID NO: 214348 - DNA, 408 bp, Gossypium hirsutum
cccacgcgtccgcccacgcgtccgctctctcgctcctccccttctcgcaagtctttcggggtgaaagccaccagtgagcttccattggtgggaaatcctgcccctgattttgaggctgaggccgtctttgaccaggagttcattaaggtcaagctctccgaatacattgggaagaaatatgtgattctcttcttttacccgctggacttcacatttgtttgccccacagagattactgctttcagtgaccgctatgaagaatttgagaagctaaacaccgaaatattaggtgtttctattgacagtgtgttctctcaccttgcctgggttcaaacagatagaaagtcaggtggtcttggtgatttgaagtatcctctcgtatctgatgtcacgaagacaattgccaaa

SEQ ID NO: 214349 - DNA, 400 bp, Gossypium hirsutum
gaaagttcagatgatgaggaggaagctgagtccgaatcatcaaaggatgatgaagaaagtgaggacgatgattgaatccaggatggttttggattaggttctgtaaatgaaaccatgtttaaaaatactgtctttagcagcatggtatgatggtatgtttgcttgatgtgtcgtgtgcttggtttttcgatgtgaaagaaacgcatctcctatatttctatatatgcagatatatgtttgtgttaccatgttgaaggcactgcaactgcaaaagagagtactgaggatatggcggacggccattaatggcagcgactcgacagccacattccaacagctctttgcttgtatcatccgtgtgaactatcacttcaatgaaacataagcagtctttcatggc

SEQ ID NO: 214350 - DNA, 403 bp, Gossypium hirsutum
gcttgatagctgcgattaccgagaatttttacttctacttggatgctccaattatgtggttatgttcacaggatgtgcctacaccatatgctggaaccctggaggaagagactgttgttcatcctgcccagattgtgacagccgttgagcatctctgccagtaattgcaaatttgcaatagcagaaatattgatgcatggttgaagttctgttagtgttgtcatgtttattttgaaaccattctcttgcgactttgttttcaatatataagtttcacgagttatgttagtgttatgtttgttgagttgttcgtgggtttaaggcatttagtttgacctttgttttttcttgactgaaatgggcagcaagacctttaagcagtgttacatgtaaggtactggaa

SEQ ID NO: 214351 - DNA, 400 bp, Gossypium hirsutum
  unsure (1)..(400): unsure at all n locations
cccacgcgtccgcccactcgtccgcccacttcgtccgatctccgtcaagacaaactggcgaaggcccaagggtattgactctcgtgttaggaggaagttcaagggatgcactttgatgcccaacattngttttggctcagacaagaagactcgccactatcttcccaacgggtttaaganntncgtcgtgcacaatgtccaagagctagaacttctcatgatgcacaacaggacatactgtgctgagatagcacatgatgtttcgacgaagaagaggaaggaaattgttgagcgagcggctcatttggatgttgtcgttaccaacaaattggctaagttgcgcagccaggaagacgagtgaaggtcggttcttgaatgttgattttgttctttttaatat

SEQ ID NO: 214352 - DNA, 404 bp, Gossypium hirsutum
agcatttgaagtaacacatgggaaagatctatggagctacaccgaggcgaaccccgagtgtagagaactccttaacaactccatgggttgcaaagctagactgacagtgcaagcgacaatcgaaggatgtcccgaagtgttcgacggagtcgaaagcctggtcgatgtcggcggtggtaacgggactgctttgagccttttcgtcaaggcattcccatggattcgaggcatcaactttgatctccctcatgtcgtcgccgttgcagaaaaatccgatggcattgaaaacgtaagaggagacatgttcatgtctatcccaaaagccgacgcagcgtttctcatgtgggtattgcatgattgggacgacgaggaatgcattaaaatcctaaaaaaatgtcgagaag

SEQ ID NO: 214353 - DNA, 381 bp, Gossypium hirsutum
  unsure (1)..(381): unsure at all n locations
tcggatatatccccaattgcccttttatcatacaatatcctcggaggcatgcagcaggatagcactggaaatgtggcagttgaagcactgcaggaactttttgccggtgatggacaatcaaaaaaaggtcgaagaacacaaaacgaggtgccacttcctcctagtgtttaccaaagactcacttcaagttctacgctaatgaacctggcacaggccctagcttaccacaaaatgtgctacgaggagatgccgcttcaagagttgcaagcaacacaggagcagcaaaccatccaaaacctatgcgacacactaagaaccattctccggttatagatagatagtcgtatgctacatttcttttttcggntgttgtatgttatt

SEQ ID NO: 214354 - DNA, 396 bp, Gossypium hirsutum
cccacgcgtccgactacatcaccttgatgttgtttagccaattttccccaatgtgagcggggggcaagcccttcagcgccttattttgcctacaaatttggattccgcagggatcatgcagcagtccatctgctatgacaaaaccaagagttggaccatttcggtttcatggggttttgcagttcaagtttttagagggatcttttcaccacgggagatagaaatgccttcgagaacattcttgaattggtacaaaagagcagattacacagcatatgcattcaacactctccctgttagccgaaatccatgccaaaaaccttttgtgttctacatgtcaagtgtgagaatggattctgaactgaacaaaactgtgagtgaatacgagcgacacca

SEQ ID NO: 214355 - DNA, 422 bp, Gossypium hirsutum
cccacgcgtccgtgacctactctgtgcacctctcgtcgatcataataggcgcgtcgtcgagaagcgtgtacaacgcgctacttacattagcagtgtacgcattgatatgtcgatacgagggtttaccgtttcgatacccaggtagccggtacacatgggagcatttttgcgacatgtccgatgcacgcgtgctcgccaagcagcatatatgggccgcagtgactcccagtgccaagaaccaagcctttaattgcactaacggcgatatgttcacttggaaaagcttatggaaaaaattgtgcgacatatttgatctcgaatttatcccttccgaggagttggaaaactttgattttgttgagctgatgaaggagaaaagcaaggtatgggatgaaataatggaaatgcatggattgttcaag

SEQ ID NO: 214356 - DNA, 406 bp, Gossypium hirsutum
gttcaccatcggctctcccctagtgaccgattcttggtactatcatctgatggactttaccagtatttcagcaatgaagaggttgttgcccatgtcacatggttcatggaaaatgttcctgaaggtgatcctgcacaataccttgttgcagagcttctgttccgtgctgcaaaaaagaatggaatggattttcatgaattgctcgacatacctcatggagatcggcgtaaatatcatgatgatgtttctgttatggttgtttctttggagggaagaatttggaggtcttctggatgattttttttcttcttttctatccctttttattttggatcaccgtttgactacttttttcaagcaagggttgaaatcaatgatgcattacagaaatgaatgagaatcctag

SEQ ID NO: 214357 - DNA, 403 bp, Gossypium hirsutum
cccacgcgtccgctttgaagagcggctgctcagattttgcctatttcccagattgttctgtcagtttgaaacgatgtctacggctggtgaagctgcttgttcttacgctgctttgattctctatgatgatggaattcccatcaccgctgataaaattgcaacaattgttaaagctgcaaatgtttcggttgaatcttattggccaagcttgtttgcaaagcttttcgaaaagtgcaacattgaggatcttataaccaatgttggtgctgctggtgctggtgctccagttgccgcatctgcacctgttgctgctggcgagagtggtggtgccgctgctccacctcctgctgaggaaaagaagaaggaagaaccagaggatgagagtgatgacgatatgggattc

SEQ ID NO: 214358 - DNA, 408 bp, Gossypium hirsutum
agaaagatggctgctgctgcccggattcaatataggttccgaacttggaaaattcgtaaagagttccttaatttgcgccaccaggctaccaaaatccaagcagctttccggggcctcctagtaaggaggcagtaccgcaagattacctggtcagttggtgtgcttgagaaagcaattctgcggtggcgattaaagagaaaaggtttgcgtgggctacaaattaacacagttgacacggtcacagagcaaaggccggaaagtgacactgaagaggacttctacagaaccagcagaagacaagctgagcaacgcgtcgagaaagctgttgttcgagttcaagctatgttccgctcaaagaaagcacaagaagactatcggagaatgaagttggcttgtgatcaagcaatg

SEQ ID NO: 214359 - DNA, 406 bp, Gossypium hirsutum
  unsure (1)..(406): unsure at all n locations
cccacgcgtccggaaaaaaggaaaatggtgatgagggtgatggtgcaccttccaaggcaggaattttcggaaacatgcaaaatctctatgagacggtgaagaaagcacaaatggttgtccaggttgaggctgtgaaggtgcaaaaagaactagctgcagcagaatttgatggctattgtgaaggggagctgataaaggcaacattatctggaaaccagcagcctatacgcattgagattactgaggctgcaatggaacttggtgcagaaaagctatcatttttagttaatgaagcatacaaggatgcacatcaaaagagtgtccaggccatgaaagaaaggatgagcgatcttgcgcaaagcttangaatgccacaaggtctcggtgagggattaaagcaacaatg

SEQ ID NO: 214360 - DNA, 384 bp, Gossypium hirsutum
  unsure (1)..(384): unsure at all n locations
cccacgcgtccgcaaaatatctgctttttcttagttttcctttttgtcccttgtttattggatatttccccctcatggccgccgctgatgtcgagttccggtgcttcgtcggagggctcgcatgggccaccgacgaccgggccctcgaagaagccttcagtgcgtttggtgaaatcgtcgaatcgaagatcattaatgatcgtgagactggaagatcccgaggctttggattcgttactttccgtgacgagaaagctatgagggacgcgatcgaaggaatgaacggtcaatatcttgatggaaggaacatcaccgtcaacgaagcccaatcgcgcataattggangcggtggcggaagatttggaggaggaaacggtggttaca

SEQ ID NO: 214361 - DNA, 397 bp, Gossypium hirsutum
ttctcttctagtgatcttcttttgttcgttacagaaagtatgattttacacttaccttgtacaactctttatcaaacaccattactatccaatcctagaaatcttcaacaattagctaaaacccaaaccagtttttcaccagccaacaagttgtccattgcaagaaagcttgtaacaagaggatgcagcaatagccaaggtggtgaaggagagaagaagacagaaagtagaagtttcctatctctagaagaggctggtttggttgaaatatctggtttaagctctcatgaaaagttcctatgtcgattaacgatatcatcattgaatctacttagagtgatatcagaacaggaaggatgttcaattgaagagatgaatgctggaagggtatgtgatt

SEQ ID NO: 214362 - DNA, 397 bp, Gossypium hirsutum
cccacgcgtccgcagcctgaccccttatgtattacgtttaaaggagaaagccatggagacttgcatatagatttcacctattatgtaaatacggatcttgtgattgcatttcactgtgattgccaagtatcctataggtataaatacaagtttcttcgagcaacaacttctaatctacccagcagtgttattaaagataacagaggaagtaaactgaccattgggagaggagggatgttgaaagttcaacacttggtttcagttgctagatcagctacttcacatcctcatattgattctgctgagcatcaacaacctagtctaattgcttatatcgagttctttgtgaaatctgaagtagatgaattaaagttgatttctaagacttctgggtttt

SEQ ID NO: 214363 - DNA, 417 bp, Gossypium hirsutum
aaaaaccggcgcgacgccacgcgtccgatcaaatcctgctgatttcatggctttattttataagaatggaccggttgaagagaaggtctccttttatgaggattttgctcactacaagtcgggagtttacagacatttgactggcgatgttatgggaggccatgcacttaagctgatcgggtggggaacttcatatgatagaaagaattactggcttcttgcaaaccaatggaataaagactggggtgatgatagttacttcaagatcaaaaggggtgtacatgaatgcagtatcgaattcgatgtcgtaactagattgcctttcaccaaaaacctttgttcgataagttacagatactggaattgtcgaatatgcttcattctaagagaagaacatcttgactggcttatctaata

SEQ ID NO: 214364 - DNA, 404 bp, Gossypium hirsutum
caatcaaccagggaagagttggataatatcatggccgctaccaaaaatggagttgcactcactggtgctgcagccactggatcagttggacctgttatcggaaaagtggacattggtgaattggaggattcatactatttccgtgtcgcccttcctggggtctcaatggataaaagagacttcaattgtgacatagaacctgatggaaaagtcgtaataaaggggatgtcaactactggcgagaagatagtgtgcaagaactttcaaatcttccatatgctgacacaaaatctttgcccaccgggactgttcactgcctcgtttcagctccctggtccagtgaataacgaagacgctaagagttatttggctaacggaatgcttgaagcggttgtgaagaggat

SEQ ID NO: 214365 - DNA, 425 bp, Gossypium hirsutum
cgaaggggaaggagacatttgagcggcacttgtttaaaaaatatgtctgcaacgggaaacgtcggcggcggaggaccagaggaggataagaagccggccgatcaagctaatcacattaatctcaaagtcaagggccaggatggaaacgaagtgtttttcaggattaagagaagcactcaaatgaggaaactgatgaacgcatattgcgataggcaatcggtggatctgaactccattgctttcttgtttgacgggcggaggctccgtggagagcagactcccgatgagctggagatggaggatggagatgaaatcgatgcgatgttgcaccagaccggaggagcggaataaagcagtaggtattattatatatgatattggttcttctatatatgtaaatgaaagaattatagaacatttggaac

SEQ ID NO: 214366 - DNA, 411 bp, Gossypium hirsutum
cccacgcgtccgggaaacttctgggcaagaaaccattaagcttgcaattcgtgcattgctcgaggttgttgagagtgggggaaagaacatcgaagttgctgtgatgacaaaggaacatggtcttcggcagcttgaagaaactgaaatcgatgccattgcagccgagatcgaggcagagaaggaagcagccgaggctgcaaagaaggcccctccaaaggaaaaatgatgaagcatcaactgtttaagctatcatttcctttttctttttttttcttttctggtctgactgcttaatttctgcaattgaagtttcatttgccattgttggcattttatttgctttttagttgtttcagtttaagcaagtatcaatcacattcagataatatgcaaatatgaatcttgcaacaa

SEQ ID NO: 214367 - DNA, 401 bp, Gossypium hirsutum
cccacgcgtccgcccacgcgtccggatgcccacagtgcaaagggaacaaggttactcaggaaaagaaggtgctggaagtacatattgagaaaggaatgagagatggtcagaaaattacatttgagggacaagctgatgaggctccagatacaataactggagacattgtttttgtattggaacaaaagaaacaccccaaatttgataggagatttggggacgaactttatgttgaccacaaactcagtttgacagaagctctatgtgggtttcagtttgccctaactcaccttgatggcaggcagctcttaattaaatcaaaccctggcgaggtcgttaagcctggtcaatacaaggctatcaatgatgagggtatgccccaccatcagagacctttcatg

SEQ ID NO: 214368 - DNA, 391 bp, Gossypium hirsutum
ccgtaacggcgccatttgcctcgatttttttaaggaccaatggagccctgccctagaggagatacaaagtattgctttcaatcatctaactttcgacggacccaaacactgatgatgccttattgcccgagattgcccacatgtacaagaccatcagggctcacaacgattcatctgctcggagctgcacccaaaaatatgctctgggtttgtgagggcttttgcatctgcttgtaggactgcatagtatcaaactaatatcatcaatcttacaggtgaaaatccatgtagaaggatataggaacagactctcaagcttatacaggacctatcgctcctttaaacacatttggtgactgtactgtctgtatgaaaagcaacttacaaactt

SEQ ID NO: 214369 - DNA, 407 bp, Gossypium hirsutum
gtgatacagtacaggatccagaaaactctgtaccagctgcaaatgaacagttggaaaggactattgatgaaggtgctcaagcttgctctactttattcatagcaaatctaggtccaaattgcactgaatatgaactgaagcaagttctatccaagtatcctggattcaatatgctcaagattcgggctaaaggaggaatgccagttgcatttgctgattttgagcaagtagaacaagcaacgaaagtgatgacggatcttcagagcagccttttgccttcatcagaccgaggcggcatgcacatagagtatgcaaggtccaagatgaggaagccctaggaaaaaggtaatggagctggctatctgcaaaaaatggtcccaccagttgtattttagaagcagtctcgt

SEQ ID NO: 214370 - DNA, 395 bp, Gossypium hirsutum
ccacgcgttcagtgcaaattttggagggttcttccactactcatactcagttgttagaggagacgatttaatcgtccctgttgacatctatgttcctggttgtccacccactgcggaggcgttattgtacggagttcttcaattgcagaaaaagatcaacaggcgcaaggatttcctccattggtggtccaagtaagaaaatttgcaagttatttcaaggctatttgcactgcattttgcagtgttgagtaacaaataaataaaatcaaactttctggtgaaatgccatgtagatggagattgttaaaaaaagcttttgattataaaaattcatgggggttctattactttgcatggtgactgtacttcctgattaatttggaacttacagtttt

SEQ ID NO: 214371 - DNA, 400 bp, Gossypium hirsutum
cccacgcgtacgatggacaactgcgaagagctgatccctgaattccttggctttgtgaagggtgttgttgactcagaggaccttcctctcaacatctcgagagaaatgttgcagcaaaacaagattttgaaggttattcgcaagaacttggtgaaaaagtgcatcgagctcttctttgaaattgctgcgaacaaagaagattacaacaagttctatgaggctttctcgaagaacctcaagcttggtatccatgaggactctcaaaacagaaacaagattgctgaattgctccggtgtcactctaccaagagtggtgatgagatgaccagcttgaaggactatgtgaccagaatgaaggagggtcagaatgacatctattacatcactggtgagagcaaaa

SEQ ID NO: 214372 - DNA, 352 bp, Gossypium hirsutum
cccacgcgtccggctcatgtacctgccccttctgaggatgctgagcaacttcgtaaagcttttgaaggatggggtacaaatgagcaattgattatcgacattttggctcacaggaatgcagctcagcgcaatttgattcgtaaaacttatcgtgaagcttatggggaagatctccttaagtctttggatgaggaactttcaagtgactttgagcgagctgcggtgctgtttactttggaccctgcagagcgtgatgcatttctggctcatgaagctacaaagaggttcacatcaagccattgggttctcatgggaaattgcttgcactaggtctttacatgaactgttcaat

SEQ ID NO: 214373 - DNA, 396 bp, Gossypium hirsutum
agcatccttgcaatgagtgcaagggtactggtgaaaccatcaacgataaggatcgttgcccacaatgcaaaggtgataaggttgtgcaagagaagaaagtcttggaggttattgttgagaagggtatgcagaatggacaaaggattactttcccaggagaagctgatgaagcgcccgatacggttactggggacattgtattcgtcctgcaacagaaagatcatcctaaatttaaacgaaagggtgatgacttatttgtagagcatacattggcacttactgaggccctttgtggctttcagttcatactgactcacttagatggcagacaacttctcattaaaacccaacctggggaaagtcgtaagcctgatcaattcaaagcaataaacgatg

SEQ ID NO: 214374 - DNA, 421 bp, Gossypium hirsutum
atcaagctagaccttgaaagcaacaaaattgttgatttcatcaagtttgatgttgggaatgttgtcatggtcactggagggagaaacagagggcgagttggagtaattaagaacagggagaagcataagggcagctttgagacaatccatgttcaagatgctgctgggcatgagtttgcaactcgtctcggcaatgtcttcaccatcggaaaaggaacaaagccatgggtgtcccttcctaagggtaagggtatcaagttatccatcattgaggaagctaggaagaggcttgctgcccaaaatgctgcctaaactttagcataagacatccagatatgtattgctgcagtagtttattctaaagattagctggagttgtttatttatgaagttgtgagcaaaattttgagaactatttact

SEQ ID NO: 214375 - DNA, 396 bp, Gossypium hirsutum
caattttagaatcccctcaggagattgaatctccaaagaaagtagcttgtcatccaatgccatatctttatgcagtttatttctgtcactttgatgccactgagactaaagctttcaaactccgtttagttggtgatgttacaggagataaggtggatgctgttgttctttgccatatggatacttcaggttggagctctgatcatgtcgcttttcgcatgcttggtattaagcaaggaaacactgtttgccatgtattttctcaaggtaattttgtttggattaatcagccatcggatatcgctgccggtgccatataagtgttgaactgttcgatggagcactcatttggcactacgtatggagactctgatcccgatataagtatttaaaagc

SEQ ID NO: 214376 - DNA, 410 bp, Gossypium hirsutum
cccacgcgtccgctcaagtttcccctcacaactgagtcagccatgaagaagattgaggacaataacactttagtatttattgttgacatccgtgcagacaagaagaagatcaaagatgctgtgaagaagatgtatgatattcaggccaagaaagtgaacaccttgatcaggcccgatggcacaaagaaggcatatgttaggttgacgccggattacgatgccttggatgttgcaaacaaaatcggaattatctaagcagttggcgactaccttgttttgaatgctttattttttgtgttttgttgcaaggtgagactgttattttcagattcagctggaagatttaagcttagtttttttgttttttaaggttgtaatcttgctttactgccacttaatcatctttggta

SEQ ID NO: 214377 - DNA, 418 bp, Gossypium hirsutum
atccattgcacccaaaaagaaaacgcgagaaaaaaaaaaaaagagaatccttccaacaagttatttgtgagaaatactagtgggaagtcaaaatgcaggcttgtaatggagctgcaatgatgggttctttgcttcagcccatatgggtcaaagggaatagaccaatttttcctttaaaagggtatggtcttaagttcaactctgtcaaaccctgtagagctcaacttgaaagcagcttggttactggaaagcctccctcttcggactcattccctgtggtcgaaacccgatttgtggaccatggcctcagtgaagccgatcccgaagttcgtgctattattaacaaggagaaagagaggcaattcaaaagccttgagcttattgcctcagagaactttacatcccgagcagtaatgga

SEQ ID NO: 214378 - DNA, 422 bp, Gossypium hirsutum
ggtcaacgaatccgatctacctcaccttaactacctacgctgcgtaatacgtgaaacattccgcatgcacccggccggaccgtttttaatcccacacgagtcccttcgggccacgaccattaaacggcttttacatcccggctaagacacgtgtcttcatcaacacccatgggttgggccgaaacactaaattatgggacgatgttgaatcgttcaggcccgagaggcattggctggctgatggcgctcgagtcgagatcagccacggagctgatttcaaaatcctgcctttcagcgccgggaaaaggaaatgtcccggcgcgccacttggagtgacactggtgctcatggctttggctcggctctttcattgctttgattgggctccccggaatggtatgaggcccgaagatataaatacc

SEQ ID NO: 214379 - DNA, 405 bp, Gossypium hirsutum
  unsure (1)..(405): unsure at all n locations
cccacgcgtccgaaagatttcaacaagaagttacagggtacagtcacagagttgaaacaggagcttggtggaatccatctggttatgtcaagcccctacgataagctcatggaaatgattcggaatccaagtcactttggatttgaagatgcagaaacagcatgctgtgggactggattcttcgagatgagttacctgtgtgataacatgaacccatttacatgttcagatgccaataagtatgtattctgggatgcctntcacccgacagagaaaacaaatgccattttggctgattatgtggtcaaaactaccctagccgagttccaataattactaaaaagtaaaagaagcagcactgcttcatttgtgtagaactagtattagtagacattatatttacta

SEQ ID NO: 214380 - DNA, 420 bp, Gossypium hirsutum
cccacgcgtccgcccacgcgtccgaaacggtcatgatcattgcttgcaacacctgagtagcatcacaaggtaaattcaataagagtgagtgcctcctcaaattaaaagaatattggttgagggtaaatgtgtttatgattgtaaatgcagcccgctccagtttttcaccagtggaggtggttcgaaggcatggaaaggtgattttgattatttagacggtgggggagatgatgaaatcaaattttattacgacggccaaggattcatgtctgttgagcttactcccactaatgctaagattgccttctatgatgtttccggcaatgttctgcatagcttcaattccaaccaactctactacacttacagtactgaaatgtaggaaataatagaataatgatggatgaaatgaatcaatcg

SEQ ID NO: 214381 - DNA, 409 bp, Gossypium hirsutum
cccacgcgtccggattactttgttgttttggttggtgatatgatcacagaggaagcccttccaacttaccagacgttgcttaacaccatggatggaactagtgatgaaacaggtgctagcctttctccttgggccatttggacgagggcatggaccgctgaagaaaacaggcatggcgacctacttaataagtatctctacttgtcgggaaaagtcgacatgaggcaaatcgagaagacaatccagtatttgattgcttcaggaatggactcgaagagcgaaaacaacccatatctgggagcgatctacacatcattccaagaaagggcaacttttatttcccatggaaacactgcaaaactcgctaaggagtatggggacactgagttggctaaaatatgtggtttca

SEQ ID NO: 214382 - DNA, 262 bp, Gossypium hirsutum
cccacgcgtccgtttctttgttctcattcttttcatttttctctcgaagtccaataccctcattttttttcccttgatttttgctctccttgatcctgttccatctgccaaaaggttatctgaaatgaattttaactttagaagcttaaatgaggattctgcaacttcccaaatggaaatccttagatgtccatttttgagaaacattaatgagccgactaacttttcattctcgtcgaccttgccctttcccttgccgtac

SEQ ID NO: 214383 - DNA, 394 bp, Gossypium hirsutum
ggcatggtttagagaacttcctagtggagtgctcgattgccttacaccggagcaggtgatgcattgcaacacggaagacgattgcgttgagcttgtgaagttgcttccttcaacagaagctgctttacttgattgggctatcaatttgatggcagatgttgtggagtatgaacaatacaacaaaatgaatgcacgcaacatcgcgatggttttcgcaccgaatatgactcagatggccgatcccttgacagcattgattcacgccgtgcaagtgatgaacttcctcaaaacattgatcttaaagacaattcgagaaagggatgagtccgctaccaaagacaggttgcttccatcttgctcagattgtcctacaggcataaccgatacatgtgca

SEQ ID NO: 214384 - DNA, 422 bp, Gossypium hirsutum
tcagcaaccaaacaaaaccttccattgtcttctagaactatccaagcacactggtattaatcaatggctcgtacaaagcaaacagccaggaaatcaaccggtggaaaagctccacgtaagcaattggcgaccaaagccgcgaggaaatcagctccagccaccggaggagtgaagaagcctcaccgtttcaggccaggaacagtggcgttgagagaaatcaggaagtaccagaagagtaccgagcttttgatccgtaaacttccgttccaaaagctagtgagggaaatcgctcaagatttcaagacggatctgagattccaaagtagtgcggtggcggctttacaagaagcggcggaagcgtatctggttggcctgtttgaggatactaatctctgtgctattcatgccaagagggttactat

SEQ ID NO: 214385 - DNA, 360 bp, Gossypium hirsutum
ccaactcgtcgaccatcaactccatcaagtactaatatatctgcccctccaattaaatcatcttgttcagttacaaagccaactactgcagcatccagaagttctgtaccatcacgtggtgcctcaccgactgtagcatctagaccatggaagccttctgagatgcctggtttctcacttgatgctccaccaaatttaagaacaacactacctgatagaccactttcggccaccaaaagtaggcctggagcggccagggctcgatcttcttctgttgaaccaggtgccattggtagaccgagacgacagtcatgctctccttcaagaggacgtctccctaatggtgctatgctgcattta

SEQ ID NO: 214386 - DNA, 344 bp, Gossypium hirsutum
ccaaccgttcgaccataaactcgatgaagtacttatatatctgcccatgcacttgaatcaggtgtgatcagttacaaagccaactactgcaacatgcagaagttcagtaccatcacgcggagcctcaccgactgtggcagataaaccatggactccttcttagatgccagggttctgacttgatgctccaccaaatttaacaacaacactacctgatagaccacatactgccaccagaagcaggccacgagcaccaagtgctacaactttttatgatgaaccaagtgccatcggtagaacgaaacaacagacattctctacatcgagaggacgtgctcgtaatg

SEQ ID NO: 214387 - DNA, 415 bp, Gossypium hirsutum
gcaaaggcatggaaaggcgagggtgagagtgggcagagtttggaggagcaaagatggatgccgccacttcatggtcgaatggaatgttaacatcagcttgctttccaattgcgttgccgcttatgtccgcgatgacaactctgacatcgtcgctactgacaccatgaaaaacactgtttatatcaaagcaaaggaatgttcagaacaactttcagcagaggagtttgctattctacttggcaagcacttcacatcattttatccacaggtttttactgcaatagtaaagatagtggaaaagccatgggaacgcatttctgtcaatggtcaaccacatgaacatggctttaaactgggatctgaaaagcatacaacggaagcgattgtacagaagtctggtgttttacagctgact

SEQ ID NO: 214388 - DNA, 383 bp, Gossypium hirsutum
  unsure (1)..(383): unsure at all n locations
ggaaatttcagggtgctatgcaaatagttgctatggccgaaattgtgatatacataaacattgatgactcctctgagaattactggctccggttgctggttcgagaatgggctcaattctgcatatttttgtacattgggtggacttttaggtcacaagaattggcaccacgcttttcggttatgccgactttaaaatctaaagtggatttaatggtccctccgatctatcgtatagtaagttaatttgctatttgaaaacagatttttgctttgtgtaatagactcttctagagatagcatttagtttccatgtcgacggagtaatttgaaaccttaattngcattcaactaattatttaaatngacttttacatcagttga

SEQ ID NO: 214389 - DNA, 299 bp, Gossypium hirsutum
gcccagagccacgcgtcctcgcaatcgcaagtatattgcacggttttttatgtaccgtggcgacgatgaacccggggatgtcaatacttctgttgccaccatcaaaaccaacataactagtcaattcgacgactgttgcccaactggattcaagtgtggaatcaactaccatccaccgactgacatatctggaggtgatcttgctcaggtccaaacagccgaatgcatgatgtccaactaaaccagcgttgctgaagtgtactgccgcatagaccacaatttagatctcatgtatgcca

SEQ ID NO: 214390 - DNA, 416 bp, Gossypium hirsutum
cacccctgcagctcttgttcacaagacattgcccaggattgcatccccagtccccattgggttgccaacaatgggaaagagggggaaggtgatgatgatgtgtagcatggagaagaagagtgagaatgggtcaaacatggggatgagtgcatcattgctggcagcagcctgtgcagcaaccatgtcaagcccagccattgctctggtggacgagagaatgtccactgaaagaacaggacttccctttggtttgagcaacaacctcctcgggtggatcctgtttggtgtgttcggcctgatctgggctctttacttcatctatactgcctccctggaagaagatgaagagtctgggttgtccctttaaaacccaaaccttatttccttcctttgttcttcattgcaaatatcatgta

SEQ ID NO: 214391 - DNA, 356 bp, Gossypium hirsutum
cccacgcgtccgctgtgaagcaagaagtcattgttgaccttgttgatcaatgccgttcttaccaaaagcgtgtgatgcttcttgttaatagtaccacagatgaggaacttttatgtcaggggttagcactaaatgacagcttgcaacgtgttctttgccggcatgatgacattctgaaaggaaatactgttccgactgaagcagtagcagagactcctgttgtgccatatgttaatattaaccatgaggatgatgagtcggaagatgaatttgctcagctatctcatagatcctcaagggataattctcaaggacagggcaggagagcgcctaaaagtgagcctgggcgagttgat

SEQ ID NO: 214392 - DNA, 420 bp, Gossypium hirsutum
atcctcgccatggcaagtatatggcttgctgtttgatgtaccgtggtgatgttgtgcccaaggatgtcaatgctgctgttgccaccatcaagaccaagagaactattcaattcgttgactggtgcccaactggattcaagtgtggtatcaactaccagccaccgactgtcgttcctggtggtgatcttgctaaggtccagagagccgtttgcatgatttccaactcaaccagcgttgctgaggtgttctcccgcattgaccacaagtttgatctcatgtatgccaagcgtgcctttgttcactggtacgtgggtgagggtatggaagaaggagaattctcggaagctcgtgaggaccttgctgcacttgagaaggattatgaagaagtcggtgcttaatcaagcgaaggtgatgaggaag

SEQ ID NO: 214393 - DNA, 408 bp, Gossypium hirsutum
cttttacttgaatttattggactggggcagcagcaatgttcttgcaatagcacttggaaacactgtttatttgtgggatgcttcagatagttctacctcagaacttgttaccattgatgatgacaatggcccggtaacaagtgtgagttgggctcctgatggtcagcatattgccataggcttgaacaattctgaagtacaatcatgggattctgcttcaaaccggcagttgcgcactctgagaggttgtcaccgatcgagagtgggttcaatggcatggaacagtcacgttcttacaactggaggaatggatggtatgatagttaacaatgatgtaaggattagatcccatgtttgtaaaacctacagaggacatcggcaagaagtttgtgggctgaaatggtcagc

SEQ ID NO: 214394 - DNA, 419 bp, Gossypium hirsutum
cttttacttgaatttattggactggggctgcagcaatgttcttgcaatagcacttggaaacacttgttatttgtgggatgcttcaaatagttctacctcagaacttgttaccattgatgatgacaatggcccggtaacaagtgtgagttgggctctctgatggtcagcatattgccataggcttgaacaattctgaagtacaatcatgggattctgcttcaaaccggcagttgcgcactgtgagaggttgtcaccgatcgagagtgggttcaatggcatggaacagtcacgttcttacaactggaggaatggatggtatgatagttaacaatgatgtaaggattagatcccatgtttgtaaaacctacagaggacatcggcaagaagtttgtgggctgaaatggtctgcttctggacaa

SEQ ID NO: 214395 - DNA, 414 bp, Gossypium hirsutum
  unsure (1)..(414): unsure at all n locations
ctaccacaacttgaagtctgtgatcaagaagaagtatggtcaagatgcaaccaatgttggtgatgaaggcggttttgctcctaacattcaggagaacaaggaagggcttgaattgttaaagactgccattgcaaaagctggttacactggcaaagttgttattggaatggatgttgctgcgtccgaattttatggatcagcagataaaacctatgatctgaacttcaaggaagaggtgatttgtgatacaagatattctcagtcattgcagctttatgagattctgtttatatatgattaccatatcattttagatatatattcaagttgctgtgtatatgtcgngtctatattctattgttcggcatgtgcagaaaaatgatggttcacaaaagatatcaggagatgctctca

SEQ ID NO: 214396 - DNA, 422 bp, Gossypium hirsutum
  unsure (1)..(422): unsure at all n locations
gacctgaacgtggtctcggcaggcttaggatgattaccacccagcctttgtccatcaaagatgaaggagaaaggaaaaagtaccagaggtcgttgtcgctgccgaatagtccagtgtcaggtccgacacccgtgacaccgacgactccgacggcgcgtaaggagaacgtgtggaggagtgtgttccatccgggtagcaacctcgccaccaaaagtataggttctgaagttttcgacaagccacaacctaactctcctaccgtctatgactggctttacagtggggagaccaggagcaagcatcgctgagagggtggcgactgacaggcggctagcaggctgctctagtgagccagggttgcatgtaaatagngngttctctttccttttctttttttcaatgtgcttatttgtctctgtctt

SEQ ID NO: 214397 - DNA, 417 bp, Gossypium hirsutum
gccggttccaaagccaagaaccttgaaaaagtggcaaacgagacgactcataagacaagccgagggagagagaaagaagggaagactcagcgaactcgaaagaacatttacagaggaatcaggcaaaggccatgggggaaatgggcggctgagataagagatcctcacaaaggtgtccgagtctggctcggtacatacaacacggctgaagaagcggctcgagcctacgatgaagccgccaagcgcatccgtggggagaaagccaagctcaacttccctcaaactccacacctaactcagcctcctgctaagaaaaggtgtatgatggctcctgagttgactccgccgagttctgaaacaaagagcccaccaaccccacaactttttatgggttttggttacgagaatggagtttac

SEQ ID NO: 214398 - DNA, 409 bp, Gossypium hirsutum
gcagaaaatatctcaaatctcctcctccttttcagaaatcttagtatcatcaccatggggtgaaatcccaaggtcttctttgacatgactatcggtggtcagcccgctggtcggattgtgatggagcttttcgcagattgcactcctcgcactgctgagaacttccgtgccctctgtaccggcgagaaaggcgtcggccgcagcggtaagcccctccactacaaaggctcctctttccatcgtgtgatccctaactttatgtgccaaggaggtgacttcacggccggaaacggtaccggaggtgaatccatctacggatccaagttcgctgacgagaacttcatcaagaagcacactggtcccggtattctctcaatggctaacgctggtcccggaactaacggatctc

SEQ ID NO: 214399 - DNA, 419 bp, Gossypium hirsutum
cccacgcgtccgctacacatgacgtcgtttctcataatttttgtgagcttccagttggtacagtttgtgtagctgacactcagtttaaagggagaggtcggtccaagaatgcgtgggagtctccaaggggatgccttatgttttcatttacattacaaatggaagatggaaaaactgtgcctctggtacaatatgttgtgtctcttgctgtgacggaggctatacaggatgtttgtgatcgaaatggcttcccctttattaatgttacgatcaagtggccgaatgatctgtacttgaatggccttaaagttggaggcattctctgcacatcaacatataaatcaaagaagttcaatgttagttgtggtataagttttaatgttggtaatgagaaaccaacaacatgtttgaatacagta

SEQ ID NO: 214400 - DNA, 331 bp, Gossypium hirsutum
ctgtggtttctgagtgttgttttgggattttgaatatgggtgagaataggatgaccggcaaggtgaagtggttcgatgaccaaaagggttatggcttcatatcccctgacgacggcggcgacgatttgtttgttcaccaatcttccatccgttccgagggtttccgtagccttgctgatggtgaagaggtcgagtacgttgttgagtcttctgaaggtcgccccaaggctgttgaggtcacgggccccaacggcaaccctgttcgtggatcatctagatccggacgcggcggcggcggtggtagcggttatggcggtggatccggtggtta

SEQ ID NO: 214401 - DNA, 422 bp, Gossypium hirsutum
cggacgcgtgggcggacgcgtgggcaaaacaacacattgcaaagagaaagggaatattatcaaaagaacccaaccatggcatttgcaggaacaacccagaaatgtatggcttgtgacaaaactgtgtatttggtcgataaattaacagctgataacagggtttatcacaaggcttgttttaggtgccatcactgcaaaggtactttgaagcttggcaactacaattcctttgaaggagtcttgtattgcaggcctcattttgatcaacttttcaaaagaacttgtagtcttgagaaaagttttgaaggtacaccaaagattgcaaagccagaaaaaccagttgatggtgagaaaccaatagctactaaagtatcaggcatgtttggtggaacaagagataaatgtttttgtttgtaaaacac

SEQ ID NO: 214402 - DNA, 420 bp, Gossypium hirsutum
atgcacagcggcacacccgatcgcttcctcccatagagttccttccacttcgaattccttcgtcgcgttagaatcgtcatcgttaaagaccgttaactctatttcgagcgctaagaacaacagaaggaaaggcgttgtcggaaaggtgaggtcgagcctggagacagcgggagcaactgtggggcaggtgacggaggttacaaaggacaccttctggcccatcgttaacgccgcgggggataaaaccgtcgtcctcgatatgtacactcaatggtgtggtccatgcaaagttatagctcccaagtttcaagaattatctgaaaaataccttgacgttgtctttctaaagctcgattgcaatcaagaaaataagccattggcgaaggagcttggcataagagtggttccaacgttcaagat

SEQ ID NO: 214403 - DNA, 425 bp, Gossypium hirsutum
gagctttcaaaagccatagctttcaagcctgacttgcaaatgcttcatcttcgagcggcattttacgagtcgatgggtgatatgaagtcagctctctgtgattgtgaagcagcactctgcttggaaccgaaccatatggacacgctcgatctgtataatagagcacgagacagagccatcaatccacaagaaatgtgagaggcatcatcgtcattacatttctgataaacttgccggatgtagcagtcagttacaaggaaaaagaatcatggagtcttttcacatcgagctgctgactgaccctcaccgtggaaaggaaaggacccagagagagttgcttgtaaatgcgaacaggccttatggaatcaggtgtaccttgccacataagaaaagatttagccttgtaggttaaaaggggtcacact

SEQ ID NO: 214404 - DNA, 375 bp, Gossypium hirsutum
  unsure (1)..(375): unsure at all n locations
tgaaaccctcaaaattccactaaaaaatggcctccacagcttccctctccaccgccgtagccaccacctctttcctccgcggccatccggcgccgaaaaccctaaactcccttcctttcaaccaatctcttttcgggctaaaaccccaacgaaatggccgtctcaccatggcagcatacaaggtgacactgttaacacccgaaggaccccaagaattcgtgtgccccgacgacgtatacatcgttgaccaagctgaggaagaaggcattgatcttccgttctcgtgtagggctgggtcttgttcttcgtgtgccggagtgattaagcaaggctccgtcgatcaatccgacggtaatntccttgatgatgaccaga

SEQ ID NO: 214405 - DNA, 417 bp, Gossypium hirsutum
gagaagagaagggaaaaaagaaagtgaaaggaaaaagacgaaaagatgatgtccggaggttataccagcattgataaccagaaagtttctggatccgtacccgccgtttcggattccggccgtgtcccggtccaattcgcagattcgggccttcaaacatttcctccatcgggtgtgcaggggaagatctcgggtggaactctacctccatctgatgccgacgattcattttcaagacctgctggtggctcttctagtggctctgatgaaccacaagcaagtggatggcttcataaattcacagttgctgcatacaagccatattttgatgttgatactacagatgttttggatagacttaaggagtcactctatccatttaggggaacatttacagagaaaacagctaccaaccca

SEQ ID NO: 214406 - DNA, 338 bp, Gossypium hirsutum
agatgcagaagtactatattggtgaggtcgatgccaccaccattcccgcacgaaggatgtacaaagcacagacgtcaaccgcggcaactcaacaagaggagcctggctttctgtttaagattatacagttcctggtacccctcttgatcttaggcttcgcattcggtttacagttcttggggaagaaggaaaaaaccgaaacttagataactttcccattacggaacctgctagttcgtatgtatgcttgttaaagctgttgttggtgttggtgtaatgttcgtgacagtctataactgattgctattaataatgtcttggaatgtcgttttcgatct

SEQ ID NO: 214407 - DNA, 406 bp, Gossypium hirsutum
  unsure (1)..(406): unsure at all n locations
cccacgcgtccgcaaacacttacatttcatgaggacgaataccaattagaggagctggaagttgttgcggctgattatatgttgaaggtgggtgtctctaatttcaggaatgcatgggaaaccatggatgcggattgtgagcgtgtcgatgaatatggccttggccctagggaaagcctggctgaagctgttaatgcagtcatcaatcttctaggcatgcaaccttgtgagggcacagaggttgtccctaacaattcaagatcacacacttgtcttctatctggagtatacatcggcaatgtcaaggtgcttgtgcggctgccggttggacttgacggtccaaaagatgtggcaatgaaactcgctgntagatcagaggatgaagcttgtagtgatgcgattcatg

SEQ ID NO: 214408 - DNA, 356 bp, Gossypium hirsutum
  unsure (1)..(356): unsure at all n locations
cggggcggcccaagccgtccgccaacccttccggaaaaatctgccaaacttggttttggggacccccggggagtctattcaaaggttcatagacattcaaagggggcttttccacagccagatcgaccagcttcaaaccgttgttgttccacaatgcaaactcaccggcgtcaatcctttcccccaaaaaatggcagctgggcttttgtcctaaaaatggggaacgaccaagagattgctaacccctaagctgtaagtatatgcagctgtttttccattaagatgnattacaagaaagatcccggagatagtgctcaatttgtgttactgtcacacaggtgcgtgatttttttaat

SEQ ID NO: 214409 - DNA, 410 bp, Gossypium hirsutum
cccacgcgtccgggttgaggtgatttacgacaaggtaactaggagaagtaggggatttggatttgtaaccatgtccacaatcgaggaagtcgaagctgctactcaacagttcaatggctatgaattggaagggagagcattgagagtaaactcaggacctcctcctcctcgtagggaagaattttctcctaggggagcaagaggtggtccttcgatgggagcaaggggtggtcctccgatgggagcaaggggtggtcctcctatgggagcaagaggtggtcctcctatgggagcttcaaatcgtgtctatgttggtaacctttcatggggtgttgatgatatagcactcgagaccttgttcagtgagcaaggcagggttgtggaagcaaaagtcgtttatgacaaggaaa

SEQ ID NO: 214410 - DNA, 428 bp, Gossypium hirsutum
aagttctcagcctttgtatcgtcttcttgacagtttaacttaatacattctttctaaagttttgtctctggattcctcctcgaaaccctgtgattgtctataggttgattttgtggtggctaatagcaataccaacaattcgtgagtacaacttataccttcaagaccgtaaaccagtgaaaaaggtaggagcattttgttggctttccctcgcgatttgcatcatcgagcttctcatatgtatcaagtttggacatggtttatacccgaagccgatgccacaatggttggtagttttctggttgtccatgggatccactctcgtattgttccttatgatttggtcatggaaactgcagcggagttaccagaaaaagagacgataatttcaatatactattcttttggttacttgcaccattgattgg

SEQ ID NO: 214411 - DNA, 384 bp, Gossypium hirsutum
ggggtgttcgggacggcagcgaatatgaatttatgttcaaagtgttaccgggacctccgggtttgtgtggagcaagcggcgaaggcgaaagctgttatggagaaatctctcagtatcaaaacgaagcatgaacctgtcgttgtggagacttttaagcctcatgtgggttcttcgtctacatcgattgagcaacaacaaccggctgttgttgccgttaatcaacaaccggaaccaaaggcggcgaacaggtgttttatttgttggaaaaaggttgggttaactgggtttaagtgcaggtgcgagaatacattctgtggggagcatcggttcccagaaaaacacgagtgttcatttgatttcaagggtattggacgtgatgccatt

SEQ ID NO: 214412 - DNA, 401 bp, Gossypium hirsutum
  unsure (1)..(401): unsure at all n locations
cggcccgaccgcacgcgtccgcacagaattacagtactattagcatgttgtttgattgaggctccgaagntataaaggggggaatccttatatttgtcgcttcgccacaaggagcatatcagtgcctatggtgagggaaacgaaagaagactgaccgtaaagcatgaaacggccagcatcaacacgttttcatggggagtggctaatctcggttgctcaatccgagttggtcgtgacactgagaagaatggaaaattgtacttggaagatcggcgttcggcatttaacatggacccatatgttgagacagcattgctggcagaaactacactattgtatgagccaacactttaagctgaatcacttgctgctcaaaagattgctttgaatgtcttaattaa

SEQ ID NO: 214413 - DNA, 416 bp, Gossypium hirsutum
gacccacgcgtccgctactcaggatctgaaaggtcgcttgaacgtgcagtttcaaggggaagagggcattgatgccggtggactgactagagaatggtatcagttactctcaagggtcatatttgataaaggtgcattactttttactactgtggggagcaatgcaactttccagccaaatcccaattctgtttaccagaccgagcatctttcttacttcaaattcgttggtcgcgtggttgcaaaggcactatttgatggtcaacttttggatgtttattttactcgatccttctacaagcacattcttggtgttaaggtgacctaccatgatatagaggcagttgatcctgattattacaagaatctgaagtggatgctggagaatgatgtaagcgacattcctgacctgactt

SEQ ID NO: 214414 - DNA, 349 bp, Gossypium hirsutum
cgcgtacgcatacacccacacgtttttccacttttgctttcaatttagggcttgcactagccagaggtgtccgttcttatcacgaataaactgcctaccctttgctttctaataatattgcgaataatcgtgtcaagaagttcatgacgccctaaaattaccgcaagatctccgtcatgacaaactgtctaatgcctaaaggtattgactccctttttattattgaagttcaagggatgcactttgatgcccaatattgtttatgggtccgacaagaatactctccactatcttctcaatcgttttaagaaatttgtcttgcatatcatcctaaagctcgagcttctta

SEQ ID NO: 214415 - DNA, 433 bp, Gossypium hirsutum
cccacgcgtccgcccacgcgtccgcccacgcgtccgtccaatttagggtttgcacgagccgtagtgcgccgttcgcatcaggaagaaatggcggtccctttgctgtctaagaagattgtgaagaagcgtgtcaagaagttcaagaggccccaaagtgaccgcaagatctccgtcaagacaaactggcgaaggcctaaaggtattgactcccgtgttaggaggaagttcaagggatgcactttgatgcccaatattggttatgggtccgacaagaagactcgccactatcttcccaatgggtttaagaaatttgtcgtgcataacgtccaagagctggagcttctcatgatgcacaacaggacatactgtgctgagatagctcatgatgtttcaacaaagaagaggaaggaaattgtcgagcgggcagcacagt

SEQ ID NO: 214416 - DNA, 431 bp, Gossypium hirsutum
  unsure (1)..(431): unsure at all n locations
ccggaccggaagggccggcgtcagagcgtacgcgatacagaacacagacgtaagtctataggcacgaataagacgtacgaaacccaancttccctagaaatcgattatncgttcttcagtcaaacaccacgctattgcttttgtttgcatacacaatcaggaaagggtatggcagccgaggacaatttggacttgtcaactctgcaatctcagcttagtgaaactcatgaactgtggaagcaggagattgaaaatcgtcgaggccaagtagacgtgttacaagccaaaattatggaggtaaaggcttctatacaagggtcggaagaggagtcgaagaaggagttagatgttctttggcgaagggtagaaactaccgcgaccttattgacttacttgaaatcaaaagcaagagtaatggctgntcccgattt

SEQ ID NO: 214417 - DNA, 390 bp, Gossypium hirsutum
ggaagttttcttttcaatagcaagggacataaagcaaagactcgtcgatactgacttaaaggctgagccttcaacaattaagatcaataaacctgaccaggcagctggggctggtcaagctgcacaaagaccggcttgctgtggttcaacctaagggagctcaaacctggtgggacacgtattggatgttaaaaactacttttcttcaaaaaatggaggggaaagagaaaactaattgtggtgactggatgatgagtgcctgtattttcttattgtcattctttataacttggtttagggtgtgaggatgtagtgtttttctttataattgtttgtgtcatgtgaagaacataaccttttggtttctcccccatctttcggttcctttat

SEQ ID NO: 214418 - DNA, 415 bp, Gossypium hirsutum
ctgtaatcaatatatcttccattgctggtcttaatcgtgggcaactacctggaggtttggcttatgcttcctcaaaagcaggcctaaacaccatgacaaagaccatggccatggaactggggatgcataaaatccgagtgaactcaatatcacctgggcttttcaaatctgagatcacagaaggccttctgaagaaggcttggctacaagaagtggctacaaaaatcaaccctttaagaacatttggtacggcagatcccgcattaacctcgctagttagatacttaatccatgattcttcggaatacgtaacaggtaacatattcatcgttgatgccgggtctaccttacccggtgttcccatattttcttcgctttgaagcacaattggaatactaaatgtttgtattccttg

SEQ ID NO: 214419 - DNA, 333 bp, Gossypium hirsutum
acacgggcttgcccgtcacaataatagaggattatgcataaattgacattcgggtcgggttaggctattacattggagtggtaaagggaagccatgggtgagactagatactaaccgaccatgaactttagatgctttatgggctccttatgatttgctacaaacaccctttgctttagaatcttaaaaaattatgattagtatatgtttttttcaacaataattttctttttatgggctgaaattttttctttcaatgttgccatggaacttaataaagaaaaaaaatggacttgagtggaaaatttaaagaaaaatttttttgggaaaaat

SEQ ID NO: 214420 - DNA, 376 bp, Gossypium hirsutum
cccacgcgtccgattggatcatcccaagagtggacctcggtctttgtctggtgagatgtcggggtttgctggtgtccctcctacttgcatggttcagtgcttgcacaaagggtttaaccatccaaatgggtataaatgtgcacctgagaatgttaaggttgggtccttacagatgtatatgaagaatgccgggagtggtgaggatgtaggtccaggaggtttccctgtggaggaagtgcacaagatcagcgtgctcgatataagaatggcaaattccgatcgacatgccggtaatatcttgattggtaaacgggaaaatgaccaaactgtgcttattccaattgatcatggctactgcttgcctgagaatttccag

SEQ ID NO: 214421 - DNA, 362 bp, Gossypium hirsutum
agaagttcaagcgcatgtgtgaaaaatcgatgatcaagaagcgatacatgtaccttacagaagagattttgaaagagaatcccaatgtatgtgaatacatggctccttcactggacgctaggcaagatatggtggtagttgaggtgccaaagctaggcaaagaagcagccaccaaggccattaaggagtggggccagcccaagtccaagatcacccaccttgtcttttgcaccactagcggtgtggacatgcctggggctgactaccagctcaccaagcttttaggcctccgcccctccgttaagcgcctcatgatgtaccaacaaggtttgcttcgcaaggggggacggttgctccgagtg

SEQ ID NO: 214422 - DNA, 413 bp, Gossypium hirsutum
  unsure (1)..(413): unsure at all n locations
cgcagctccccctaagaagcctgtatatgtaccattctccagaaactatatgcctacttgggcttttgatcacattaagtatttcaatggtggctctgagattcagctccaccttgacaaatacactggtactggtttccagtccaaaggatcatacttgttcggacacttcagtatgcaaataaagctagtccctggagattctgctgggactgtcactgccttttatttgtcttctcaaaactcagagcatgatgagatagattttgagttcttgggcaacagaacagggcaaccatacattcttcagaccaatgtgttcactggtggcaaaggagacagagaacanaggatttacctttggtttgacccaaccaaagaataccactcctactctgtcctttggacatgta

SEQ ID NO: 214423 - DNA, 404 bp, Gossypium hirsutum
gcgacgcggccggacactcgtaccaaaatcgggcttatcctcaaaaactgccggatataacacgatcatgcgtgttggcgcatataacagggactctacctctgcagacaccccagccaagcttggcaccgcagcttactatgaagctgaggaggaggcgcccaacgctgctgctcaggcagtcaagagtgatgaggacgaagctaaacctgaccctggaagtatcagtcagatcaactttgctagacgccttccgttccaatatatgaagcaccagatagcaggacatgacgacgagactttgtcatacagttatagtttgatcgaaggtggacctttgggggacaagcttgagaaaatcagctatgacaacaagtttgaagcagctgcaagtggaggaagcc

SEQ ID NO: 214424 - DNA, 237 bp, Gossypium hirsutum
ccggggccgaccaacgcgtccgcccaaattacagtacaaatatcttgaggttttatttaggcttaaaaactataaaaaaagcgagggtgaatttgtcgcttcaccacaaggaacatatcaacgcctatggtgagggataccaaagaagactgagcggatagcatgaaacggccagcatcaacacgtaatcatgggagtggctaatcgcgggtgctcaatccgagttgggcgtgacac

SEQ ID NO: 214425 - DNA, 410 bp, Gossypium hirsutum
gagatgagcccgatttatcatgggttcagtctcttgtaaaagagtctcccactgagatcaaagacaaaatagcagcaccggtctcaggtgagggttctagcaggaactcggatacagttgataatgccatgctgggagcttggcttgagcaaatgcagctcgatcaacttgtggctcagcaaaactgaaaaatgttttagctgagccctcctgaggtagttcatcaaaaaaaggttttggtaaataacatttgtattttttcttcggattttcggattctgttggtgatttaatgttgaaggtaaagaggaacaaggtgaaggcaaagagattgaggtcagtttgacgaaaggaggcttcaattttcatttattattattattacaacaaaagagttagaacaggatgag

SEQ ID NO: 214426 - DNA, 418 bp, Gossypium hirsutum
ctgaaaccttaggagcagaaaaaaaagggaaaaaaaatctcagattttctgtcaaggaaaatatggaatccagtaggggccaaggtggaatccagcagttgcttgctgcagaacaagaagctcagcacattgtcaatactgccagaaatgccaagatggctaggctgaaacaagccaaggaagaggctgaaaaggagattgcagaatatcgagctcaagtggagaaggagtttcagaggaaacttgccgagagcagcggggattcaggtgctaatgtgaaacgccttgagaaagagactgaagcaaagattgaccacctgaaaaatgaggctgcaagaatatcagatgatgttgtccaaatgcttctcaagcatgtaacaactgtaaagaattaggccccttgagatggcaaacattc

SEQ ID NO: 214427 - DNA, 414 bp, Gossypium hirsutum
gcgccgcttggggtacctctctacgcaaggtttacacatttgacaccgtagaagaattttggtgtttgtatgatcaaatattcaagcccagcaagttgcccgggaatactgacttccacttgtttaaggccggaattgagcccaaatgggaagatcccgagtgtgctagtggaggaaagtggtctgtcactagcaacagaaaggctaatctcgagaatatgtggcttgaaaccttgatggcatttgatcggggagcaattcgatgaggcggatgagatttgtggtgtagttgccagcgtacgctcaaggcaggacaaacttgcattatggaccaagacagcaacgaacgaagctgctcagatgggcatcgggaggaagtggaaggagatcattgacgtcaacgataaaattact

SEQ ID NO: 214428 - DNA, 396 bp, Gossypium hirsutum
gccactcttttcttcaagcgggtgagagagaagaaaatcttaagaggccgaagatgccagctggtcacggtctacgttctcgaacaagggatttgttcgccagaccctttagaaagaagggttacattcccttgtctacttacctcaggacctacaagatcggcgactacgtcgacgtcaaggtaaacggtgccgttcacaagggtatgccccacaagttctaccatggtcgtactggtcgagtttggaatgtcacaaaacgtgccatcggtgtcgaagtcaacaagcaggtgggaaacaggattatcaggaagaggattcatgtacgtgttgagcatgtacagccttcgaggtgcgctgaggaattcaagctcaggaaggtgaagaatgatcaac

SEQ ID NO: 214429 - DNA, 324 bp, Gossypium hirsutum
cgcgttcggtacggaatcgagaggacaagatgctcttaaggcaactaaggcagcagttgaggaacgtattgttgtcggtggtggatgtactttgctaagacttgcttctaaggtggatgctatcaaggattcactcgataatgatgaagaaaaggttggagcagatattgttaaacgagctttgagttaccctctaaaattgatagctaaaaatgctggtgtaaatggaagtgtggtgagtgagaaggtgctctccaacgataaccctaggtatggattcaatgcttccactggaaattatgaggatcttatgtctgcaagaat

SEQ ID NO: 214430 - DNA, 397 bp, Gossypium hirsutum
cccacgcgtccgcccacgcgtccgcccacgcgtccgggaactctcagaagattacacctgtgtgatatctcatggaagtaatccaagaaccacccatatctttgatgattgcattgttgaaagctgttgtggggttgttggtttctcctctccgaagagaaacgggtcaagttaccaatcagaaaatttccttagctactgttatgcttgtaagaagaatctttctccaggaaaagacatttacatgtacagaagtgagaaagcattttgcagcaaagaatgtaggtaccaagagatgatgctagaagaaagcaccaacaaactagaatctgatgacatctttgggacttattcctaacatttgtttcaagttctcatcatcagtcttgcataaaag

SEQ ID NO: 214431 - DNA, 408 bp, Gossypium hirsutum
atctcatctcatcttatgttgtgttctactactctttctacctcgaattatatgtatatctatttctctctcacctaatctctatcgtttattggctcagatcagcagcagcagttggcaaaacaaagcatattgctttgctttgcctctttggcttatattacacagtttaattacccatgttgcccgataactcttgttcctcacttccttctttggagccatttacatgcatagacaatggtaataacaacaataagaggaaaagaagacccgcaggaacacctgatccagatgcagaagtggtttctctctcgcctaaaacattattagaatcggatcgctacgtttgtgagatctgcaaccaagggttccaaagagaccaaaacctacagatgcacaggcggc

SEQ ID NO: 214432 - DNA, 410 bp, Gossypium hirsutum
cggacgcgtgggttttgaggttgatcagccaagggacctttatctctattgctactatgggggaatgatatgcattggacaaaagtgttttcggaaagcattggagcttctacacaatgttgtgactgctccaatgtctaccatcaacgctatagctgttgaggcttacaaaaaatatatattggtctctcttattcaccatggacagctttctaccagtctccccaagtatgcttcaggagttgctcagagaaacttgaagagcttatgtctgtcatatatggaactggcaaatagttataacaatgggaaaattgcagacttagagacttatgtacaggcaaacatggagaaatttggaagtgacaacaatctaggtttggtgaagcaggttgtatcatctatataca

SEQ ID NO: 214433 - DNA, 397 bp, Gossypium hirsutum
aaagtaatgaacgtaccgaagagagctcatgtgatgctgaagaaacaccggagataaagcttgagactgctcctgcagattttcgcttcccaactacaaaccaaacaaggcattgcttcactcgatatattgagtaccatcgttgtgtagctgcaaaaggagaagatgcttcagagtgtgataaatttgccaagtactatcgtgccctatgtccgggagaatggatagatcgatggaacgagcaaagggagaacggtacttttccaggtcctctgtaagacggtacttttcgggaaatccagtgaagttgtcaaatgagaaacggcattttcaggaaataagaaattttggcatgtacccgttttgactggatcatgattgataaaatggagtatat

SEQ ID NO: 214434 - DNA, 422 bp, Gossypium hirsutum
ggcccgcccacgcgtccggttctagatcgctagcgtctcacccttactctttgtcgaaagctggtatcgtcggactgatgagaaccgcagcatgcgagttaggtgtgcacgggattcgtgtgaactgcatttctcctcatggtgtacctacagatatgctcattagtggttatagaatgttccggcggaacgaaacaacacccgaagaagtgaagaaactggtcggtgatcaagggagtctattacgtgggaaagctgcaactgttgaagatgtggcccaagctgcagtgtttcttgcctcagatgacaccggattcataacagcacataacctcattatcgatggtggatatacttctgctattagttcactgagtttcatctacaaatagtaaagaattgggagaagaaaaaaataaaac

SEQ ID NO: 214435 - DNA, 382 bp, Gossypium hirsutum
  unsure (1)..(382): unsure at all n locations
gctaagagaaatggaagccgtcctcgccatttctgtaagagcagtggatctgttgctcgccacattcttcaacaattgcagaacgttaacatcattgatattgatcctaaaggtggtaggagaatcacatcgaacggccaacgcgacctggaccaagtagccggaaggattgcggttgccatctgagtaacttttaatacccaaatttgcttgtttttgctgttaagcaattttcattttaggtaccgagagagtgaagacatggaatatttttattttagggtttgttgacttgttctctctttatcaccgtcgatcttgaaccttgttgatgaaaactcgaatctttanaatttgcctttntttattgtctaaaannaaa

SEQ ID NO: 214436 - DNA, 411 bp, Gossypium hirsutum
aagggattgaggaagcagcaagcaattgccccataagctatcagaaaatctaagaagcttggcactgaagggacttcattattttcaaacttttgaggattcacttcagctttctcttctgcttttgcttctttgattcagctaatagtagaggccaaggaagcttgcaatgtttgagcctggttgattgccaaaggattactgatgaaggtcttaagcatgttgttgaaaataatccaaagctaatcaaggtattgaggtatcttctttcatatgcaagatggtggctggaggagtataagtttgatgggtacagatttgatggtgtgacttcaatgatgtacaagatttccttgattaagtaaatgtattatttatttgagtaagaaaatgcattgtatgttttattac

SEQ ID NO: 214437 - DNA, 350 bp, Gossypium hirsutum
ctcgatgggagagttgttgatggtcgggaaataacagttcagtttgcaaaatatgggcctaatgcagagaggattcacaaaggaaggatagttgaatcagcaccaagatcggggcacaggtcaagaagccgcagtcctcgcagaaggcaccgtgatgaccattacagagatagggattatagaagaagtcgtagtagaagtcacgacaggtatgaacgtgatcgctatcgtgggaaagacagagattctcggcgccgtagcaggagtcgtagtgctagtcctcctattctaaaggccgaggaagaggccgttatgatgatgataggcggagtgttagtcgatcgataagt

SEQ ID NO: 214438 - DNA, 403 bp, Gossypium hirsutum
cggacgcgtgggttttgatgttgatctttttatggacctttatctctattgctactgggggggaatgatatgcattggacaaaagtgtttacggaaagcattggagcttctacacaatgttgtgactgctccaatgtctaccatcaacgctatagctgttgaggcttacaaaaaatatatattggtctctcttattcaccatggacagctttctaccagtctccccaagtatgcttcacgagttgctcagagaaacttgaagagcttatgtctgtcatatatgcaactggcaaatagttataacaatgggaaaattgcatacttagagacttatgtacaggcaaacatggaaaaatttggaagtgacaacaatctaagtttggtgaagcatgttgtatcatct

SEQ ID NO: 214439 - DNA, 399 bp, Gossypium hirsutum
gaagcttacagaaagagctaaaccgttacattcccacagctgctgcattcggaggcatgtgcattggtgcactcacagtattggctgatcttatgggagcaattgggtcagggacgggtattcttctcgcagtcacaatcatctatcagtattttgagacttttgagaaggagaaggcgagtgagcttggcttctttggactgtgagcttaggctttgactggagggatgcttgtgcttcttagctttcgcaattttgggtaagctgagggattcatttcaggcctacttttgacaaaagagtttacaatttagttagttcaatatgttttgtttacacattttgttttgagaaattacagaaaaagggtattgcctgaaatcagtgctgcttttgtct

SEQ ID NO: 214440 - DNA, 417 bp, Gossypium hirsutum
  unsure (1)..(417): unsure at all n locations
cggacgcgtgggcggacgcgtgggatcctatagatgccgatgatgcaagatatgcattgaatggtcgagacatggatggaagccggatgattgttgaatttgccaaaggagtgccccgtggttcaggtggatctcgagattaccctgnaagaggccccactcctgggtcaggacgctgcttcaactgtggaattgatggtcattgggctcgtgattgcaaagccggggattggaagaataagtgttaccgctgtggagaacgaggccatatagaaagaaattgtcaaaacagtccaaagaaactaagccgcagaccacgcagttactctcgctcacctagcccctaccgtggtagaagcagaagccgcagttacagcaggggacgcagcgacagtagatcaagatcacctgtgaaga

SEQ ID NO: 214441 - DNA, 415 bp, Gossypium hirsutum
cccacgcgtccgcccacgcgtccggttatattagggattcctctgtggcagtcactgtctatgatgttgcaagcaggcagtccttccagaatacttcaaagtggattgaagaggtgcggactgaacggggtagtgatgttatcattgtgcttgttgggaacaaaacagatcttgtggacaaaaggcaagtctcaatagaggaagcagaagccaaggctcgtgatctcaatgttatgtttattgaaactagtgccaaggctggcttcaatatcaaggctttgtttcggaagattgcagctgctttgcctggaatggaaaccctttcttcaacaaagcaagaagacatggttgatgtcaatctcaagtctaccaacgctaatgcgtcacagtcgcagcaacagtctggaggatgcgc

SEQ ID NO: 214442 - DNA, 419 bp, Gossypium hirsutum
agccttccggccttccatgtttaagtccgacagtgttcacggtcaatggaagcatcatgagcttaaggtgagggactcaaaaacccttttttttggtgaaaagcctgtcacagttttcggtatcagaaaccctgaggaaatccaatgggctgaggctgaagctgagtatgttgttgagtctcctggtgtttttactgacaaggacaaggctgctgctcacttgaagggtggcgcgaagaaggttatcatttctgctcccagtaaggatgctcccatgtttgttgtgggtgtcaatgagaaggaatataagcctgaccttaacattgtctccaatgctagctgcaccaccaactgtcttgctccattggctaaggtgatcaacgataaatttggcattgttgagggtcttatgaccactg

SEQ ID NO: 214443 - DNA, 411 bp, Gossypium hirsutum
gcatcacaggccggtcaattccctggggttttccaaactcctggtcaaccaaatatggtgccatcagaatcctggagacctgctgttccagttcagtcaaacgttcaacttcctgctccaccaaatttaccttggggtatgactgtccccgataaccaaggtgccaccgccctgagacaggcaccagggaatcaaaaccctggttggggaccaataccagggaatcaaaacatgggatggggtgcactggtccctgcaaatacaaacatgaactggggaccatctagtcagggatcagcatctgttaatccgaatcaaaattgggctccacccggccaaagacaagtacccgggaatgtaaatccaggttggtctgctcctgggaatacaatccaaggatggacaccacct

SEQ ID NO: 214444 - DNA, 408 bp, Gossypium hirsutum
gaaatggctgcttacaacaagcttttttgttagttcgacttggtaggcattcccccggctggtagaggtatgcctcagattgaggttacatttgacattgatgcaaatggtattgtcactgtttcggccaaggataaggccaccagtaaagaacagcaaattacaatacgttcctctggaggtctctcggaggacgagatcgagaagatggtcaaagaagctgatttgcatgctcagaaggaccaacaaaggaaaagtctgattgatgtaaaaaacaatgcggacaccactatttatagtgtagagaagagcttgaatgagtacatggacaagattcctagtgaaattgcaaaagaaatcgacggtgctgttgcatatttgaggaacgcaacggaaggagaggatgtt

SEQ ID NO: 214445 - DNA, 389 bp, Gossypium hirsutum
  unsure (1)..(389): unsure at all n locations
ggaagatgtaaagaagattgcttttcactacggattcgagttagagaaagaacagaccattgaaacaacgtatactacaaatcctcgatccatgatgcaaaaccattaccatgctgcattctggacaatgcgaaagaaaagaacaactacgacatagcttgcaagaagatgatatgcattcctctcttaaacatactctcaggttttattcctcatttggatattttttatatataagacttaatttcccctgagattttcttgttagtttggattattacaaaacataatcagttctttgattaattatatagatttatgcaatcagcatattctgttttgaacccnnnnaaannaannnannnnnnnnnnnnnnnntnnnnnnanat

SEQ ID NO: 214446 - DNA, 398 bp, Gossypium hirsutum
  unsure (1)..(398): unsure at all n locations
gccacgcgttcggccacgcgttcgcccacgcgttcgccacgcgtncgcccacgcgtccgcgcacgacgtacgcccacgcgtcgccccacgcgtccgagagccagagccagacgaaaacactggctgagatcagtcaggcggacgaaatctctccaaatatgacactatacatcaacaatgtcaacgagaagatcaaaatcgaccactggaagaagtcattgcgcgctgtgtcttcacaactcggcaagatgctagatgtgttagcattcaagactctgagacacaaaggtcgagcttgggttattgtcgatgatgttagctgcggtgccaatgcttattaggcaaatgccaggctttaccttgtatgacaaggaactgagaatgcaatgtgcggagac

SEQ ID NO: 214447 - DNA, 432 bp, Gossypium hirsutum
  unsure (1)..(432): unsure at all n locations
gaatncccggggccgccccacgcgtccggacctgcttggaacccaaatagagcggggttggtgcaaacaaaagctcgcagcctatgccattctggccgcgacccttgctgtgagcaaagctggccctgaagtcaagaaactgaccctttacaagcacagttgctaaccttgccgcgcacagcaaggtggatcttgctgcccctgctttcaatgacatcaatggtggttcacatgcaagaaacaaacttgctatgcaagagttcatgattcttactgtaagagcatcatcctttaaggaggccatgaaaatgggtgttgaaagctatcaccatatgaagtctgtgattaagaataagtctggtcaaaatgcaaccaatgtcggcgatgaaggtggcattgctcctaatatccaggagaacaaagcaggacttg

SEQ ID NO: 214448 - DNA, 412 bp, Gossypium hirsutum
ggaagttgagagctctgacacaatcgataatgttaaggccaaaattcaagataaggaagggatgcctccagaccagcagaggctgatatttgctggaaagcagctagaggatgggaggacccttgcagattacaacatccagaaggagtccaccctccacttggttctccgtctccgtggcgggatgcaaattttcgtgaagaccctgactggaaagaccatcaccctggaagttgagagctcagacacgattgataatgttaaggccaagatccaggataaggaaggaattcctccagaccagcagaggctgatttttgctgggaagcaacttgaagatgggaggacccttgcagattacaacatccagaaggagtccaccctccacctggtccttcgcctccgcggcggg

SEQ ID NO: 214449 - DNA, 409 bp, Gossypium hirsutum
cccacgcgtccgacggctccgacccatccaagcccatctacgttgcaatcaatggtcgcatctacgatgtcaccgccggcaaatccttctacggtcctggtggtgcctactccatgttcgccggcaaagatgccagcagagctcttgcaaagatgagcaagaacgaagaagatgtctgtcccaacattgacggcctctctgaaaaggagatggatgtccttaacgattgggtcaagaaatttgaagctaagtaccctgttgtcggccgcgttgtctcctgaaaatttgcacctttcctctatgttgggtgtaatttgtttcgtttttaagtgtctttagactctggttattacttatctatcaattgtgtttggtgttttgcttagctcagagcaatttctaggttaaa

SEQ ID NO: 214450 - DNA, 414 bp, Gossypium hirsutum
ggcaagcttgatgctttcttatcacagggcaaggagtatgtcttcgttgcaaactcagacaatctgggtgctattgttgacatgaaaatcttaaaccatttggtccaaaacaagaatgaatattgtatggaggttacacccaaaaccctagctgatgtcaagggtggtactcttatttcttatgaaggaaaagttcagctccttgaaattgctcaagtccctgatgaacatgtcaatgagttcaagtctatagaaaagtttaaaattttcaatacaaacaatttgtgggtcaacctgaatgctatcaagaggcttgtggaagctgatgcactcaagatggagatcattccaaacccgaaggaggtcaatggaatcaaggttcttcaactggaaactgcagctggtgcagcaatt

SEQ ID NO: 214451 - DNA, 405 bp, Gossypium hirsutum
  unsure (1)..(405): unsure at all n locations
gggacccttggttcctgttataaaatggtttattagcagagaggcatgcatttggtcacgaaggggttgggggatttgaagtgaaagagcaagccaaagctcagttggaagctacatgtccgggagtggtttcttgtactgatatagttgccttagcagctcgagatgctatagctttggcaaatggaccgtcatatgaagttccaacagggcgtagagatggaagggtttcggatgtttctctggcggctaacatgctagataattaagctaactntatggttctatttttaattaatgcaggactgagcaatgcttcctttacaggaggatgggttgcttcacactgcttgcgagactccaaattatgttgctccggaggtgctcaaagataaaggttatgat

SEQ ID NO: 214452 - DNA, 409 bp, Gossypium hirsutum
attgcatggtctttcggtgggatgatctttatcctcgtttattgcaccgccggtatctcaggtggtcacattaaccccgccgtgactttcgggttgtttttagcccgtaaagtgtcactaataagagctgttacttacatggtagctcaatgcctgggtgctatatgtggtgttgggctagtcaaagcttttatgaaccatgaatacaccaccctcggcggtggtgctaacaccgtggctacaggctataacaagggaaccgctttgggagctgagattattggtactttcatgcttgtttacactgtgttttcagctactgatcctaagagaaatgcccgtgattcccatgtccctgtgttggctccacttcctatagggtttgcaagtgtcatggttcatttggcta

SEQ ID NO: 214453 - DNA, 411 bp, Gossypium hirsutum
cagcattgcattttgcatgtggatatggcgaggtgaaatgtgcccaagtccttattgaagctggagcaaaagtggatgctttggacaagaataagaatactgcacttcattatgcagctggttatggaaggaaagactgtgtggcccttttacttgagaacggtgctgctgtcacactccaaaacatggatggaaagactgccatagatgtggccaagctcaacaaccagcatgaggtgcttaagttactggagaaggatgctttcctgtgagttggagtgtcggcaacagccatgtgtattgtttgggtcctagcatgtgatagaccattagacaaaaaccaaattgctttcatttcgtatgcgggttatgatcacacagtcacagctcgactagttgtccatgctgtct

SEQ ID NO: 214454 - DNA, 405 bp, Gossypium hirsutum
cccacgcgtccgagcagttgaaaaagatgcgacaaaaactgctgtcctggatggaactgtccatcctttaaccagctatgtgatcaattatgtaaagtttttatttgactaccaatcaacactgacacaacttttccaggaatttgaaactggtgatggtacagtatctcagttggcttctgtaacaatgagaattatgcaggctcttcaaacaaatttggatggaaaatccaaacagtatagagatcctgctttgactcacttatttctgatgaataacattcactatatggtgagatctgtgcgcaggtctgaagccaaagacctgttaggggatgattgggtccaaagacacaggaggattgtgcaacagcatgcaaatcaatataaaaggaatgcttggca

SEQ ID NO: 214455 - DNA, 417 bp, Gossypium hirsutum
cgaaaatgaaaaaagatgtcgtcgtcggtgggaaagatgttaaggaggttgataatgattgcttcttagtggttgttaagattttcgaccatcagggacctctttctacaagctttccaattgagaatcggaaaaaccttgtggcgctgagggcactgaagagtcatctagatagaacaaagagtcttccttttgtgaagagaatatcggattttcatttgctgttgtttctggccaagtctcaaggccttggttccgacgtccctgcactcgcagagtgtgttaacacacagacagcggtgccagaaggttatcaactgctaattgagtccatggccaatgcagcttgatgttctttacatgtgtatttatgattttacagttacatttacctcataatttaccatgctcattagc

SEQ ID NO: 214456 - DNA, 433 bp, Gossypium hirsutum
  unsure (1)..(433): unsure at all n locations
gggccggaccgggncgacccaacccgtccggagaaaaccgcggttccgaacaataactcggcgagagggttcaacgtcgtcgacaacatcaaggctcggctggagaaagcgtgtcctgaagttgtatcctgccctgatattctcgccattgctgctcgtgattcggtggttcggttggggggtccgtcatgaaaagtaaggttggaaagaagggattcgacaagcgctagcagaagtgccgcanatacctctattccaccgcccacctctaatctaagcgctcttatttcaagcttctcagctcaaggcctctcaatananaaccttgtagcactgtctggttcacacaccattggcctcgcccgctgcacatcatttcggtcacacatttacaacgactccaatatagacccctcctttgccaactcgttgc

SEQ ID NO: 214457 - DNA, 405 bp, Gossypium hirsutum
ccgacgcttgggggatcttaaacgttgtttttacgattgacactccaaggatgatgcgggcgaggaagctgccaacttcacctcacaggttatcatcatgaaccaccctggccaaatcggaaatggttatgccccagtcctcgactgccacacctctcacattgctgtcaaattttctgagctgttgaccaagattgacagacgatctggcaaggaactcgagaaggaacccaagttcttgaagaacggtgatgcaggtatggtaaagatgattcccaccaaacccatggtggttgagactttctccgaatacccaccactcggacgttttgctgtccgtgacatgcgccagaccgttgctgtcggtgtcatcaagagtgttgagaagaaagacccaactggtgc

SEQ ID NO: 214458 - DNA, 410 bp, Gossypium hirsutum
gctccaccttgacaaatacactggtactggtttccagtccaaaggatcatacttgttcggacacttcagtatgcaaataaagctagtccctggagattctgcggggactgtcactgccttttatttgtcttctcaaaactcagagcatgatgagatagattttgagttcttgggcaacagaacagggcaaccatacattcttcagaccaatgtgttcactggtggcaaaggagacagagaacaaaggatttacctttggtttgacccaacaaaagaataccactcctactctgtcctctggaacatgtatcagatagtgttctttgtggacgacataccaatcagagtgttcaaaaactgcaaagatttgggagtgaggttcccattcaaccaaccaatgaagatatact

SEQ ID NO: 214459 - DNA, 432 bp, Gossypium hirsutum
  unsure (1)..(432): unsure at all n locations
ggaananccggnccgggggggggggggggaaagttgttgtctccgacaggattgtcgtctcaccttgctgtctggtcaccggagaggggggatggactgctaacatggaaaggatcatgaaagcacaagctttgagagataatagcatgagttcttacatgtccagcaagaaaacaatggagattaatcccgataatggaataatggaagagctaaggaagagagctgaagccgataagaatgataagtccgttaaggatctcgtactgttgctgttcgagactgctctattgacctctgggttcagcttggatgatccgaacacattcgcaggtagaatccatagaatgctgaagctgggtctaagtattgatgaggatgagaccggtggtgatgatgcggacatgcctactcttgaggaagatgaagctg

SEQ ID NO: 214460 - DNA, 442 bp, Gossypium hirsutum
gaataaccgggcccgccccacgcgtccgcccacgcgtccggaacaaaggagcctacatttatttatactttatctaagtcaccttgaagggggtctgatgtttcacctgaagctgcatttttggaattcaaggggcttgtaaaatctctaaatgatatacaacttattgcagctttatgtccccttaaaatttttattttgacatggtcaagcaatcttagagtatatttgtcatcttcttctctagttctaaatatggagtggcctgtggaatttgacctaaaaaatctttccactccttcacgtttcttgtgatgttcttttgtggttgaagagctttgtgcttcatcagctttctccttgttatcttctttaatctcaatgcaaacagcattttgtagaggactttgatttgccccaatttgatgcatggaattactct

SEQ ID NO: 214461 - DNA, 362 bp, Gossypium hirsutum
aacgctcttcaacgttgtagggcagcccctgagatttcctgaatcacccgttgtaagcttttcagccagagatttgataaggggcttgctagtcaaagagccacagcagagattggcgtacaagcgaggtgcaacggagattaagcaacatcctttcttcgaaggtgtaaactgggctttaatccgttgtgcgagtccaccagaggttccaaaaccagttgaggttgagcggattccagctccaacatcatcagctggtaatagacctactgttcctgcaaccaaagatcaaaataactatctggaatttgatttcttttaaattattctcaaaaccattttcccgttggtttttttttttt

SEQ ID NO: 214462 - DNA, 395 bp, Gossypium hirsutum
  unsure (1)..(395): unsure at all n locations
cccacgcgtncgaggagattgcattgcgaggattgaaggatcaggtgtttgtaaatgcttgctctaacattgaagggcttaagtttgctgggaccttgattatcttcagtccagattccaagggaaaaattacgggccactggtatggctatgttactcctgaagatgtacctgaattgctggatcagcacattgcgaatggcaaaataataaaacgtctttggaggggtcaaatgggggtttctactgaaagtggtgatggcacagggaaacagaatcttccaagtgggacagatgtgaagaaaaatgagaagcctgaagagtcaactgttcaaaagaccagggaaaatgtcggcggttgttgccagggtgctaatgggtctagctgttgcatg

SEQ ID NO: 214463 - DNA, 399 bp, Gossypium hirsutum
gcttttggtggtgaaaaggccacaggaggaggccgtgaagctggcagtgattcttggaaacaatacatgcgacggtcaacctgcacaataaactacgggagtgagttaccgctggcacaaggaatcaatttcggctaggaatgcatacatgggtgaggcctaaagaagcaaatttgcattcctgcaaaatcaactcccagaccttttatgctctacatatagactgggatttgggtcacataattgtcgctgaaaaccattaatagtaacatactaatgaaaagaggcataatgaagaaatcaatgattcctaaaacacacttgctacgaaaattacgtgtagagtgtgtgctgtaataattcttataatagaagcacattattgatcttgcggatggg

SEQ ID NO: 214464 - DNA, 416 bp, Gossypium hirsutum
gctgtagattacagtgagcctatttttgattggcttagaaactctccagatgatgctatgaaaaaatgggaaagcatcataactggtgagttgcaacaaaagcaaagatcagttttaggcagtgtgacaccttcaagattgcctcacttcaaagccgcggacatgcacaagactcggttttgtgactttaggtttcaacttggtgccagatatctctattgtcatcagggtgactgcaagcacacaatcgtgattagggacatgaggtcgattcatccagatgatgtacaaaaccgagcagcttatccaataatgatctttcaactaaaaccccgagttcagaaatgcagtgtttgtaaaattacgagagcctcgaaagtgaccttagatgataagtgggcaagggagaacccttg

SEQ ID NO: 214465 - DNA, 417 bp, Gossypium hirsutum
gccttttctaacagaggtggcttggtccatcctcatacatccattgaagacttggatgaactttcaacgcttcttcaggttccattggtagctggcaccatcaaccgtgggagcgaagtgatagccgccgggatgaccgtaaatgactggacagccttttgcgggtcagacaccactgcaacggagctttctgtgatagagagcgtgttcaagctgagagaagcgcaacctagcgccattgtcgatgagatgaggaagtcattgattgatacctatgtttaagcttccccttcctttggttaatctaaaattgaagtccttcatataaatatggtattacactgttttatgtgagaaacataatataagtgtaaattaagtgagatgttgattgttgatgaaaatcacttggatgca

SEQ ID NO: 214466 - DNA, 408 bp, Gossypium hirsutum
cccacgcgtccgcccacgcgtccggcgggaaagtggactctgtgatttgaaagaaattcccgaggataaatggttttgttgcgatgactgcaacaggattcatgtggctctccagagttatgtttccagtggggtgcagataattcctactgtatttgcaaatataattagaagaaagtatttagaaaaaggattacttattgatggagccacagattgtgttcaatggcgaatactgagcggaaaaagccgttattctgaacatctgcctctactttcaagtgcagctgcaatatttcgagaatgttttgatcccattgttgcaaaatcgggtcgtgatttgattcccgtcatggtctatgggagaaatatatcagggcaagagtttggtggaatgtattgcgtggt

SEQ ID NO: 214467 - DNA, 397 bp, Gossypium hirsutum
gccacgcgtgcggttttcagagccatgctgttctagctctccaggaagctgcagaggcataccttgtgggtctttttgaagacaccaacctttgtgcgatccacgccaagcgtgtcacagttatgcccaaggacatccagatggctcgtaagatcacaggagagcgagcttaatttacatgtgtgtggatcagacgcttataaagaagaaactattgcttatttttaggcaaatggattggttttatgatttttctaatcatcttttatgccatgatggtagtggtaggttcaatgtgatgtgatgatgaagtgtggcgactgatatgttaatggacaatagctctggtatagtctgtttaaatgagttattgcttaatcgaaagatgctttgcaca

SEQ ID NO: 214468 - DNA, 397 bp, Gossypium hirsutum
cccacgcgtccggctaaacatcacaatatcacatatgcagacctataccagcttgcaggagttgttgctgttgaagtcactggaggtcccactattgactttgtaccaggaagaaaggattcagacatttgtccgaaggaagggcgacttccaaatgctacaaaaggtgctcctcatctgaaggacatctttcatcgtatgggtctatctggcaaggatattgtggcattatctggcggtcacaccctgggaagggctcatccagagagatcaggttttgatggcccttggaccaatgaaccactgaagtttgataactcttacttcgtggagctgctaaaaggggaatcagaagggctattgaagcttccaacagacatagctttgatggatgacc

SEQ ID NO: 214469 - DNA, 423 bp, Gossypium hirsutum
tacttttttggggttttcgcttttctttttcactatcatcagttcagcaaatcagttccaaaaaaaaaacccacttctacaaacatgaaatctggttatggggtcactctttttctcttgtttctcttcttttcagcttttgtcttcaattacaatgaagctacaagcatggcccaagtaaatgggccttcagaaatgttcccattggtggaagagaagatgatgttgttcaatgaaagcagaagaaagttggggagtttccagatatgtgctgtttgtacatgctgtggtggagctaaaggtgcttgcttaccttctccttgttgctatgctatcaattgcaacattccaaacagaccctttggtttctgttctttcactcccaaaacctgtaactgctttggatgccatctctagtttaaa

SEQ ID NO: 214470 - DNA, 416 bp, Gossypium hirsutum
gttctttgtggagagggaacactgccaatgttattcgttatttccctactcaggccttgaactttgccttcaaggattacttcaagaggcttttcaacttcaagaaagacagagatggttactggaaatggtttgctgggaacttggcttctggtggtgcagctggtgcttcttcccttctctttgtctactccttggattatgctcgaactcgtcttgcaaatgatgcaaaggctgcaaagaagggaggagagagacaattcaatggtcttgttgatgtctacaggaaaaccctaaaatctgatggtattgccgggctttatcgtggtttcaacatttcatgtgttggaatcattgtttaccgtggtctatattttggaatgtacgactctctgaagccagtgcttttgactgga

SEQ ID NO: 214471 - DNA, 408 bp, Gossypium hirsutum
gcgaaatccgccgctggtgacaaccttttcttcttcctctttctttaccccgattgttcttttttattctttccctgcgctttgtgggaaaaagaaaaaagcaaagcaaaaaagaatcgaggaagaatttaagacaatggcacagcaagcagtgcagaagaacacgttgtacgtgggaggactagcagaggaagtgaatgaaacaatcctccatgcagctttcatcccctttggagacataaaggacgtcaagactccattagatcaggccactcaaaagcaccgctcctttggcttcgttaccttcttggagaaagaggatgctgctgctgccatggacaacatggatggggctgagctctatggtcgagtcctcactgtcaactacgccctccctgagcggatcaa

SEQ ID NO: 214472 - DNA, 397 bp, Gossypium hirsutum
cccacgcgtccggaaaattatcatttcgtgatatcgttaaatcacgttaaatcacgtgatggcgggtgctgacgtggaggccgcggatttcgagccggaggacgacgacctcatggactaggacgccgccgccggtgacgcctcacctcaagcctgcatgcctaagctcaagtctgccatcactggcggcgcttgcgtttctctttctggccctaagaagactaaaggccgtggcttgcgccaggacgacgccgatcgtcattaccatctcgccttccgcgactttgactctatcggctctgacgagggccccggtccccagagatctattgaaggatggataatcttggtcactggggtacatgaggaagcacaagaggatgatttgcacaataca

SEQ ID NO: 214473 - DNA, 406 bp, Gossypium hirsutum
aagagaccacagagccagcaatttgtttaactgaagatatacaaactaacgagtgcttagaaaacaatggtggttgctggcaggacaagagtgccaacataactgcatgcagggataccttccggggaagagtgtgcgaatgcccgttagttaatggtgtgaagttttctggagatggttatacgcattgtgaagcttctgcggctttacgctgcgaaatcaacaatggaggatgttggagagaaacacaggaaggaaggacatactctgcttgtattgatgatcattcacatggttgcaagtgcccatacggattcaggggtgatggagtcaagagctgtgaagatgttgatgagtgcaaggagaagctggcctgccaatgtccttggtgcaaatgcaaaaatac

SEQ ID NO: 214474 - DNA, 409 bp, Gossypium hirsutum
cccacgcgtccggccgtcactgttcttaatctccgtgtcaagtcatcaacatcccactctgcagtgcccattgctttttctgctggggacgagtttagccgtagccctactaccgatgccaactctgggaaacttgtcatgttttctggtgaacctgactttagcacaggagcacatgctatgctcaacaaggactgtgagctcgggcgtggtgggttcggagcagtgtaccgaacagttttgcaagatggacgcgcggtggcaatcaagaagctcgctgtctcaagtcttgtgaagtcacaagaagaatttgaaagggaagtcaagaaactagggaaaatacggcactataatcttgtggcgctcgagggctattactggactccatcgttgcaacttctcatttctg

SEQ ID NO: 214475 - DNA, 423 bp, Gossypium hirsutum
cccacgcgtccggcttcggggagttgaaaataagcgtagatccggagattcccgaataggtcaacagatgtcatcacaaaaagactattccatggcaacagcagatgtggtggatgcagaggtaagggatttagtagagactgcatacacaagggcaaagcagataatcacaactcacattgacattctccacaagcttgctcaacttctgatggagaaagaaacttgtgatggagaaaaattcatgagcctcttcattggtggaaaagctgagctatatgtttcttaaatcgtacattatatagtccccattcagtccttggataactatgacccttaaatggtcaaaatcatctgtggatgctttcataaagaagggaaaaaaatctcaatactttttctttctgtaattgagaaaaccta

SEQ ID NO: 214476 - DNA, 422 bp, Gossypium hirsutum
gcattatgctaatgaaatcaacatgggtttcgatatcgaaatagttagcctcgaggcattgaattcgtgttcttggtcttcattgcccctgcatttcggtgaaaacgaaacgattgctgttaatctaccgatcggttctttttccaattacccttcaactctccccttgatcctccgtttcgtaaagcaattatcacccaaaatcgttgtctcgtctgaccgtggctgtgaccgaaccgatgtcccgttccctcatcacataatccatgcactccaatcatactctggcctactcgaatccctcgacgcggtgaacatgaaccttgatgcgttggaaaagattgaaaggttcttccttcaaccaagcattgaaaaaatcgtgttgggtcgacatcggtccctcgaaagaagacctccatgga

SEQ ID NO: 214477 - DNA, 389 bp, Gossypium hirsutum
gcccttgtggtcatatatgcacttacatcaggaattgcaggatatactgcaacttctttctattgtcagcttgaaggaaacaactgggttaggaatctcttattgactggctgtcttttctgtggtccgttgtttctcacattctgcttccttaacacggatgctattgtatacagtgcaactgctgcactgccttttggaactattgtagtaatagtccttatatggacactagtgacatctccattgcttgttctgggtggaattgctggcaaaaatagcaaggctgagtttcaagctccttgccgcaccacaaagtattctcgagagatttcaccattgccatggtacaagagtgctgttcctcagaaggcaaaggctggaatttt

SEQ ID NO: 214478 - DNA, 344 bp, Gossypium hirsutum
cccacgcgtccgcccgtaaggcgcaaggaagctgattggcgggatccctcgcgggtgcaccggggaccgaccttgatcttctgcgaaggagttcgagattgaactgaaaaaggagcctgagtcaatgacagagcaaccgaaggagaataccactgctgttagtgaagagaagaaaccagatcttgaggtctctagctcaaaggaaagtgtatgaattcctaaaatcatcgtcttgttggtgaaatttctcaattcgtatgtctgttgtatcgatgaacatcgaacaaataattttgaatgtagatcagttatgttagtgattgctcacaaaaaaaaaaaaaata

SEQ ID NO: 214479 - DNA, 413 bp, Gossypium hirsutum
caaagttcatggaagaacatccaggaggagaagaggtgttgttggaatcagcagggaaggatgcgacgaaagaattcaacgatatcggacatagcaagtcagctcagaatttgctcctcaagtatcagattggtgttctccagggtcacacttcaaagaataatgaacaggttggttcaaccgaggagccccaaaagaaagagatgagtgcattcccgatcaaggatgacctgacgccttaaaatgcggcaatcgttgagttccacttgcccccactccctggttgctgggttcctatttttttggtacaataataccctcacaacttaatccttatataattgctggtaaaataagtttggggttttccaaggttttaaaccctcaaacattgccccctttttttccccttt

SEQ ID NO: 214480 - DNA, 410 bp, Gossypium hirsutum
gaaaatctttccagtttcaattttctcacaacaaaactgaaaatgtcttgctgttcaggaaaatgtggctgcggcgctgattgcaagtgtggcagtggctgtaacggatgcagtatgttccctgacataatagagaagactacaactgagactattgttcttggtgtggcaactcagaaaatgcactttgagggatctgagatgggagttggggttgagggtggatgcccgtgtggagacaactgcaaatgcaacccttgcacttgcgggaagtgaacaacaaagagaagcagagtggcctttgtcattttaactaaataaattctattactttagtatgtatcagcaaatcttcatgaggatttggttcttaattatgtgtaatgtggcttttctgctatgtcagaatg

SEQ ID NO: 214481 - DNA, 353 bp, Gossypium hirsutum
cagagtttagttagactgaaagagcctgtagtcctactccgttgtcgcaaagaagatttgcatttggtggagtctgttctggattcagcaaaggaggaatatgcttctaaagtgaatgttcatccaccagagataatcattgatgatgtccatcttccccctggcccttctcatcatcatggttttttccatcatcatgctgaggctcacgggcctttctgctctggaggtgtagtcatagcatctagagatggaaaaattgtgtttgagaataccttggatgcacggttggatgttgcattcaataagaaacttccagagatccgcaagtggctttttggtcatgttgctgc

SEQ ID NO: 214482 - DNA, 413 bp, Gossypium hirsutum
cccacgcgtccgggcacctccgaactcctgtctagcgctaagctggtggcggacgcagcaaaatccacattcaacaaagaaagcgacaaggttgacaagggtaaggttgctggtgcaggtgctgatcttttgggtgccgcccaacactatgggaagctggataaggacaagggtgttggccaatatgtcgaaaaggctgagacttacttgcatcaataccagaccagtcacttagctcccaccaccaaccccgacttccatggagcaggtgccgccgccaaagattctgaaactgctgcagcttgtggtggtggtgttggggattacatgaagatggctcaaggtttcttaggcaaataaaattataattaaaacttattaatatttatttacttaagccttgctgtcaatat

SEQ ID NO: 214483 - DNA, 427 bp, Gossypium hirsutum
cccacgcgtccgcccacgcgtccgcccacgcgtccgcccacgcgtccgagatcccaccatagctttggaaacctcaggtcaacgtgtgtgcatgaacaacaggagctagaaactgttgattcttcctctgatatatctgatgagaagtctgaagaagaggatggcgctttcctaaaagaaccaatggaggaacaagacaacaataaggcaaggtcaaccccaaactacattcgaatagttagtaagtagatggttggtatatacatatctatatgggtgacaaagaggctgaggagacatataaacaatttaaaagtctctcctgttggagttggtcttatgggctacatgggaaacaagggatctgtttttgttagcatgacactttttcagtccaggctatgctttgtgtgttctcatttgacat

SEQ ID NO: 214484 - DNA, 400 bp, Gossypium hirsutum
cccacgcgtccgcagatttcggatctccatgagttctggcattttggaactgaaagaggaagtagccaataggctgaagctagaggtgggtgcttgcgacataaagtatttggatgacgataatgaatgggttttgatagcatgtgatgccgaccttgaggaatgtatagatgtttcaagatcatcaggcaacaatatcattagattgtgtattcatgacaccatggccaatctagagagttcttgtgagagcacaggagagttataattaggttgtagatatatttgttagtgcaattctcactcatagaattatagaagagtgaaagtgcagattttggtttcaagagctttctcaattgtaagaaacttctttttatgataggaggcttaattgtaa

SEQ ID NO: 214485 - DNA, 417 bp, Gossypium hirsutum
caagtcttccacagccatttccaagtgtatgatcatgggtgcagctggatcaactgtatactataacctgagacttaggcacccaacactggaaatgcctctcatagattatgacttggcattgctatttcagcccatgcttatgcttggaatcagcattggagttgcccttaatgtcatgtttgctgattggatggtcacggttctgcttatcattctcttcattggtacatcaacgaaagccttattcaaaggtatagacacatggaagaaagagacaatattgaaaaaggaagctgccaaggtggaatcagaagagtccaaaccagctgatggagcttctcaagattataaaccattacctagtggccctggcaaccagacagaagatgaagttcctctcctacaaaacatata

SEQ ID NO: 214486 - DNA, 381 bp, Gossypium hirsutum
ctgggttatcagctgacccagagacatttgctaataaccgtgagcttgaagtgatccactgcagatgggcaatgcttggtgcccttggttgtgtcttccctgaaattctttcaaagaatggagttaagttcggagaggcagtttggttcaaagctggatctcaaatattctccgagggcggccttgactatcttggcaacccaaaccttatccatgctcagagcattcttgcaatctgggcttgccaagttgtgctcatgggatttgttgaaggatacagagttggtgggggaccactcggtgaaggactggacccaatttacccaggtggtgctttcgacccacttggactggctgatgatcctgacgcgttcgcagaat

SEQ ID NO: 214487 - DNA, 374 bp, Gossypium hirsutum
ggaaaagaagggaattctggagaagatcaaggagaagcttcctggtaaacactccaaatcagatgaagaaaaagaaaaggcttgagattcaagttcacataaaaatactgatgggattgtgtgtttcttcaattgttaaaaaaatatctgtttttgttttgaggttgtatttgttgtatatttcatattaagtttcttcttttcccagcatttttagtacaaatcataagaaaaaaaaagtttgctttcggtatgtaagaaatgacatgtttccattctgtctttttgtgattcgaacagtatttaatgaatcaatttcttgctttgttgtttttaaaaaaaattaaaatattatatttttatgtaaagttttt

SEQ ID NO: 214488 - DNA, 399 bp, Gossypium hirsutum
aaggatgagaagattggttcaaagcttgacccggctgacaagaagaagattgaagatgccattgatggagcaatccaatggttggatggcaaccagctagccgaggctgatgaattcgaggataagatgaaggagctcgagagcatctgcaatcctatcattgccaagatgtaccaaggtgcaggggctgacatgggtggtggcatggacgaggatgccccacctaccggtggcagcggtgctggacctaagatagaagaagtcgactaaatcaaatattaagatagtattttgccgatgtttaacagcttctgctggtgctatattttatgttttcagcaacctatgttttgatgtattgaaaaaatctggataatttttgggaacattaccattctt

SEQ ID NO: 214489 - DNA, 379 bp, Gossypium hirsutum
cccacgcgtccgcccacgcgtccggtttgtgactcaatttgagaaaacgaatgtcatcttaaaggcacaagaagcattaaccaatgaaggatttatgataattatgaagcccacacatgttgggagacggttttatatggctgtccctactgcatgggtggctaaatatctcccgaaagataatgcggatgtgattcttcgaatgaacaaacgtacatggaagacccgattttattatcacagaagtcgtgattgtggaggtctttcaggtggatggaggaactttgtgaacgacaacaaactagaggaacatgatgtgtgtgtatttcagcctgcaaatataggaaagaaaaccaatgaatcctgatgttaacatttt

SEQ ID NO: 214490 - DNA, 415 bp, Gossypium hirsutum
cccacgcgtccgactcaacacacttgatcagaagtcctcctctgccaagttctgttacttctcacatgcacaaagatgtttatcaagcttttccatactcagatccaatgcaatgtactattaacttcaagcaatcagatgatccagtaatgagctttgaccaggaagatctaaatattccttggagcgaacttgttttaaaagagagaattggagcaggttcttttggaactgttcatcgggctgaatttcgtggttgcgaagttgctgtcaaaattctcatggagcaagagtttcatatagaacgcttcagggaatttttacgggaggtttccatcatgaaattgttactgcaccctaacattggtctgtttatgggtgctgttactcaaccaccatagttgtccattgttac

SEQ ID NO: 214491 - DNA, 432 bp, Gossypium hirsutum
tgaaggccagttggaggaccctctgatatcatgctggcagcttgtatttgttgaccgggagaatgatgttcttctccttggcgatgacccctggccggagttcgtgaacagtgtcgggtgtatcaagatactttccccacaggaagtgcagcaaatgggccaacgaggcctggagcttctaaactctgtgccagttcagaggctctctaatggcagttgtgatgactatgtgagccggcaggattcgagaaatcttagctctggtatcgcctccgtgggttctttggactactgaatgaaaattcatcgggttatgatacctgtttttcttcctgtaatattaattgtgttcttgcaacccctttttaatattaggtgggaaatgagcctgcctaacttctagctttggaattttattttttatataaaaat

SEQ ID NO: 214492 - DNA, 410 bp, Gossypium hirsutum
ccgaatatgactcagatggccgatcccttgacagttttgattcacgccgtgcaagtgatgaactggctcaaaacattgatcttaaagacaattcgagaaagggatgagtccgctaccaaggacaggttgcttccatcttgctcagattgtcctacaggcataaccgatacatgtgcatctaaggaacctgccactgctaagttcttgagggttgacacattgagtagactcgaaagtgaccccgaagagaaacaatggagcagtcaggatagtaacagagaagaggaagttgagtccatttcaggcaacaatatactaaatgaatgggaaatgggaaatgttgaaactgaatgtataagtggatatgataacggtgaccggctaagtttaagaaaaggtgttaggcgatt

SEQ ID NO: 214493 - DNA, 299 bp, Gossypium hirsutum
cccacgcgtccggtgaaaaaaaaaatctagctggaaaataatctggtaaaaacaaacattgtgtgtccgacgacggagataagagacgttaaacgatgtcgtcgccggacattgcttcaatcatggacaactcaagggaactcgatcgattaaggaaagatcaagaagaggtgcttgttgaaatcaataagcttcataaaaagcttcaagccactcctgaggtagttgagaaacccggtgattcttcattgtcaaggctaaaaagtttgtatattcaagctaaagatctttcagagcga

SEQ ID NO: 214494 - DNA, 399 bp, Gossypium hirsutum
agcaattctggtatgttgcgctactagttgtttctcttgtttgttatttggcaacatttggcttctcgggacttctcttccactggttcactccatccggacaagattgtggactcaataccttctttatcgttatgacattgactcttgttcttttgtttgccatagttgcactgcatcctgcggttggcggtagcattttgccagcttcagttatatcactgtactgcatgtacctatgctatagtggacttgcaagtgaaccgagagattacgaatgcaatggtcttcacaagcattcaaaagcaatttcaactggtaccttgaccttaggtctgcttaccactgtcctgtcagttgtctactctgctgttcgtgctgggtcttcaacaactttac

SEQ ID NO: 214495 - DNA, 408 bp, Gossypium hirsutum
accggcacagatatgaggtaaacccagatgtcatcggggttcttgaagaagctgggctaaaatttgttgggaaggatgaaactgggaaaaggatggaggttctggagcttccaagtcatccattttatgttggcgtgcagtttcatccagaatttaaatcacggccggggaagccttcggctctatttttaggtcttatattagctgcaaggggaaaattagaagcatatcttacaaggcatcaaaatggaagttgatttactagttatattgatacatccaaatcaattttacaaggaggaaattggtagattggtggtcttgtggtataggtatacccaaagagggttcctcaagtgaatcttattgcaatagaattcgagttaaggcacatattatggtccgagc

SEQ ID NO: 214496 - DNA, 405 bp, Gossypium hirsutum
agatcttgaatatggattgccagttcaagttcgggatactgctctaagtataaactccaatgatgccattccaaagagtgatgtcaatagagagtatttcgccgaggagcatgacaggagggcgagagctggtctagattatgaatcctcatatgggaaggtacgtccaaacgacactattctgaagcttcagaggacaacaccttactacaagagaaaccgagcacatatttgcagtttctatgtgcggggtgaatgtacaagaggtgctgagtgcccttataggcatgagatgccagaagctggggagttgtcccagcaaaatataaaagaccgttactatggggtgaatgatccagtggcactaaagctacttaacaaggctggtgaaatgcctttctttga

SEQ ID NO: 214497 - DNA, 346 bp, Gossypium hirsutum
cccacgcgtccgggaggtcaagtgctgaggtttgaagtacaaaaatgttgggtcaacagcaccatccttgtagtaagcaaacaccaagcatccatcatcatgcatgctctctcctacgaaaaattgaaggtccttcaattttgaaagcaaaaacttggatgctccctcaatgtttttcttgaaggactcttgcttttcgcttcgagagagaccatgttggtttaccaggatcttatcttcggtgacgagcttctttctgactcatttccctacaatgcaatctatactggtttgctgtgggaagtttaaggaatgtgtgttttgttaggaaactgtttatctttac

SEQ ID NO: 214498 - DNA, 375 bp, Gossypium hirsutum
ctctatctttctcctttcttttgatccctcttctccaccgccaccagtccctgacccgagctctctcttgccttcaagtggcgtacagacgatatcgggaaattgtataaggtagaacaatgccgaaggtgaagacaaaccgcgtaaaatatccggaaggatgggaattgattgagcctaccctccgtgaactacaagcaaagatgagagaagctgagaatgatcctcacgatggtaagcgaaaatgtgagacgttgtggcctattttcaaaattgcacatcagaagagccgctacatttttgacctataccatcggaggaaggaaatatcaaaggaattggatgagttctgcttggatcaaagctatgctgacc

SEQ ID NO: 214499 - DNA, 420 bp, Gossypium hirsutum
ggaaaagtgaagatagaggtctaaaggacaggctgcttcgaagatttgggagtcatattagcagcttgaagttggaattctctaagaagaagaagaaagggaaactaccaagagaagcacgacaaacattgctcgggtggtggaatgttcactacaaatggccataccctacggaggcagataagctagcattggcggaatcaacggggctagaccagaaacaaatcaataactggtttataaatcaaagaaagcggcactggaaaccatcggagagcatgcaattcgcggttatggataatctgtcgggacaattcttttcagaggactgaggtggggggcaactaccgactggcttgctttctcataaatgtatatcccacatcattaattaattatatggtcttgtttgcatatgac

SEQ ID NO: 214500 - DNA, 423 bp, Gossypium hirsutum
ggaaaagatagctcagttggtcttcaaatccttaagggccaaacgtgggtgcctgttaagcctattccaaatgcactcgtcatcaacatcggtgacactctagaagtacttacaaatggaaaatacaagagtgtggagcatagagcagtaactcacaaagagagagaccgcctttcaatcgtcactttctatgctccaagctatgaaatagaacttggtccaatggcagaactggtggatgagaagaatccatgcagatacagaagttacaatcatggagagtacagtaaacattacgtaaccaacaagttgcaaggcaaaagaaccctggatttcgcaaagatccaatccaagacctcgaattaacaaggattccactttggtcttcccccccccactagatcactattcttgtactattta

SEQ ID NO: 214501 - DNA, 430 bp, Gossypium hirsutum
cccacgcgtccggtcttttgtggtggatataccggatgggaacaccaaggacgaaacatgctacttcgttgaggcactgatcaagtgcaacctcaagtcattggctgatgtttcagagcgtttggctgttcaggatcgcactgagccaatcaaaataatgtgaataatctgggtccctcttagcagcatcaaggttgttgtgtgtgatgagtgaagaaatgttattattagaagctgagtagaaagttcgggctaccttgggttagagtcaactcctattttcttaatacttcatgcatcttcttcttactagaacattataattaggtgtgttgtgttgatagtagctgacaattaagctacaccttcggcctacagatttcttaaatgaagaaacatttcagaaattttctttgtggcttattctatg

SEQ ID NO: 214502 - DNA, 419 bp, Gossypium hirsutum
caagccggttatacccgagaagtaccttgatgagaaaaccattttccaccttaacccgtcaggccgtttcgtcattggaggtccccatggtgatgctggtctcactggtcgcaagattatcattgatacttatggaggatggggtgctcatggtggtggggctttctctggtaaagaccctaccaaggtggatagaagcggggcttacattgtgaggcaggctgcgaagagcattgttgctaatggactagctaggaggtgcatcgtgcaagtctcctacgccattggtgtacctgagccattgtctgtatttgtggacacttacggtactggaaagatcccagacaaggaaattctcaagattgtgaaggagacctttgacttcagaccaggaatgattgccatcaatcttgatctta

SEQ ID NO: 214503 - DNA, 409 bp, Gossypium hirsutum
cccacgcgtccgacactccactttatcatcaccctctttttatccccctcttttatcttgactttaatctccacgccttcttcccattacttcattacattctcaagagaaaaacccagagccaaaaaaatggccaaattattgctgttcattgcactatttgtggttccatgtcttgttagtgctacacgcatggtgaagaacccgttggtggttcaaggtcaagtttactgtgaccattgccgtgctgggtttgaaacaccaaagactagaaacatggctggtgccaaggttaaggtggtatgttccaaccggaagaccggtgatgtcgtgtacgagaaggaaggacacacggattcaaccggacaatacaagatcgctgtctccgaggatcatttggatgagatct

SEQ ID NO: 214504 - DNA, 402 bp, Gossypium hirsutum
cccacgcgtccgcccacgcgtccgctgaggtttacctcagttacttgaacctagaggatgacggggcagaagcacttgccaatgctctgaaagagtctgcaccttcacttgaagttctggacatggctggaaatgacattacagccaaaggtgcagcttctttagcagcctgcattgcatcaaaacaattcctctcaaaattaaacttggctgagaatgaactcaaggatgaaggtgctattttgattggtaagtcattaggggagggtcatggtcagttgaatgaaattgatatgagcacaaatgctattaggagagctggggcaaggcttttggcccaagtggttgtgaaaatacctggatttaagttgctgaatatcaatggaaatttcatatctgatg

SEQ ID NO: 214505 - DNA, 251 bp, Gossypium hirsutum
  unsure (1)..(251): unsure at all n locations
tgaaaagaacatgaaagcctacaataagagacaggctgagggtccccaagaagatgaggaggaatctgagaagtctgtatctgaggtgaatgatgaagaagaagatgatgatgaaggcagtggagacgaggaagatgatgagtaggaaaaatcctgngaggatagcataatcaaagtaggctgtgatagtgtttgatcatcttatgttaatgctttntaaatgcaaatttcatttaaccaaaaatgtaact

SEQ ID NO: 214506 - DNA, 324 bp, Gossypium hirsutum
agacgaatgaaagccaaaatcgtgatgcatcattcgaggaatgcgtgagctcggattgtttaagttcaatggaatgcatgcaagaagctgcagtcgagcctaattttctggatttcactggaatggattttgattctgtttacggaatgaggagagcatttagtgaaggcgatataaagacacttggcaacggtgatgtgagcgtcatccattcttccgtcaagtggccattaattgtcagaagctgttcttctgaagatcgaagggaaaagctttctagatacaggaacaagaagactaagaggaattttggtcggaaaatca

SEQ ID NO: 214507 - DNA, 320 bp, Gossypium hirsutum
gaacggacagggcccggacgacccacacgtactttgacgcattttttttagaactatgcactcacactggtggtaatcaatggctcgtacaaatcaaacagccatgaaataaaccggtggaaaagctccacgtaagcaattggcgaccaaagccgcgaggaaatcatctccatccaccggaggagtgtagaagccttaccgttttaagccaagaacaatggctttgagagaaatcaagaagtaccacaagagtacctagcttttgattcgttaactttcggtccaaaggctagtgaaggaaatccttcaagatttttaag

SEQ ID NO: 214508 - DNA, 235 bp, Gossypium hirsutum
ctgcattgaggtttgttgttgataatccaggggtttggggatttcactgccacattgagccgcatttgcatatggggatgggggttatttttgctcaagacgcccatcgtgtaggtcaaataccaaaagaggctcttgcttgtggattaacaggaaacatgccgaactgttagactgatctgagctaatttatgtattacgctatttgatgccatgctattttgtcatatttact

SEQ ID NO: 214509 - DNA, 287 bp, Gossypium hirsutum
cccacgcgtccgcccacgcgtccgtcagatcttgccattgaagaaggtcaattagatcaattttacaagcatctgcccaagatatttgatcggttttcaagtgctgatggctttttattcctcgaagatgatactgttcttaattactggaatctcttacaggcagacaagactaagctatggataacggataaggtatccatgtcttggagtactgcatcaaccaaaggaagttctgattggtactcgaagcaagcggagctggtaaggaaggtagttagtacaat

SEQ ID NO: 214510 - DNA, 285 bp, Gossypium hirsutum
  unsure (1)..(285): unsure at all n locations
tccccagtgacctttcagatgatggaggatatgagaaatcagtttatagatctgttatcagacataggctttgtagacaaatcaccgggtgctagcgcttacaaccaatacagccatgatttggagatggtatgtgcagtcctttgtgctgggctttacccaaatgttgtgcaatgcaaaagaagaggaaaacgtacagcattctacactaaagaagtcggaaaagttgacattcatcctgcatctgttaacgcggnggttcatctctttccattgccttatatg

SEQ ID NO: 214511 - DNA, 87 bp, Gossypium hirsutum
cccacgcgtccgcccacgcgtccgcccacgcgtccgggacttttggttttttttaatttatgtttctgggtttattgcaggccgggc

SEQ ID NO: 214512 - DNA, 108 bp, Gossypium hirsutum
cccacgcgtccgggccgcccttttttttttttttttttgaaaaacaaaagtcaccatatttaactggaattgacgggcgcacaaccccatgttcaaacaatgccggcg

SEQ ID NO: 214513 - DNA, 322 bp, Gossypium hirsutum
aggtgcaaggttgtggactttggaaacgcatgttgggctgacaaacgatttgcagaagaaattcaaacaaggcagtatagagctcctgaggtcatacttctatctgggtataccttttccgttgatatgtggtcatttgcttgcatagcctttgagctcgctactggtgacatgatgtttgctcccaaaacgggacaaggcttcagcgaagacgaggatcaccttgctctcatgatggaacttcttggaaagatgcctcggaagattgctgttggaggagctcgatcaaaggatttttttgacaggcatggggatctgaaga

SEQ ID NO: 214514 - DNA, 287 bp, Gossypium hirsutum
tcacaaaccaaagccctatctctcgaggattcaccatgaaaggcggtcaaacaaagtccgattcgatgcaggctggaaacaaactgaaaggcaaaggcgcaggcgccggaaaacgtgcgaagaaagccgccaaggatccaaacaaaccgaagaggcctgccagtgctttcttcgttttcatggaggagttcaggaaacagtacaaagaggcgaatcctgataacagatccgtgtctgctgttggcaaagctggtggagaaaaatggaaaagcatgacagatgctgag

SEQ ID NO: 214515 - DNA, 281 bp, Gossypium hirsutum
aagttccaaaagattataacaaagagaggagctgtgcctgagacaaccacaaagaaggggaaggattatcctgttggtcctgtgcttcttgggttcttcatattcgtcgtcattggatcatctctcttccagattatcaggacagcgaccagcggaggtatggcataagtctgcacttctggtgttaaggaattgcgaggagactggtcttgcattgggcttttcttttctgttagttttgtagggaaactgatgatatatttactagagatatgcttact

SEQ ID NO: 214516 - DNA, 286 bp, Gossypium hirsutum
aacggtgctgactgtaaccctatccgttcaaatggacctggttacaaccccaacactgttaaagcacattgcaattatgctgttaacagctatttccaaaaaaaaggccaaggtcaaggctcctgtgaatttgctggcacggcagctatcactacaactgaccctagctctggtggctgttcttacccctccagtgccagtggtggaggcacgaccttaacaccaacaacaccgggcacgacaacaactccatcatcatcaacaaccaccacgccctccatcatgt

SEQ ID NO: 214517 - DNA, 260 bp, Gossypium hirsutum
caccttactagcatttttttatcttcgccggaaaacaggggggagatggccgcaccttggccgattacaacatccagaaggaatccaccctccaccttgtcctacgtcttcgtgggggtattcagatcttcgtcaaaaccttaaccggcaagaccatcaccctcgaagtcgagagctctgacaccatcgataatgtaaagtctaaaatccaagacaaggaaggcatcccaccagaccagcagcgtgtcatcttcgccggc

SEQ ID NO: 214518 - DNA, 288 bp, Gossypium hirsutum
gttccttatgctgcctctaattattttgcttatgatacactaagaaatgcttataaaaaagcttttaagaaagaggaaattgggaatgttatgactcttctaataggatcagcggccggtgcgatctcgagcacggcaacttaccctctcgaggtggctcggaagcagatgcaggctggtgctattaatggaagacaatgccacagcatgattcaagcattaacaagcatagttgagaaagaggggatggcagggctttatagagggttgggaccaagctgcatgaaa

SEQ ID NO: 214519 - DNA, 281 bp, Gossypium hirsutum
ctgagtttgtggcttcaggatctccaaattccagttatggtcaggcattgccaacggaggaagattttgcaaaggagcctgttatagttccctcccagctgcatcaaactgtcctcggtacagataatcaagatggagcatcatcctcaaagcctcaacatgttgtacttaaccaccttttcattgagaaaggatgggcatcgcattctgttgttgccctgggattgacccataggtttgagtccaaatacgtgactgttgtactctataagccactcaaa

SEQ ID NO: 214520 - DNA, 286 bp, Gossypium hirsutum
tagctgtatcccgttcttttggcgacactcgatttagaagggaataataatgaaatgctgaagaagggagttgaagaaaagagatggtctgaaaaatttatttcacgtgtagtgttcaatgatgacttggtcatagcatctccagacacttttaaagtagctcttggatcagatgcagaatttgtcctgttggcatctgatggtttatgggattacataaacagttcggacgcagttgcttttgttcgaaatcaattacgagaacatggagatgttcaggtagcat

SEQ ID NO: 214521 - DNA, 322 bp, Gossypium hirsutum
ctctacctttcggtacccttttcatcgagcttttcttcatcatgtcaagcatatggatgggacgcgtgtactacgtcttcggctttcttctcatcgttatggtcctccttgttgtggtttgtgccgaagtatcattggtgttaacttacatgcatctctgcgtagaagactggaaatggtggtggaaatccttcttcgcttctggttcagtcgccatctacatcttcttatactccgtaaactacctcatattcgatctcaagagtttgagtggaccggtctctgcaactctctacttggggtattctctcttcatggtcct

SEQ ID NO: 214522 - DNA, 270 bp, Gossypium hirsutum
  unsure (1)..(270): unsure at all n locations
gaaaaanaaagnacannggnanancngaagcnagccccggaacganaaggagggcacacgcngnncanccncnnacngccgnacaacnngagnggncgcnnnggacncgngangnngaggaagaacaaannccccnnngcagggaacncggaannggganngnngcananagnccccnnggncanggnnncnnngccggnaaagcaaaggagganaccncnaanaggncncnggaangagacccaaggggacaaggagaaaacnnggagc

SEQ ID NO: 214523 - DNA, 264 bp, Gossypium hirsutum
ccatcggtgtctccgtcctcggcgctgcatggggaatatacataactgggagtagtttaatcggtgctgctattaaagctcctcgaatcacttccaagaatctaattagtgtaatcttttgtgaagctgttgctatatatggtgtaattgttgcaattattttacaaacaaagttagagagtgttccatcatcacagatatatgcgcctgagtctcttagagcaggatatgcaatctttgcttcggaaattattgtgctttgca

SEQ ID NO: 214524 - DNA, 322 bp, Gossypium hirsutum
  unsure (1)..(322): unsure at all n locations
gcaaattcaaggtccaaggcatccctatgcttatagcactcggaccaactggaaaaactattacaaaagaggcaaggagtctggtcatggctcatggggcggatgcttatcctttcactgaggagaggttgaaggagattgaggcacagattgaggagatggcaaaagggtggccggagaaactgaaagatgaacggcatgaggagcatgagctggtgctcactcgtcgcagtaattatgtctgtaatgtatgcgacgaaatgggacaagtctggtcattctactgtgaggaatgtgactntgatctacatcccaaatgtgc

SEQ ID NO: 214525 - DNA, 287 bp, Gossypium hirsutum
cccacgcgttcgccttcttttccgcccacgcgtccgggaggatgaacactcaacttttggagattgagccaaaggaacttaaattcgaatttatattgaagaagcaaagctcctgctcgattacgcttacaaataaaactaaccaatatgttgctttcaaggttaaaactacatctccgaagaaatactgtgtacggcctaatgttggcatcattatgccaaaatcagcttgtggttttacagttaccatgcaagctcaggaggaagcccctcctgatatgatatgt

SEQ ID NO: 214526 - DNA, 285 bp, Gossypium hirsutum
cttctctcaacccatacacatatttcccaggaaaaagaaaaagcttgagcgaacaagaaaatggccgatcagcttaccgacgatcagatctctgaattcaaggaggcctttagcctgttcgacaaggatggagatggttgcattactaccaaggagttgggaactgtgatgcgatcacttgggcagaaccccactgaggcagaactgcaagatatgattaatgaagtcgatgctgatggaaatgggaccattgattttcctgaattccttaacctgatggcaaga

SEQ ID NO: 214527 - DNA, 282 bp, Gossypium hirsutum
cccacgcgtccgcctacgcgtccgcccacgcgtccgcccacgcgtccgcatttctgaagagatgccagcttgtcgtcaaatgctcaacatcttccacccatatgatcctgtagcatatagaatagaaccacttgtttgcaaagaacacatcacaaaacgtcctgtcattatcccttatcacaaaggtggaagaaggttgcatattggatttcaagaattcactgaagatttagctgctcgttctcaaggagtaatggatcgtctcagctttataagggctaa

SEQ ID NO: 214528 - DNA, 285 bp, Gossypium hirsutum
gtcgctgcagatattgcagagggggagaacaaactcaagctctattcttactggaagagctcctgctccttccgtatcagaattgcccttaacctcaaaggtctggaataccagtacatacccgtgaacttgcttaagggggagcaattcagtcctgaattccaaaagctgaaccctattgggtatgtaccggtgctggtggacggtgacatgatcatttcagactcttttgcgattttcatgtatctggaggagaaataccctcaacaccctttattaccatct

SEQ ID NO: 214529 - DNA, 269 bp, Gossypium hirsutum
atttttccgcataaacccaaatcggggggctttttcaagatacctataaaataacccctgatgatccaaaatgccagcaattacagccaatgatgactccgactatttatccaagctagtattgatccgatattccggggtctgggaaatccaacttgttgtctctattcacaaaaaacgagttgaatctgaattcaaaatccacaatctgagtagaatttgctacccgaagtatacgggtagatgataaggcctttaaggcccagatt

SEQ ID NO: 214530 - DNA, 264 bp, Gossypium hirsutum
tcaatgtccggaatcagatacagtaagaaattaaagattcaagtggtgattacaggtgaagtaactctaaacttgttgtcggtgacaatggtgtcaccagcttttaatacccattccttctcgatgaatcaaaggttgcttgtacttggaaacgacaaagttatggcttccgggaaatcaacatataagattgaagtgatgacgccaggttcgggtaacctcgcacctgcaggcttttatcttttgttggggttcatcaagaca

SEQ ID NO: 214531 - DNA, 288 bp, Gossypium hirsutum
aaaggctttggttgatactttctttggtcctcctgaacggggtgtatatagtgcatctgttcaaagcactcttttgcagatggcaaaggctgtacttggcaggtttggtgacatatcatcagttaaactaaaaatgccgaatatccatttcttacctgttaatatatcaagcaaggatcacggcagcattgtaaagttcaatgatgatgtatatcttccgacggacgaacctcacggatcgattgaagctagcttgagccgattctggtcaaagatgtagtacgtaca

SEQ ID NO: 214532 - DNA, 282 bp, Gossypium hirsutum
gccacttgataaaattttccgcataaattcaaatctttattctttttcaagatccgatagaagaacccctggtgatccgaaatggcggcgtatagagcagatgatgactacgactatttgttcaagctagtattgatcggagattcgggggttgggaaatcgaacttgttgtcgagattcacgaaaaacgagtttaatctggagtcaaaatccacaatcggagtagaatttgctacccgaagtattcgggtcgatgataaggtcgttaaggcccagatttgg

SEQ ID NO: 214533 - DNA, 285 bp, Gossypium hirsutum
cccacgcgtccggtttctcatattcttctaccctggagggtcgaccggattaagaagcgaatcacttccatggcatgtactgttggggctgtttgtatacatcttggcagttggcaatgccaccttagggttcctggagaagcttacattccttgagaactcagggcttgataaatatggtgccgaggcataccttgtaaacttcacagctattgtcacaatattgtatggagccttcgtcatatttacagttctctcccagggtcctcaggaagatgactacaa

SEQ ID NO: 214534 - DNA, 307 bp, Gossypium hirsutum
  unsure (1)..(307): unsure at all n locations
cgaagctaccaactgacttagggtggcggtttatgctcggcgtcggagcaattccgtcggttttcttggctgtgggtgttttagctatgcccgagtcaccgcgttggctggttatgcaaggccgactcggtgaagccaagaaagttctggacaaaacttcggactccattgaagaagctcaacttagactaagtgaaatcaaagaagcagccggaatcccacaagtatgcaccgacgacgtcgttaaagtccaaaaagcgaagccacggcnaaaggcgtgttgaaagaaatactattatacccaaca

SEQ ID NO: 214535 - DNA, 288 bp, Gossypium hirsutum
tcttcctctcagtaacaatggagtcgcggttgttgtcacgcgcttccaccattgccggcttgcctcagatcaggccgaagctttcgcgagactgtctcagtgtttcgtttgcttcggctaagcctatcggagccgtcggagaaggcgggaacgtgatatgggggagacagctaaggccgtcgctgttgctcgagagctcgctggccaataaacgggagattttgaagacggttctagcttccgcgtcgtcggcggccgggggaggaagcgattccgccgggtgaggga

SEQ ID NO: 214536 - DNA, 324 bp, Gossypium hirsutum
gaaaaaacctacggggctagtcgatacggcgtcgtggtactgttccgtaaccttattggccttaatattgatagggtcaatcagggcaaactccgtatcagatgaaccagtgagaggtagccagctccggaaccgaccctgcgatgaaatctatgtcgttggcgaaggtgaaacccttcactccatcagcgacaagtgtggcgatccgtttatcgtcgagcggaacccgcatatccatgaccctgacgatgttttccccggccttgttatcaagatcatcgcttcaactgataggaaattatagaggtagctgctttacacatt

SEQ ID NO: 214537 - DNA, 288 bp, Gossypium hirsutum
tgaaattccagcgtttggtgaggagacacacacacacacgcacgcacagagatcttcaaatttcatcaatggatcattcaaaggttcaagagatcgtggagaagcaggtattgacggtggcgaaggccttcgaggaccagatcgacgaagagattgcggctttagatcgactggaccatgacgatctggaagctattagagagcggaggttgcagcaaatgaagaagatggcggagaagcgaagtcgttggatcggtttaagccatggtgaatactctgagattccag

SEQ ID NO: 214538 - DNA, 285 bp, Gossypium hirsutum
cccacgcgttcgaatggtcacctccttacattaacccagcgagttcagaagattgaaatttcaggttcgagatgaattagagcatcttatggatgatgatggtgacatggctgagatgtacctcacagagaaaaaactaaggtcagagggcaacaccccccatgaaataaatcctctaactaatttttctggtgggaccagacaagtttcaaaatctgctcctgtttcaccaatagcatcgaccagtggagctccaagattgcaaagggcatttagcagtatcgt

SEQ ID NO: 214539 - DNA, 299 bp, Gossypium hirsutum
attcaagatggaagagtacttgatgtttccttctccaaagccttctacaaattaattttggggcaggaccttagtttgtatgatatccaatctttcgatcctgagcttggtaggacgctactggagtttcaggctattattgttaatcagaaaaggcatcagaaatccatttgtgttgaaaacacagcattgaaacaggatttgtgctttcgaaataccaggattgaggacctttttctggactttacccttcctgggtatcctgattatgttctttcttttgagtgtaatctcaaaat

SEQ ID NO: 214540 - DNA, 319 bp, Gossypium hirsutum
catgactgtcttgtttaaaatgcctgtcgttttgggtttctttgtgggtcttatgatgctgggtttggttagctctgctgagtttcatgagctttttcaacctggttgggcaaacgatcatttcatctatgaaggagagcttcttaagctcaaacttgataatttttctggtgctgggtttgcatcaaaaagcaggtatttgtttggaaaagtatccatgcagattaaacttgtagagggtgactctgctgggactgtcactgcttactatatgtcatcggagggtccataccacaatgagttcgacttcgagttcctg

SEQ ID NO: 214541 - DNA, 238 bp, Gossypium hirsutum
cattgccaacggaggaagattttgcaaaggagcctgttatagttccgtcccagctgcatcaaactgtcctcggtacagataatcaagatggagcatcatcctcaaagcctcaacatgttgtacttaaccaccttttcattgagaaaggatgggcatcgcattctgttgttgccctgagattgacccataggtttgagtccaaatacgtgactgttgtactctataagccactcaaaag

SEQ ID NO: 214542 - DNA, 291 bp, Gossypium hirsutum
cggacgcgtgggcggacgcgtgggcggacgcgtgggatcgtggattaataggggtcatgcatgactggtgtgagtcgtttgatacatacccaaggacctatgacttattgcatgcagctggcctcttctcggttgagaggaaaagatgcaatatgtctaccatcatgcttgaaatggaccggatattacgacccggtggacgagtatacatccgcgattctcttgatgttatggatgaacttcaagatatcgcaaaagccatgggttggcatcctactctacgcgatacgt

SEQ ID NO: 214543 - DNA, 286 bp, Gossypium hirsutum
tagctgtatcccgtgcttttggcgacactcgatttaaaacgaagaagaatgaaatgctgaagaagggagttgaagaaaagagatggtctgaaaaatttatttcacgtgtagtgttcaatgatgacttggtcatagcatctccagacacttttaaagtagctcttggatcagatgcagaatttgtcctgttggcatctgatggtttatgggattacataaacagttcggacgcagttgcttttgttcgaaatcaattacgagaacatggagatgttcaggtagcatg

SEQ ID NO: 214544 - DNA, 284 bp, Gossypium hirsutum
cggacgcgtgggttctagaactatccaagcacactggtattaatcaatggctcgtacaaagcaaacagccaggaaatcaaccggtggaaaagctccacgtaagcaattggcgaccaaagccgcgaggaaatcagctccagccaccggaggagtgaagaagcctcaccgtttcaggccaggaacagtggcgttgagagaaatcaggaagtaccagaagagtaccgagcttttgatccgtaaacttccgttccaaaggctagtgagggaaatcgctcaagatttca

SEQ ID NO: 214545 - DNA, 403 bp, Gossypium hirsutum
tatgggagagttgatggcagagatatttacattggaagcaaaaaaatttcagtgagagcggacggaacagttccaactctagaaggcaatatgatgaaagggaagaccattgggtttgtatattctggagcaacccctgctggaatcttcagtctttcagatgcttgtcgaactggtgttccagaggcagtcgatgagcttaagtcaatgaggataaaagcggctatgcttacaggagacaatcaagctgtagccatacatgtacaagaacagctggggaaccgtctagacgtagttcatgcagaacttctccctgaagataaggcaagaataatcaaagaatttaagaaagaaggggcaacggcaatgattggagatggtgtcaatgatgcccctgcacttg

SEQ ID NO: 214546 - DNA, 300 bp, Gossypium hirsutum
gacccacgcgtccgcagcggccgtttgcatatcgtagctaacctgcaaagtttcgacaatggctgtcgggaagaacaagaggatttccaagggaaagaagggaggaaagaagaaggcggctgatccatttgctaagaaggattggtatgatatcaaggctccatcagtttttactaccagaaatgttgggaagactcttgttacccgtactcagggtaccaagattgcttcagaaggactcaagcaccgtgtgtttgaggtctcactggctgatcttcaaggaggtgatgaagatcatgc

SEQ ID NO: 214547 - DNA, 385 bp, Gossypium hirsutum
cccacgcgtccgagctttaggacttaaaatctctgttccattggttttggaattctctggttctcaagctccgttatggtggagtggtttccgttcttggctcaagcctccatatctttacgtcgtcatcaacgggatcatcatcacaatagcagcatcgtcgcggtttaaccaaaacaacggcgagaaagatcagatggagcagatgcaaccgcggccgaagatctcggaggatcaacaaccaattgtggagtatgatacaaagagcgggtggggctccgacgcagtggaatccagtgatttcgtgtacgaggaaaatcagagaggagaagaggtggcaaccagggtttccgaggaggagagcaatgtgggcggtgaagatgac

SEQ ID NO: 214548 - DNA, 398 bp, Gossypium hirsutum
cgcgcttaaaaaggccgccaaagtgttggaagatcgcagagagaaaaacgccgttgccagcatcttgatcttatccgacggtcaggataaacaatgtgaaatgaattccaccaatcagaacctcccagttgtttcaaccacgcgcctggcacaatcagagatccccgtgcactccatcggtttcggcacatgcagtcaggctccaaacgacgacgctttctgtaaaatcgtgaatgggcttgtaagcgtggtggttcaggatgtcagactccaactgggattcgtatccgggtcagcgccagcagagatttcgtcggtctattcattgacaacccgaccgtcttacgtcgggtcgaattcggtacggatcggggacttgcactcgggcgaggagaaag

SEQ ID NO: 214549 - DNA, 352 bp, Gossypium hirsutum
tctgaaagtacataatcctcagttttactggaggatcatgaaagaagctgatataggccttgcagatgcatatatccatggagatttttcttttcttgatgaaactgaaggccttcttaatcttttccggattcttgttgccaataaagagaactcagctgcctcagggtcgaataaaagaaggacttggtggtcacctgctctgttaacagctagtatatcatctgcaaagtattttgtgaagcatctcttgagacaaaatactattacacaagctcgtcggaacatttctcggcattatgatctgaggaatgaacttttcactctatacttgggcaaaatgatgcaatac

SEQ ID NO: 214550 - DNA, 347 bp, Gossypium hirsutum
gtcgaagttgcggcatatcctttttagtactccctactgtaaagatgaacaaggagaggctcatgaaaatggctggtgcagtccgcaccggtgggaagggtagcatgagaagaaagaagaaggctgtccacaagacaactaccaccgacgacaaacggttacaaagcaccctcaagagaataggagtcaatgctattcctgcaatcgaggaagtcaacatcttcaaggacgatgttgttatccagtttattaatcccaaagttcaagcatctattgctgccaacacctgggttgtaagcggttctcctcaaacaaagaaattgcaagatattctccctggaatcatc

SEQ ID NO: 214551 - DNA, 411 bp, Gossypium hirsutum
gcgtccgtaataggtgggatcaaggtagtcctattctggtattcattggctcatggatgtacatgggctggtatgcacttggcggagtactaccatcgctattactatcagagttatttccaataaatgtaaaaggttcagcaggaagcatctgtaattttatgggaaatttcactggttgggttgtcgcatactacttcaacttcctaattgaatggagctcaacaggaatattctttatatcttcagcctttagctctgcaaatttcatcctaacagcgacaatggtacccgagactaaaggacgaacactggaggaaatacgagcatcaattactcattcttcagattgaaatagcaatttgatttaaatattgatcactctagctgctggtgttactagacactgat

SEQ ID NO: 214552 - DNA, 393 bp, Gossypium hirsutum
gttaacaccaactcatcttgccatagtcatggaatatgcagctggtggagaactttttgaaagaatatgcaacgctggtagatttggtgaagatgaggcaaggtttttctttcaacaactgatatcaggagtgagttattgccatgcaatgaaaatttgtcatagagatcttaagctggaaaacactctattagatggaagcagtacacccagactaaaaatatgtgacttcggctactctaagtcgagtgtgttacattcccagcccaaatcaactgtaggaaccccagcctatattgcaccagaggtcttgtccaaaaaagaatatgatgggaagattgcagatgtttggtcatgtggggttactttgtatgtcatgctggttggcgctta

SEQ ID NO: 214553 - DNA, 385 bp, Gossypium hirsutum
  unsure (1)..(385): unsure at all n locations
cccacgcgtccgcccacgcgtccgcccacgcgtccgcggacgcgtgggttcgaaggtaaagtcgaattttttcgctgtaaaacgaagttttgagtttgaaaatggcattaaccaacttcatattaacagtagcaggtgttagcgcagtggttcttttattgcgaagcgacgttaaacaatccgctgcgatctttaggcgcaacgttaaacatataaggaattggcttgaagaagagtcttctgctgcttccaaggcagcagagaaggcaaagcccaaggaattggagtccaaggttcctcctaagaaggactagtttctttatagagagtttgggttatntatgatgatatacagtttacagtttttgaatatctggngttttat

SEQ ID NO: 214554 - DNA, 358 bp, Gossypium hirsutum
aaactaatagatttatgcagttttgagaacttgagtaatttagacgtgaacaagacgggaaaacgacatgaagacgacgatgaggcaacgaacaagacgttcttcagaaaaggctaggttggagattggcaaaaccatcttacacccgagatggctaatcggctcgacaatatagtggagcaaaaactgagtggaaccggtttgagttttgaactcaacaatggatcatcttgatggactaaaatcatttgtcttttgggtaataattgtgtgttcatttgcaactgtgtttggtttggatgctttgaatttcttgttcaaagatccaaacatgttattgaaacctatttctctcaaa

SEQ ID NO: 214555 - DNA, 410 bp, Gossypium hirsutum
cacgcgtccggatcgtctcacccgagctatcatggacgattatcattctagcccgccaaaagagcggcgggggcgaggagcatttagttgatgccgtgcttacgtagcaagacaagtatgatcttaacgaggacactattattggacttctttgggacatgatcactgcaggcatggacacaacagcaatcttagtcgagtgggcaatggctgagctcattatgaatccaagagtgcataaaaaggcacaagatgagctacatcgtgtgataggattccaaagggtgatgtctgaacctgatttctctaatctgccttaccttcaaagcgtatccaaagaagcactacgactgcaccccccaactcctctaatgttaccccaccgtgccaatgctaatgtgaaaatctgt

SEQ ID NO: 214556 - DNA, 274 bp, Gossypium hirsutum
agacactctaggtttgactggtcacgagcgttataccattgatctcccaaacaaaatatgcgacataagacctggccaagatgtaaccgtcacgactgacaatgggaagtctttcacttgcactgtccgctttgacactgaggttgaattggcatacttcaacaatggtggtatacttccatatgttattagaaacttgattaaacagtaagtgcattggttgggagccatttctagatctttcatcaattgtgaaacgcgagatgcacataaa

SEQ ID NO: 214557 - DNA, 374 bp, Gossypium hirsutum
gccacgcgtccgcccacgcgtccgcagaaagatcctcctacctcttgcagcgctggccctgttgctgaagacatgtttcattggcaagcaactattatgggtcctccagatagcccgtatgccggtggggtgtttctagtcaccattcatttccctccggattatccatttaaaccacccaaggttgcattcaggacaaaggtatttcaccctaatattaacagcaacggtagcatttgccttgatattttaaaggaacagtggagccctgccctcaccatatccaaggtgttgctgtcaatctgctcactcctgacggatccaaatcctgatgacccttttgtgccggagattgcccacatgtacaaaacgga

SEQ ID NO: 214558 - DNA, 390 bp, Gossypium hirsutum
cttgactcaaaagctgcaggatggggagtgatggtcagccaccgaagtggtgaaacagaggataacttcatcgctgacctttctgttggtttagctagtggccagatcaagactggagctccttgtagaagtgagaggttggccaagtacaaccagcttcttcgcattgaagaggaacttggaaatgtccgctatgctggtgaagctttcagatctccttagaggagttaacttacaggaacaagtttgtgcaccaaattagtatggagaaacgttttaacgagctctagtaaagtgaggccgacctttagaaattttcaggaaccctaagagcttctcaggggaaaaaacataatttgtcatctaggatagatttagtttggggatctg

SEQ ID NO: 214559 - DNA, 388 bp, Gossypium hirsutum
gtcatgtttgggggaaaaagggttgttcgatacactcgtgaattaacaaacgtcgggcctgcaagatccatgtacaaagtcacagtaaatggaccatcgacagtagggatctcagttaggcccaagacactcatctttagaaccgtgggtgaaaagaagagatacacagtcacctttgtagctaaaagaggaacaagcccaatggctaaacctgaatttggttcaatagtatggggcaatgctcaaaaccaagttaaaagcccagtttccttctcatggtcattgatgtgagagtgtcccacagtttatatataattctgggtattctttccctcaatgaacctcacacaggacaagaaatctggtgcaaaaagggaccctcatccat

SEQ ID NO: 214560 - DNA, 413 bp, Gossypium hirsutum
cccacgcgtccggggtgctgaccagcccgttatccttcacatgcttgatatcccacctggtgcggaggctttgaatggtgtcaaaatggagttggtggatgctgcttttcctcttctaaagggtgttgttgctacaactgatgttgttgaggcatgcactggagtcaatgttgctgtcatggttggtggtttcccaaggaaggaaggaatggagaggaaagatgttatgtcaaagaatgtgtctatttacaagtctcaggcttctgctttggaacagcatgcagctcctaactgcaaggttttggttgttgctaaccctgccaacaccaatgcattgatcctgaaggaatttgcaccttcaatccctgcaaagaacattacctgtttgacaaggctggatcataacagggcac

SEQ ID NO: 214561 - DNA, 411 bp, Gossypium hirsutum
tcttgatttgcaagaacagggtgcacccgttggtttaattggaattcaaggacatatagggaggcctgtatgaccagttgtgtgtactgctcttgataagttaggcattctcggccttcctatctggtttacggagctcgatgtgtcttcaatcaatgaacacgtgagaggggaagatttagaagttatgcttagagaagctttcgcacatccggccgtggagggtgtaatgctgtggggattttgggaactgttcatgagccgggataacgcacacttggtgaatgccgaaagcgaagttaatgaaaccggtaaaaggtttcttgctcttaaacacgagtggttgtctcatgctcgtggacaagtagatgtaaaaggacaattcaatttccgaggctttcatgggaagta

SEQ ID NO: 214562 - DNA, 381 bp, Gossypium hirsutum
  unsure (1)..(381): unsure at all n locations
cccacgcgtccgcccacgcgtccggcattcccgatgaatttcccaaggggttatggagcagaaaagaaggtgagagcttggatggaggagtttcagaagcttccgtacatatctccgtatgaagattctcggcatattgatcctaatagtgagcttatggagaaaagggctgttggtgtattgcatgagtttttgagcttgacaattcataagaagaccaagaggaactacttgagaagcttgcgagaggagctgaacatcccgcataagtttactcgattgtttactagatatcctgggattttctacctctcgttgaagtgcanaacgacgactgtggctctcaaggaaggatacagacgggaaaactagtgaatcaca

SEQ ID NO: 214563 - DNA, 347 bp, Gossypium hirsutum
aaagaaagaaaaaatggttctgctagacaaaatgtgggacgatgtagtagctgggcctcagacctgaacgtggtctcggcaggcttaggaagatcaccacccagcctttgtccatcaaagatgaaggagaaaagaaaaagtaccagaggtcgttgtcgctgccgaatagtccagtgtcaggtccgacacccgtgacaccgacgaactccacggcgcgtaaggagaacgtgtggaggagtgtgttccatccgggtagcaacctagccaccaaaagtataagttctgatgttttcgacaagccacaacccaactctcctaccgtctatgactggctttacagtggggag

SEQ ID NO: 214564 - DNA, 389 bp, Gossypium hirsutum
cccacgcgtccgttcctttccgggtattgccaacaatcaaggagcttggtcgaacacgaatggaagtaaatgttaaggttaaaagtgtctttggagcaaagatgtttgctcttggagttgtcatcaaaattcctgttccaaaacagacagcgaaaacaagtttccaagtaacatcaggtcgagcaaagtaccaagctgctattgattgcttggtttggaagataagaaaattccctggacaaacagaaccaaccttgagcgcagaagtggagttaatttccacgatggcagaaaagaagtcatggacaaggcctccaattcagatggaatttcaggttccaatgtttacagcctctggcttacgtgtccggtttcttaagtctggaaaa

SEQ ID NO: 214565 - DNA, 296 bp, Gossypium hirsutum
cccacgcgtccggacagtttgaagaatgtttacaagtcattcgtgactgattatccaatggtctccattgaagatccatttgatcaggatgattgggagcactatgcaaaaatgacaagtgaaattggtgaacaagtgcagattgttggtgatgatctccttgtcacaaatcctaagcgtgtggagaaagcaattaaggagaagacgtgcaatgctcttttattgaaggtgaatcaaattggttctgtgactgaaagtattgaagctgtaaaaatgtctaaatctgccgggtgggg

SEQ ID NO: 214566 - DNA, 356 bp, Gossypium hirsutum
ggcaagtttacataatatttttacttgaatgattttcacattgctttttagctgtgggatttgttgaattcaggaataaagaaacattcccagtgaagattccagcctggaaacactgcaactgcataagatccagatgtgtgaaactttattgtgagtgctttgcagcagggatttactgcgataattgtgcatgccagaactgtttgaacaatccagattatgacgatactgttcttgatactcgacaacaaattgaattgcgtgaccctcttgcatttgcttcacctgttgttttcccatccaatgattctcctaatgttactggtcatggaaacttgatgaacgctggatca

SEQ ID NO: 214567 - DNA, 292 bp, Gossypium hirsutum
cccacgcgtccggaaaccagagagagaaaaaaaagaaagaaaaaatggttctgctagacagaatgtgggacgatgtagtagctgggcctcaacctgaacgtggtctcggcaggcttaggaagatcaccacccagcctttgtccatcaaagatgaaggagaaaagaaaaagtaccagaggtcgttgtcgctgccgaatagtccagtgtcaggtccgacacccgtgacaccgacgactccgacgtcgcgtaaggagaacgtgtggaggagtgtgttccatccgggtagcaacct

SEQ ID NO: 214568 - DNA, 362 bp, Gossypium hirsutum
gctttttcgagttggaacaatcgggaaacggaggagtgatcgtcgactgcgggacggccataacacggttgcaagcggaggcttacaacgcactccgtgacgcgttcgtgaaattaacgccggacttgccgacgaccggtgggtttgcgttgttcgacacgtgctacgacttgtcttcaagaaccagtgttagggtcccgacggttgcgtttcatttcagcggcggactgtcactggaattgccggcgaaaaattatttgataccggtggactcctcgggaacgttttgcttggcgtttgcccccacgacgtcgtctttgtctataattgggaacgtacaacagcaagggacacgtgtgagc

SEQ ID NO: 214569 - DNA, 395 bp, Gossypium hirsutum
attagggtttctctcttcaggtaaattcttggtagtttcgttcgttttaagaacagaggtgtcgaagatgagtaagcttcagagtgatgcccttagagaagctatttcaaccattgtggctaattccaaggagaaaaatcgcaagttcaccgagaccattgaactccagattgggctgaaaaactatgatccccaaaaagacaagcgtttcagtggttctgtgaagctaccacacattcctcgtcccaagaataaaaattgcatgcttggagatgctcaacatgttgaaaaagctgaaaagattggtttggattatatggatgtagaagcattgaagaagcttaacaagaacaagaagttggtcaagaagcttgctaagaaatatcatgcatttt

SEQ ID NO: 214570 - DNA, 350 bp, Gossypium hirsutum
gctgtgtctcaggtgaaaagaagttggttgaagaaggttcagcaagaatggagtattctagagaaaaaccttcctggttagcactttatcttactcttcataatgatttaaagtgttaactctgccttcattttgttggttaccattgtttaaattttgaaggcagttgctattttctcatgagactatgtttggcctgtgcagaaaccatctatgtccgtgtatgcgaggaaaggatcaatttactacgagcagcccttgttggtgctcctggcacaccctaccatgacgggttgttcttttttgacatttctcttccttctgactacccatatgaaccaccattggtg

SEQ ID NO: 214571 - DNA, 367 bp, Gossypium hirsutum
cccacgcgtccgcccacgcgtccgggtgcctaaagatgtgaatgctgcagtggcaacaatgaagaccaaaaggaccatccagtttgttgattggtgtcccacagggttcaagtgtggcatcaactaccagcctccaactgtggtacctggtggggatttggctaaggttcaaagggcagtttgcatgatttcaaattctacaagtgttgctgaagtgttctcaaggattgatcataagtttgatctgatgtatgcaaagcgtgcatttgtgcattggtatgttggtgaaggtatggaagaaagtgagttttctgaagctagagaagacttggctgctcttgaaaaagattatgaagaatttggcttg

SEQ ID NO: 214572 - DNA, 422 bp, Gossypium hirsutum
caaaggttaaagaaagaaagaaaacatgtctcttgtgacagaagagataaaagcgagtgcgtcagagatttaccatggagatgagatatgccaagagaaatccaagtttttgttggaggaagtaggcatgccaagggggcttttgccacttagagacatcgaagaatgtgggtacgtgaaggacacaggtttcgtgtggctcaaacaaaagaagagcatcacccacaagttcgaaaagatagggaagctggtttcctatgcaactgaagtcacggctgtcgttgagaaaggcaagatcaagaagctgactggggtgaagaccaaagagcttttggtttggatcacactgagtgatatccaagtggatgatcctcccactgggaagatcactttcaagaccccttcagggctgtttaggactt

SEQ ID NO: 214573 - DNA, 420 bp, Gossypium hirsutum
gtgaactattagaagaaagagaagcagggaaaacttttgatgtatgcttccagcaactgaaggcttttgctgatgttgtacccagttgggacaatatagttattgcttatgagccagtatgggccattgggactggtaaggtggctacaccccagcaagctcaggaggtacatgtagctgtccgtgattggcttaaaaagaatgtttctgaggaagtggcatctaaaacgcgtatcatatatggagggtccgtgaatggaagcaactgtggtgagcttgcaaaagaagaagatattgatggatttcttgttggtggtgcttctttgaagggtcctgagtttgctacaattgtcaactctgtaacaaccaaaaaggttgctgcttaaatatatataaggtggattcaggtaaatgaataaa

SEQ ID NO: 214574 - DNA, 387 bp, Gossypium hirsutum
cccacgcgtccgcccacgcgtccgcccactcgtccgcccacgcgtcccacagattgaggttaatgcttctaatggaagcattggagctcatcgtgctgttctttctgcacgatcgcctgtttttcacagcatgttttcacataacctgcaagaaaaagaattgtcaaccataaacatatctgacatgtcaattgaagcttgtcaggctttgctatgttacatttatggaaacatcaaacatgaagaattcctggctcaccggctggcacttctccgggcagctgataactatgatatatcggatttgaaagaggcctgccaccaaaggcttctaaaaaaatttggatccaaaaaatgtccttgaaagactccaaatggcaccttttt

SEQ ID NO: 214575 - DNA, 394 bp, Gossypium hirsutum
cccacgcgtccgattttcttgttagcccttatggttagggccgccaatgtacctggtgagtatgacagtgatgatgagttcattgcaccaaggcaacaaatcagacagcctttaatcaacaggccaccagttccagctacaggtgttcctgttactggcagccttgatcaacgacccatcataaatgatgcttggagtgcacgaatgagggaaaagtatggtctggatacgtacgacttcacctacaacccttcggagtcaaacaggtaccagcaggcagctccgcaaccagcagaagaaagcagtcgttgcaccattatgtgatgatcatctggttggatggttggcttccgaacgaaagatattgcattgtcgatggagtgacaaacttcat

SEQ ID NO: 214576 - DNA, 332 bp, Gossypium hirsutum
gcgggaatgcatatctctttggaagatatacgagagacagatccatgcttgtatagcagctgcaagaagattctggagatggatgctgagtttattgattcagatgctttgggattgacatttgtcagagaagttgaggagttaggatccaggagacttgttgagctggttgctggtgggaaaaacattgttgtaaatagcaagaataggcaggaatatgttaatcttcttattcgggatcgatttgtaacgtccatttctgaacaggtagaccatttttcccaaggttttggccatattctttctaactcaaggctgcagaagttcttttt

SEQ ID NO: 214577 - DNA, 414 bp, Gossypium hirsutum
cgggctggagaaaaaaaccactagccttttttttgcctgagatgcatacatgaaacggtgctggattggttctataactaaagacgcctctattagtgacacgaacaatgcagactccaattcatttggtttcaagttgctgttaggcaagattgtgccgaagctgttatcatcacttaatgaaatcggagctgattgtcaagaattcaagcatctccagcaatcgtgatgtcgggtttctaaagacattaaaaaaactcaatatcccccatcaaaacaaaacaaacgtcagtgctggaattttcaaatgtaaatatacaacttcggtgaaacattcttctttcctgtttttttttttaaaaaaaggggcttatcaacatattacgagctggatgcactttcttggagcaaaaa

SEQ ID NO: 214578 - DNA, 392 bp, Gossypium hirsutum
  unsure (1)..(392): unsure at all n locations
gggagatgacttgaccgaagaagagcaaagaaaggcaaataaaggaacactatttattcgcttctcgcaacttccaccaaaaaaattgcgcaaggactgcttctatcacacaacaccagcgatgcagactccgacggcccttgagaatgtggattcttgcgagaactggttgccaaggagagtgataagtgtatggcgcatagctgggatactgcatgctctggaaggatgggaagagcacgaatgtggttacaccatgtctaacattgacaaagtttgggaagcatgtctcaagcatggatttcagcctctgaaggtcccaactcaatcaaagtcctagaagatatttggcgatttatctaattaatctactngatatctatngtttctat

SEQ ID NO: 214579 - DNA, 421 bp, Gossypium hirsutum
caaggatctccagaaagatcctcctacctcttgcttcgcaggccctgttgctgaagacatgtttgattggcaagcaactattatgggtcctcctgacagtccatatgctggtggagtgtttctagtcaccattcatttccctccggactatccatttaaaccaccaaaggttgcattcaggacaaaggtctttcacccaaatattaacagcaacggtagcatttgccttgatattttgaaggagcagtggagccctgccctcaccatatccaaggtattgctatctatctgctcactcttgacggatccgaatcctgatgacccattggtgccggagattgcccacatgtacaagactgacaagagcaagtatgagacaacggctcgaagctggacccagaagtatgcgatgggttaacgt

SEQ ID NO: 214580 - DNA, 386 bp, Gossypium hirsutum
ccgttgcgaagaagaaaactgctggctctaagaagtctaaatcagctccttcacatcctccattgcttgagatgatttcagatgcaatcgtttcgttgaaagagaggacagggtcgagccaatatgcgatcgcgaaattcatcgaagagaagtataagcaattaccggcgaatttccgcaaagtcttacttgttcagacgaagaagtttgttgcttctggaaagcttgtcaaagtaaaagcctcttttaagctgccttcggcttctgccgcagctaagaaaccggccgccgtagctaagaagcctgccgccgcgaagcctaaatctgcagctaccactgccgcctcaaagtccaagccgaaagcgactaaaaccgcgtcgaaaccg

SEQ ID NO: 214581 - DNA, 367 bp, Gossypium hirsutum
gcattcgctagttataaatgccattcagcttcttgaccagtcgaggcggtgctaccgggtgattggaggtgtccttgttgagagaaccatcaaagaggttctccctgccgtgcaacgaaacaaagaagggcttgaggaagtaattgctcgtcttaacgagaccctggagaagaaaaagaaggaaattgctgatttcgagacaaaatacaaaattaggatcaaaaagtccgataatgactcgaaagatgaaagcaacaagaaggaaggctccgctcaaggagtccttgtcggccctgcaagttcgagtcagtaataggtatattccttcctatttccttccttatatgctcgaaactgctttttataa

SEQ ID NO: 214582 - DNA, 392 bp, Gossypium hirsutum
agcttatgctcaggatcacttctttgatgttatcacaaacatcattggccttgttgctgtgctacttgctaagtacatcgacgattggatggaccctgttggagctatcattctggctttgtacacaatacggacatggtcgatgacagtattagagaacgtgaactcattggttggaagatcagcagctccagaatatcttcagaaactgacctatctgtgttggaaccaccataaggccataaagaacatcgatacggtccgagcttacaccttcgggtctcactactttgtcgaagttgatattgtacttccggcaaacatggcattacaagaagctcatgacattggagaatccttgcaagagaaactggagttacttgccgacattg

SEQ ID NO: 214583 - DNA, 401 bp, Gossypium hirsutum
cccacgcgtccgggaatggatgttgccgcgtctgaattttatggaacagataaaacttacgacctgaacttcaaagaagagaacaatgacggtaaacaaaagatctcaggagatgctttgaaagatttatacaagtcattcgtagccgagtatccaattgtgtcaatcgaagatccatttgaccaagatgattgggagcactactccaaactaaccaaggaaatcggagaaaaagttcagattgtaggagatgatcttttggtcaccaacccaaagagggttgcgaaggctattgccgaaaaaacttgtaatgcccttcttctcaaggtcaatcaaattggatctgttaccgaaagtatcgaagctgtgaaaatgtccaagcaagctggatggggtgtgat

SEQ ID NO: 214584 - DNA, 291 bp, Gossypium hirsutum
cccacgcgtccgcccacgcgtccgcggaaaatggggcagattcaatactccgagaaatactttgatgatacttatgagtacaggcatgttgttctcccccctgaagtggccaaacttctccccaagaatcgcctactctctgaaaatgaatggcgtgcaattggagtacagcagagtcgtggttgggtccattatgcaatccatcgccccgaaccacacatcatgctcttcaggaggcctctcaactatcagcagcagcaggagaatcaggcccaacaaagtatgcttgct

SEQ ID NO: 214585 - DNA, 280 bp, Gossypium hirsutum
gacgcttgagcagatcggatggcaccaaagaaagataaggcccctccaccttcttgcaagccagcaaagtctggtggtggcaagcaaaagaagaatgaagtggagcaagggaaagcaaaaggagaaggcgaacaacatggtgttggttgaccaggctacttatgataagcttttatctgaggctcctaaatataagctcatcactccctcaattttgtatgatcgtatgaggattaatggatcccttgctaggaaggctataagggaatagatggcaaga

SEQ ID NO: 214586 - DNA, 289 bp, Gossypium hirsutum
caaccctggattccctttccagccctatagattatgtttgtcttcctcctgttgacttgagtgacctccctcaagacgcaaagattgaaaccgtgatttctttaacggtggctcgctctctgtcgttccttcgggatgctttgaagtcgctggccgcaaagacaaaactcgtcggtttggtggttgatctttttgggacagacgcatttgatgtcaccggagaattcaacctctcgccgtacatatttttcccctccacggccatggccttgtctctgtttcattacct

SEQ ID NO: 214587 - DNA, 294 bp, Gossypium hirsutum
gctgagtttaagcttatcaataagcggaggaaaagaaacttaccaggattcccctagtaacggcgagcgaaccgggaaaagcccagcttgagaatcggtcgccatcggcgtccgaattgtagtctggagaagcgtcctcagcgacggaccgggcccaagtcccctggaaaggggcgccggagagggtgagagccccgtcgtgcccggaccctgtcgcaccaagaggcgctgtctacgagtcgggttgtttgggaatgcagccctaatcgggcggtaaattccgtccaaggctaa

SEQ ID NO: 214588 - DNA, 281 bp, Gossypium hirsutum
attggaactgtccctttgggtcgtgttgaaactggtatcctcaagcctggtatggttgtaacctttggtccctttggattgaccaccgaaagtaagtctggtgagatgcaccatgagtctcttcctgaggctcttccaggtgacaatgttggcttcaatgtcaagaatgttgctgtgaaggatctgaaacgaggatatgttgcttcgaacttaaaggatgatcctgccaaggaggcagcttatttcacttgccaagtcatcattatgaaccaccccagggc

SEQ ID NO: 214589 - DNA, 294 bp, Gossypium hirsutum
gatgttttgtaacatggatgtcttcccacttaataccaaaagttttaatattatactgaatggctggtgtaatgccatccgtagtccacgtgaagcagaaaggatttggagggaaatgagcaagcgaggtgttaggcatgatgttgtgtcatatgcaagtatcatgtcctgctactcaaagggttctaatcttaacaaggtactgaagcttttcagccaaatgaaatcaatgaggattgaaccagataggaaggtttacaatgcagtgatccatgctcttgcaaaggctaggca

SEQ ID NO: 214590 - DNA, 294 bp, Gossypium hirsutum
cccatttcttcattacattgttcaagaacaaacaaaaaaaaaaagaagcaaaaaaacatggccaaagttctgttgttcattgctctatgtgtgcttccagctttggttagtgctacacgcattctgaataaccaattggtggttgaaggctatgtgtactgtgatacttgccgtgctggttttgaaacccctaagactagaaggctagctgatgccatggttaagctggtatgctccgacaggaagaccggcggagttgttttcgagaaggagggatataccgacaaaaccgga

SEQ ID NO: 214591 - DNA, 289 bp, Gossypium hirsutum
cccacgcgtccgcccacgcgttcgatcgaatgggtctttctgacaaaaatattggggcattatctgggggtcacactctgggaagggctcatcctgagagatcacgttttgatggcccttggaccaatgaacccctgaagttcgacaactcttactttctggagctgctaaaaggggaatctgaagggcttttgaaacttccaacagacaaggctttgatagatgaccctgagttccgcaagtatgtagagctctatgccaaggatgaggatgcgtgcttcagagatta

SEQ ID NO: 214592 - DNA, 291 bp, Gossypium hirsutum
  unsure (1)..(291): unsure at all n locations
gcaatgagcactgccggtcaggttattcgttgcaaagctgcggtggcatgggaggccgggaagccactatctatagaagaagtggaagtggcaccaccccaaaaacatgaagtccgtattaagattctcttcactgctttatgtcacactgatgtatactactgggagtgtaagggttacactcctctgtttcctcgtatacttggtcatgaagcctcanggatcgtggagagtgtgggtgagggtgtgaatgatttgaaacctggggatcatgtgcttcctatcttcacc

SEQ ID NO: 214593 - DNA, 290 bp, Gossypium hirsutum
gttcgaggctgtggtccattcggagcatattcatcaactaaaccgcaaaggataacagttgattcggaggaagtggagttcgaatatgaaggcaaatctggtttggttacttttgcactaaaagtcccagaggaagagcagtacctctggaacattgtcattgagctataaggagattcgaaagttttattcccttttcagcccttgtttgtcgatgatttcctacagttcgaaccatttccgaatgagaatttccctatgagctgacttcatttcaagaatgaaatgtg

SEQ ID NO: 214594 - DNA, 290 bp, Gossypium hirsutum
cccacgcgtccggctaaaccctagccactctctgctcaagtcgccaatgggggcttataagtacgtgtcggagctatggaggaagaagcagtcggatgtgatgaggtttttacagagggtgaggtgctgggaataccgccagcatccgtcaattgttagggtcaaccatcctactcgccctgacaaggcacgccgcttgggttataaggccaaacaaggttatgtggtttaccgtgtccgtgttaggaggggtggtcgcaagaggcctgttcctaagggtatcgtgtatg

SEQ ID NO: 214595 - DNA, 294 bp, Gossypium hirsutum
cccacgcgtccgggtaatttcagtgcgcaacattgcagcttgacttccaacttcctgagcgcttcaagttggagtactcagcagaggatgaagccaagagggagaaacctgttatgatacatagagctatcctggggtccgttgagcgaatgtttgctatattgttggagcactataagggcaaatggcctttctggcttagtccccgtcaagcaattgtttgccctgtgtcagaaaagtctcagcaatatgcaatgcaggtccgggattggattcatgaagctggttattatg

SEQ ID NO: 214596 - DNA, 291 bp, Gossypium hirsutum
gagaattagtcggattttgagagagtgaaacaaaatgagtatcagctgcgcgttgaaggtggttccgattgtgcttctgttggttcttttcgcattagcgaatgccaagaaatcagctgatgtgaccgagctgcagatcggcgtcaaatataagcctccatcatgtgaattccaggctcataaaggtgatagagtaaaagtgcactatcgggggaagctcactgatggaaaggttttcgattccagttttgaaagaggtgatcccattgagtttgagcttggtagtggaca

SEQ ID NO: 214597 - DNA, 293 bp, Gossypium hirsutum
tgcatttcaagtgattagtggtgttctgagtgtgtgcacagccttcttgtctggtgaacctgccacaaggttgcgttctcaggagctacagcaacttattgctgcactccttgaatttatggctgtttgcaagcgggcaattcgtgtacacttcagactaataggagaagaagaccaagatttccacacacaactagtgaatggatttcaatctctcacagcagagctatctcattacatccctgcaattctatcagagctctgataatgttgtaagcattacttgctccgat

SEQ ID NO: 214598 - DNA, 287 bp, Gossypium hirsutum
cccacgcgtccggttatatccctctttattttcctggtttgcagtcagcttcccctttatggaatacattctacgacgggcgctgatccgttttattggatgcgtgttatccttgcatccaaccgtggaaccgttatggaacttgggattacccccattgttacttccggtttggtgatgcaactcttggctggttcaaagatcatcgaggttgacaacagtgttcgtgaggatcgtgcactcttaaatggggctcaaaagctgttggggatcctaattgctgttgg

SEQ ID NO: 214599 - DNA, 289 bp, Gossypium hirsutum
atttatttcaagagtttttacctgcaatggtcggtcatggaacatcatccaaaacatataatgttaacctgtgtgtatgcggcctataagatagaagaaaatcatgtgtcagcagaggagcttggtaaggggatttcacaggatcatcaaatgattctcaattacgagatgatagtgtctcagagtctggaatttgatctcattgtttatgcaccctatcgttcagttgaaggttttgtcaatgacatggagaagcttcacctgtagtacatgaagagacaggtccatc

SEQ ID NO: 214600 - DNA, 283 bp, Gossypium hirsutum
tagaaaagaaaaatgaaagggaaactatgacacacttcggtctagttcatggtatgtgtcatggagcttggtgttggtacaagattgtgtcgctgctcaaatcaggcggccaccgtgtcactcccttggatcttggtgccagtggaatcaaccccaagaccatcactgacttggcttccttgtccgattatgcggagccattaatggcattaatggcctctttgcctgaagacgagaaagtgatactagtgggtcacagttacggtggggttatcatttcctt

SEQ ID NO: 214601 - DNA, 293 bp, Gossypium hirsutum
gcggaattcgccgttgaggagtataacaagcagtcaaatgggagtttaaagttggataaggtggtgaaaggcgagactcaggtggtggccgggacaaattaccggctgattttgcaggcgaagaaaggggcagtcgataacacgtatcaggctgtggtgtgggagaagttgtggctgaatctcaggaatctcacctcctttaacctcgtcaagggttagattggattataatgtaatttatgttcatatatgttatcctcgtccttttctattacttaactgagtggagaaca

SEQ ID NO: 214602 - DNA, 398 bp, Gossypium hirsutum
cccacgcgtccgcccacgcgtccgttccaggtaaaatcaagaatgatgggagactctgggtgcaaaaacactcttgattgtttcattagaactttgaggaatgagggattccttgccttttataaggggtttgttcctaattttactcggctgggatcttggaacgtggttatgttcttgactcttgagcaagccaagaaagctttccggggggaattatattatgattgattttagtttgcaatcaggaagacacaccttttacttgcatattgtgtcttcgatctcaaggagaatattttttgatcaaagaaataaggtaggagcattgcccaaatctctttttcgtataacttaccatttttcttagacaaaatagtattactgtaacaatcaat

SEQ ID NO: 214603 - DNA, 402 bp, Gossypium hirsutum
cccacgcgtccgcccacgcgtccgcccacgcgtccgcccacgcgtccgcccacgcgtgcgtgcatcgatagcattgttaatggcagcactagcgggaatggtaaggaaccatctgttgctgctgctttggctgtgcaatgtggaaattttgggtcaaaaattgaatcatccatcgatccatcccatatgaccttcggtgggatgaaaacaaaagagggtcccaacaggtgtaatgcatgccacaagcgtgttggtttgacaggatttagctgcaggtgtggaaacatcttctgtgcagcacataggtactctgacaaacacaactgtcctttcgattataggacagctgcccgcgatgctattgctaaagccaacccggtagtgaaggctgagaaacttgat

SEQ ID NO: 214604 - DNA, 297 bp, Gossypium hirsutum
acttgctaccaaggccgcccgtaaatctgccccaaccactggtggtgtgaaaaagccgcgtggataccgtcctggaactgttgctcttcgtgaaattcgaaagtaccagaagagtactgagcttcttatcaggaaattgccttttcagaggcttgttcgtgaaattggccaggatttcaagactgatttgcgtttccagagccatgccgttcttgctcttcaggaagctgcagaagcataccttgtgggtctctttgaagacaccaacctgtgtgcgatccacgccaagcgtgttac

SEQ ID NO: 214605 - DNA, 308 bp, Gossypium hirsutum
ccaaccactcttccgccaactcttccatccactttttctttttcctgcgccgttcgcaaaagctgcaaactttactaaactgttgcataaaattggccccaatctatgtgatcaggtcgccatccgcaccaataataaacaagacaatgttttcaatccattgttcgagaagcgtccaaaacagatttctattcgaagctctttaccttcatacaaggatttgcatccacttatgaagcacacaaacgtcttctccattcaaaggaaatacacgatccttaaacatatattgcatgtcccaccttcat

SEQ ID NO: 214606 - DNA, 381 bp, Gossypium hirsutum
ggtggcgcgaaaaaggttatcatttctgctcccagtaaggatgctcccatgtttgttgtgggtgtcaatgagaaggaatataagcctgaccttaacattgtctccaatgctagctgcaccaccaactgtcttgctccattggctaaggtgatcaacgataaatttggcattgttgagggtcttatgaccactgttcattctattactgctacacaaaagactgttgatggtccttccatgaaggactggagaggtggtagagctgcttccttcaatatcattcctagcagcactggagctgccaaggccgtcggcaaagttttgccagcactgaatggcaagctgactggaatggctttccgtgttcccacttgtgatgtc

SEQ ID NO: 214607 - DNA, 372 bp, Gossypium hirsutum
aaaaacgtgtatggcttgggagcgaggaaaattggtgttacttctcttcctccgttaggtggcgttcccttagcaagaacattgtttggttaccatgagaagggatgtgtgagcaggttcaataccgacgctcagcaattcaacaaaaagctcaacgcagcagcaaccaatctccagaagcaacaccctgatctcaagattgtggtttttgacatttacaaggcccttcttgatgttgttaataccccttcaaactatggtttcgtagaagcgacgagaggctgctgtggcacagggactgtagagacaactgaattcttatgcaatccgcatacactgggaacttgtcccaatgccttccagtatgtgttt

SEQ ID NO: 214608 - DNA, 340 bp, Gossypium hirsutum
cgcgtccgcccacgcgtccgcaaaattcagagcagcacctttttgagttccaacattttcccacttctgggggtcggcttgctgcacatcgtgttgctcaacattatgggctggtaactatggtttatgataatggtttaaatggcctaggaaacagaatcgtggcgaataaagcaggggaaatcaaatggcctggtgtttgtttgtctgaaattcctgccaaatactctgaaaatgataaaccagagcaggttaaaattgctattaatcctaggccaaataatggatctgtaaatgaagctaatcaaatcggcatcaaaagaagtcctgtgagaaagtg

SEQ ID NO: 214609 - DNA, 392 bp, Gossypium hirsutum
cggacgcgtgggttcgaaatctatggagatggcagcgtcaaagcttacttcgttgcaggggccgatataggaaaattcaccatgaaaactgttgatgacattaggaccttgaacaagtcagttcattttaggcctgcctgcaatttctataacatgaacgagcttgcagctttgtgggaaaggaaaatccggcgaacactccctcgagttaccgtcactgaggaagaccttctctcggctgcggcagagaatattatcccacaaagtgttgttgcatcattcacccatgacatcttcataaagggttgtcaaatcaacttcccaatcgaaggcccgaatgaaaccgaagccttcagtttggacccgaatgagccattccgaacattggatga

SEQ ID NO: 214610 - DNA, 368 bp, Gossypium hirsutum
cccacgcgtccgcggacgcgtgggtgcagctgatgatgtacaacaacatgtacagaatgaggttcgacacaagattcgagagtgaggatgatcctttgtttgttaggctcaaggctttgaacggggagaggagccggttggctcagagttttgaatacaattacggggattttattccaatcttaaggcccttcctcagaggatacttgaagatctgtaaggaggttaaggacaggaggttgcagctcttcaaggaccatttcgtcgaagagaggaagaaacttggaagcacaaaaagcatgaacaacgatggattgaaatgtgccatagatcatattttggatgctcaacaagaaggggaaatcaat

SEQ ID NO: 214611 - DNA, 358 bp, Gossypium hirsutum
cagtgggaagggagtgacaacaattatcggaggaggtgactctgttgcagctgtggaaggggctgggcttgctgacaagatgagccacatctctactggtggtggtgccagcttggagcttcttgagggcaaacaacttccaggggtccttgctcttaacgacgcttaaacttttaattttgcacctctttgctttttttgaacattgttcactgctgtaatggtggctagtatttttatccaagagtgaattttagtagagctgaggttgtagaggctgatagggtggacttgttataaataaattggtttctcctcatcatccatcagagatgcatttggattggatgtctttttt

SEQ ID NO: 214612 - DNA, 402 bp, Gossypium hirsutum
cccacgcgtccgcccacgcgtccgcccacgcgttcgcccacgcgtccgcccacgcgtccggggcaaacccttaattccagaaaataaaaaactcagatacttggtcgaggaagaaggcaaagcacagccaaaatgtcgtcgtttttgcaatcacttttggatccgaagaagagctggttagcttctttgcatatgaaagcccttaccacacgcctccgcaaatacggccttcgttacgacgatctgtacgatccttactatgacttggatatcaaggaggcgttgaatcggctgccccgtgagattgtcgatgctcgtaaccaacgccttaagcgtgcaatggatctctccatgaagcacgagtatctcccaaaagatcttcagaaaatgcaaacaccattt

SEQ ID NO: 214613 - DNA, 375 bp, Gossypium hirsutum
ccaatcgttgctgtggaaagtgaggcatctgcaacaaatgatgcatggtgcaattccacattagagggacttaaagaagcttcaccattgagcttgaaggtgtctttgagatcggtacgagaaggcagatttcaaacctttgaccagtgcttggttcgtgagtatcggatgtcccttcaagggatatcgaagcgaatctctaatgacttctgcgagggtgtcagagcacgagtggtgcacaaagactctgctccaaagtgggaacctccaagcttagaaaaagtgtcggacgatatggtggatcagtactttgcacccctcagtgaatctgagccaaatctggagctccccacaaaacagagagaagcatttaac

SEQ ID NO: 214614 - DNA, 367 bp, Gossypium hirsutum
ataacccatcactcctatattcatctttcagcataaacgatgtcttcggttggcgaagctgcgggctcttatgctgctttgattctctatgatgatggcatccccatcaccgctgagaagattgccgcgctagttaaagctgccaatgtctctgttgagtcttattggccaagcttgtttgctaagctttttgagaagtgcgacattgagaatctcataaccaatgttggtgctgctgctggtggtgctccggtcgctgcagctgcacctgttgcagctgctggtggaagcggtgctgctgctcctgctcctgcagaggaaaagaagaaggaggaaccagaggaagagagtgatgatgatatgggat

SEQ ID NO: 214615 - DNA, 280 bp, Gossypium hirsutum
gatgcaagatgtatccagacctgaacgctgccgagatgaccacaactgagactctgggggggggtgtagcaccccagaaagcacactttgagggagctgagatggaattcggggctgagaacggctgcaagtgtggagacaactgcacctgcaacccttgcaattgtaaatgattagagaccaaagccaaagctccctggaagcagaggcgcctttgtcttaaaaataatatgttttgttggttatgtgtttttagaataaagtagccatggcttgtcgt

SEQ ID NO: 214616 - DNA, 315 bp, Gossypium hirsutum
agcagtcacgggtgggactgtcacggtagtttgatgcggaacaagtagtttacaggggggggtaaaatttgccgaggttcttgaaataattggtgctaaagtcacctggaccaagaatagtgtaactgtcaccggacccccaagaaatccctcagggaggaaacacttgcgtgctattgatgtcaacatgaacaaaatgccagacgttgctatgactctcgctgttgttgccctttacgccgatggtccaactgccataaaagatgtggcaagttggagagtgaaagagaccgaaaggatgattgctatatgcac

SEQ ID NO: 214617 - DNA, 386 bp, Gossypium hirsutum
  unsure (1)..(386): unsure at all n locations
cggacgcgtggggtcttgcttgattcgaactacaatgcaaagctttctgatttcnggctggccggagatgggccaacaggtgataagagccatgtttctaccagggtcatggggacctatggatatgctgctcctgagtatttagccacaggtcatttgactgctaagagtgatgtctatagttttggagttgtgctgctggagatgttatctgggcgtagagcagttgacaagaatcgaccgtccggagaacacaacctggtggaatgggccaaaccatacctggccaacaaacgcaaaatattccgtgtcctagataaccgtcttgaaggccaatattcaatggaagcagccttcaaggccgcagcccttgctttacgatgctt

SEQ ID NO: 214618 - DNA, 402 bp, Gossypium hirsutum
gcaaaacctacgatggcggacgacgactataatgatatggacatgggatatgaggatgaggcaccagagcctgagattgaagaaggagctgaggaggatttggaaaacaataacaacgatgatgttcctctagaacctatcgaaactgaagacaatgtagaccaagatgctaaagacaaaactactcgtaaaacatcaaagtatatgaccaaatacgagcgtgctagaatcttgggtacccgagccttgcaaatcagtatgaatgcacctgttatggttgagttggaaggtgagaccgacccacttgagattgccatgaaggagcttcgagagcggaaaataccctttaccataagacgctacttgcctgatggaaagtatgaagaactgggagtcgatgag

SEQ ID NO: 214619 - DNA, 389 bp, Gossypium hirsutum
cccacgcgtccgcccacgcgtccgattctttcgttatttcgtagggtgaatgtttctgggggggaaaaagaagatagactgatgattacagggttgcacactgtagcagatatcttctgcattgggtgtggatcaattgtgggatggaaatatgaatttgcccatgagaagagccagaagtacaaagaaggaaaatccgtacttgaacggtttaaggtgtctggtcctgatggaagccattattgggttagccatgaaacacatgttggtggaagtgatgcagatgatgtttgattaaataatcaaaaatgctggtcaaattccaattgtacattctttagtccctggaatctctcattcaactcatctgaattcttaaaaaactgggc

SEQ ID NO: 214620 - DNA, 375 bp, Gossypium hirsutum
  unsure (1)..(375): unsure at all n locations
aggagacagacaaaattcttggagtccatattatggcaccaaatgcgggagagctcagggatgaagcagtccttgccattaattatgatgcatcaagtgaggacatcgctcgagtgtgccatgcacatcctacaatgagtgaggcattgaaggaagctgcaatggccacctatgacaagccaattcacatctagaaatatggatttttacatgttattcttcattttgatttatgtttgaaaattttcgagattgactcggcagcagtcagcacaaactgttcattttcttgtttgtccttactcgaaacagatggcgtgcttgaatagacatttgccattcatcngttacattttcccaaatgcatataataac

SEQ ID NO: 214621 - DNA, 396 bp, Gossypium hirsutum
cccacgcgtccgcccacgcgtccgcggacgcgtgggtccgaattcagggtatcgaaccagagtgagagatacccttctcttgggtagcaaacaatttattaaacccggactattttcttcacgtctgtgtttgtgtcaaagttgcacaataaaatcccacatgaaggggatggatatgtgtggatatgtttctcctgttgtgacaaggaggttagggtctcttctttttattcattttacactgtgaatatgttgattgcatcaatgtcttagcaaaaaatgaaaagaaaaagccactgtgatacttagaggtaacactgaactgagctaggataggcttggcatgggtttattccagcccagttgatcacttagttatttttttttattaatatg

SEQ ID NO: 214622 - DNA, 433 bp, Gossypium hirsutum
gaaaacccgggccgaccgacgcgtccgcccacgcgtccgcccacgcgtccgcaggtttcgtgtggctcaaacaaaagaagagcatcagccggaggttctaaaagatagggaagctggtttcctatgcaactgaagtcacggctgtcgttgagaaaggcaagatcaagaagctgactggggtgaagaccaaagagcttttggtttggatcacactgagtgatatccaagtggatgatcctcccactgggaagatcactttcaagactccttcagggctgtttaggactttccctgtatcagcttttgagattgaaggtgaacaagttaagggttctaagggtaaggatgaagagaaacaagtgaatggagctgtcgaaatgaacgaagtctagagtcctttttcaattcccaacagaagaaagccttaatgtac

SEQ ID NO: 214623 - DNA, 372 bp, Gossypium hirsutum
cggccggaggcgtccggagacctaaaataagctagaaggattgcctggtgttctctttgtgctcccagattcttatgtcgatcccgagtacaaggactatggtgctgaattgtttgttaatggggagattgttcaacgatcaccagaaagacaaaggagggtggaaccacaaccgcaaagggcccaagacagaccaaggtacaacgatcggactcgttatgttcgtcgcagagagaacatgaggtgaaaagtataattagaaagaaagaaaatgatttatagaactccttttaagtgtttcttgagatatgggagcattactattatgaagataagacatggaaaagaaaagcttatgttgatgttttttaa

SEQ ID NO: 214624 - DNA, 389 bp, Gossypium hirsutum
ttaacacctttggcaacagaatccacaggatgctgaaactcggcttgagcattgacgagggggcaggtgaaggtgaagctgatgctgatatgcccccattagaggatgctgatgctgaaggcagcaagatggaagaagttgactaagcaccactcttcttgttggaactttttactagtttttttttaattattattgaagttatccttaggtttaatattttgttttgtgcctttttgggaggttttgttagtgattttggagaaagttcttaatgataattgctgttctgtttctggtatatttatacattttatcggtgccttatctttggtgcttgcttagaatggttgctgttgccatatgttttcttaaatggttattataca

SEQ ID NO: 214625 - DNA, 361 bp, Gossypium hirsutum
gaggcgtccgcccacgcgtccgcccacgcgtccgcccacgcgttcgttttcctccgccgttcgtaaaagctgggaagcagactaaagtggtgcaaaaaatgggccccaagcgaggtggaaaggtggccgtcccagccaagaagaaacaagagaaggttgtcaatccattgttcgagaagcgtccaaagcagtttggtattggaggggctttacctccaaagaaggatttgcatcggtttgtgaagtggccaaaggttgtccgcattcaaaggaaaaagaggatccttaagcagagattgaaggtcccacctgcattgaaccagttcaccaagactcttgataagaaccttgcaacaagttt

SEQ ID NO: 214626 - DNA, 345 bp, Gossypium hirsutum
cttcctctaaccatgttcgtaccagaggccgagcttcctgtttgggttatttgttatgtggctgtttttatgtcattcctcaacattcttccatcccccaaatcgttccctttcattgtcccttatcttctatttgaaaacaccatgtctgtgaccaaattcaatgcaatggtatctggattattccagttgggtagctcctatgagtgggttgtgaccaaaaaggctggcaggtcatcagaatctgacttactggcttctgctgagatggaatcgaagataatgaaccaactgcaaattcagagaggagcttcggaaagtgaactcactgaattaaaccgattg

SEQ ID NO: 214627 - DNA, 340 bp, Gossypium hirsutum
  unsure (1)..(340): unsure at all n locations
cccacgcgtccgcccacgcgtccgcccacgcgttcgcccacgcgttcgnccacgcgttcggaagaaatgtgagagtaatgaattttatggtttggtagctgttctttttttttttttgtaaataaaaaatatttgtgtttgatatttctgttagagcatttggttatgagtgtgggttttccgatacttgcctctgaaatcagatgccatagcctgttcacaccgtatactttttctccgataaccattttaagcttgtatatgtttacgttttgcttcattggacatggtatatgaattttgagctagtatggtaaatgaaggtggtggttgatttcac

SEQ ID NO: 214628 - DNA, 386 bp, Gossypium hirsutum
atgaaaaccacaacagtttcggtgtttcttcttttcatcatcttctcaatcacaccgggggcctttttgtttggtgtagccaacgctacaaacgaacctgtgctcgacattgatggcaacgaggttcaaacaggcaccccatactacgttgtgtcgtcgatatggggtgctggtggtggggggctttccctaggcatgcctagcagaaaaaaatgcccggaagtagttgctcaaaggggatccggtgacgatggtattccggtgatattttctaattcggactccaacgatggcgttgttcgcctatccactgacataaacatagagttcattccccttagacccagactttgccaaacaacaacagtgtggaaggtcgatgatta

SEQ ID NO: 214629 - DNA, 371 bp, Gossypium hirsutum
gtccgttttagacccatttaaaggtcaaaaaacctttgcagccaaattttctctccttttctctgccgtcctcattctccgggaaaaccagaaaaaaaacccctaaaaccatgcaaacagcccaacccccaaaaccccatcctctctacgacataatcatcttaggagcctcaggttttactggcaaatatgtagtaaaagaggctctgaagtttctcaacaccccatcttctcctcttaaaactttagcacttgctggccgtagccgtgaaaagcttgttaaaactcttcaatgggcagcccatcctagttctcctcccaatgatgttagtgttatcactgccgatactaccgacccatctaagttttta

SEQ ID NO: 214630 - DNA, 405 bp, Gossypium hirsutum
ggattatgcacctaaccatgctgcatattatcctttcggagttgatgtattcttatccgggcgaaaaatagatcacatggctagatttatcgaactccctgttattagtcattccgagaaactaccatctatccttgtcgtaaatgttcagattcccttgtatcctgctgcactttttcagagtgaaactgatggagaagggatgagttttgttctttactttaagctttctgacagttactcaaaggagcttccgctccactctcaagaaaacttcaggaggttaattgatgatgaagctgaaaaggttaagggattccctgtggatacaattgtgccatttcgtgaacggttgaaaatattaggtcgtattgcaaatgtggaagatcttcacatgggtgcggc

SEQ ID NO: 214631 - DNA, 337 bp, Gossypium hirsutum
  unsure (1)..(337): unsure at all n locations
caaaggccaaatcgtattatctttttgatggttatgcccatctttcctctggtcttgctgggggacttgctgggctttcagctggaatggcaatcggaattgttggtgatgctggtgtcagagctaatgcacagcagccaaaactttttgttggaatgatccttatcctcatctttgctgaagctttggctctttacggcctcatcgtgggcatcatcttgtcttctcgggctggccaatctagagcagagtaaagcgctggtagagctgttttagtagtattcttttattacttatcgngtttattatgattggacatcaagtggtgggtttaatg

SEQ ID NO: 214632 - DNA, 297 bp, Gossypium hirsutum
aaggagattaccataggtacttggctgagttcaagactggcgatgacaggaaatctgcgggcgagaataccctcactgcctataaatctgctcaggacattgcagtagctgagctagccccaactcatcctatccgtttaggattggctctgaacttttctgtcttctactatgagatcttgaactctcctgatcgtgcttgcagtcttgcgaaacaggcttttgatgaagccattgcagagctggatactcttggagaggattcatacaaggatagcactttgataatgcaacttc

SEQ ID NO: 214633 - DNA, 440 bp, Gossypium hirsutum
  unsure (1)..(440): unsure at all n locations
accggnnccggaataacccgggggcgaccgcacgcgtaccgcccacgcgtnccgcttggctcgtaccccttcaaggtaatttcggtatctnttgaataanccaggtgtctcctccaagggcaagttgaagaactcctgtgtatcggtcttcattttctcaatcacttcatctgctatcccatggttgattaactgttgcacccaacagtaagaatgaactactgaatccatagacgtaaaaaaagtataattgtgtttcaattaggtacctggaagaaaccccagtctttgcaagcctggtggagttttttctgttcagcatcatggtctagtttgctcatgtcaattacaggaatctgctgggattcatctatggaaaccacatcgaattcgacctctggtctgatgtatctggatgggattctgttgaagttcttgga

SEQ ID NO: 214634 - DNA, 417 bp, Gossypium hirsutum
  unsure (1)..(417): unsure at all n locations
ggaaaaaccgggccgaccgcacgcgtccgcggacgcctgggttccatttgagaatttttagtccattcaaatactacactatnaacagcntcttttttatgagccacatttccattattttcatgacaaagctaatcaacagctcggtggtcaccgtattgctactgtactgatgtatttgtctgatgttgagagtggaggggaaactgtgtttccaaatgcagagggacgactttctcaggtgcaggatgaaaattggtcggcctgtgccaaaaatggatatgcagtgaaaccccgaaaaggtgatgcattactgttcttcagcctacatcctgatgcgacaactgatacagccagtttgcatggaagctgccctgtgattaagggtgaaaaatggtcagcaacaaagtggatcca

SEQ ID NO: 214635 - DNA, 372 bp, Gossypium hirsutum
cccacgcgtccgcccacgcgtccggaaatggcgagcggaggaaaagtgtcatttaaagtcgctgttacctctgatcctaagctccctttcaaagtgtttagcgtgcctgaagcagccccttttacagccgtcttgaaattcgcagccgaggaattcaaagtccctcctcaaaccagtgctatcatcaccaatgatggtgtgggaatcaatcctcagcaaagtgcaggaaatgtgttcctcaaacatggatcggaacttcgcctgattccccgtgacagggtgggagccttttgaaataacaaaaacttcatttgttatctctgagtgagaagactggttatgactttgtttggttatggatccctttgtttg

SEQ ID NO: 214636 - DNA, 427 bp, Gossypium hirsutum
  unsure (1)..(427): unsure at all n locations
gagcgaggcgtccgaaagcttaaagttgaaaagattcatggagaagctgacatgatacttgggaatattgttaacgagcacaaagaaagtagagcaaaaggcanaagtaaagatgaaaacaaggaaaatctggttgatgttcttttaaggattcaggaggatggtgaatttcccttgactgacaacaacgtcaaagccgtcatcttagacattttcagtgccggaagtgagacatcagcaggagctgtagagtgggcattgtcggaaatgattaaaaacccaagagttatgacaaaagcacaagcagaggtaaggcaagtattccaaggcaaaggaaatgtagatgaaacaggcattcatcaacttaaatatctcaagtgtgttataaaagaaaccttaagactgcaccctgttatacctttattga

SEQ ID NO: 214637 - DNA, 303 bp, Gossypium hirsutum
tggtcttccggtccttctattcttccttctgacccctgtgaacgtgctgtcgctcgggggggggctgcatatcttgacgacaagtggttcccagcggtgaaaagtataggagtcgctaaaggagacgaagcaaagaaagcagcaatagcgcaagtggaagaagggttggctttgatggaagaagcatacgacaagtgcagcaaagggaagggttactttggtggggatgaagttgggtaccttgatatagcttttgggagcttcttgggatggcttagagtgacggagaagttcaatgcgatg

SEQ ID NO: 214638 - DNA, 358 bp, Gossypium hirsutum
cggacgcgtgggtccgggactgttttcctcttatgtactggtttcttcttccggttatacggatgggaatttctacatgaggcattgctataccatcttactcgcacggatccaagacataatttttccatctatttctaccatatctatcttaactatgaacgcgagctttcggttcttgaaaagctcatctcctttttgcctcagtttatagtgcagctagtcctcattttatgcttcgcaaaggatcttgtattctgcttctttgtacagacaagggcatttgtagcattcaataaagtacggtacgcgaatttaacttccctaacttcattttattgacaattgtcgttttttt

SEQ ID NO: 214639 - DNA, 70 bp, Gossypium hirsutum
aaaaaatccaagcgggcgtacacatacatgcgacgtcataactcttctatagtgacacctaaattcaatt

SEQ ID NO: 214640 - DNA, 376 bp, Gossypium hirsutum
cccacgcgtccgcccacgcgtccgcccacgcgtccgtgaaggagcacctgatgtgaaaatgggggtgcagaaatacaaagatggctgctggtatccaccccttgttatcgacgaacaacctaatgttccaatgtggaatcctgtgctatttaaacttccatccgaggagttgttgttattctataaagtaggccaagaggttcaaaagtggagtggatgcatgaagcgatcatatgataaaggtgttacttggacaaagagagagcaactccctactggcatactaggaccttctaagaataagcctatcttgcttgaaaatggggttttgctctgcggatcgtccgtagagagttggaattcttgggggtcatgg

SEQ ID NO: 214641 - DNA, 412 bp, Gossypium hirsutum
cccacgcgtccgtcaataagtagcgtaggttataatctaagttcaagattcgaagatggggggaagaggaaagggaggcaagggactgggcaagggaggagcaaagcgccatcgtaaggttctccgtgataatatccagggtatcacaaagccggcaattcggcgtttggctcgtagaggaggcgtcaagcgtatcagcggtctaatctacgaggaaacccgtggggttttgaagatcttcttggagaacgtgattcgtgatgcagtaacctacaccgaacatgcgaggaggaagactgtgactgctatggatgtggtttatgcactgaagaggcagggcaagacattgtatgggtttggtggttagatgatttagggattagatctttctgcgatgttggcggatctggac

SEQ ID NO: 214642 - DNA, 134 bp, Gossypium hirsutum
cccacgcgtccgcccacgcgtccgggaatggatgttgctgcatctgaattttacgggacggataaaacttacgacctgaacttcaaagaaaagaacaattaccgtgaacaaaagatctcatgagatgcttttaa

SEQ ID NO: 214643 - DNA, 330 bp, Gossypium hirsutum
  unsure (1)..(330): unsure at all n locations
cgtccgcccacgcgtccgcccacgcgtccgcccacgcgtccgttcacgtgaaaaacgaatggtttcgtgacgccggtgccggagtgattgctcatgttgcanacactctgaaacaacaagaatcgtcttcctcgtttatttcctcgagcttgtaagtgcactattgctagtaatgctttgaaagtatattgtataaaataaaacgacaagatgggatgaagaaaaatgaaaatgtctcccatttccattgatttgcacattgttcatctataggcaccggtttaacttgatattttctgaatatatgcatcggatttcaatgttttgccg

SEQ ID NO: 214644 - DNA, 432 bp, Gossypium hirsutum
cgaatcccgggcgacgacgcgtcgtcttatttttggtaggaaagattggatcactggagctaggtgagagacgagacatgcgcagcctttgagaacatatatcctgtacttacagagttcaggaaaaaccagcaatgatatattttggtggcaaaacacaaccttcctcaactcgtttgtggatattaggttttcctctgccatgttcaggagttggatttcaagtatgaatatacaatgaatagagattggcaaagtaaaggaggggagtcggatacatcggatcggtacctggctttttggctgtggttgtcatatggggtttcctttcccttaaagtcagtatggtgcttaaatgcttggcatatgctgtaattagtaaattcagaaggaagaactaactggaaacaaaaaaaaaatggaaggaacaac

SEQ ID NO: 214645 - DNA, 359 bp, Gossypium hirsutum
cccacgcgtccgcccatttccttttgagttctagtcagactgttatctcttatgacatgtggcaactcagaaatcggtaaagaagaatgaggacaaagcagaaagaaaataagggagaactgaaactgaaaatagaattttaacacaaaagcaactatggcctacgctgcaatgaagccgaccaagcctggtttggaggagccccaagaacagatacacaagatcagaatcactctctcctccaagaatgtgaaaaaccttgagaaagtttgtgctgatctggttcgtggtgccaaagataagagactgagagttaagggacctgtgaggatgcctaccaaagttcttcacattacaac

SEQ ID NO: 214646 - DNA, 366 bp, Gossypium hirsutum
gttccttaccttcttttcgagaataccatgtcggtgaccaagttcaatgctatgatatctggtgttttccaactcggcagtgcatacgagtgggtcgttacgaaaaaatccggacgatcttcggagggtgatcttgtttcattggttgagaaaaagccaaaacaccatcgggttggatcagaacccaatcttgaggaaatgaaagctgatctccagcaagaacaggaacaaaaggctcgtaaaaagaagcataatagaatatacacgaaggagctctctctggcgttcctcctcctaacagcttcagctaggagcttactgtctgcacagggtatccatttctatttcttgcttgttcaaaggata

SEQ ID NO: 214647 - DNA, 413 bp, Gossypium hirsutum
cgcgtacgccaaagcggtgaatccacaaccggcgatcgtttgggcttcgtcgagctccatttatgcagtcaacactgaaaacccattctccgaacatgatagaactgaccgtccggcgagtctttacgccgcaacgaaaaaagccggtgaggaaatcgctcacacttataaccatatatacggcctttccctcaccggacttagatttttcaccgtttatggtccatggggaagacccgatatggcttacttctttttcactaaagatattcttcaagggaaacccattgatatctacagaacccaagatcaaaaagcggtggcgcgtgacttcacttacatcgacgacgttgtgaaaagttgtttaagagccttagacacggcggaaaaaagcaccggtagcggcggaaaaa

SEQ ID NO: 214648 - DNA, 375 bp, Gossypium hirsutum
gaaaggctccaaaattgttgaatcccaagcgaggataacatacctacaaccaataacaagagaggtcctttgagtgcggatttcttcggttcagcttgctatacttttcagcatgggcagtttcgtaagctatatttcgatctaactcgagttgatgctcgtttggacttatcttcactctcatcttttgccaaaagaattttccagagttctagtgcaaacaaatctctatcatcccccagactaaatttgatatttcaacaacaggttgcagggccaatagtgtttcgagtggattcaaagttgctgctcgattctaaagctgggaaactaggccctcatatcgaagatgtcatatacagcttgagctactcg

SEQ ID NO: 214649 - DNA, 424 bp, Gossypium hirsutum
  unsure (1)..(424): unsure at all n locations
cccacgcgtccgaacaaattgaaggttgttttactgccatttctgcacaggggccattggacaagaataaccgagccagtaggtggtaggctttcctataaacccccgatttttgacataaatgcaccagatttatacatcccatttatggcatttggtacctacgttgttcttgctggattatcgctcggccttcaaggaaagtttagtcccgaagtactcaactggttgtttgttaagggattatttggctggtttctgcaagtcatgctgctgaaagtaacattactctcattaggcagtggtgaggcacctttgctcgacattatggcatacgcagggtatactttcacgggactctgtttggctgttctaggaaggatcgtatggagatattcatactancttttgatgccatggacgt

SEQ ID NO: 214650 - DNA, 379 bp, Gossypium hirsutum
ccgggaaagaccgggccggccgacccactcgtacttccacccattccaaattaaatctggttgtaatcaagtaatgcttttacttgactttgctgatggattcaatgacttgttttccaataacaacaaacaattctggtatgttgctctttttattgtttcaactggtccaccttgggatgcatttggtgttggtcttttgaagtggaaaatgcaaagtgcagattaatcaatggtgcccttatccatcaactgctagacttcagtttctgcaaatgaaacttatgtcagcattgagtatgaagcttcaaccatgtttgatctgcaaaaccttgtgatatctatacctcttccagctcttcgggaggcaccaaatgtc

SEQ ID NO: 214651 - DNA, 392 bp, Gossypium hirsutum
  unsure (1)..(392): unsure at all n locations
cctgcattctacgaagcctttggacttacagtggtggaagccatgacatgtggccttccggcgtttgccacattgcatggtggtcctgcanagattattgaacatggtatatcagggttccatattgatccataccaccctgaccagaccgctgaactcctggcaactttctttgaacgttgcaaggaggatccaagccactggactaaaatatctgatggagggcttaagaggatttatgaaaggtatacatggaaaatttattctgaaaggctgatgacattggctggagtatatggtttctggaagtacgtctcaaaactcgagaggcgtgagacccgaagatatcttgaaatgttctacatcctcaagttccgtgaattggtaaaatc

SEQ ID NO: 214652 - DNA, 318 bp, Gossypium hirsutum
  unsure (1)..(318): unsure at all n locations
acgattggttgatagggttggccgcaagcagtctatggcaattatgttcggcttancatttatgcgcctttcaccactgctaatccagcagcctgctgtgttaactacttgcttattatttggagctcgtatgaatgccatgggaacctttacagttgcctccatatattcccctgagttatatccaacctcggtgcggacaacaggggcgggagttgcaagtgctataggaagaattggtggtatggtatgtcctcttgttgcagtgggattggtgaatgaatgtcatcaaacagcagctgtagcgctatttttggt

SEQ ID NO: 214653 - DNA, 418 bp, Gossypium hirsutum
gtacactatcattatacgttctttctttctttctttttttaaattcccgggccttattggctactgtaaacaaaaccctgtttgtaaaagaaatgaagctcgttttggtgacattcctgctggtttctcttgttctcagctcctttctctttgaggagtcgatggctggttcaggtttctgtgcgtacaaatgcaaggcaaggtgcgcaaaggcagattttaaagagaggtgcttcaagtactgtaacatttgctgtcagaaatgcaattgtgttccgtcagggaactacgagaacaagcacgaatgctattgcttcagggacatgaagaacttcaaaggcttgcctaagtgcccttaaatactggcttaaatacatgctattgcttaacttgttgtaaaggccaattttaacttttg

SEQ ID NO: 214654 - DNA, 317 bp, Gossypium hirsutum
  unsure (1)..(317): unsure at all n locations
gaaaacccggtccgacccacgcgtccgcggacgcgtgggtttcagttgaaatgggtttgaaggagcttgcatccttaaaggttgagggagccattgtgaatgcattggcccaacaganaanagcaagttctgttagaatttcattgtctgatatcaagtcaccacgtgatacaaagtttatggaggcatttgaattgagtccagaggagtctgaggatgttctcttcaaggaggcatggcttacatatatttggagaagagccaaatcccatggcatagaggaggatacagccaaagagcgacttaaattttggatc

SEQ ID NO: 214655 - DNA, 301 bp, Gossypium hirsutum
cccacgcttccgcggacgcgtgggtggcggtggtaccggtgccacgcttagcatgatcgtgggtaagtaccccaccataaaaggcattaacttcgatttgcctcatgtcattgaggatgctcctagctgtcctggtgtggagcatgttggtggagacatgtttgtaagtgtaccaaaaggagatgccattttcatgaagtggatatgtcatgattggagcgacgaacactgcgccaagtttttgaagaactgctatgaagctttgccagacaacgggaaagtgattgttgccgaatgcatt

SEQ ID NO: 214656 - DNA, 301 bp, Gossypium hirsutum
tgattataacgctaggcccgcctccaaaagatgaaaggaaaaaggatgaccgtttgaaatgcgagggcatacaaagctgtgacacatcaccacaacgtaattcatgaccaaccggctcttttccagaaaacaatttgtcatcgatgatttacattctaagaagcccaatttttcctacgcctatcttaacgataatctccatacgatctatgacgcgaaggaccccacttcgatctttgttttaaagttcacgactcattttggaggtggcaaaactactgaatcagggttgatttatgat

SEQ ID NO: 214657 - DNA, 389 bp, Gossypium hirsutum
cccacgcgtccgaaagccctctttgcagagttcccacaagtaatgcagcagggttttatgtgcgtacaaggtggcatttgtttatcaagcatgggaagagcagtctcttatgaaagagcagtggcttggaaagtggtaaatgatgaagagaatgctcactgtatctgcttcatgttcataaactggtcttttgtatgaaaattctaaatatataaaaatagggtctagatagcagcttagattagaaaaatctccccctttcaactgttttcttttagtctttttaaaccttttaagtgatatgatacttgtacaatgatgttgaaccaaatggtgtaataagggcctccattttgggttaccctcattttcttttggatttggttcat

SEQ ID NO: 214658 - DNA, 390 bp, Gossypium hirsutum
atttacttgaaattatgggagaatttacaccagagcaacagcgggccttctgccaatttgttgggggtgcgcctagacttccacctggtggtctggcaatgctgaatccaaagcttacaatcgttagaaagcattcgtcgtctgcaattgctgctacttccaatggaagtggaccctcagaatcagcagatgatgacttgcccagtgtcatgacttgtgctaattacttgaagcttcctccatattcttccaaggaaattatgtataagaaattgctatatgcaatctacgaagggcaaggatcttttgatttatcatgagtgagtgttcgcaaccaaaacatacaattgtggagtatagttctgaacaacacaatgtggggtcaactta

SEQ ID NO: 214659 - DNA, 344 bp, Gossypium hirsutum
cccacgcgtccggtcagcagctgttctaccaaggaccgaagggaaaaactctctagatacgaggaataagaagacgaagaggaactttggaaggaaaatcaagtatgcatgcaggaaggctcttgctgactgtcaaccgaggatccgtggaaggtttgcgaagactgaagaatccaacaactcaaagaggcaatagctgttgattaatcaagcaagtaccaagtaaaacaggaatgaagtagctagattgaatgatgcaatgctaagaaaagaaagttttcgagtagtggtgtcaacttcgacatatataagcctttgtggagatcatcttatgacattaaaat

SEQ ID NO: 214660 - DNA, 316 bp, Gossypium hirsutum
ggggaagccaaaatcgtgatgcatcattcgaggaatgcgtgagctcggattgtttaagttcaatggaatgcatgcaagaagctgcagacgagcctaattttctggatttcactggaatggatttggatcctgtttacggaatgaggagagcatttagtgaaggcgatatacagacacttggcaacggtgatgtgagcgttatccattcttccgtcaagtggccattaattgtcagaagctgttcttctgaagatcgaagggaaaagctttctagatacaggaacaagaagactaagagggattttggtcggaaaat

SEQ ID NO: 214661 - DNA, 405 bp, Gossypium hirsutum
cttggcaattaaattgatgtaccagggtggtcagactgaagtagtagccatggatgtagctcaggttgggtctgcaaactggaacttcatgagcaggaaccatggggcggtatgggacacaagcagagtcccaaatggagccctgcaattcagatttttggtgacatctgggtttgatgggaagtggatttgggcaaaaagtgtgcttccagctgagtggaaaactggagttatttatgattctggagttcaaatcactgacattgcaaaagaaggttgctctccttgtgatgacagccactggagatgagatcttagttgccaattacacatatagtgaatttgaatgttttagaagattaaagaaaatgaatatatagatagattttccttgtctctgtaatt

SEQ ID NO: 214662 - DNA, 400 bp, Gossypium hirsutum
cccacgcgtccgctgaagtttaggaatgttacaattgatatcaaagtggacaccagctccaataacatcatactgcttgggacctgtcctatttggcggaaatgcttttcaattgaaggatctctttggttgattatttaccaccataacagttgatgaacctgcacccgtgctaaatgcaatctttggcttcagagtccctgatcagaggtctgacaagattgaactccagtatttgcatgagtatgttgggataagctcaagcattggattgactgtcaacccgatagttaacttctcggctgtgcttggaacaaatgttattgcacaaggtactaaacttgagattatatcatttggaatgttcagccgtagataggtatatagagtccatcgataa

SEQ ID NO: 214663 - DNA, 395 bp, Gossypium hirsutum
ggaacaacttcaaggttcgagtgcgatggtattaccgtcctgaggaatcacttggaggaaggaggcaattccatggagcaaaggagctgtttttgtctgaccactatgatgtgcagagtgctcaaaccgttgaagggaagtgcattgttcattctttcaagaactacactaagcttgagaatgttggggctgaggactactattgtagatttgaatataaagctgctaccggagcctttacacctgatcgagttgctgtgtactgcaaatgtgagatgccctacaatcctgatgatcttatggttcaatgtgagggttgcaaggattggtatcatcctgcttgtgtaggcatgacaattgaagaagcagaaatgttggaacactttgtctgtttt

SEQ ID NO: 214664 - DNA, 394 bp, Gossypium hirsutum
cggacgcgtgggtgtgtctcagatattggtttagcagcagtgatgagcccgatgcctgtgcctgtaatgcgtgctgcaggttaccgtgccccggaggtaactgatacaaggaaagcaactcaagcatctgatgtatacagtttcggggtctttttactcgagctattaaccgggaaatctccaatacatgccaccagtggggaggagatcgttcatttggtgagatgggtgcattcggtagttcgagaagagtggaccgctgaagtgtttgatgtagaactcctacggtatccgaatatagaggaggaaatggtggagatgctacaaattgcaatgagttgtgtggcgagggtagtggagcagagaccgaaaatggccggactagtgaaaatgg

SEQ ID NO: 214665 - DNA, 93 bp, Gossypium hirsutum
ggacatgcctggggctgactaccagctcaccaagcttttaggcctccgcccctccgaaaagcgcctcatgatgtaccaacaaggttgcctcac

SEQ ID NO: 214666 - DNA, 404 bp, Gossypium hirsutum
gggaggcaatatttcggggccgtatccgccggcccaagtgaagccatggagttcatgcacataacacatgaattattttggctcttaggtgtgatctatttgggggattatttgcccatttggaggtgggtggatccttatggatgtgagaaaaggatgagggaagtagagaaaagagtggatgatttccataaaaggatcattgaagaacataggagggcaagggaattgaaaaacaaagaatatggaaaggatgatgattatggtgaagaaatggattttgttgatgttttattgtcattacctggtgaagatggaaagcctcatatggatgatactgatattaaagctctaattcaggatatgatagctgcggcaacagatacatcggctgtgaccaacga

SEQ ID NO: 214667 - DNA, 400 bp, Gossypium hirsutum
attttgtttgacaagaagactggtactcatttgcttcagtggccagtggaagaaatagaaagtttgaggttgaagagttacgaatttaaccaggtgaaagtccaggccggatctgttgttcctctagatgttggtccagccacacagttggatatcatagcggagtttgagatagataacgaggcgttagagaaaacaacagggtccaatgtaacattcagctgcagcagcagcggtggaactgtagaacgtggggcattgggaccatttggtctgttggtgcttgcggatgacagcctcagtgaacagacacctgtatacttctacatcgccaaaagatccgatggcaaactcaagactttcttctgcaatgatcaatctcgatcatctgtagcatctg

SEQ ID NO: 214668 - DNA, 401 bp, Gossypium hirsutum
cccacgcgtccgaacgtctataggttagcttgagttttgatgtgctatcggggtaagacatagtcttcaagtcaccttggatgtagtacctgtgttaaaacaagataaccatgattgtccttttatccatgggtgcaggaatcaagtgcagccaaaatggcagaaagcaagctgcaggaaaatttgagaaagttgcagggaatcagcttgaagactacagagatgcaagataatgcaaaatcattctcttccatggcaagagaactgctgcgcactaaagaaaaagaagataaatgatatctcctatatagcctataatattgttttggattaaaaaggtttgattttttacatatatgtccatgtttgtatagcagtgaaaatcaagagtacttgactga

SEQ ID NO: 214669 - DNA, 399 bp, Gossypium hirsutum
gttgaaaagactggaggtccgacagagagctatgatgatttcgcagcctcattgccggagagtgactgccgctatgcagtttatgacttcgattttgtgacttccgagaattgtcagaagagcaagatcttttttattgcgtggtctccttctgtttcgaggatccgttccaagatgctttatgcaacatcaaaggacaggttccgaagggaattggagggcatccattacgaaatccaggcaaccgacccgactgaaatggatcttgaggtgattagggagcgtgcacattaagtgtccgctcccagaattcacatgcttaggaaaacttcctagaggtacctttagggttgttttatggttcaattaaattgcagaattaagtcgagttacccgact

SEQ ID NO: 214670 - DNA, 296 bp, Gossypium hirsutum
catggacgagatcagcaatgctgcggtggtgcacttcaacgggaacatgaaaccatggcttgatatcgccatgaaccagttcaaacctctttggaccaaatacgtggactatgatctggagtttgtccaggcctgcaatttcggtgtttaaataaaacatcatcattgaaggttctgcactggtaaatgcttcaaaatctagtttttgttacagcaagagttttcaccataccatctgcattattatatcttcttgcacgttaaaattcaattgtctctaattctgcgttgaagaa

SEQ ID NO: 214671 - DNA, 321 bp, Gossypium hirsutum
agagccatgctgttctagctctccaggaagctgcagaggcataccttgtgggtctttttgaagacaccaacctttgcgcgatccatgccaagcgtgtcacaattatgcccaaggacatccagttggctcgtaggatcaggggagagcgtgcttaatttccagaagtgtggatcagtcgcttagaagaaactattgtttatttttaggcaaatgtattggttttttgttttttctaatcatcttttaagccatgatggtagtggtaggttcaatgtgatgtgatgatgaagtggggcgtctgatatgttaatggacaataac

SEQ ID NO: 214672 - DNA, 404 bp, Gossypium hirsutum
  unsure (1)..(404): unsure at all n locations
ctcagatgagaagcgccacgagacagcctataccaaaatcgttgaaaagctgtttgagattgatcctgatgaaacagtcctggcatttgctgacatgatgaagaagaaaatcgccatgccggctgagttcatctatgatggcagagattataacttatttgaccactactcagctgttgcccaaagaatcggggtttacactgctaaggactatgttgatatagtagagcacctggtggatcgatggaaggtgaaggagctagctgggctttcagccgaggggcgtaaagctcaggactacttgtgttcacttccttcgagaattagaaggttagaggagagagcgcaaganaaggccaaggaagcacccagtgtcccattcagttggatatttgatagagaag

SEQ ID NO: 214673 - DNA, 346 bp, Gossypium hirsutum
ctcatatgagaagcgcctcgagacagcctttaccttaatcgttgaaaagctgtttgagattggtgcctgatgaaacagtcctggcatttgctgacatgatgaagaagaaaatcgccatgccggctgagttcatctatgatggcagagattataacttatttgaccactactcagctgttgcccaaagaatcggggtttacactgctaaggactatgttgatatagtagagcacctggtggatcgatggaaggtgaaggagctagctgggctttcagccgaggggcgtaaagctcatgactacttgtgttcacttccttcgagaattagaaggtttaaggaaagagc

SEQ ID NO: 214674 - DNA, 393 bp, Gossypium hirsutum
cccacgcgtccgcccacgcgtccgcccacgcgtccgaaaaactgtctgaagacaatgtgaaggacttatcaagtgatttgcagaaactcacagatgagtatatgaagaagattgatagcgtctacaagcagaaggagaaggagttgctgacggtctagtgtttgtttgtacaaagatgtaacgtgttgatcttccatttctatcgagatgaaaagaaaaataaactggttgtctttgctttactttggtgcatagtatttatatcttacttgcagaagagcatgttgaaagttaatatgttatgggtagatatcttgttttggatcgaagtgggaaaaaaaaaaacaaaatgcatcacctctgcttaaaattttttagtgtttatgagagctc

SEQ ID NO: 214675 - DNA, 389 bp, Gossypium hirsutum
tgcctgagacaaccacaaagaaggggaaggattatcctgttggtcctgtgcttcttgggttcttcatattcgtcgtcattggatcatctctcttccagattatcaggacagcgaccagcggaggtatggcataagtctgcacttctggtgttaaggaattgcgaggagactggtcttgcattgggcttttcttttctgttagttttgtagggaaactgatgatatatttactagagatatgcttacgttgtgaaatgttcggaatttgaataagacctcccctttctttgtctggtcattgtgctttgtctgctacttttttcatttatgcaatgagatggacaaaaaactgatatattagtggttgaaccgagttacccgagtaactt

SEQ ID NO: 214676 - DNA, 320 bp, Gossypium hirsutum
ttaccgtactcgccatagctatgctaccaaatccaatcaacaccgtgtcgttaagacccccggtgggaaattagtctatcagactactaagaagagagcgagtgggcctaagtgtcctgttactggaaagcgaattcagggtattcctcacttgagacctgctgaatacaagcggtctcgattgcctaggaaccgtaggacggtgaatcgtgcctatggtggtgttttgtctgggagtgctgttagagaaaggataattcgggccttcttagtcgaagagcaaaagattgtgaagaaggttctgaaaatccagaagacta

SEQ ID NO: 214677 - DNA, 280 bp, Gossypium hirsutum
agtccctcttcgggggttcttcttgtatagcgccctcatcgaactctgcacctgatccgttgctgtcttcgtttattttgcctatcgttgatgattctgttagtgtgcagcctcagttatctagcgaaaccaacacagctacgaaaagttcagatgtgaataagtcagagagaaatgtgcagtcatctcctctttcagtcaaggatcaggaagagaaggcaaaaagatgtgaatttgttaaaagggctgctgttatccacaattcttgatgatggtttat

SEQ ID NO: 214678 - DNA, 304 bp, Gossypium hirsutum
cccacgcgtccgcccacgcgtccgcccacgcgtccgtgacatgggaaataacacgaaggttcatacttctggttttttaacatctatcttaccaatttccacgctgtctagtttctcatgtcatgcatattattaggctgcgattataagatttggtctgagagagatgagagagttctgcaagctgttattttcatccgttaaggatgataccttctttgaaagctgtggagttgctgatgttatcacaacatgcttcggcggaagaaacagaaaagttgccgaggcatttgctaggaatgga

SEQ ID NO: 214679 - DNA, 394 bp, Gossypium hirsutum
cggacgcgtgggtttcaatgacaagaagatcatactctcttattgctctcacctttctcaccatttcctttccatgtttagaaaatgccaatggttgttgcaatgtatacaaaggtaagtgggtgtatgacagctcctatcctctctacgattcatcagcctgtccattcatccacaaggagtttaattgcctcaagtatggccgccctgatcatctttaccttaaatatcgatggcaaccaagcaagtgtaatttgccaaggtttgatgggacgcatttgttgaggagattaaagggcaagaagataatgtttattggggactccataagtataaaccaatggcaatctctgttatgcatgcttcacgctgcagtgcctgctacatctggtat

SEQ ID NO: 214680 - DNA, 353 bp, Gossypium hirsutum
ctgattcagatactaactatcttttcctttaaaaatggttactttcaggttgcatcggtaccaatttgatgggagggctcacccaacagagagcgatgagcattccatgatctataggatgaagctctgggccaccaatgaggatcgggcaaaatctaagctctggtacttctcgatgaaactgaaaagggtccataagagcattgttcaaggactttccctcaatgagatttctgataataaccctaccgagagcaataattacggaatcctactccgtttccaaagacgaactggctaccacatcatgtacatacagtaccgtgacactactttgaactgagctgcttaac

SEQ ID NO: 214681 - DNA, 195 bp, Gossypium hirsutum
gggcatttcggattggaactcgctcttttggatcgctcaccccggtggtccagccatattggatcaggttgaggcgaagctagcccttaaatccgaaaaactcctagccactaggcacgtgctttcagaatatgggaacatgtcaagtgcttgtttgctgttcatattggatgagatgaggatgaaattaattga

SEQ ID NO: 214682 - DNA, 402 bp, Gossypium hirsutum
cccacgcgtccgaaccccatattccgaggctaaacttcccatcaagagtgatgttcccgaaggatgtgtgataatacgagaacatgttccgattaccaacctcttttcttgtctttggttcaatgaagtcgatcgttttacttcccgagaccaaattagtttctcaaccgttagagacaagatcgcggcgaagacaggttggatggttaacatgttcttggattgtgaacgccgtaactttgtcgttcagcaatatcataaggaagttttagcgtatttggctcaaatggctcctccggttattaacccgccaccgccgccgacgtcgtcacggtctttcgtccgatgatccaccaaggattttcgcactcaaaacttcggatgaaaggaacaagaacatgg

SEQ ID NO: 214683 - DNA, 285 bp, Gossypium hirsutum
gattggacgttctggtcaattcggacgaaagggtgttgctattaatttcgtgaaaagcgacgacatcaagattcttagagacatacagcagtactacagtacccagattgacgaaatgccgatgaatgtcgcagatctgatatgagaaatgctttcataagtgcttggaccggaacttgaagggtacggttgaacattttccatggtgttggtgtaatcgaatcatctatcttgttgcatgtttgtgtgtgattgggtttggatgctacgcggaggtcgattaac

SEQ ID NO: 214684 - DNA, 380 bp, Gossypium hirsutum
  unsure (1)..(380): unsure at all n locations
ctcatctagttggaggaaatctctacccttttaagctgaaggcaaatgaatatgggggtactatagtcatctaaatggtaacccgggagacagtcccttttggttgcttagcttagtccacatgttattctcttaatgtcatatattcatccaaccttatattcccatggcatggtgactctcgaggaggagggaaccttttgactattattgagagatcataacanatggaagaacaaattgatttggtggggaaggcatttgcggatcattactaccatctctttgataatgatcggcctgcattgtcttctctctacaagccctcctccatgttgacctttgagggccataagatacaaggtgttgaagacatcact

SEQ ID NO: 214685 - DNA, 393 bp, Gossypium hirsutum
cggacgcgtgggttgttctggaagtagtgaataagatgctatccttgcaacgcagccttgcatcttatatgaccgaccaagacatcgaaaagggcatcttgtatccatctatcaatagtattcgagatatcacagctaaggttggggcatcagttgtgcgagctgctgttgcagaggaagtggcggaaggatatggaaaggttgatcctgaggaactggcctacatgtcaaaagaggagacggtggaatacgtacgtcgaaacatgtggtaccctaattatagcccgctcgttcaaaagaagtagtctttattcctttttgtcacaattttgatttggagttttcgggttatttctttgtggactccgaccccaagttctgcggcagaaaaat

SEQ ID NO: 214686 - DNA, 391 bp, Gossypium hirsutum
tctcgctctggcgggtataggcgatgcgcttgttcaaggtgggctcattggagcggctggggaattgcctgaacgctacatgcaggctatcgttgcgggatccggcggttctggggtccttgtttcaatgctaaggatcctaaccaaagctgtatttccacaagatggtgatggcctgagaaagagtgcctacctttacttttttactagcattgtgtttatggtcatatgcatagtcttgtacaatgtggcacacaaacttccgattatgcagtactatgaggagttaaaggctgaggctgttaaggaggaaaaagcagagaaaggtcccatgaccgggcctgtttggagagcaaccttgtggaatatagtaagaacagtcaagtggtat

SEQ ID NO: 214687 - DNA, 238 bp, Gossypium hirsutum
gatgacagggtctttgaaaggggtggagtaaaattgatagttgataacatatcctatgattttgtaaaaggagcaacagttgattacattgaggagttaattcgttcggcgttcctcgtaacaacaaacccaagtgcagttggagggtgcagttgtaaaagttcattcatggtcaaagagtagcctttgattttcagctttgccaaaccagttagtaaatcatttttctaccattttt

SEQ ID NO: 214688 - DNA, 308 bp, Gossypium hirsutum
ggggactttgaaaccgctttgaggttttgtaaagaaagaatggagaaaaattgggttccgaatttttcgactatgaaagctcttgtgaaaggacttgctagcatatttaaagatgaggaagcaaaggaacttataaagaatgttaaggagaagttctccataaatgcagatgcatgggatgaaattgaaaatggattgccccaatatagaatgtaagcagggtgtcctatctaagaatctgatattaaaattaatcaggtcatttatgcttggatatgatataagtagggggctttttacctcatgca

SEQ ID NO: 214689 - DNA, 360 bp, Gossypium hirsutum
  unsure (1)..(360): unsure at all n locations
ctcaaaattctgttttgctttgtctcttgctattctttcaatctgggccgttgatgctgcccaacaccatgctctggcgccctctccttcttcccccgtggactgctcctctctgattctcaacatggcggattgtttgtcctttgtgtcgagcgggagcaagacgtcgaagcctgaaggaacctgttgttctggcttgaaaactgtgttgaaagctggaccgcaatgcttgtgtgaggcttttaagagcagtgcttctctgggtgtcactttgaatgtcaccaaggccatgactttgcccgctgcttgcanagtctctgctccttctgccactcggtgtgcattgtctctcagtcctac

SEQ ID NO: 214690 - DNA, 369 bp, Gossypium hirsutum
cccacgcgtccgcccacgcgtccgcgactgttggcttgtcatcgatggccgagttctgaacgtaacaaagttcctggaagaacatccaggaggagaagaggtgttgttggaatcagcagggaaggatgcgacgaaagaattcaacgatatcggacatagcaagtcggctcagaatttgctcctcaagtatcagattggtgttctccagggtcacactttaaagaataatgaacaggttggttcaaccgaggagcccaaaaagaaagagatgagtgcattcgttatcaaggatgacctgacgcctaaatatgctgcagtcgtcgagttcgccgccccactcctggttgctggttcctatttcttgttaca

SEQ ID NO: 214691 - DNA, 384 bp, Gossypium hirsutum
  unsure (1)..(384): unsure at all n locations
caccatcaccatcttcaaggccgccctctttcctttaacagtcttaatctccctaacctcaatctccttctcacgggtaattgtctcttcttcaggatgcagcgcttttggatcggaaatgggatcaacaaaaacaaacaaatggtggagcatttgcagcgttacggagtgatttcgtcaatgaaagtagctgaagtaatggagactatcgatagggcattatttgtaccggatggggcttcggcttatgctgatagtccaatggcaataggttacaatgccaccatttcagcaccgcatatgcatgctacctgccttcaattattggagcaaaatttgcagccccgcatgcacgctntagatgttggctcangaactggatac

SEQ ID NO: 214692 - DNA, 319 bp, Gossypium hirsutum
agggtatgcggttggccaaattctgtctgcatcctgcaagggacactacatcatcgtgccgactattggatgcgattgtgagccattgtgtacctgtgatagtcagcgacaaaagcgagtttccctttgaggacgaaatcgactacactaaatcctcaattgtcttctctatgaaagaggcattagaaccgggttatttggtgaatcagctgcgccaatttccaaaggatagatgggttgaaatgtggaagcggcttaagcaggtttcccatcattatgaattccagtaccctcccgaagaggaggatgcagtctatat

SEQ ID NO: 214693 - DNA, 398 bp, Gossypium hirsutum
cccacgcgtccggacccacgcgtccgtgcttcttgagttgctgagcggaaagaaggcactcgatatgggtgatgagaaccaacctttagtggctgattgggcatggtcattggtgaagaacgagaaagctttagacgttatcgaagatggcatgccggagttggggtcgccggacgttatggagaaatacgtgttgatagcggttctttgttctcacccggaattacaatgcagaccatctatggatcaggttgtgaaaatgttggaaacagacatttcagttccttcgatccctgataggccaattcctatcgtagctcgtattgatgagattgagagatctataagaagtaatggctcaggtcagttcatcagttctggtggtcatcagatgtttg

SEQ ID NO: 214694 - DNA, 341 bp, Gossypium hirsutum
cccacgcgtccgcccacgcgtccgcggactcgtgggttcatcttcgagcaaccgagtgcttggattcacattcttgctaatctccccatctccccccttttaaataatccctgcatgtttgctttctgttttacttttaactttcagttttcttttttcttctattgttgcaagtgttttccatttttgtgttgaatactatttgtacaattaacttttccatctttttcagagagaaaaaaaaaactgaacatatgtatttttacgctgttcaaaaaataacattctggaagagccaagaaccaaaaggaaaccaaaattgaacaaaaaattataaacac

SEQ ID NO: 214695 - DNA, 389 bp, Gossypium hirsutum
ctggggctggaagttttcttaaggttttttttaagaactttgatgttcttgctgggccagttattagtcttctgtatcctctttatgcctcagttagggcaattgaatccgagtctcgtgccgatgaccgacaatggcttacatattgggttctctattccatgattacattgctggaactcacctttgccaaagtcattgaatggatcccaatctggtctcacgcgaagttgattttcacctgctggctggtcatcccgtacttcagtggtgctgcttatgtttacgagcattatttgagacctttctttatgaacccacaacagacaattaacatctggtatgtcccgaggaaggacttcttcagtaaatcagatgatattttaact

SEQ ID NO: 214696 - DNA, 398 bp, Gossypium hirsutum
ttcagacgttttgaaagccaaaggcaaaggtgcagatggatcctggctttggtgcactacggatgactctgtgtacgatgctgtgaaatcgatgactcaacacaatgttggtgctctggtggttgttaaacctggagagcagaaatcaattgcgggtatcatcacagagagagattatcttaggaagataatagtacatggaagatcatccaagtcaactaaagttggggacatcatgactgaagagaacaagctcatcacggtgacacctgagaccaaagttctgcaagcaatgcaattgatgacagaaaaccgaatcagacacattccagtgatcaatgagaaggaaatggtaggcatggtttccattggagatgttgttcgtgctgtggtgagcg

SEQ ID NO: 214697 - DNA, 402 bp, Gossypium hirsutum
cccacgcgtccgcccacgcgtccgccgaagagtaggcacaagggaaaacttaataccgagagcttactggagtcgagggatgttaactggacatctgtgagaccagtctacatatatggacctttgaattataaccctgttgaagaatggttcttccaccgattgaaagctggtcgccctattccaattccgaactctggagtgcaaataacccaacttggtcatgtcaaggacttggcaacggctttcattgaggttcttggtaatgaaaaggccagcaagcaggtgttcaacatttcgggagaaaagtacgtgaccttcgatggattagcaaaggcttgcgccaaggctggtggatttcccgaacctgagattgttcactacaacccaaaggagtttgac

SEQ ID NO: 214698 - DNA, 393 bp, Gossypium hirsutum
cccacgcgtccgcccacgcgtccgcggacgcgtgggttggcatacattctcttggctaataaaactaatacgaaacatgttgggcaaggtttgctggacccagaagtgcgtactttaacttttggctatataggactgaacggaaagaaacctataattgtagcaagatctggagaaaatcatgatggacaagcatcggataacagtctactacctggtcttaatgatgacatggcactgaacattctggctcggagcagcagatctgactacccaaatctttcctgtttaaacaagaaatttaggtcactgatcggcagcggttatttatataaactgagacgtcagcttggcataagagaagactgggtttatctagcctgtaatatgatg

SEQ ID NO: 214699 - DNA, 393 bp, Gossypium hirsutum
gccatttatggtgctataaagccaactgccatatacattcctctcgaagaaattttaaagccagctaactatgagcttgtaaccaaagaaattttcgggccatttcagattataaccgattataagaaggatcaattaccaatggtattggatgctttggaacgaatgcatgctcatctaaccgctgctgttgtctcaaatgatcccatcttcttgcaagatgtgatcggaaaaacggtgaatgggacaacctatgctggattgagagcaaggactactggagctccacaaaaccattggtttggaccggctggagatcctagaggagcagggatcggaacaccagaagccataaagcttgtttggtcatgtcacagggaaatcatatatgat

SEQ ID NO: 214700 - DNA, 345 bp, Gossypium hirsutum
caatcagagtgatcaaaaactgcaaagatttgggagtgaggttcccattcaaccaaccagggaagatgtactccagcttatggaacgcctatgactgggccacaaggggtggtctagaaaagaccgactgatccaaagccccattcattgcctcatacattagctttcacatctacggctgcgagtcgtcaccataagccaagttctgcgccacacaagacaagcggtggtgtgaccaaaaggcattccaggaccatgacgcctatcagtgactcagattgtgtattgtccacactaagctcaccatttacaactatagcaactatagggtgaggaaccccacga

SEQ ID NO: 214701 - DNA, 405 bp, Gossypium hirsutum
caaaaactcagtgaactcagtgaagttactttaaaaaaaaaatcatgcctatgtttgattatgttgaatttagtgtgtagtgtgaaggtgattgtggcttgaaaacagtattcataaaaggaacaaaaaaaaaaagatggggaggacaccatgttgtgacaagaaggggttaaagaaagggccatgggcacctgaagaagatgagatccttacaaattatatcaagaaacgtggccatggaagctggcgatcgcttcctaaacttgcaggtcttcttcggtgcggcaagagttgcaggcttcgatggacgaactatttaagaccagacataaaacggggtccctttacccttgaagaggagaagcttgtcattcagcttcatgccattcttggaaataggtgggc

SEQ ID NO: 214702 - DNA, 345 bp, Gossypium hirsutum
gaatcgtctaggctcgcaaggtacaacaagaagcctaccatcacttccagggaaatgcagaccgctgttaggcttgtacttcccggtgagcttgcgaaacacgccgtttctgaagggaccaaggccgttaccaagtttacatcttcttgaaaaatgtgatttgtggttagggttagggttttcattttaaaagtagatcgcgttgtttttctcttccgttgtgaatcattctgctcttctgttatatgattccgtgtgtatcttgaagatggatctgctcgatcctgatttgaacatgttagaattgaatgcaattaaatactaaaatttagcgtattttcttgg

SEQ ID NO: 214703 - DNA, 204 bp, Gossypium hirsutum
ggttgtaaaaccagggggaaaactttctttaattggcccgtgccccccacattgggggtgtcgtttctttgcagacgcctggatgctttttcctccggaggaagaatatatatagtggtttgaaaaggctggatttaatgatgtccaactcaaaaggattggccctccctggtatcgtggagttcgccgacctccactgatcat

SEQ ID NO: 214704 - DNA, 369 bp, Gossypium hirsutum
acggacactattattggacttctttgggacatgattactgcaggcatggacacaacagcaatgtcaggcgagtgggcaatggctgagcttattaggaatccaagagtgcagaaaaaggcacaagaggagctagatcgtgtgatacgattcgaaagggtgatgtctgaaactgatttctctaatctgccttaccttcaaagcgtagccaaggaagcactaagactgcaccccccaactcctctaatgttaccccatcgtgccaatgcaaatgtgaaaatcggtggctacgacatccccaagggatcaaacgtgcatgttaacgtatgggcagtagcccgagatccagctgtgtggaaggaccctgaagag

SEQ ID NO: 214705 - DNA, 431 bp, Gossypium hirsutum
gaaacagacattggaaaattggtgtacatccaagccatagttaaagagacattaagaatggatgcacctgcacccctttcagcgccccgtgagctcagtgaaagttgttccattggaggctatgacatccccaaaggcactcggttaattataaaccttcacaagatccaaagggatcctaaaaaatggccagaaccatcggaatttaagcccgagaggtttctcactacccacaaagatatcgatgttaagggtcagcattttgaattgatgccctttggtagtggtaggaggagctgtcctggtacatcgtttgcacttcatatgttgtacttgaccatgtctaatttcttgcacgccttcgatttctcaacgccatccaatggtttgattgacttgactgggaccgatggattgaccaacattaaatc

SEQ ID NO: 214706 - DNA, 345 bp, Gossypium hirsutum
gcctcaccgtttcaggccaggaactgtagctcttaggggaatcaggaagtaccagaacagcacggaactgttgatccgaaagcttccgatccagaggcttgtgagagaaatcgctcaagattttaagactgatttgaggttccaaagcagtgccgttgctgctcttcaagaggctgctgaagcttaccttgtcggactgttcgaggatactaatctatgtgctattcatgctaagagggttaccattatgcctaaagatatccaacttgctaggaggattagaggagagagagcttaggtctgttaatatctagttgattgattcctacaattagaaatctgcac

SEQ ID NO: 214707 - DNA, 335 bp, Gossypium hirsutum
aaaaaaccctaattctataaaaagatcgaattaaagtagaatcagaagcaagaatcgccgaggaaaacaagatgtcggggcagcaagaagaagataagaaacccggcgatcagtccgccgctcacatcaacctcaaagtcaaaggccaggacgggaatgaagttttcttcaggatcaaaagaagcacacaattgaagaagctcatgaatgcatattgcgaccgacaatctgtggatttcaactcgattgccttcttgttcgatggtcgccgcctgcgaggtgagcaaactccggacgagcttgagatggaggatggtgatgagatcgatgctatg

SEQ ID NO: 214708 - DNA, 406 bp, Gossypium hirsutum
aaagaaaagaaaaatggttctgctagagaaactttgggatgatgtagtggccggtcctcagccggaacgtggccttggccggctgaggaagatcaccaccaccccacccttgtccaccaaagatgaggcttcatcaatggcgatgccgacgagtccgacgacacctgggacaccatcgacgccggtgtcggctcgtagggacaacgtgtggaggagcgtgttcaatccaggtagcaaccttgcaaccaaaggtattggcgctgaagttttcgacaagcctcaacctaactctcctactgtttatgactggctttacagcggggagacccggagcaagcatcaccgttgattaggcggtggctgacggcggcggatggtagcaaaaccactagcagaaggttgcagc

SEQ ID NO: 214709 - DNA, 277 bp, Gossypium hirsutum
cccacgcgtcctccacgcgtccgtggacgcgtgggttcagattgatccaagtgtgggggtgtctgcattagtgggaactgcaatagcctctgcatgtttatcaggagctgctatgttagcaaagcgcagagagtaccttcaccttgggggcttgctttcatctggtgtgtccatgcttctgtggttgcattttgcttcctctatctttggtggtagcgctgccttctttatgtttgagatctacttcgggcttttggtgtttgtgggctacatggta

SEQ ID NO: 214710 - DNA, 310 bp, Gossypium hirsutum
  unsure (1)..(310): unsure at all n locations
cacgcgtgcggctaaggaacaactgcgaccgatgtgttatgcttgctgatgggaaagcgagggtgtccatcaacggcaagcctatctaccagtttgctggaacctcgacttttacccaatatactgccgaccatgtcggccatgttgccaagatcagtacatccggcccgcttgataaagcttgtcgcataagctgtgggatatgcacaggttttggcgccactgtaaatgtctccaaacccaaaacgggtcaaactgttgcagatattggactgtgtgccgatcggcttgccatcgctgaangtgcaag

SEQ ID NO: 214711 - DNA, 381 bp, Gossypium hirsutum
atgctcctttccttttagagcaaggatttgccgtaaccaatgcagtgctcgatgctttgagcaaagctggctacggtaacaagacagatcagaaagtcatgattcagtcaagtagtagctcggttctaatgaagttcaagagtcaaaccaactatgatctcgtttacaaggttgacgaagatattggtggtgctcaaagttcaacgattgatgacattaagagttttgctagcgctgtcgtcattagcaaggattctgtatttcctgaaaattctgcattcatcactagtgctacgaatgttgtaccgaggctaaaagctgctaatctctctgtatatgttcaaaccttcagtaatgagttcacatctcaagcatgggact

SEQ ID NO: 214712 - DNA, 424 bp, Gossypium hirsutum
cccacgcgtccgaccaaccatatccgaaaacctaaagattctctctcccaaaccaaacctgcaaatttcagcaagagagagagagagagagaacttacatagctcagatttcgatcatcaatttagggtttcttagttcgatccccgattacccaataccccaattttacagatcaggtctgagtgttctagttgttcggctgtttctatcctctaagtttcatgtctgatcttgacatccagattcctactgcctttgatccgtttgctgatgcaaatgctgaagacgctggtgctggtgccaaggaatacgttcacattcgtattcagcagcggaacggtaggaaaagcctgaccactgttcagggattgaagaaagaatttagctataacaaaattctcaaggacctcaagaaagaatttt

SEQ ID NO: 214713 - DNA, 417 bp, Gossypium hirsutum
gtcgtttttaccagcacgaaaggggagacacagacaacggtaccaggatcatctcagactggttgctggatgcattccatacagactgcagaaggatgtcgaggatagaaacagcagtgtgacgagcaggataaatgttcttatgatttccacaccaaaccgtgatgatcttgtgttccctaagggtggatgggaaaatgatgagacggttcatgaagcagcatgtcgggaggccctggaggaagccggagtgaaaggaatacttgatgaggatccactgggagtctgggagtttagaagcaagagtagacaaaactgctgcaacatggaaggtggttgtagaggttatatgtttgccttggaggtgactgaagaacttgactcttgggcagaacagacaagttacaagaggaaatg

SEQ ID NO: 214714 - DNA, 335 bp, Gossypium hirsutum
acacctacggccacgcgtccggatgtggcatacactgaagggaggatggctggtcatgcaacatgctatcgagagccagaacaatcagcgcctttacctttccacctcatcagaagtttgatgagaagcttgaagaaagaacactatgttagtgacactgcggatgttgtttactaccaaactgacccagaactcaaaaagaatgcttcataaaatagctcatccccacaacaatggctggaattcaagctcttggcttcagacttgctagcttaaccataatagacctgtgcaatcatctttcattgccatagcagaagacaattggagtttca

SEQ ID NO: 214715 - DNA, 436 bp, Gossypium hirsutum
  unsure (1)..(436): unsure at all n locations
gttgtttttaaattaaaaaattattcgtttagaatctggtttagaatctagtggtttcttttggggttctttgttacctgctcgggtggttatgntgcatgtccgatctgcagttcgtaaaaccgtttcaatgattttagattttctatgaactctatcctcatgcgtcgaatccgtattcttcactcgttctcggttgtcttcctttactggttctacgttttctcatgaattagcacctctttgttcatcaatcttcttattttgatctaacctgactattgaaaacttcaaatctctaattgtcattcaatttgttaattccaatttaaatactcttcccggataaaaaaaaaacttttctcctatggctgctgtgcaaaggccagcgagttcttctgattccgacgagaggaaaaggaagagaatgctgtcg

SEQ ID NO: 214716 - DNA, 406 bp, Gossypium hirsutum
gtgggttccacgttaaaccgacggctttgtctctttatttgggttacttaggatggagtgtggcttggcatccgactgtgctttggatgggagctagctgggctgggttgcttgtgagtttggcgatggttgggaccttggtcgggtgttcaagagattttggaaaggtgaatccgattgctggtaactcggttatgccttgtttggcttgggctgcgtttttggcgactgtaaatctaaaacttgtcttcctttgaagcatataccaccatcttttgttctgcaagaaatagtattgttttttttttccctcttatgaataagatcaagttgttggtttgttcattagacagcttagaaagaaacacatggccttttgattttcctgttgcttcttacattatca

SEQ ID NO: 214717 - DNA, 402 bp, Gossypium hirsutum
ggagactgtcccacattggtttgcacggacttggctgctagagggctggacttggatgtgaatcatgttatcatgtttgatttccctttaaactctatcgactaccttcatcgcactggaagaactgcacgaatgggtgccaaagggaaagtaacaagtttggtggctaaaaaggacttattgttggcagaaaggatagaggaggcaataagaaagaatgagagtttggaatctcttacagttgataatgtccgaagggatactgcaaggactcggattaccgagcagaaggggaagaatgttaaactgtttaaggcatcaaatcagaaaaacaagaccaaagctgtgtctgcatctgtgcgcacatcagggaaaaaacccacaattgcaaagtcggtaaaa

SEQ ID NO: 214718 - DNA, 329 bp, Gossypium hirsutum
cggacgcgtgggcggacgcgtggggccgattagaaaggaaagtttgatgaattaggtgaggacaagggcgtcaaaatattaattgatccaaaagctttgatgcatgtgattgggaccaaaatggattttgtagatgataaactgaggtctgagttcattgttatcatcccaaactccagatggcattgtggatgtggcgaatctttcatgacaacagatggttgcacagctaatcacggtggtaattgacgatttcatcacccatgtcataagataagactttaattaaccttgatgataccaggatgcttgctttcctaaattcacca

SEQ ID NO: 214719 - DNA, 377 bp, Gossypium hirsutum
ggcagagataacctctgggaaagagaagtatatccgtttacaagctgattttgataattatcggaaaagatcggagaaggagagacttacggcaaggtctgatgctaaaggagaagtgatggagagtctgttgcccatggttgacagttttgagagagccaagcaacaaattaaacccgaaacagagaaagaaaagaagatagatacgagttatcagggtatatacaagcaatttgtggagatcatgaggagcttgcaagtggctgttgtccctacagttggaaagccctttgatccctctctacacgaagcaatagcacgcgaagagtcgcaagagttcaaggaagggattatcatccaagaattttgtcgtggat

SEQ ID NO: 214720 - DNA, 380 bp, Gossypium hirsutum
cggacgcgtgggtggagatctgtatcgtggtatctaccttgggcaagatgttgctgtcgagaatggttagatctgagcatttgaatgatactcttgaagatgagtttgctcaagaggtggcaatcctacgggaggtccagcacagaaatgttgttcgttttattggtgcctgtacaaagtttccacagttgagcatagtaacagagtacatgcctgggggaagcttgtatgactatttgcataagaatcataatgttttgaagctctctcagttgctgaagtttgctattgatgtctgcaaaggaatggagtatttgcatcaaagccacataattcatcgggacctgaagacagcaaatttgttaatggatacagacaat

SEQ ID NO: 214721 - DNA, 427 bp, Gossypium hirsutum
gacccacgcgtccgggggaagtacagtgtgtgaagggaataactcaaactataggagtagggagaatgaagttagaggagctacaactccttcctctgatcatgatcagtccgatgatgatgacgacgatgtagaagaagaagatgatgatgatgatgatgaagatgaagaaggaggagaaggagaaggagaagtagaagaagcagatgctggtcagtctgaacagagcttagacccctctcatttgaaacgcctccgcaggaagctttctaatagggagtctgccaggcgatcaaggaaaagaaagcaagagcaactggcagaacttgaattccaggctgaacaattaaggggagaaaatgattccctatgcaagcagcttaccaatgctcatcaactaattcgtgatgttggcactaacaatcga

SEQ ID NO: 214722 - DNA, 401 bp, Gossypium hirsutum
gttcattctagtgtttgtagggacgttcgtaggtggtgtgtcaccctattttctaaagtggagcgcagggttttttggtgctgggaacacagttcgccggtggggtttttcttgggacagccatgatgcatttcttgagtgatgcgaatgaaacttttggagacttgacgactaaagaataccctttagcctttatgttggcatgtgctggatatttgttgactatgctagctgattgtgtgatttcttatgtgtacgggaaagggaagaattcatgtaacaatggtgatttggagcttcaaggggctgagcggagcaaaacgaatcctcatggtcaaggcgatccaccatcttcatctctcacatctgcaagttctttcggggatagcgttctgttgatc

SEQ ID NO: 214723 - DNA, 371 bp, Gossypium hirsutum
cggaaaagtattttgagaaggttcttcgcttagcaatcaatagacgaggaacgggggaaggagctcttactagagttgtttgcactagggctgaggttgatctaaagatcatagcagatgagtaccagcgaaggaacagtgtcccactgactcgtgccattgtcaaggacactcatggagactatgaaaaattgctgctggtacttgcaggacatgtggagaattgaatctgatatcttgagacaatttcctggtgaataaatgtttatgaccaaactataatggtctagtgtggttacgaggttttcctgtttttctatgcattaatgcgagttatatgctatccaagaattcgaagtctacttaacacc

SEQ ID NO: 214724 - DNA, 373 bp, Gossypium hirsutum
agagagagaaaaaaaagaaagaaaaaatggttctgctagacaaaatgtgggacgatgtaggagctgggcctcaacctgaacgtggtctcggcaggcttaggaagatcaccacccagcctttgtccatcaaagatgaaggagaaaagaaaaagtaccagaggtcgttgtcgctgccgaatagtccagtgtcaggtccgacacccgtgacaccgacgactccgacggcgcgtaaggagaacgtgtggaggagtgtgttccatccgggtagcaacctagccaccaaaagtataggttctgatgttttcgacaagccacaacccaactctcctaccgtctatgactggctttacagtggggagaccaggagcaagca

SEQ ID NO: 214725 - DNA, 420 bp, Gossypium hirsutum
cccacgcgtccgccacgcgtccgggatcctgaacatccctattctttggaagagcggaaagtaataactgaagatgctattgaagttgataacgagcgaagttatgttagggtcacatttactcctacggttgaacattgtagtatggctacggttattggtctttgcttgagagtcaaacttatgaggagtcttccttctcgctacaagatggatataagggttgcacctggaactcatgcaactgaagctgcagttaataaacaactgaatgataaagaacgtgttgcagctgcgctagaaaaccctaaccttttggatatggttgatgaatgtctggctccatcctatgcttgaattttttattattaccagacgtggtgaactagatttgtttttcttcatacaataaactttact

SEQ ID NO: 214726 - DNA, 363 bp, Gossypium hirsutum
cccacgcgtccgccaagccttcgcttcagttccatctttgttaagaagagccattggttggctagattaaccactcctgtggatcaattgaaacatacccttggagctcagtgaattggcagcacactgattccggtattcctcatcaatgacagcgactgtatttgttataggatcatacagtgtctccccagcttcgcgcctacggaggcaactgaaaactgttgcatgtatggctgccacacttttgtcaacatttgtgttgtttattttggggacaaaatgcttgtcagctcgtttacatagataatcttgtattgtcctgatattccttatatacttcacatacttattttttagcag

SEQ ID NO: 214727 - DNA, 356 bp, Gossypium hirsutum
cccacgcgtccggacccacgcgtccgcccacgcgtccgctggtactcgatcacaaaggccttttgcattgctttcgtgatgacattcttcagtgtgtttgatgtgcctgtcttttggccaatactccttttctattggataatgttattcatcctgactatgaggaaacagatactgcacatgatcaagtacaaatacgtccctttctcattcgggaaacagcgatacgacagcaagaaggcatctccaacagaaaacacaaaccttcccagggattaagttcctcaggtgcatctgggaaagtttagcctagataagaaaaccaaagttaccagacaaagaacactttgtattga

SEQ ID NO: 214728 - DNA, 438 bp, Gossypium hirsutum
gagaaattatgctggatggtgcctgacaccttgttaccaaggggatatgactctgagaaggatcttcaaaacctgctttctaattatggtagcaatccaagagatattgacacagagttgtctactgctgcaataagtccccagtcatttggtgtgccaaacatacctttcaagactggatgttcaaatgatgttgccataaacgatgcaggagttttaaatggtggattgtgggccaaccaaactcaacggatgcgaacatatacaaaggtacaaaagcgtggctctgtgggaagatcaatcgatgtgacccgctacaaagggtatgatgaactcaggcatgatctagcccgcatgtttggtatcgaaggacagatggaagatccacaaagttctgactggaaattagtatatgttgaccatgaaaatgacatatta

SEQ ID NO: 214729 - DNA, 433 bp, Gossypium hirsutum
cggacgcgtgggcggacgcgtgggcggacgcgtgggatctgtatcttaaatgtctggatggcatgggttccgttttctctttcaagtttaaattgacgataattaatactttttccttgcagcggttggaatttctaggggactccgttttagattatcttattactctgcatttatataataaatatcctgggatcacgccaaaattattaacggatcttaggtcagcatctgttaacaacaattgctatgcattatcagctgtaaaggctggatttcataagcacattctccaaagttcacagaagctttacaaggatataaaagaaaccgtcgaaagttttcaggaattatcattggaatacactttcggctgggaatctgaaaaatctttcccccaggtacttgctgacgtgatggagtcacttgctgg

SEQ ID NO: 214730 - DNA, 336 bp, Gossypium hirsutum
attaccatatctagaacatccttcctcgtatatgctttatctgaaatcagaacaaggtcgtccactattgggacagaaacttcctcatacttgcatgctaataacatggctgtcatgccaaccaattgaagcttctttcggatcacagtgcaacgctctaagaatctgtctatgagattgatagtaaggaacaatgtttcttccataagatcaaatttgtagtgaacctgctcaaaatgatattgttagtaatctctagacatactttgaacaacaattaagtacaaatttttcaaatcaatagtagtagcacatctttcttaaaaaaaaaaccga

SEQ ID NO: 214731 - DNA, 322 bp, Gossypium hirsutum
cggacgcgtgggtggacgataacggacgtgttaagcttgcggatttcggcgtttcggcggcgttctataagtggagttcggtttacagattaggttcttcgccattttcgcaatattggattgccccagaggtgattcattcacataaagattatagtttcaaagctgatatatggtctttcggtataactgctcttgactccaccaagaagttttcagaaacttttcaagacatggttgcttcttgtctccgtaaagatcctgcaaaccgaccctctgcagacgagcttttgaaacatcctttctttgagagttgcaatgg

SEQ ID NO: 214732 - DNA, 384 bp, Gossypium hirsutum
gaagtagagaaaaatgcattatcaaaagatgagaagaagaatgcagaagacggcctgctgaggattggactaggacatgcgaaacttaaggccagccgaactggatttaaaccttacaaaaggtgttctgtggaagccaaggaaaatagagtgatgaacactggcagtcaaggtgaagagagaggtcccaagagggtacgcttagaaggggaagcttcgacttgacttttacgctattgcatgcaattaacaaatgcgatgtttgtttgttgcatgcaatccctaattttttttccccatatctctttccttttcatatgttgatcttaaagacgagcattacgagaccctttcgtgtaggtggtgttgtactatctaatatct

SEQ ID NO: 214733 - DNA, 407 bp, Gossypium hirsutum
gtcatcagtctcgatctgatctgtttctgggtggaggatatgaagaatttgatggagacgaggatttcaaggcggagtttttatgtccgttttgcgctgaggatttcgatattgttgggctttgttgtcacatcgatgaggaacatcctgttgaagtaaaaaatggggtctgcccggtttgcgcgaagagggtcgggatggatatagttagccacattaccatgcagcatgggaattttcttaaggtgcagcgcaagcgaagattacgcaaaggtggatccaatttgacattttctatgttgagaaaagaaccgagagatggaaacttgcatgcccttctcgggggatcttcatgctttgtttctccctccaatgtcgaagctgatccattattgtcatcatttatg

SEQ ID NO: 214734 - DNA, 438 bp, Gossypium hirsutum
cccacgcgtccgcccacgcgtccgcccacgcgtccgagcctggaaagcggcatcaaatttgattgttataaaagggacttccggtggcctgcacctctcgcaccccaccttggtgacagaccaaagagaccaaactgcacaaacaatctttcgacagatgccaggtttcaattgcaaacggacagttgcgaaaaccatcctccaacgtctcctcacttctcaagcattttgggcaagtcgctgctccaaccaatcttttattgtacgaattataggaatttggaattagattattgaaaatacgccagaaaatgattttgaccttttctggcaaattaagctgccataatttgttgtaataaggtatataggaattgtccccttctattgtatttgcatactcgaggccttcttacctatacccactccgaacgatat

SEQ ID NO: 214735 - DNA, 430 bp, Gossypium hirsutum
aacaaatgtgggatgccaagaacattatgtgcgctgctgatccacgccatggaagggaccttacagcatcggctatgttcaggggcaaaatgagcaccaaggaagtcgatgagcagatgctcaatgtccagaacaagaattcatcctactttgtggaatggatcccaaacaatgtcaaatcaacagtgtgcgatatccctccgaatgggttgaaaatggcatcaacattcattggaaactcaacttcgatacaggagatgttcaggcgtgtgagtgaacagttcacagccatgtttaggagaaaggctttcttgcattggtacacgggcgaaggtatggacgagatggagttcacagaagcagaaagcaacatgaatgatctggtgtcggagtatcagcagtaccaggatgcaactgcagacgatgagga

SEQ ID NO: 214736 - DNA, 431 bp, Gossypium hirsutum
cccacgcgtccggtcaagctggaggcaaggtgaagggtatgggtgagaaacaaatggaagtggacaaacgtatcttacgtactcaaattggagttcttaaaaaagagcttgaatctgtcagaaaacatcgaaagcaatatagaaaccgccggttttctgttcccgttcctgtagtatctttggtaagcacttaacctgttttttttaaaaaataatacaaggacagttttattgtgttgcttttatgtctccgacatataatacatttgaaagcattataggttgggtacacaaatgcgggcaagagtacacttttaaatcaattgactggagctaatgttctttcagaggaccgactgtttgctacccttgatccaacaacaagaagggttcagatgaaaaatggaagtgaatttcttcttactgatact

SEQ ID NO: 214737 - DNA, 426 bp, Gossypium hirsutum
gcctgctattgcaacatcttcatgtgaagctgatgtgccctcaattccattaggggactgggcattccagaatcctctgtatggttgcatgcaagactcttcagagctgcagaacagagggcaagttgacccaccgaccccaactccaacatttgtcaaggtttataaatcagggtcagtgggacgctcgttagacatctccaggttcagcagttaccatgaactgcgagaggagctggctcagatgtttggaattgaggggaagttggaagaccctttaagatcaggctggcagcttgtatttgtcgacagggagaatgatattcttctccttggagacgacccatgggaggcatttgtgaataatgtttggtacataaagatactttcacctgaggatgtgcagaagatgggcgagcaacgggc

SEQ ID NO: 214738 - DNA, 411 bp, Gossypium hirsutum
gaggtgtccaacacagaagcaagcagctagcagtttcctttgaattatactactataactgcaccactttccaccagatttacattgcagatggcttcatcaatgctgtgggcttcaagggcggcttcttacctcaggatctctgtcttccacagaggcttttccactgttctaaaggatctgaaatatgcggattctcatgagtgggtgaaggttgagggtgactctgccactattggtattactgatcatgctcaagatcatttaggtgatgttgtgtatgttgaattacccgaagtgggagctgctgtaaagcaaggtgaaagttttggagcagttgaaagtgtcaaggctacaagtgatgttaattctcctgtttcaggaaaagtggttgaagttaatgatgagctc

SEQ ID NO: 214739 - DNA, 393 bp, Gossypium hirsutum
cccacgcgtccgacaacttccatttaagtatagctgctctcgatagatcattcaaccaagcaaagaaacgcgggctgaaagtgcgtggggttataatatcaaacccatcaaatccggctggcaatcttctaaaccgggaaacactttacagcctgctagactttgccagagagaagaacatccatatcatctccaatgaaatactggctggttctactcttggaaacgaagaattcgtgagcatggcagaaatcgtcgaccaggaagatactgacaggaaaagagtccatatagtatacggtttgtcaaaagatctctctcttccaggtttccgggttggtgttatctacacttttaatgaggatgttctggctgctgctagaaagttatcga

SEQ ID NO: 214740 - DNA, 416 bp, Gossypium hirsutum
cccacgcgtccggaaagagaaggaaagttttacgccataaatgtcccactcaaagatggggttggtgacaatagcttcactagattgtttaagataattatttccaaggttgttgaaatgtatcaaccaggtgcaatagttcttcaatgtggggcagattctcttgctggggatcgcttgggctgtttcaatctctcaattgatggacatgctgaatgtgttaaaattgtgaagaaattcaacctacctttactggttaccggaggtggaggatatactaaggaaaatgttgcacgttgctggactgttgaaaccggagttcttttagatacagaacttccgaatgaaatcccagaaaatgagtatatcaaatattttgcaccagattgcttgttgaatattccaaatgggcacat

SEQ ID NO: 214741 - DNA, 436 bp, Gossypium hirsutum
accacgcgtccgcccacgcgtccgcccacgcgtccggatctacaaatgggactgttgtattcgggtgcgggggtgggcattctggggaattaggatcatcaagtgaagcactagatgggatactaggatttggacaagcaaattcttctataatttcacaactggctgcatctgggaaagtaaaaaaatcgtttgcacactgtttggataatatagagggaggtggaatctttgcgattggtgaagtggtatctccgaaagtcaaaaggacacctatggttcaaaaccaggcacattacaatattgtaatgaaggatattgaggtcggtggtgatctactgcgacttccaagtgatatttttgatagtggagatcaaaagggaacaatagtggatagtggtacaaccttagcatatcttccatcatcaatttatga

SEQ ID NO: 214742 - DNA, 432 bp, Gossypium hirsutum
cccacgcgtccgtgcctttatcaatatgctgtctccttcacacattataccatttgggggggcatttaatggaaagaagtgggagaagtttaatagcgagaaagttgcttctttggcatatgctcgaatccagggaaaggcagctcttgttgcccacttccagaattcaagcttgatgaatgaagataagcgctgccgcccaattctctttcactctgaaggtccagatggtggcgatcagaccatcccagagcatttacactctagtttgaatatcatccgccagccaaacgggttaccctcgggtgattcttcaagtagccccaaaaagaaagatgctggcgaggagcttgaaaccttctagcagcttaatatcaagagattttgcccttgtaccaaattcatggggcagtgaaggctaacatatttcgt

SEQ ID NO: 214743 - DNA, 425 bp, Gossypium hirsutum
tggaagaaggattgttgatatcccaccaagtgccattgctttcaatccttccactggggctggcaccattattgattctggtaccgtcttcacccggctagttgagccagcctatgtagctgtccgggacgcattccggagacgagtaagggtggcgaacgtgacatctctgggtgggttcgacacatgttactcggtcccaatcaatgcaccgaccataacatttatgttttcgggcatgaacgtgacactgccacaagagaacctactgctccacagcacagcaggcagcatcacatgtcttgcgatggcatctgcaccagcgctgaatgtgatcgccaatatgcagcagcagaaccatagggtggttttcgatgtgccaaattcgaggatgggggtcgcccgtgagcgatgttcgtaaaaag

SEQ ID NO: 214744 - DNA, 423 bp, Gossypium hirsutum
cccacgcgtccgcggacgcgtgggtaaatttgtagagcagagacaatgagaggaacattgacgttgacttggattctgatggtctgcctctcccaagtagcggtgcagagccaatactactcggagagcttaccatatgatcccaggccggttaaggtcactaatctttacttctttttgcatgaaactctccgcggtaagaacccaacagtagtcatggtagcccaagctaacaacacaagcaacgacaactactcatcagtgccatttggcaccctatatgccattgatgatcccctcaagataggtcctggggacaactcagaggtgattgggaatgctctgggacttgggatcttgtccggcaaaaattcaacgaccgtggtgatgtacttagattttggattactgccggaaagttta

SEQ ID NO: 214745 - DNA, 414 bp, Gossypium hirsutum
tgagttcatagccactctcctcttcctctatgtcactgttgctactgtaattggtcacaagaaacaacaagatgcatgtgatggtgttggtctcttgggtattgcatgggctttcggtggcatgatctttatccttgtttactgcactgccggtatctcaggtggacacattaaccctgcggtgacttttgggttgtttttggcccgtaaagtgtctttcattagggctgtggcttacatggtgtcacagtgcttgggtgctatatgtggagttgggttggttaaagctttcatgaagcatccatacaactcccttggtggtggtgcaaacaccgtggcttctggctacaacaagggaactgccttgggagctgagattattggaactttcgtacttgtctacacttgtttctc

SEQ ID NO: 214746 - DNA, 419 bp, Gossypium hirsutum
cccacgcgtccgcggacgcgtgggttcgccttcaccagttccttacatatttggccgaggaggagaatgcagtgcaaatttggagaaagtagttgagagaaggcaaaggagaatgattaagaacagagagtcagctgcaagatcacgagctcgcaagcaggcctatacattggaactcgaagcagaggtggcaaagcttaaagaaatgaaccaagaattgttgaagaaacaggaagaaatgatggaaatgcagaaaaaccagatgctagagaaagcgaatcgaccatggggacgtaaaaaacaatgcgtgagaagaacaataacatgcccttggtagaaaatctcggctggcggtacgaacacgaggggattgcagcgtgcatcgatcatcgatcatctgtattgatgctgcaaaaggg

SEQ ID NO: 214747 - DNA, 423 bp, Gossypium hirsutum
gagaaaataatgaaaactgagaggtttaaacctgacaaggcgtttgctggtacttctgagaagagtggtccaagagacaggccagttgagtttgaaaaggaagttgaagaagctgatccattcggtcttgaccagttcttgacagaggtcaagaagggcaagaaagccatggacaaagtgggtagtggagggacaatgaaagcaagtgcaggttcgtccatgcgagatggctatgaaggaggatctaatagatctcgcattaatttcgaaagaggacattaatatacatggttctgtagcttgtttatttgctcatctttgttacccagtgaaatcttaaaccctgaaatagcagtctggggtgagattttctctctcttcggtacgtggaatgttgttttattttcccttgtagacttttaa

SEQ ID NO: 214748 - DNA, 431 bp, Gossypium hirsutum
acggagactttctcggcggagggatttgaagttgatccgttgatcgaacaagtagcggacggtcacgaaggagccgagccgcagctgctgacggcggagcatcacttctcgctgttcaagaagcggttcaagaaatcgtacggatcacaagaggagcacgattataggttcaagatttttcaggttaacctgagacgagcggcgcgtcatcagaagcttgacccttctgcgactcacggggtgactcagttctccgatttgactccaggcgagttcagaaaggcatatttgggattaaggagactgagattgcctaaagatgcaactgaggctccgattttgcctaccgataatttgcctcaagattttgactggagagaaaaaggagctgttacacccgtcaaaaatcagggttcatgccgatcatgctg

SEQ ID NO: 214749 - DNA, 424 bp, Gossypium hirsutum
caacgtgccaaatccatgaagttcaaagacggatacatgatttcttctggtcacccagtgaacgagtacattgactctgctgttcgacatgttcttctgagacagggagtactgggcatcaaggtgaagatcatgcttgactgggatccaaagggtaagcaaggcccaacaactccactcccggatcttgtcaccatccaccctcccaaggaggatgaagttatcaaggtggaagcacctgtgccgaccgagattgaacttccgccagtggcttaaagccaatgataactgttatgatagtcatctatttgatatttggagcatgttaagtgtcttagattttgtagtttttaagtttggcacctaaaatgaacttatgctggatgcttttttctgaattttccttttgtgtttctcaaatttt

SEQ ID NO: 214750 - DNA, 360 bp, Gossypium hirsutum
caataacatgtgcgaactgcttaggatcaactgcgaccgaggtgttatgcttgctgatgggaaaaccagattttccatcaacggcaagcctatctaccactttgttggaacctcgacctttagccaatatactgtcgtccatgttggccaggttgccaagatcagtccaaccgcccctcttgataaagtctgtcccattagctgtgggatatgtacaggttttggggccactgtgaatgttgctaaacccaaaaagggtcaaactgttgcagtttttggactgggtgccgttggtcttgccgccgctgaaggtgcaagggtttgtggggcttctcggatcatcgctgttgatgtgaaccc

SEQ ID NO: 214751 - DNA, 420 bp, Gossypium hirsutum
cccacgcgtccgcccacgcgtccgtgcttctcaagttgattactacgaaatcaatgaagcctttgctgttgtggctcttgcaaatcagaaactgcttgaccttaatccagagaaggttaatgtgaatggtggagctgtatccttgggacatcctttgggttgcagtggagctcgtatcttggtcacacttttgggggttttgaagcagaaaaatgggaaatacggagttggtggtgtttgcaatggtggtggaggtgcatctgcactcgttgtagagcttctgtaagcggttttaaagtaggttcgatattacgatgttgcgaccatttctttttcgggggataaattcatgctctgccaaaacacagtttgatgttgtgcaatttttattccgctctcaaataagttatgtaacgaatg

SEQ ID NO: 214752 - DNA, 414 bp, Gossypium hirsutum
cccacgcgtccgagcccgagttccatgaagcaagttagcgttgtttgggatgcctatgcggcaacaaaggatgctcatgggatttgcattctgacagagtgggatgagtttaaaaccctggattaccagaagatttatgataacatgcagaagcctgcattcgtcttcgatggccggaacatcgtggatgtagctaagctgagggaaatcgggtttattgtctactccattggaaagccattggatgaatggctaaaggacatgccagcggtggcataagactgtattctggaccatggttgagctacaactttataatctcgaggaaaacattatccgatagtatactttataacattcatttcttttagaattaagattatggtatttcaacttatattggattacttggga

SEQ ID NO: 214753 - DNA, 405 bp, Gossypium hirsutum
cccacgcgtccgcccacgcgtccgcccacgcgtccgcaccaattgatgccatctgtagtggcctggcttgtttctaaaaaattagggaacaggattgctgacaatcactgggaacttagagattttactgcaaagttagttgcttctatatgcaaaagatttggccatgtttataacactcttcagacgcgtcttacaaaaactttgctcaatgcacttctggacccaaaacgggcattgacccaacactatggtgcagttcaagggttggctgccttaggaccaaatgtggtttgtctccttattctaccaaatcttgagccataccttcgactccttgaaccagagttgttactagagaagcaaaagaatgagatgaagagatatgaagcttggcggatttat

SEQ ID NO: 214754 - DNA, 333 bp, Gossypium hirsutum
cggacgcgtggggtacccaattgacactgtgcgtagaagaatgatgatgacctctggtgaagcagtgaagtacaagagctcactcgatgcattctctcagatcttgaaaaatgagggagccaagtctttattcaagggtgctggagctaacatccttcgtgccattgctggcgctggtgtgcttgccggatatgacaagttgcagctcattgtgttcggaaagaagtacggatccggtggtgcttaatatctctttttcattttttacttgtttatgtttagatggtgatgaaaagctcgactacccaaaaatttatttcggccaaaaacttc

SEQ ID NO: 214755 - DNA, 394 bp, Gossypium hirsutum
gaggaactgctgcccttcagttcatcaaatagcccaacaatctctacaatctcgggtgcgcaaatactctgggttggcaaacaagaaaacggtaaccattcatagtgggggaacagaccagtctgtgctactagctaccaccaagactaagaagcagaacaaaccgtctaccttgcttcacaaatctgccatgaaaaaggagtttcccaggatggccaaggctgtcaaaaaccaggtgacagacaactactacaggccagacttaaccaaagcagcccttgcaaggctgagtgctgtgcataggagtcggaaagttgccaaatctggtgtcaagaagaggaacagacaagccttgaagatccatggcaagaagtaagctagacagttaagttgt

SEQ ID NO: 214756 - DNA, 351 bp, Gossypium hirsutum
cccacgcgtccgagaaaatttcgactatcctgtagccatggatatacgagaactcattaggttggatgatgtgatggaggagcttggcttgggtccaaatggtggccttatatactgcatggaacatcttgaagataatcttgatgattggctgaatgaagaattggacaattacttggatgacgactatctggtatttgattgtccaggccaaatagaacttttttcacatgtaccagtgctccgtaactttgtagagcacttgaagcgcaagaactttaatgtgtgtgctgtatacttgcttgattcccagtttatcacagatgttactaagtacgtaagtggatgcat

SEQ ID NO: 214757 - DNA, 283 bp, Gossypium hirsutum
tgtcagtccaacgaggaaagataaccattttcctggaccatcccatattgcaccagaagggggttcttcttcttctacgttatcattaactggttcttcaacttcaatcatcgagcaagggcaatgggcaaatttgccttcggaattacttttagatataatacaaagagtggaaacaaaggaaaaatgtttgccgcgaaagagagatatggttgcttgtgcttccgtttgtaagtcatggagggaaattactaaagagattgtttaaacaccggagcaatgt

SEQ ID NO: 214758 - DNA, 425 bp, Gossypium hirsutum
cccgagtccatcctcccccacgcctacaattccttctatcaagtttataccacgttaaccgaagattatttggtgcttgagcagcctgcttttttcaaggcacttatgacgttggaacttgtttaccaactccctctcgctttgcttaacatctatgggttgttatactctaagccctggttcaacaccacctgcctcctctttggtgcctctatcgttgcctctacgacagctatggtgggagacattctcaattcccagaaggcatcagccaatttgatggccatgtattatccaccgtttcttccattaggggttctggctatagtgcgaggggtggttggacaatcgagcaaggctgctccatccattggcaatggaccttcgtcggctgtgaaaaagagggcttaaagttgatccccgat

SEQ ID NO: 214759 - DNA, 432 bp, Gossypium hirsutum
gatgccttggagaacaagataaaccgaacccctttatccacctgtgaatggttcagagatttcagccccttaagggcacaccacaaccaccatgccctggcacaacaagcatactattacgtagcggtgaaattcaaggaactatattcatcgatatgcggccaaaaactgtttgtttggcaaactaaagggcgagaacgcagatcaatcgatgaagcattcaaatatatcagggaagtactgaaatgggacgaagagaaaaacgagaacatgtacgaaatccatggggacgattcgttttacagtacagaaatgagttcatctccttatataaggcaagaataattgcagatttgatttatttaaaagatttttaacttggcaaatttatcatagattttgcagcagattgaatatctgtatagtttattt

SEQ ID NO: 214760 - DNA, 434 bp, Gossypium hirsutum
  unsure (1)..(434): unsure at all n locations
cccacgcgtccgcccaattgaagttccagcgcagcaagcggtctgttgctgaggagcgtgctggccgaaagttgggaggtctcagagttgttaactcgtactggatcaatgaggactctacttacaagtactttgaggttatcctggtggatgttgcacacaatgctatccgcaatgacccaagaattaactggatctgcaatccggttcacaagcacagggaacttcgaggacttacatctgctggtaagaaaaacaggggtctccatggaaagggtcatttgcaccacaagaaccgtccttctcgcagggcaacctgnaagagaaacaacactcttttccttcgccgctaccgctgagttactgtgttccttagactttttatcctagttgattttagaagtcattgttttgagtttgaaatttttggaagt

SEQ ID NO: 214761 - DNA, 410 bp, Gossypium hirsutum
cttaaagaaactattgaatggggtggccgaaacatggacaagaaaaagagcaaacttgggggcattgtagacgatgatcatcaaactgataatagatttaaagatattcgcattgaaaggacagatgaatttggtcgaattgtgactcctaaggaagccttccggatgctttctcataaatttcatggcaaggggcctggcaaaatgaagcaagaaaagcggatgaagcaatatcaggaagagttgaagctgaagcaaatgaaaaattcagatacaccttcactttcagtggagaggatgagggaagctcaagctcagctgaaaacaccctaccttgtccttagtggtcacgtcaaaccagggcaaactagtgatcctgcaagtggctttgctactgttgagaaggattt

SEQ ID NO: 214762 - DNA, 425 bp, Gossypium hirsutum
gcaatattttctaaagcttatgttgaggctgccactaagatgaatatgactagagtagaaactgtggctccattcggactctgctttagttctaaagggccattggtgcctgaaattgatctagttttgcaaagtgagatggtgaagtggagaattcaaggtaggaattcaatggtgaaagtgagcgaagagagcatgtgcttgggttttttggatggagggttggagcaaagtagcccaattgtaataggagggcttcaaatggaggataaccttttggagtttgatattgggagttccatgttaggatttagctcttctttgttgttgaaggaaacaacttgttcttcatccttacaggattccaagctgaagcaatttatctgatttatctttatcctttttctacttttctcccttttctt

SEQ ID NO: 214763 - DNA, 356 bp, Gossypium hirsutum
gcagacccgaacgagtaaggcacagctgagctgcacaaaccaactcatcaacctgaatgtgtgcgcaccctttatggtgcctggtgccaccgagacccagcctaattccctgtgttgtggtgcactccaagctgtgcaacatgattgcctctgcagcactctcaggattgcttctcaacttccttctcaatgcaatcttccacctctctattgtgccacctgacatatatgcatgcatgcaagcaagctggtagaatatatatatatggctgcagttttatttttcttttggaatgtgtgtcatcatatgtgacaaagcaaatgcaatggagatcaaagttataattagtacttgg

SEQ ID NO: 214764 - DNA, 401 bp, Gossypium hirsutum
aaacgatgcgttgagatcaatagtgaatgcagagaagagaggcaaagcagcaaagctacggtggaattgaagccgatctccaccgtcatatcttcctttctcactatcatgaaatatcgaggatacatcaggaactttgagcttttcgatccgcatggagttgggaagatcacagttgaaccacaaggcagggtaaatgattgccaagcacgcacttaccggcaggacatcaaagtgaaggatatcgagaagtacacaacatttaaacttccaactcggcagtggggttatgttgtgatttcaactcctgatggtattttggatcacggagaagccattagaaggaatgtgggtgggcaggttcttggttattttcattagacttcattttttatgcacac

SEQ ID NO: 214765 - DNA, 502 bp, Gossypium hirsutum
  unsure (1)..(502): unsure at all n locations
cacgccgnntccgggggatgtaaagggaggagnngagatgtaagtggtgtaggtataggaagaaggggagaaaanttggggtatgagagaagagcagtagctgaaggctatgggtttgcctggtgaatggtgaaggtttgtaaaggaaagagaaagacttctctccacactctgtttgattttgaaagcttaaacctttatnnttccacctcttccaaactggatgacaaaggggacaaaaatattgtcnccttctcaaacctttgatcctgctaaagcctccaccttgccaagggctcaagttgtgggaatgggccaccggtccggtcatttccgaaaagaacatgttagccacccaaaagagcagcgccagcgaggacagtggtgagaaggccgcctttgtgaaagttagcatggacggcgcaccctatctccggaaagtggacctgaggatgtacaaaacttaccaacaactcttcgatgctctagctaaaatgttcag

SEQ ID NO: 214766 - DNA, 381 bp, Gossypium hirsutum
attgaggtggccaaagttattttcgccattgttatgctcttgttccagtctcggcataagaaagttggggaaaaatctcttctctcagtttctgcactagttcaggctgctcgaaataatgttcttcttgcagttccagctctactttatgctattaataattacctaaaattcatcatgcagctttatttcaatcctgcgacagtgaagatgcttagcaacctgaaggttttggtaatagctatcttgttaaagataattatgaaacggaagttttccattcttcagtgggaggctctcgctttgttgcttattggaattagtataaatcagttgcggtctttaccaaagggtgagcagtaaatcttggtaataataata

SEQ ID NO: 214767 - DNA, 421 bp, Gossypium hirsutum
agagcaagcacttggtggtatttacagtgttcttaaccagaagcgaggacatgtgtttgaggagatgcagaggcctggtactccactatacaacatcaaagcataccttcctgttatcgagtcatttggattctcaagcaccctgagggctgcaacttcaggacaggctttcccacaatgcgtgtttgaccactgggatatgatgtcatcagatccattggaacctggttcccaggcagccaaccatgttgctgagatccgtaagaggaagggattgaaggagcagatgaccccgctctccgattacgaggacaagctgtaagctaagcaacaaaataataattaattgaagaggttacgttacccattttatgcaatgctgctagttagttccttctatattttgtttactgttggactt

SEQ ID NO: 214768 - DNA, 380 bp, Gossypium hirsutum
  unsure (1)..(380): unsure at all n locations
cccacgcgtccgcccacgcgtccgcccgagttggaatcgggaaaccaccgagtcaagtatacatggtactcgacacgggcagtgacgtcaactgggtacaatgcgcaccctgcgccgattgttaccaacaatccgacccaatcttcgagccatctttgtcgtcttcctactctccgctaaagtgcgacacccaacaatgcaagtaccttgacgattccgaatgtcgaaatgaccgtacatgcgtctacgaggtgtcctacggtgacgggtcttacactgtgggtgactntgtcaccgaaaccatcaccctcggctcggattctgtcaacaatgtagccattggttgtggccataataacgaagggttatttgttggagcg

SEQ ID NO: 214769 - DNA, 420 bp, Gossypium hirsutum
cccacgcgtccgagaagatgatgaaccaagaattcaggcttggtgataatgctccggatgtgagctgggctgatcccaaaaatgccgattcttctgctgcttctcaggtgaaagcaatttatgtaaagaacttgccaaaggatgtcacacaagatcagttaaagaagctatttgaacatcatgggaagatcacgaaagtggttctacctcctgcaaaacctggacaagagagaaatagaattgcttttgttcattttgcagagagaacttgtgccatgaaagctctgaacgactcagaaaaatatgaactggatggtcaagttgtggaatgttctcttgcaaagccactaacagatcaaaagactcctgggggttcaagttctcagaattcacgttttcttcctaattatccacctcacg

SEQ ID NO: 214770 - DNA, 407 bp, Gossypium hirsutum
cccacgcgtccgcccacgcgtccgcccacgcgtccggtgcaattaatgacttaagtggaaagtggctcggcagtcggcagattcgttgtaattgggcaacaaagggtgctagtagcaatgatgacaagcagagctctgatgccaaaagtgtggtggaacttaccaatggctcatctgaggatggtaaagagacaaccaatactgaggctcctgagaataatcctcaatatactactgtttatgtgggcaatcttgcttcagaggtcacccaacttgaactccatcgtcatttccatgctcttggtgctggggtgatagaggaggttcgggtccagcgtgataaggcctttggctttgtgagatacagtactcatgctgaggcagctttggctattcagatggggaat

SEQ ID NO: 214771 - DNA, 405 bp, Gossypium hirsutum
gatgagaaatccctcatgtcaagggtgaattctctgtgttgtcttttgcaaaaggacaatacaacaggcacaagctcacaggcaaatggagaaaattacgatggaggtgatgatggaaaagatgttcagctaaacagaagtcatgggtttgagtttaatattacgggcaaggatgatgtgaaggcttttgaaggggaaacaaaggaagtgtctagtagcaggcaggcgccaggcatgtcaagaaaagactcgtttagtgagttgctgcttcatcttccccgaatcgcatcgctccccaagttcttgtttaacatttcagaagaagatggagagagacaagctagataagatagttttcttgtttatagactgtgtaaaacaaatgataagaaaaaatattaagcg

SEQ ID NO: 214772 - DNA, 350 bp, Gossypium hirsutum
  unsure (1)..(350): unsure at all n locations
atgattcaaaagaaaaaattcgagaagtctatgatgctttagatgcagtgaattctgaactggcagaagaacgggagaatgtagcatctttgttaaggagagttgagtccttggatcttatcgaaggacagcggctcctgctgcagaaagagctcaagaagtgcaaggaaaatgcttgagggaagccgctaagtctcaaatacagttcaaagagcaagctntgcagatggaaaatgaatccagagagaaacttanggaagtttgtgatgctttagaaacaacgaaatctgaattaaccgaagaacaagagagaacagcttcattgatgataagtgtcgagtttttagatc

SEQ ID NO: 214773 - DNA, 425 bp, Gossypium hirsutum
cggacgcgtgggcggacgcgtgggcttggctgattataacatccagaaggaatcgacccttcaccttgttttgaggcttcgtggaggcatgcagattttcgttaagacattgactgggaaaacaatcacattggaggtggaaagttcggatacaattgacaatgtgaaggcaaagattcaggacaaggaaggtatccccccagatcagcaaaggctcatctttgctggcaagcaattggaggatgggaggactttagctgattataacattcagaaagagtccacccttcaccttgttcttcgtctccgtggtgggcagtgagaagttaattcttcttctgtctttggtctagcttaagatggtcacaaataagcctttaggaaagtgcctattttcttatctcttaatgtaacatgttaatcta

SEQ ID NO: 214774 - DNA, 372 bp, Gossypium hirsutum
cccacgcgtccgcccacgcgtccgattttggatgagatgaggaagaaatcaagggaagatgggcttcagaccacaggagaaggattggagtggggagtgctctttgggtttggacctggcctcactgttgagactgttgtgctccatagtgttgctgcttaaagttaaacaaacatgccttttaagtaattggtcgtgctccacttggcttgcagttttatcttcttcttttttccttttttagaatcctatgaatttgtgtgtttattgttaaagactagaagcctttgatggtgtgggcgggaagcttaacgcctattcagttcatgtatcaacttatattaaatttatggcaataataagttactttgc

SEQ ID NO: 214775 - DNA, 419 bp, Gossypium hirsutum
ccagactcccccaaaaccctcaccacaaaagaaatctcttctatttttccccactctactgcaaaaatgtttcgatccgttgctagatcggccgccggtaagagcctcctccgacgaggatatgcaaccgccgtacctgaacggaaagtcgctgtcttgggcgcagctggagggatcggccaacccttggctctcctcatgaagcttaaccctcttgtttctcaactggctctctatgatatcgctaacactcccggtgttgccgctgatgtcagccacatcaactctagatctgaggttgccggatatgtaggtgaagagcagttggggaaagctttggagggatgtgatgttgtcatcattccagcccgggtgcctagaaagcccggtatgactcgtgatgatcttttcaacattaa

SEQ ID NO: 214776 - DNA, 304 bp, Gossypium hirsutum
attcatccaggatagctccaatgggcatgatatttattccatgttacaaaggatatagtcataagccagaggagtatgcgtcacctcaggatttagaaaatggggtgaaggtattagcgctaaccttggccaagttgtctttgcgttgatgtgttgttgtatattgtagtttttattaggctggttaatgccactctttgtcaatattttcaataataacaactttggcatttatgaaaactttgtatcatgtttgagaatccaatctcaaagataatggaactcctacaatttggctttcttc

SEQ ID NO: 214777 - DNA, 279 bp, Gossypium hirsutum
cccacgcgtccgcccacgcgtccgcggactcgtgggttacaattgaatttccaaggttgtgatatgtttctaaaaggaattttagttacatttttctttagctttaccaattgccttttctgccttgcccttacaggcattgcggttttgttgtcacggactgtcgtcataagaactttaagtttgggtttaaattgagcttcatgtgattatattttgctacatactattattttactactcaaactcgagtgaatagcgaaggaaaattactgctgt

SEQ ID NO: 214778 - DNA, 430 bp, Gossypium hirsutum
aaaaaaaaggggggggtttcatcaaaaaaatgggttctttgttctcaaaacaatttgaaaggcgtaaaaatatcaaggctgaaaagaaaaccctttgtgatctcaatgaaaactgcggtgaatcgtatcccggaagtgattaccggccagcggataggaagaattggatggccggacttggggttgataaagtttatataaacaagattgtatggccgggaactcatgattcggcgacgaacaagatcggtattccgtttattactcgtccttttgcacagtgtcaatcgctatcggtataccaacaactcgttaaaggtactcgggttttggatattcgggtcaacgagaaccgtcgtgtgtgtcatggggttttaacgacgtacggtatcgatgttgttatcggcgatatcaagaagttcttgtcgga

SEQ ID NO: 214779 - DNA, 368 bp, Gossypium hirsutum
caagaagctgctaccaaatttggaaaagacccaagatcctatgaggttttgactaagaggtttagaggagatgataatggaaatgtgaaaggacttgaggtggttcgtgtgcgttgggagaaggatgccagtgggaggttccaattcaaggaagttgagggctcagaggaaataatcgaggctgaccttgtcctgctagccatggggttccttggccctgagtcgacactggcggaaaaattatgtgtggagcaagacaatcgatcaaacttaaaggcagagtatggccgcttcacgaccaatgtggatggagtctttgcagctggagattgtcgacgcggtcagtcgttagtcgtgtgggcaatctc

SEQ ID NO: 214780 - DNA, 416 bp, Gossypium hirsutum
gctgtgaagacgttggatacaagaattccaattatttcgctcattggatcattgtctaaggcgaaattttgaaacacctagggcattcccggaagagatcgtccatcgtttccactactgattcacaccgggggcaaatgacattagtaattagctttttgtattgcatgttagctcgtgtaggcaagtaattcaaggaggttttccaaactgtaatcttaattttggagggtagatttaatagccatagttttttatagaaactacttagtcagtttttaaagcataaacactaggatcttccgacctttgtaatagtttataggcactacggacaaagtattctctcgagagttcaccattccaagccagaaaatcatcacgaggtgctttcgcaagaggaatatgcaaaatct

SEQ ID NO: 214781 - DNA, 427 bp, Gossypium hirsutum
cggacgcgtgggcggacgcgtgggcggactcgtgggcggacgcgtggggttttaggaaagggggctggtttcacatgggaagaggctaagatgcaggctgctgaaaaggcccttggaagtctaagatcaatgctcggtcaatttactcagaaacgtcaaggttctccaaggtcattgcaagatatgccaagtaaacgcctaaagcctgagtttccacgtgttctacaccggatgccctcttctggtagatatcacaagaatgctcctccggttccttgaagacacctcgatatggtagatttttcctcattttatagtgtagcaattcttgtgacatctgtacagtacgcaatatggactacaagtgcacaacgggtgaaggccatcaagacctgcaacccacgttgactgttaaaaacttcgagtg

SEQ ID NO: 214782 - DNA, 422 bp, Gossypium hirsutum
gagagcactagcattagcactagcactagtagcaaccatggcctccgccgcatgtttcttgcaccaccacgcactcacaaccaatggcagatcatcatcattatcgccgtcgctgcgccaggtttcaaacatgaagcctacccagcaggtggtgtgcaaggctcaaaagcaggaagatgatggaagccttgtgtcccgtaggttggctctcactgtactcattggtgctgccgctgttggctctaaggtttctcctgctgatgctgcctatggtgaagctgcaaatgtatttggaaagccaaaaacagacacagacttcatgccatacagtggggatggattcaagctctcgataccatcgaaatggaacccaagcaaagaggtggagttcccaggtcaagtgctgaggtacgaagacaact

SEQ ID NO: 214783 - DNA, 373 bp, Gossypium hirsutum
aatggaattggaaggacctggaaagggcaacttgaaaaacgtacgtgagcaggcacaaaaagggtctgaaaagatcggaaggttgcagttcgaggtgcagagcattgagtacgttatgctgaaactagaagatgaaaggaagaacaaagggaaaacccgaaccggtgtcctcttaagggactttatctacaatggtggaagacggggtggaagacgaaagaagggttgtttttgtgggtgtgcaagaccttcttccagtatagactgaggctaagcatatacagaaaaaaaaaggccctgttgttgcttgataagattcaaagcatgcctaattttcaaggaatttatatgcttaggaaacttgttttagagc

SEQ ID NO: 214784 - DNA, 424 bp, Gossypium hirsutum
cccacgcgtccgcccacgcgtccggaattaaattccctataaaatcgtttctcgtaaattgccttttcgttttaaatcaaacccgatttcctggtttctttttcttcatcgatcgtcgccggcggaaaaacaagaaaaatcaaaagcaaaaagcttgcagaattagaaaaaaaattatgggttctgaacagaatgaaggaacaagctttccaccatcggagccaaagctttgtgccaacggttgtgggtttttcgggacggcagcgaatatgaatttatgttcaaagtgttaccgggacctccgtgttggggaggagcaagcggcgaaggcgaaagctgttatggagaaatctctcagtatcaaaacgaagcatgaacctgtcgttgtgagacttttagcctcatgtggttcttcgtctacatc

SEQ ID NO: 214785 - DNA, 421 bp, Gossypium hirsutum
cctttgtggaggacatgaaggttttccaaagggagaggttaaacggccactatggtgtaactgcatttgttatagggaatacactgtcagctatgccattcctcataatgataaccttcatctctggaactatttgttactttatggttcgtcttcacccaggctttgaacattatatgttcttcgtgttgtgcctttatgcgagtgttactgtggttgagagtttgatgatggccattgccagtatcgtccccaatttcctcatggggatcatcacaggagcagggattcagggaatattcatgcttgtttctggctacttcaggctcccaaacgacatcccaaaacctgtgtggcgttacccaatgtcctacatcagcttccatttctgggctttacagggacaataccaaaatgatct

SEQ ID NO: 214786 - DNA, 432 bp, Gossypium hirsutum
accgagctgaaattatccgagatttggcatggaaggtagggctgcttcatgagcttccatgtgaaattaaggagaagttcagtgactcagaggaacagtatttcaaagatcattctaaatctttgaaaatgtacatgtcacagctgagtcttgatgtaaatgtggatatggtgcctccgaaagatccctacatcaaggtaagagtgcttgaagatttgggaagtggaataattcttagtgataaatctgccaattttgctagccactcaatgcactttctgaaacgaactgatgcagagcaatacattgcacggggcttaatggaggaattgataagctgagcctgaaacagttgtttatatgatgtttcatatcttcagcggccaatgcggttagcttaataccgaacctgtttattcactcttaagtgca

SEQ ID NO: 214787 - DNA, 301 bp, Gossypium hirsutum
  unsure (1)..(301): unsure at all n locations
acccacgcgttccaactgtatatcttcagctaaaaattttgattattatacttatctaggttcacgagacagggttgaatttgttcactgctcggaacaacananaaagtgccactgatgacgaacgctgccttattgaggcgaatggtcagtatcaccttcgcgaatttgtaaatacgttccctcattgactccttagcatgccgatcccaatactcttacctagccagattcaaacctttatttttttcaccttcaatggtccaattgacatgattgcttcacttccacatgatcagta

SEQ ID NO: 214788 - DNA, 444 bp, Gossypium hirsutum
gcctccagcaagtcaagcaccacatcgtagtccaaactcagcttccccaccaccgatctcatcatcttactaccctgcagctcctcacatgcttttagccctttcaggtggtttagctggtgcattagacaacaaccaccatcaaaataactctcatttacaaggcttaggaacccttaccccaaacaccacaaatctgggttcccactcaaagaaaagattcagaacaaagttcactcagtttcagaaagataagatgttggaattcgctgagaaagttgggtggaagattcagaaaagagatgaacaagctatccaagagttttgcagtgaagttggggttgatagaggggttttaaaagtttggatgcataacaataagaacacttttgggaagaaagatcaagccattaatgaaggagaaactgggattaacaacaatac

SEQ ID NO: 214789 - DNA, 413 bp, Gossypium hirsutum
cccacgcgtccgcaggattttattgttactttgaatgagatgaaggcagaagtttcttgtgtatgccgcttgtatgaatacaaaggatatctctgcaggcacgcaatggtagttctccaaataaacggccactcagccatcccttctcaatatattttgaaacgatggacaaaagaggcaaagagcaggcatttcatgagtgaagaatctgaacaggttcaatctagggtgcagaggtacaatgatttatttcaacgagggatgaagttgattgaggagggttcattgtctcaagagagctactatattgcattccgaagcctggaagaagcttttgggagctgtttgagtgcaaacacttctaataagagccttgcagaagctgtggcatctcccacccagggtatgatctg

SEQ ID NO: 214790 - DNA, 428 bp, Gossypium hirsutum
gcaggatctacattcatttccattgcggcagtcgatcgattgggtcgaagagttttactgatcagcggcggaatacaaatgattatatgtcaggttatagttgccataatcttgggggtgaaatttggggacaaccaagaactatcaaaagggtactcaatattggttgtgatagtgatatgtctgtttgttttggcatttggatggtcatggggtccattagggtggactgtaccaagtgagatattcccactggaaatcaggtctgcaggccagagcattacggttgctgtaaatctcctcttcacattcatcattgctcagtgttttctagccatgctttgccatttcaagttcgggatcttcttgttctttgcatcgtggatcacggtaatgaccatcttcgtttactttttcttaccggaaac

SEQ ID NO: 214791 - DNA, 423 bp, Gossypium hirsutum
aaaaatactatattggtgagattgatccaaaaactgtcccggcaaagcgcacttacattgcacccgagcaaacgccttacaatcccgataagacccctgagtttgtcatcaagatcctacaatttcttgttcccctcttgatcctgggcttggctattgcggtacgtcactataccaagaaagagtagcttattactatacaggactttacctgttacgagggaagaatcagtgtgtctcatctgttagttgaaatagcacagtcatatcttttgtttaatttccttttagcatttgtgtgtcgaactaaatacctgttgatgatatgctccattgtcaaaagacaatatatttgagcatctttgagcccccatttaagttagcagggaaaccagacaatgtttaatattgttggaatttaaa

SEQ ID NO: 214792 - DNA, 407 bp, Gossypium hirsutum
cggacgcgtgggtgcttttcatactcatttagcccctttcattagcatcaaaatggctcgagttttctttatcactgaaaaatgtcttgctgtggtggaaactgtggctgcggtactggctgcaagtgtggcagtggctgtggaggatgcaagatgtatccagacctgaacgctgccgagatgaccacaactgagactctggttcttggtgtagcaccccagaaagcacactttgagggagctgagatggaattcggggctgagaacggctgcaagtgtggagacaactgcacctgcaacccttgcaattgtaaatgattagagaccaaagccaaagctccctggaagcagaggcgcctttgtctttaagaaataatatgttttgttgtttatgtgtttttagaata

SEQ ID NO: 214793 - DNA, 433 bp, Gossypium hirsutum
cccacgcgtacgggctgacatggcacatattagcgggttggttgctgcaggtgttattcgatctggttttgaatacgctgatgttgtgacaaccacaacacacaagtcacttcgtggtccacgtggtgctatgattttcttcaggaagggactcaaagagattaacaaacaagggaaagaggtaatgtatgacttggaagacaaaattaatcaagctgtctttcctggtcttcaaggtggaccacataatcacaccatatctggtttagcagttgcattgaagcaggtcagaacacccgagtacaaggcttaccaagagcaagttcttagtaattgctcgaaattttctcagaggttgctggagaacggctatgaactagtatctggtgggaccgagaaccatttagtcttggtcaatttgcgaaacaagggt

SEQ ID NO: 214794 - DNA, 242 bp, Gossypium hirsutum
aaaccctaataactgggctctgttcttatcatattcaaaaatagcttcctctgatggattgattctacaaagcaccattcgtgcccacaccgacatggtgaactccttacaatctcccatctataactcctacatgatcgacacttcctcccgcgaacaaaacatctttctttggcacttaaccaaggacgaaaagacctacgaagtccctcgactatcacttacccgtcactctcactttg

SEQ ID NO: 214795 - DNA, 441 bp, Gossypium hirsutum
  unsure (1)..(441): unsure at all n locations
ccgggccggaccaagcgttcggccacgcgttcgatgacatcaaaaagcttgcctcagctgtatatttgcaagtgagcattgtgaagtgaggccctaatatttgtaactcgatctanaagttggtcctttgttgagcgtccgggtttactactattggcggcctttgtcatagctcagttgattgctactcttattgctgtgtatgccaattggagctttgctgcaattgaagggatcggatggggttgggctggtgtgatctggctttataatattatcttctatatcccacttgatttcatcaagttcttcattcgctatgctttgagtggccgggcgtgggatcttgttattgagcaaaggattgctttcacaaggcaaaaggatttctgaaaagagcaacgtgagcttcaatgggcgcatgcacagagaacattgcat

SEQ ID NO: 214796 - DNA, 218 bp, Gossypium hirsutum
gcgagtctcagttcaatcaagttttgaacaaagaacttgatcaagttattgaggcttgcgggttgcttgacgagaattggaaccctaagtttgtggttattgttgcacaaaaaaaccatcataccaagttttttcagcagggatctcctgacaatgtgctacctgttactggcattgacaacaaagtatgccattcgaagaacaatgatttttacctt

SEQ ID NO: 214797 - DNA, 417 bp, Gossypium hirsutum
agcaaggaagctttttaccaatattcggtttaaaaggtggtgtttcgatgttgaagtaggtttcctttgcaaatggtttggtattccaatgctggagatatctgtaaactggtccgaaattccaggatccaaggtaaatccattgagtataccaaacatgctttgggagcttgccctcatgtccgtaggatacagaactcgaatctggaaaattaactcctgatgtcaggattttctctgatcaattgagcaaagatgaaaaattacacacggtgcagtactgattcgataaccttaggtttttcttatacgttctttgggaaaacacttattacaatcagatgaaaccagtttatcggagcttgttctttctggaatccgcggctggaacatgcagtattttacagttgtaatatt

SEQ ID NO: 214798 - DNA, 331 bp, Gossypium hirsutum
  unsure (1)..(331): unsure at all n locations
cccacgcgtnncggtgtttatatttccttctctcttttttntcgttttgcttcagcttatgtctctcaactaanaaaaaaaatgactgctcaaacagacaaagaggtcgaagagatcctcgccgctcatctcgatcaacaaaaaaatccattctgagcaacccgaacaacctgtagttgaagatgacgacgacaacgatgacgacgacgatgatgacgatgacaaggatgaagatgatgccgaaggccttcatgacgtagacggaactggtaggtcaaagcaaagcagaagtgaaaagaagagtcgtaaagcaatgttgaagcttgggatg

SEQ ID NO: 214799 - DNA, 430 bp, Gossypium hirsutum
cccacgcgtccgattttgttcacctcaatctatttctaaaatctgaagctttgtacaaaacgggatcgaactccaagtggttgcttcctttctggcccatttctctgtgcaatggtggtctgcaaatgccgtaaggcgacaaaactatattgtttcgtgcacaaggttcccgtttgtggggaatgcatctgcttacctgagcaccaaatatgcgttatacatacttactcagagtgggtaatagatggagactatgactggccttccaaatgttgcaaatgccaagctgtgcttgaggagggggctggctctgaaaccacacgattgggttgcttacatgtcatacatacaacttgcttggtttcacatatcaaaagctttcctctgcacactgcacccgctggatatgtgtgtccttcatgttcgatat

SEQ ID NO: 214800 - DNA, 440 bp, Gossypium hirsutum
tggatttggggtcgccacgcgtccgccacgcgtccgaaagatccggacaaggaagagaagctcagaggtagacctggatatgagcacctgaatgatccgcttcacatcttaatcgaggccgatttgcctgctaatattgttgatacacggcttagacaggcacaggaaatcatagaggaattacttaaacctgtggatgagtcgcaagattttatcaagagacagcagttgcgggagctggcaatgctaaattcaaacttcagagaggatagtccgggtccaagcggcagtgtctcaccttttaattcaagtggaatgaaacgtcccaaaaccgggcgctgagaaataaaccaggaatcatctgaaattgtttctaccggcctggggtttcgtcatagccaagtatatcttctgatgcatattggttgggtgtaactttg

SEQ ID NO: 214801 - DNA, 351 bp, Gossypium hirsutum
gtcgatacctccaaggaaaagaagaaacccaaagaaggtgacaatgttgtggaggagcctgctgctgatataccttcactattggagttgaagcgtatctactatgaactgatgattaggtattactttcataacaatgactaccttgaaatttgccgttgctataaggcaatatacgagattccatccataagagaagatccatctcagtggattccggtcttaagaaaaatctgttggtacttgatcttggccccacatgatccaatgcagtcaagccttcttaattccacattggaggataagaatctttctgagatcccaaaatttaagttgctattgaaacagtta

SEQ ID NO: 214802 - DNA, 418 bp, Gossypium hirsutum
ggaatggttcagggaagagttaacggaagctaatcaaaccattgctcctggctcagcagatgcttacactatcaatggtcatcccggagaaacatatggatgcagcaacgatacaacttttgagatgcaagtagattaccagggcctttaccttgttcgcgtaataaatgcagttgccaatgaaacaatgctgtttgacatcgaaaaacacagattgacgattgtcggacaaaatgggacatataccaatcgttcctttacaagttctttaaccctagccccaggccaagttattgacgtcttgttgtgtccaaaccaaaatgttggccgttattacatcactgctcgatcttcctccggcagacatattaccaatggaattctgcgatataccaccactactactagtttttaatat

SEQ ID NO: 214803 - DNA, 371 bp, Gossypium hirsutum
cactaatttcccattgatcttgtccgcgagatagccagacaactattggaatgtggagcgttcatgcctgatatggacctgatacacacggacttgaagccagaaaacattcttctagtctctacagagaccgtcaaagttcctgataacaacggggcatagctatctccaaaggacagttactttagaagattgccaaaatcaagtgctattaatgtaatacattttggttgcactacgtatgatcgtccagatcagaattatgttgtgtcaacaaggcattatcttgctactgaggttattctcggactgggatggacatatgcttgcgatatatggatggctggatgcattatagttgaattatgcac

SEQ ID NO: 214804 - DNA, 411 bp, Gossypium hirsutum
ctcattgttgctaatgctggtgattctcgttgtgtaatatctagaaagggtcaggcttataatctgtctaaagatcacaaaccagagcttgagttggagaaagataggattctgaaagctggtggttttattcaagtgggacgtatcaatggaagcttaaacttggccagggctattggtgatgcggagttcaaacagaataaaactctgccagctgaaaagcagattgtaacagctaatccagacataaacgctgttgagctttgcgacgatgatgagtttcttgttttagcttgcgatgggatttgggattgtatgtcgagccaacaactagtggattacgttcgagagcaattaagctccgaaactaaactctcagctatctgtgagagagtatttgacagatgtttg

SEQ ID NO: 214805 - DNA, 410 bp, Gossypium hirsutum
cccacgcgtccgtgcaatagcaagtgctatagccgctgcattatacgggcttgacattcgggcagagaaagtccaggacgaggatgacaatgttaccaggtatttggtactcacaagagaacccataattcctggaactgacaggctttataagaccagcatagtttttactctagaagaaggtcctggcatgctatttaaggctttggctgtgttctccctaaggggtattaatttgtcaaagatagagtctcgaccacaaaaagggcgtcctctaagggtggtcgacgattctaacaaagggagtgccaagtacttcgactatcttttttacatcgactttgaagcttctatggcagaaaaacgtgctcaaaatgctttggaacatttacaggaatatgccagatttc

SEQ ID NO: 214806 - DNA, 408 bp, Gossypium hirsutum
agatgtcagtgatatcgtgcttttggatgtgtccccgttgtcacttggtctcgaaactcgtgggtggtgtcatgaccaaaatcatcccaagaaacaccacacttcccacctccaaatcggaggtcttttcaacagctgctgatggccagacaagtgttgagatcaatgtactccaaggtgaaagagaatttgttcgggacaacaaatctcttggcagcttccgactcgatggtattccaccagcaccacgtggtgttccccagattgaagttaaatttgacattgatgccaatggcatcctttctgtaactgctgtcgataaaggaaccgggaagaagcaggacatcactattactggtgccagtactttgccaaatgacgaggttgatagaatggtaaagggaagct

SEQ ID NO: 214807 - DNA, 381 bp, Gossypium hirsutum
  unsure (1)..(381): unsure at all n locations
gcaaaatggagtgctgtaggaggcctaatttgagtgatgcacatttatcagtggaagaagaggcggaattgtttgagcagaccagggattactttgaccacacagcacctaaacgtcacactaagcctcaacgaagcgactattcttctaactacgtcgacgctcttgccgccgctgattccggtatccctgaatacctcgagtttcaacgtctagagaatgatccccagaaaatagtttacaatggaagtgaagtgagagaagaanttatggagactgaatattataaggatctcaattgcgtcgacaaacaccaccacacgacaggaacaggtttcataaaggtagagaacgacaatggcagaaacttttaaattgaac

SEQ ID NO: 214808 - DNA, 391 bp, Gossypium hirsutum
cccacgcgtccgagcagaacccttcatttctctctgccaccagcggcacccaaagatgcagatcttcgtcaaaaccctaacggggaagaccataaccctagaggttgagtcttccgacaccatcgacaatgtcaaagccaagatccaagacaaggaaggcatcccacccgaccaacagcgcctcatctttgccggaaagcagctcgaggacggccgcaccttagccgactacaacatccagaaggaatccaccctccatctcgtgctccgtcttaggggaggtgctaagaagagaaagaagaagacctacaccaagcccaagaagatcaagcacaagaagaagaaggtcaagctcgctgtgctacagttctacaaggtggatgaatcgggt

SEQ ID NO: 214809 - DNA, 369 bp, Gossypium hirsutum
cccacgcgtacggagaatttcgtggtcctctcagacgacagcttataacaatttgttgggggagcttgtcaacgatgtttttctcgcacagagaaaacacagtgagcactttgggacgaatggtggtgatcatatggctatttgtagttctgactattaactcgagctacactgctagtttgacatcgatacttactgtgcatcatctaacatcatggattcaagggattgatagctcgatctcaagtactgaacctattggaatccaagatggttcgtttgcattgaactatttgggtgacgagctcaatatagcacaatctaggatagttaagttaaaaaatgcagaagcatatcttacagccctta

SEQ ID NO: 214810 - DNA, 410 bp, Gossypium hirsutum
tggaagagcttcttcaagtgataaaatcaacgaaaccagacaaatatacccccgaaatcgtggagaagaaagacgattacgtgcgtgttgaatatcaaagtcccatactagggtttgtggatgatgtggagttctggtttccacccggtaaggattcaatcgtggagtaccgatccgcatcaaggatcgggaactttgattttgatatcaatagaaaaagaattaaggcattgcgagtggagttggaaaagaaaggatgggcttccgtagaaacgttttaaaaggacaaaaacatcattttgtactgtactcctagattgttgtttcacaccactgttcacagattttgttataaatcatcaatgcaagatttgtgtcacttgcgtttccataattgaaagattattatc

SEQ ID NO: 214811 - DNA, 400 bp, Gossypium hirsutum
aaaatggcaccaaaagctgaaaaaaagccagccgagaagaagcctgcggaggagaagaaagccgtagctgagaaagccccggcagagaagaagcctaaggctgggaaaaagcttcccaaggaaggcggagcggctgccggagacaagaagaagaagagagttaagaagagcgtcgagacctacaagatctacatcttcaaggtcctgaagcaagttcaccctgacatcgggatctctagcaaagctatggggatcatgaacagtttcatcaatgatatcttcgagaagcttgctcaagaagcctctaggctcgcgaggtacaacaagaaacccaccatcacttccagggaaattcagaccgctgttaggcttgtacttcctggtgagcttgccaagcacg

SEQ ID NO: 214812 - DNA, 385 bp, Gossypium hirsutum
gggacagctaaagttcttgatcctgatttcaaagttgttgaaagtgcatacccttttgtgattgggaagctcttggctgatccaaatcctgatatgagaaaaattttaagggaacttctcatctgtaataatggatccattaggtggaaccgcctagagcgcttgatagcagcaatatcagaacaggcatctgaatcgtctgaggagcctcctaagtctgaagaaaaaggttcgcatcccatgggatggaagtcattcgatatgcatgctgttgttgctgccaccgaagatctcctgctttttattctatctgagaagggtcaaatggtgcgggttttcctcctgcgtgatataattagagcagcagatatatttctacaggatg

SEQ ID NO: 214813 - DNA, 425 bp, Gossypium hirsutum
cccacgcgttcggttgcccactgttggtgacttttaccaggatttcgacctaacatggggtgacagtataggcaagattttcaatggtggcaagctcttgtctttgtctttagacagggtttcagggtctggttttcaatctaagaaagagtatttgtttggaaggatcgatatgcaactcaagcttgttgctggcaactcagctggcactgtcactgcttattatctgtcatctcaagggccaacccatgatgagatagactttgaattcttagggaatctgagcggtgacccttacattttacacaccaatgtctttacacaaggcaaaggcaacagagaacaacagttctatctttggtttgaccctacaagaaacttccacacctatttcatcatttggaaaccccaacacatcattttct

SEQ ID NO: 214814 - DNA, 428 bp, Gossypium hirsutum
gacccacgcgtccgattccacaaaaccaacttctttttatacgtagagaaaggagaatatgaaggcatcatatattgcattgtgtgcagtgatggtgatcctcttggcagaagcagtaggggtgtcaacggcggtgacatgcagcccaacgcagctgagctcctgcgtgagcgccataacatcttcatctccaccatctcaactgtgctgtagcaagatcaaggagcagaagccatgcctttgccaatatcttaagaaccctaaccttaagaaatttattaacactggcaatgccaggaaggttgcttccacctgtggaactccttttccaaagtgctaagctagaccctttgcttaaggctttctttctctctattttcactgcagaatggatagagaggaagtactataattattaatattatgta

SEQ ID NO: 214815 - DNA, 376 bp, Gossypium hirsutum
  unsure (1)..(376): unsure at all n locations
cccacgcgtccgcggcattggcgaaaggcatagcttatacacataatctgaatgaaatgactgtgtatcaggcattgcaattgggacaagattccaacagtccttatgagccaagaacacaaagatttcagatgtgtttgcataccgatacattgcttaaagtgatggaacaattggcaaaccctggtgtcagacgacttgttatcgtggaagccggcagtaaccgcgtagaaggcattatctcgctgagcgatgttttcaggttcttgctcggttagtccgaaataatttacagatgaactatctaggagaggtgagtttttgcagtggcatttggactcccatgtcttgtangcaacattccaaggccccaatg

SEQ ID NO: 214816 - DNA, 423 bp, Gossypium hirsutum
ggaaatcgatagcgcaaaagatgtgtgccttggacggaggaggagcacaagctggttctggtaggactgcaaaaagtagggaaaggagattggagagggatttctagaaacttcgtgaagactcgaactccgacacaagtagcaagccatgctcagaaatactttctccgacgaagcaatctcaaccgtcgccgtcgcagatctagcctctttgatatcaccaccgatacggtgcaggcaattccaatggaagaagagcgagttgatcgacaagaaaactcaactcagccatctgaaaccaatgtgtttcccattatgccggcgacttttcccatggcctttaaccaggtagttccgccggttccaattcaaaatccgactgaaaatcttacattagcacaggggaatcaattgaataacaat

SEQ ID NO: 214817 - DNA, 424 bp, Gossypium hirsutum
cccacgcgtccgcccacgcgtccggctcgtacacgtttggctaatgataacaaggctgctaaaaagggtggtcagaggcagtttaatggtttagttgatgtctacaggaagaccatccaatctgatggcattgctggtctttaccgagggttcaatatctcatgtgttggaattattgtttaccgtggactttactttggaatgtatgattctttgaagcctgttgttttggttggtggattgcaggatagtttcttggcaagtttcttgctgggttggggtatcacaataggtgctggactggcatcttatccaattgatacggtacgtagaagaatgatgatgacttctggagaagcagtgaaatacaagagctcgatggcagcattttctcaaatcatcaagaatgaaggtgccaaatcgc

SEQ ID NO: 214818 - DNA, 428 bp, Gossypium hirsutum
cttggcggttccggtactcatactggaatagcagccagagttatgtgatgaccaaaggctggagccgtttcgtcaaggagaagaagcttgatgcgggtgacatcgtgtcgtttcaacggggtgttggggagtccgggaaacaccggttgtacattgattggaggcggaggcctaatgcacccaatccaacgtcctttgcacattttcagatgcaaaatcagttcaactttcctcagtcagtccgatgggggggtggaatctactcgctgcctcaaagctatgagcctttgcatcgcttgaattacagcatatatccttataaccatcatcatcaacgacagcagcatcaacagctacagcagcagcagcatcaggcaattacttacggtaatgtggcgcagtcgcagtactatctgaggtcatcatca

SEQ ID NO: 214819 - DNA, 375 bp, Gossypium hirsutum
cattgtctccgttgttgcaggatgctggcatgaatgatatgagtatgactcaattatcttggggacttgtaaatgacacatacaagatggaccttattcttacacatccgccatatttgattgccttagcttgcatatacattgctagcgtctacagggagaaagatatcacaacttggtttgaagaacttcgcgttgatatgaatgtggtgaaaaacatctccatggagatcctcgacttctatgagaacaaaatgattgcagatgagcgaataagtactgccttcctcaaacttgctcttaagccttagatggttgattgagcgtggaacctgataataccggcatcgaccactgcatgacttgatattattt

SEQ ID NO: 214820 - DNA, 423 bp, Gossypium hirsutum
cccacgcgtccgcacccactccttgtccaaggatttgactctgactccattcgaaagtctgactctgttggacaagtttctgtggaaatggcaaagtcacttcctagagaaatgctgattaatctagtgaactgcttggaagcttctgccatatgtcttgtatgcaaagatccacctgatgaccccgttgttaccatgtgttgtcatgttttctgctaccagtgcgtgtcggaacatctgactggtgatgataatacatgccctgcacgtggatgtaaagaacaacttggcgctgatatagttttctctagaagtactcttaggatctgtattgcggatggtcataatggtagtcttgtgcatcctcagtttgaaaattcagtgattttacaggatgagtacagttcatcaaaaatcaagact

SEQ ID NO: 214821 - DNA, 430 bp, Gossypium hirsutum
attaacacataattggggtactgtaagtgaccctgagttcaaaggatatcacagcgggagttcaaaacctcgtggctttggtcatattggcatcacggtggatgatgtgaataaggcatgcgagagatttgaacgcctgggagtagaatttgtcaagaaattagatgcaggcaagatgaaagggattgcattcattaaggatcccgatggttactggattgaaatctttgatttgaaaaccattggagatgttattagccgttgttcctgagttaagcacatcttgaagcttgctcaggaaacaaggatggcatgtgaaggttttatctcattgtcttggtttcagagtatggtctatattggtcgtagtcgagacagaaattaagcatatggagttttagaccaaacaaaaaaaggcctgtggagtttt

SEQ ID NO: 214822 - DNA, 428 bp, Gossypium hirsutum
gaagatgagcgtcctaaggttgtttacaatcaattcagcgatgaaatccctgggagctctcttgccggtatcaattatgtaggtgaaaagagggcggagatatgccagaaaatcgtcgaggcttgtgaaaattggggtatcttccaggtcgtggatcatggtgtcgacactaaactcatttctgagatgacccgtcttgccagagagttcttcgctttgcccgccgaagataagcttcggttcgatatgtctggtggcaagaaaggtgggttcatcgtctccagtcacctccagggagaaacggtgcaagattggcgggagattgtgacctacttctcgtacccaattaagagccgggactattcaaggtggcctgatatgcccgaagggtggattgaggtgacaaaggagtacagtgataaattaat

SEQ ID NO: 214823 - DNA, 397 bp, Gossypium hirsutum
  unsure (1)..(397): unsure at all n locations
agctgatggtgctggagtagattatgccctcaatagggctatctctgcttggtatgatgggcgtgactggtttaactcattgtgcaagagggtgatggagcaagactggtcttggaatcggncnncncttgattatatggagttgtaccatgcggcaaagaaatactaaaagccgattaagcaaagctgcaaatcgttaccatctcccatagcttgtacattgtttacttataccttttactgccatagttttagcacttaaaatcgttcctccatttttgtgtatcataaagcaataagctctcctcaaaataaggaaaaaaaaaagagagaaccaaatgtgtatcattcttgagagctacaaattctttttgactgcttgtacttcatctctatg

SEQ ID NO: 214824 - DNA, 342 bp, Gossypium hirsutum
gaaatgctgaatcttgaaggttgtaagatcagtgatgctagtttggttgcaattgcaaagaactgtcagttactcagtgatcttgatgtctccaaatgtgcaatcactgattctggaattgcagctctggctcgttctaatcagatcaaactgcagatcctttctatgtctggttgctctaaggtctctgacaaaagcatgccttcacttcgaaaactgggtcagaccctgttggggttaaacctacaacaatgcaaggcaatcagcagcagcacagttgacctactcgttgagcagctctggaggtgtgatatccttttctgaactaaattatcaacaaaa

SEQ ID NO: 214825 - DNA, 427 bp, Gossypium hirsutum
gaaagtgcaagataggattatcttaagtactttgagacgatttgctgtgaagagtacaaataaatccaggcattgctttgagtacttagagagagatgagaccattatagctcatttggctgggggaattgatgcatttataaaggtgtctcaaggttggccactgtcaaaatctccactaaaattgttatctgtcaagagctcagatcatcattcaaggggaatttcattgagcttgatttgcaaggttgaggaaatggctaattccttggacatgaacattcggctaaatttatcaacttttgtggatactgttgagaagttgcttttagaacagatgcgcttagaacttcggtctgatgatgcctctactaattgaccatgatgcagcctgtcacttggtaagtttgaatgtcaatgtcgtata

SEQ ID NO: 214826 - DNA, 366 bp, Gossypium hirsutum
caatataattcaaaacaatatatccggacagtttattgttaagttaaattctaaaccaacactaccagcatcttctttgccccttccaattaagcaggcgattttaagtgtcagaaatacaccttcaatgccaaccggcaagctagcgatgactttcaaatcaacggccaagtagtcctttcaatgaaaacggaaaggtaaaaatagcatatatccaaaaaagactatttggttacacgactgaaattggatcgcccaatgactcaggagtaccgctgctaccattgagaaccgtaacatttccatcggagtcaacatcaacgattactgaatcaccctccttgatgtccctggcaagcattttct

SEQ ID NO: 214827 - DNA, 380 bp, Gossypium hirsutum
ctttttcttttctttttttggcctcagactctgaatttcgattgttaattatcactgttgtgcaatggcgtcaggttcgaactggacgccaaagcaaaacaagttgttcgagaacgctttagctatctacgacaaggatacaccagaccggtggcacaagctagccagggctgttggggggaagaccgtggaggaagtgaagttgcattaccagaaccttgtggatgacatcaagcagatagagtctgggcacgtgcctttgcccccttacaagaaagctggaggaacaaaagatacaacaatttcatggacgatgaagaaccaaggatgaagaatctcaggctttagtgaagtatgaaccagaaatagcctgtagaata

SEQ ID NO: 214828 - DNA, 198 bp, Gossypium hirsutum
cccacgcgtccgcccacgcgtccggaggtggctactttattggcaatgttagtcctgcagggatggatttccgatggttttgtttaggtaactgtatagcaatactatcttctctaacaacttcataccacccaacttcaataatggacctaacgcaagccggcggccattaactttttttataaaacccataaaaat

SEQ ID NO: 214829 - DNA, 431 bp, Gossypium hirsutum
gagagctgtgtggcatcgattattgggtatttggatcctccacaaatatgcaagttggcgaagttgaacagagcgtttagggccgcttcttgggctgatttcgtttgggaatcgaaattgccaccgaattatgaaacccttgtcggtgaagttttgagctttgtgcctgagaagttgggtaaaagagacatttatacgagactctgtagagttaatacctttgatggtggcaccaagaaaatatggctggataagagcacaggcggtgtttgtatgtcgatatcttcaaagggtttacagataacagggattgatgatcgaagatattggaatcatattcctactgaagaatctaggttcggttccattgcatatcttcagcaaatctggtggtttgaaagtgatggagagggtggattttcgttttcttc

SEQ ID NO: 214830 - DNA, 366 bp, Gossypium hirsutum
aaaagactgttgatggtccttccatgaaggactggagaggtggtagagctgcttccttcaatatcattcctagcagcactggagctgccaaggccgtcggcaaagttttgccagcactgaatggcaagctgactggaatggctttccgtgttcccactgttgatgtctctgtggttgacctcactgtgagacttgagaagaaggctacatatgatgaaattaaggctgctatcaaggcggaatctgaaggcaacttgaagggaattcttggttatgtggacgaagatttagtctcaactgacttcatcggagacaacaggtcaagcatttttgatgccaaagctggaattgctttgaatgacaact

SEQ ID NO: 214831 - DNA, 430 bp, Gossypium hirsutum
  unsure (1)..(430): unsure at all n locations
gtaaaacgggtcttgagatatctggttgggactatggattatggtctatttttttcaaaaggacagtttaaactagaatgttattctgatgctgactgggcagcctcagttgaagatagacgttctacaacaagatatgtagtttttctcgggtcaaatccagttgcatggtcttctaagaagcaggctgtggtgtcaaggtcatcttctgaagctgagtatcgtagtttagctaattgtgttgctgaattactatggttaaagcaactgctgaatgaaattggattgtcagtttgtcaaacaccagtcatctggtgtgataatacctccacagtttctatggttgcaaacccaactcatcactctcgtatgaaacatgttgaaattgatcatcactttattcttgaaaaggtgatggcaagaagtntac

SEQ ID NO: 214832 - DNA, 401 bp, Gossypium hirsutum
gagagctgtgtggcatctattattgggtatttggatcctccacaaatatgcaagttgggggggttgaacagagcgtttagggccgcttcttgggctgatttcgtttgggaatcgaaattgccaccgaattatgaaacccttgtcggtgaagttttgagctttgtgcctgagaagttgggtaaaagagacatttatacgagactctgtagagttaatacctttgatggtggcaccaagaaaatatggctggataagagcacaggcggtgtttgtatgtcgatatcttcaaagggtttacagataacagggattgatgatcgaagatattggaatcatattcctactgaagaatctaggttcggttccattgcatatcttcagcaaatctggtggtttgaagt

SEQ ID NO: 214833 - DNA, 400 bp, Gossypium hirsutum
gtttggaggattttacgtatgtgactacccatggatctggcaagtcgtctacaaaggtgtattatgatggaggtgaagaaaggagaaaaagtaactgtgaaaccccagctccagcaccaagatttgtggaagaggttgcttacccaacttcagattttctcagttgttgtcacctatgcaggaaaaagctgcatggccaagacatttacatgtatagaggggaaaaagcgttttgcagttcagagtgtaggtcaactcaaataatgatggatgagaggaaagaacagtgcagatcagaagtttcaagatctgcaagagtcacaacctcctcttatgagtctggggatatcttcttctcaactgggattcttgcaatttagcttccagtcctcatatgggg

SEQ ID NO: 214834 - DNA, 383 bp, Gossypium hirsutum
cccacgcgtccgagcagaacccttcatttttctctgccaccagcggcacccaaggatgcggatcttcgtcaaaaccctaacggggaagaccataaccctagaggttgagtcttccgacaccatcgacaatgtcaaagccaagatccaagacaaggaaggcatcccacccgaccaacagcgcctcatctttgccggaaagcagctcgaggacggccgcaccttagccgactacaacatccagaaggaatccaccctccatctcgtgctccgtcttaggggaggtgctaagaagagaaagaagaagacctacaccaagcccaagaagatcaagcacaagaagaagaaagtcaagctcgctgtgctacagttctacaaggtggatg

SEQ ID NO: 214835 - DNA, 357 bp, Gossypium hirsutum
  unsure (1)..(357): unsure at all n locations
ctcctccaccaccacctattcagtttccctaaaatgggttcgggttcatgggaggcttgggaggttttgcaccaatggcaactgctcgatttgggaatttcacactctctgctgcttttggtggtcttatcccatccttgtttaaccttcaggtccatggatttcctgatgcggctatgtttggtccagctgctggttttccatacggctttccaagttcatatcttggtggccatgcttatggataccatcatcaccaccaccaccatcatcatcgcaccgcacaaggccagcaggatcattatctgaagatngctgttctgtttatcattgnttgtgttatctttgcaatgattt

SEQ ID NO: 214836 - DNA, 428 bp, Gossypium hirsutum
ttcttgaagcatccttacttctggtttctccttttggtcacccggacccatgcaagatggaacggttgttactttaagggcgcgttaacccaatcctatgtcattgctacttccaccaaggttgacatctcaggggttaacgtagacaagtttgatgacaagtactttgccaaggaagtagagaagaggaagaagaagactgagggagagttttttgaggctgaaaaagaggataagaaaaaactgcctgaagacaagaaagaagaccagaaagcagtcgacgcctctttgataaagtccattgagggagtcccagacttgaaagcctacctcgccgcaaggttttctctcaagtctggcatgaaaccgcacgagcttgtcttctaaagggtattttgcattcccttatgttaaagggattttacttt

SEQ ID NO: 214837 - DNA, 344 bp, Gossypium hirsutum
cccacgcgtacgccacgcgtccgcaatggttcttatataggtgaagcatcttagactgggcgctcagctcatggtcctcacaatggaggtcctaattcagcccattcagtggcacatacagcactggccattgtacctatatcaactacttcggctgccacagctgttcctggtccaactactaacttacatattgggatggattactggggtacacctgcttcatctaatgatcctgcaatgcatgcgaaggttccttcaaccccacttgcaagaggaattgtcacccctggatcacgggacaatgtccagtctcaactatggttacaggatgaacgagagct

SEQ ID NO: 214838 - DNA, 385 bp, Gossypium hirsutum
ggaggtggtagtcccccatcgtatggaggttgcagttccccatcgtatggaggaggcagtcccccgtcatactgaggtggcagtcccccatcatacggaggtggcagtcccccatcatatggaggtggcagtccaactactcctattgatccaggaactccaagcattccctcacctccattctttcctgctccaactccaccaattggtggtacatgcgatttctggaggagtcaccccacactgatatggggtctgcttggttggtggggcactgtatgcaacgcatttggcgtgaccaacgttcctggacttggaacaagcatgagcttgccccaagcactttcaaacacacgtactgatggacttggggcgctttaccgag

SEQ ID NO: 214839 - DNA, 375 bp, Gossypium hirsutum
ctggccagcacctttaaagttcattagtgagctcaatgacgaggcaaaggtactattagaacaggcgttaatggatgcaaacagggaaagggaaaagaacatcttgaaaggaacagcttactcacttctatcaccgtcaccatcccactccgattctgggttagacgacagtatttctgaggttagtgatgccgaactatgctgcatatgcttcgagcagatctgcacgatcgaagtccaagactgtggtcaccagatgtgcgcacaatgcacattggccctttgctgccataacaagccgaaccccacaactgcaagcgtaacacccccagtctgccccttttgccgcagcaccattgtccgattggcagtagc

SEQ ID NO: 214840 - DNA, 402 bp, Gossypium hirsutum
ccacgcgtccgcttctttgctttttttgttttagcagcttgtgtagggggaaaaaattgtgaagagggtttcctttgttgccttgtgtgtggtggcactcgcggtggtgctgttttcgggtgaaagtcgcacggcggaggcagtgacatgtaatcccgtggagcttgccccctgctcgccggcgcttacgtcgtcctcgcctccatcaagcgcttgttgcagcaagctgaaggcgcagcagccatgcctctgtggatacattaagaacccatctcttaaacagtatgtcaacagtcctaacgctaaaaaggttgcttcgacttgtggagtcccatatcctaagtgttaaatgttgcttaatggtgtatctactatctactggcagcaaataagtgatttttt

SEQ ID NO: 214841 - DNA, 413 bp, Gossypium hirsutum
atgcagcatacattcactcttcccaaaagataccaagaatttcctggggaggttattgggttgtctttctgcccttcttcatcttcccatccaacgaaatcttcatcgcttgttgtttatagtgccagggcaatgtgttcaattgactttgggaagccagtagacgaagatgatgaaagtgagttggtaaatggagctttgttgaaatttcaaggttctctcaccaatatgaaatggaaacattggttgagggagagccgtcaaagtagaaaaaataattttgatttagtagtttttcgggaccctgttttatttattgggcacctttcaaaacattccatcttgatcatagacaaaccatggatggaagtggttaaatcatttgattcggcaccacttcagagacatatttt

SEQ ID NO: 214842 - DNA, 408 bp, Gossypium hirsutum
gcatgtaggaaccagagaccaaggcaatggcttttcttgcaaccttagctggtgttcaaccaacgaccatcaagggccttggtggcagctctctcaatggaaccaagctcttggtgaattcaactagccagagtttcaaacccaaaaactacagggatggtgctgtggtatcaaagtatggtgattagagtctatactttgatttggaggatattggtatcacaactgggcaatgggacttgaatagatccgatgcaccttcaccgtacaacccactccaaagctagttttttgagacatttgcagctccatttaccaagagaggattgacgctcaagctcctgatcttgcgaggcggctccctcggtctttacctcagtgccactgcttacgatgaccttctaccga

SEQ ID NO: 214843 - DNA, 406 bp, Gossypium hirsutum
ctcagaggggaatttcctttctaattcgaaagtagatgtgatgttgacacccaggccttcgtcaaacttgggactgaaatctgtttctatgcttgagaaccttggggttcaaccaacaaaggcgaaagaggtcacgaaccagaaggtggtaaaggactcgcctcatgctgccaatgagacgaggcccaaccataatgcatctgtaaacaataacagtggagcacctgcttccaaggcacaggttgtaggttggcctcctattagatcgtttagaaagaactcattggccacctcttccaagaacactgatgaagtagatggaaaggcagggcctgatgctctttttgttaaggtcagcatggatggtgctccttatctcaggaaagtggacctgaaaaactactct

SEQ ID NO: 214844 - DNA, 405 bp, Gossypium hirsutum
gactgggccaaaccaggttcgatggggaaacaatatttcttggggttcgagaagtaccttggagggtctggtgagccggcataccctggaggaccactgtttaacccacttggttttgggaaagatgagaagtcattgaaggatttgaagctgaaagaagtgaagaatgggagattggcaatgttggcaatcttgggttacttcatacaagggctcgtgacaggtgtaggaccataccagaacctgttggatcacttggctgaccctttcaataacaatgtcttgactaacctcaagttccattagatgaaagtgcctatatttgttccatggaactaccctccccccccctccggataaaagctccattgccaaatccctttctgctcctttcttgatctcagt

SEQ ID NO: 214845 - DNA, 250 bp, Gossypium hirsutum
ggattgaagcagaagaaggcacacctgatggagatccaagtcaatggtggaacaattgctgacaaggttgattttgcttacaagttctttgagaagcaagtccccattgatgctgttttccagaaggatgaaatgatcgatattattggtgtcacaaagggtaaaggttatgaaggtgttgtcactcgttggggtgtcacacgtctgccccgtaagacccataaaggtctgcgtaaggttgcttgtattg

SEQ ID NO: 214846 - DNA, 400 bp, Gossypium hirsutum
aaattaaaacaaaagaaggcacacctgattttaatctcaaatcaaatggtgaaacaattgctggcaagggtaattttgcttacaagctctatgataaacaattccccattgatgctgctttccaaaaggattaaatgatcgatattattggtgacacaaagggtcaaggttatgaaagtgttgtcactcgttagcgtgtcacacgtctacctcattagacccatagacgtttgccttaggttccttgtattgaatcctgacatcctgccaaaatttcctttacagtaaccattgcgcgtcataatggataccaccaccgctctgagatgaacaacatcgtctacagcgttggcaaggatgatgatcagacccactctgtcataactcattatcacaggac

SEQ ID NO: 214847 - DNA, 386 bp, Gossypium hirsutum
ggattaaatcaaaaaagggctcacctgctttttatccttatcaatgttggcacaattgctggcaagggggattttgcttacaagctctatgacaagcacatccccattgatgctgttttccataaggatgaaaagatcgatattattgctgtcacaaaaggtaaaggttatgaaagtgttgtaactcgttggggtgttacacgtcttccccattagacccataaatgattgcataaggttccttgtattgcagcctaggatcctgccaaagtctcttttacatgaaccaggacatgtcaaaatggctaccaccaccgaactgtgatgaacaagaccgtctacattcttggcaaagctgctgatgagacccactctgccataactga

SEQ ID NO: 214848 - DNA, 167 bp, Gossypium hirsutum
tcgtaacataataaagcacacctaatttttatttttatcaatgttcaaacaataacctgcgaggggtatttttcttacaagttctttcaaaaacaaatccccattgatgcttttttccaaaatgataaaatgatcgatattattggtgtcacaaagggtaaaggtta

SEQ ID NO: 214849 - DNA, 395 bp, Gossypium hirsutum
cccacgcgtccgcggacgcgtgggctggattagtgcgaggaaacaaccctgcatgatgttgacattgaggaagtgatgcgtaggaaacagactcaagctcaacaagaagcttatgatgaagatgaggacatgcatggtggtgcgcagagagtacaatgcgctcagcaatgataaaaaaaagccgaatgtccgagacacagacggtggtttttggcgatggaatgtactgtggttaaaaaaaaaaagaaagaacatttgagagtaagattctcaaaacattgttgtgttttggtagtcctttattttttgtttttaatagtgcaagtattttagtaattgaaatggtgttatatgctttgaaacctgatgctttctaagtatgcaaagatttatgc

SEQ ID NO: 214850 - DNA, 408 bp, Gossypium hirsutum
gtttgcttcaaaccaagtaatttctctgttgccgtgcatgtggatgttgattgtcactcaggtgaacagacctgtctgctggctgttgaaggataccattgccgggagagtagcatcgaagagcttggttcaggcggttccatcatttaccagagcttcaacggcattgggggatgtggatcacctagatcaactctgagttgcctctgggaagaggaggaagagtattattataattaaaacggcttattttcttatgttataactattaaataaattgctacccaggcattgcctggtgataaagcatggtgtgtgtttctattctagtactttttttgtcttttatcaagtcaatcgctatgccagcaaacctggacttgatactgccatttgtacggcagaatg

SEQ ID NO: 214851 - DNA, 415 bp, Gossypium hirsutum
cccacgcgtccgcccacgcgtccgaacatctcaaaaatatctgttctctcgttcatccaagtacccgaaagtcaagagtagattaaactaatggccggaatcggacctttgactcaagattgggagcccgtcgttattcgtaaaaaagcccctaccgccgccgccaagaaggatgagaaagtcgttaacgccgcccgccgtgccggtgccgagatcgagtccatcaaaaaatcaaatgctgggacgaatagggcggcttcaagtagtacttctttgaacacaaggaagctcgatgaagacactgagaatcttgctcatgaccgagtgccaactgagctaaagaaagccatcatgcaagctcgaatggataagaaacttacccaggctcaacttgctcagatgatcaatgagaagc

SEQ ID NO: 214852 - DNA, 380 bp, Gossypium hirsutum
cccacgcgtccgaatttggatacaacaatggtggtgaaggtgtatggcccagcctttgcggctccaaagcgagtgattgcatgtcttattgaaaaggagattgaattcgagactgtccctgttgatttgcttaaaggagagcacaaagaccctgaatttctcaagctccagccttttggaacagttcctgtcactcaagatggagattatgttttatatgaatcccgtgcaatcataaggtactatgcaaaaaaatacaaatcacaagggactgatctactgggaaagacaatagaggaaaagggtcaagtggaaaattggctagaagttgaggcacacaatttcaacccatcaatttacgccttgaccctacatgtgat

SEQ ID NO: 214853 - DNA, 404 bp, Gossypium hirsutum
gccccactctcatccgatttgaggtccaagttcaacgtccggtccatgccggtgcgcaaggacgacgaggtccaactggttcgtgggacttacaaaggccgggaagggaaagttgttcaagtctaccgtctcaaatgggtaatacacatcgagcgcatcacccgcaagaaagttaatggttcgaccgtcaacgttgggattaacccatccaaggttgtcattaccaagctgtggcttgacaaggaccggaagtcgtttttggaccgtaaggctaatggacaggctgctgctgataaggataatggtactaaagtctctgccgaggatatcatgcaaagtgtccattaaggttgacttgtttttcattgctatgatatgctctggtatgttacaatgtacggagt

SEQ ID NO: 214854 - DNA, 406 bp, Gossypium hirsutum
tccaccatcatctggaggtggtcgtcccccatcgtatggaggaggcagtcccccatcgtgtggaggatgcagtcccccatcgtatggaggaggcagtcccccatcatacggaggtggcagtcccccatcatatggaggtggcagtccaccaactactcccattgatccaggaactccaagcattccctcacctccattctttcctgctccaactccaccaattggtggtacatgcgatttctggaggagtcaccccacactgatatggggtctgcttggttggtggggcactgtaggcaacacatttggcgtgaccaacgctcctggacttggaacaagcatgagcttgccccaagcactttcaaacacacgtactgatggacttggggcgctttaccgggaagga

SEQ ID NO: 214855 - DNA, 407 bp, Gossypium hirsutum
cccacgcgtccgattatcactcccgttgagcttatcaagaagggtgagaaggttggttcttgcgaggctgcacttcttgccaagctcggaattagaccattctcatacggtcttgttgtcttgtctgtttatgacaatgggtcagtctttagccctgaggtgcttgaccttaccgaggatgacctgattgagaaattcgctactggtgtctccatggttacggcattgtctctcgccatctcgtacccaaccctggctgctgcaccacacatgttcatcaatggctacaagaacatattggccgttgctgtcgcaactgagtattccttccctcacgctgataaagtgaaggagtacttggcggatccaagtaagtttgctgttgccgctgcaccctgttgctgctg

SEQ ID NO: 214856 - DNA, 405 bp, Gossypium hirsutum
gctggtcgtcccatgggccctcctggtgaccgcccacgtggtcctcctcgctttggtgacggcgagaggagatttggtgacagagatggctaccgtggaggtccaagaggaggaggtgattttggtgacaagggaggagctccggctgactatcagccttcattcaggggccctggaacaaggcctgcctttggtcgaggaggtggtggttatggtggtgctggacctgcaggtggtgcaggtcttccttgagacagatgctttttcatgacagatagttttgtcagtctaggtggttgttgaagttgatagaagtttgtgttatgcttttcaatttagttatttgatgcttataaaatattgctactcttcggttcatccgaaaggaatttaggaccaatgttt

SEQ ID NO: 214857 - DNA, 406 bp, Gossypium hirsutum
cccacgcgtccgcggacgcgtgggtgcgtgctcatttaatgagacagacattcagaaatgggcatttcttaagaacattaacaaacccaccgacttttcattcccttcaatgagttttcccatgcctggaactagaggtcctttatttgaagatggtccaaactttgatatggcatttaagctttttcatgggaaggatggcattgtacctctctcagggaggtctgatgttccctgtgacagagacaaacaggagcctaccatccaatttaacccattagcaggaaaagctgcaacaattagcctttcagcttttagctcaggagggcccttcagctttggtcccttctcagataaaaggaagaaccagaaaaagaaatccgactcatctaacaaacaagaaccc

SEQ ID NO: 214858 - DNA, 401 bp, Gossypium hirsutum
atacaagtccgtccagtgcaatagttgcatcgatgaataacatggcgttcggaagcggggggggcggtgggaacgagtcttcaagcgaggatcttaacgtgttccaatctaacgccgacggagtgcccccgcctccgccttatgtgttgtcaaagaagaggttccgcacaaaatttacgcaggagcagaaggataagatgttggagttagccgagaaagtgggttggaggatcaataaacaagacgaagaggaagtacagaaattttgtgctgagtatggggtgaaaaggcaagtattcaaggtttggatgcataataacaagaacgtgaagaagccgccaccggaataagagttggtaattttcatggttgctaaacgagtagaatgacatgtgagacat

SEQ ID NO: 214859 - DNA, 409 bp, Gossypium hirsutum
agaagttctatcgatttcagtttagcattcataatgtcaggaagaggaaagggaggcaagggtttgggtaagggaggagcgaagcgtcaccgtaaggtcctccgtgataatatccagggaattacgaagccggctattcggcgtttggctcgtaggggaggcgtcaagcgtatcagcggcttgatctacgaagaaacccgtggtgttcttaagatcttcctggagaacgtgattcgtgacgctgtcacctacacagagcacgcgaggagaaagactgtgactgctatggatgtggtttatgcactcaagaggcaaggcaggactttgtatggattcggtggttaaatgtgatttagggtttaggttttagaatggtggtgtcttaggggggatttgaagtcttgctgtc

SEQ ID NO: 214860 - DNA, 413 bp, Gossypium hirsutum
  unsure (1)..(413): unsure at all n locations
gttcctaataaaagctttcttgcattggtactctggttaagggatggatgaaatggantgggcaggggctgagatcaacatgaatgatttggtttcggagtaccaacaataccaggatgccactgcaaaacacgaggagtacgagtaatatgaagaatacgaggaaaaggcttaaaggatgctccttgttctttttatcatgtaggacattcggttgtgcaatctatgcttttctggttatcagcatttggatcgcttattgctgctgtctttgctatttacacactagtattgcttctttcttttatatcaataattttcaccagttcatatatcgtgtctctcacaaatgtttcattacaatttgttatagcaaatgttaagccttcaaatcatttattaaagtatgcctt

SEQ ID NO: 214861 - DNA, 394 bp, Gossypium hirsutum
caaagttggactgggaggcaatgggtaagatcctcgctcgcgggcatagccgagtccgtgggtactcagggaatcccaaaaatattattggacttctgctggtgaaaagccttgtcactgtacgccctgaaactgaaacacctgtcagggctgtttccatccgaagaattccaaggggtccagctgatatgcctctctatgatattctgaatgagtttcaaaagggcagcattcatatggcagctgttgtgaaggctaaaggaaaaaataagaaccttgctccgactgttgacggactgaagtctgaagaaaacaaagtgtccagtgcagatacccagctgactactcctgtgctatccaagctggatgagaagccagagagcattgtagttga

SEQ ID NO: 214862 - DNA, 357 bp, Gossypium hirsutum
gttgtgatggacggtatccaatctgtgcgttgaaatactttatacacaatgcaagggtcgcgtgtatattgtgactccatactgtggtgatattggttgttctcacgctcgttgcgaacctgcatctccgactccaagatgtgcaataaagtgcggtagcgctaaccttgcttggcatcaggcaacacactatagcatatgtgcgcttaggatcaaattaaattctgctgatatcatgggctaggttgatcagaatggaccggttgaggtctgcttgaccgattatgaagattttggttactacaacacaggagcttacagatcataagactagcgatgttattagaagccatgcaa

SEQ ID NO: 214863 - DNA, 368 bp, Gossypium hirsutum
cccacgcgtacgcagtccccaatccttcctttataagatggcgccaaaaccccgggcatgtgcgggtattttctcggcacttctcgccttctctttttctttgctcctcttttgtcatgcgatcataggcggccacaattaccacgacgctctccgcaagagcattctcttttttgaaggccaacgttcaagcaaacttcccccttgcctaaccttcaaatggggcccggtcttttgtttgcaagaccggtccaccggccgtggttggcttaacaggagggttcttctcacacccgagacatacctttaatttgggtttccaatagtttttataacttctttttttactttggaattttattcatttc

SEQ ID NO: 214864 - DNA, 399 bp, Gossypium hirsutum
gtgaacattaatgtggataggaagtgcatctcttgccaggaggaatatgaagcaaatgagaaaattttaaagctatattgtggacacagttttcacatccaatgtataaaacagtggcttgtgcataaaaatacttgcccggtttgtaagaccgaagcaacggctcaatgctagctgcagccaactgtggcggcgccgatggagattcaatttttactccccccctccccttttattttctgaaatgtgtgaagccttaaaggttcaacctgtgttgacttgggcagtacagggaagagaaatgttgcaacttttctcagccctcttccttgaaatcaactactgagagtttgtgattgtgttgccatatttatgaaaattttttcatgtttataattg

SEQ ID NO: 214865 - DNA, 344 bp, Gossypium hirsutum
  unsure (1)..(344): unsure at all n locations
ctgtagaaaccccatctggttttcctgcacatatttatgaacactgatattgtaacaggacattctcgaaaaagatgttccatagattcagatccagagccacaacgaggacacattgatgtattcgttagtcgtctaagtagcatattaacgtgagtagctaggaaattccaagagatcttccaaactgtaatttttatttttgaaggtagatcaagtagccataatttcctgtagaagtccttatagtcaacttgtaaagcataagttctaggatcatttgcagtactttgtaatagtttataggcgctacgttctatgaactcacccgacgcttcagcnna

SEQ ID NO: 214866 - DNA, 405 bp, Gossypium hirsutum
ctaatacccaatggccgtcactttctcaaatctccacaccgagtctggtcttaaagctctgaatgacttcctctctggaaaatcttacatctctgggaataagctgaccaacgatgacataaaagtttatgctgctgttctgaagaaccctggtgattctttccccaatgttagccagtggtataattctgtttcttctcaacttgcggccagcttccctggcaaagctgttggcgttgggtttggtggcaaagctgctccagctgagtctgctaaagctgaggctgcagatgatgacgacgacttggatctattcggtgatgagacagaggaggataagaaggctgcagaggagagggaagctgcaaagaagtcagctaagaagaaagaaagtggaaagtcctc

SEQ ID NO: 214867 - DNA, 407 bp, Gossypium hirsutum
cttacgctctaaggcagctttagaaggatcaaaaactgttcaagctgatcttgcggctgctggtatccaaacaaaagaagaccataatgaacagaatgagaggctaagcaacaaacaattattcattcaaaacatagattatgcgctagacctgtttctattatacgtcttaacactatcgattttccctggattcttatacgaaaacactggtgaacataagttgggtacatggtattcacttgtgttgatagcatcttacaatgtgtgggatttgatatcaagatatcttccccttgtgaaattcttgaagatagagtcaaggaaaggccttacgattgcaatactttctcgtttcttactgatccctgccttttacttcactgccaagtatggtgatcaaggat

SEQ ID NO: 214868 - DNA, 399 bp, Gossypium hirsutum
gcggtttcaggttccatacaaaagaaggagatagggaaagactgactaccgggctaggatgggcctaatcaatcaagacaagaataagtacaacactccgaagtaccgattcgttgtccgatttagcaacaaagatgtcaccgcacaaatagtttctgctaatattgctggtgatatggttcttgcttctgcttactcacatgagcttccacgatatgggcttgaagtgggtcttacaaactatgccgcagcttattgcactggtttgctgttggggcgccgtgtgcttaagatgcttgaaatggatgaagagtatcagggcaatgtagaggctactggagaagacttctcagttgagccaactgacacaaggaggcctttccgtgctctccttgatgt

SEQ ID NO: 214869 - DNA, 409 bp, Gossypium hirsutum
aagaaatcaagaagcctcttatgaggaatgacaagcaatcaatggctcttcttacagcagggtttgacaagatcaataaaaagcttggaatccggaaggaagatctgcccaagtatgaagaacagttagaactaaaaattgccaacgcacaattggaggagctgaagaaggatgcttttgaagcaatggaaacacaaaagaagcgggaggaattcaaggatgaggcaatgcctgatgtgaagtcattggacatacgaaacttcctataattctctaattcactttcggttttccagtgactttggaggtcaactttctgaattggggacttcctttgtcattttttgctataataaaaaaaaaagaaaagcaactggtcagttgaaaatgcaaaaatattatctcatct

SEQ ID NO: 214870 - DNA, 283 bp, Gossypium hirsutum
aaaatctttagagtaaatggcagatgaagtctagagctctggccttttgaaggaatgtgggcgttcctgaggatgctctattggtaactccagaaaattttaaagagaacagatggtcctggtcagacgtaaaatctctctctggcagccttcttctggcccttgatgctagtctggagcatgcactgttgggctctgtaatgtccatggatagatatgcagcagcagaaagcttttacaagcttgcaatggcatttgcccctgtcccagatcttcacataat

SEQ ID NO: 214871 - DNA, 337 bp, Gossypium hirsutum
gagaagaactgtgctccactcatgctccgtctagcgtggcactcagctggaacttttgatgttaagaccaagacaggaggtccattcggaaccatgaagcatcctgctgagctcgcacatgctgctaacaacggccttgatatcgccgtcagacttctcgagccgatcaaggagcagttccctaacctcacctacgctgacttctatcagctcgctggtgtcgtcgccgttgagattactggtggacctgaaattcccttccatcccggaagagaagacaagcctcacccaccaccttgaggccgtcttcctgatgctaccaagggttctgatcact

SEQ ID NO: 214872 - DNA, 414 bp, Gossypium hirsutum
gacgaacacagcggttggtgcggagctgacccatagcttttcaagtaatgagaacactctcacgattggtacacagcatgctcttgacccgttgaccacagtgaaggctcgactgaacaactacggcagagcaagtggtcttatccagcatgagtggcgcccaaaatccctcttcactatctctggagacgtggacaccagagcaattgaaaagagtgctaaagtcgggctggccttggcactcaagccgtagggaaaggtaatatcattgtttgaatgaagggagggctttacttttgattggtgaaaccggaagtctggaagactggggagagtaataatgtgctttgacggatttttcatgatcttggattaaaaaaataattgtgattggcgaactgaaattggcaattt

SEQ ID NO: 214873 - DNA, 405 bp, Gossypium hirsutum
gaaaaaaccatccagtcttggcatcttgactgttattacttctttgttgccggatatggcggggggggctggacaaccgacgtaagaagacgaaaaaggtacaacctggttgatgcagtatctaggaacactgttcaggtttatcctaaaagctggacttcaattttggtctcattggacaacaaaggaatgtggaacttgaggtcgcaaacctggtcaaagcggtacttaggccaagaagtctatcttagagtctggaacgacgagaaaagcttgtatactgaaactgatatttctccaaatgcactattttgtggcaaggccgttcaatcttagaacactattaatgtcctattgatgtaatctacagcagctaatttattttctgatttatttctctttttt

SEQ ID NO: 214874 - DNA, 407 bp, Gossypium hirsutum
cggacgcgtgggcggacgcgtgggtcaaaacccagattttagattggcctaattcatcaaaagatgtaatgtagaatagtttcaaaaattgattttttttttgttgatgtttgaaataatgaagccaagtaaaaggcttccaatgaaggtttggttaactgctcaaagatcaatgggtctcctcgtgggtggaaatcacacttcctccaggttttgtactcgttaatcttgtttccttgtttagttttggggcacatttccttttcaattttctcattttatatcaaaagattggatctttgttacaagaacatggattttaagaccttgaaattgatgatctttcatggttctttagcaagacgtgtacttttacgtgctctaatggtgattactgctttgtcaat

SEQ ID NO: 214875 - DNA, 342 bp, Gossypium hirsutum
cccaagcggccgtaagatactagctcagaggaagcatttcccttctgccaactggcttattggatagcgggaagtattcttgggcatcgaaaagattctatgagaaatgcgatacagattttattactcttggggacaaaaccccgataggttcgtcaaagataaaaaaatctgaaggaattgaaccacctggtggtaaagaatgcattggctgaaacagacaaactcttattggaaactgccaaatttttaaggggggctgatcttgtacagattgctaatagtgaataagataggttgggccaatttaacagccctgtttggatgatgcacaacattggg

SEQ ID NO: 214876 - DNA, 373 bp, Gossypium hirsutum
cttgccagtcctgatggccgtgtcattgggggaggtgttggagggatgcttattgcagcaggccccgtgcaggtgattgtggggagttttatatggggtggatcgaaggcaaagaacaaaaaaggagggcaagaagggataaaagattcagatgatcagatggttgacaatctagtagctcctccaggcatatcaccaagtcaaaatatgactccaagtgcaccggcaggggtgtggcctgggtcgagatcaatggatatgcgtaacaatagccatgtctacattgatctaatgcgcggatgatgactggttcctgggaataatttggggagaaatgtatatagtttggggttgaagggcccacggattggaa

SEQ ID NO: 214877 - DNA, 303 bp, Gossypium hirsutum
cggacgcgtgggtggctatcgagttctttgtttaagaataaggatcttttaagatacgccggatccgctaaaatacgccgatccccgtccgtcttccgatcatatggggctgcttgaccagttgtgggatgataccgttgctggtccccgacccgataatggccttggcaagctccgaaagcactccactttcactttccggcctaactctgccaaggaatctgatggcgggagtgtaagatcgtacggtgatgaagcgccggaggaagcgacgagagtgacacgtagtattatgatcgtaaa

SEQ ID NO: 214878 - DNA, 410 bp, Gossypium hirsutum
gcccaaggtgtccacggacactttacaaagcgtgcagaagagattggagccggtgaccagggtcatatgtttggttatgccactgatgaaacccctgaattcatgcctcttagccatgtccttgcaactaagctcggtgcacgtcttactgatgttaggaagaatggcacctgcccctggctaacgcctgatggtaaaacccacgtcactgttgagtactacaatgacaatggtgccatggatccagttcgtgtgcacactgtcctcatctccacccaacatgatgagactgttacaaacgatgaaatcgctgctgacctcaaggagcatgtcatcaagcctgtcatccctgagaagtaccttgatgagaagacaatcttccaccttaacccatctggccgctttgtaat

SEQ ID NO: 214879 - DNA, 408 bp, Gossypium hirsutum
gaagcaatgcggtcatgcgttacaaggaaaagaagaagacacggaagtttgataagcaagtgagatatgcctctcgcaaggcaacggctgatgtgagaaagcgcgtaaagggacgctttgtcaaagccggcgatgcctatgattatgatccattgaaccataccagaagctgctgagaggctccaggtttccatcagaagttggatgcaaaaacccgaaaaaaaattgccatgaataaatcgcagtggcatggtccccagtagaaagctcgatggatcacatgacatcttgtggcaagatcttcccagattgtctttgctgtcaaaccaagctgtgggtttccagcacctgcgataaaacgtacaagcaagctcacctcagttctttttagtacaaaatgagagtgct

SEQ ID NO: 214880 - DNA, 407 bp, Gossypium hirsutum
ctagattaattctcatttcattgtgactagttttattatgtacacacttgttgatgacaaaatgaagttagtttttatttttatctttaaatttatgctgttaagaagcacttaacagagttaggatttttagttttagttttagttttgcccatgtttattttgatacctcaaagcagatctcagcagattattgtctcgtgtttctcattgtaaattgcttgtgactttatagagggagtttgctatgcaaagaaggattacaatcttgcgaagcaccccgagatcgatgtacccaatttgcaggtcattaaactgatgcagagcttcaagtccaaggaatatgttcgcgagacttttgcttggatgcactactactggtaccttactaatgatggaattgagtt

SEQ ID NO: 214881 - DNA, 373 bp, Gossypium hirsutum
caccttctttcctacgccaaaatgccgccaaaatttgatccaagccaagtcgtcgacgtcttcgtccgcgtcaccggcggtgaagtcggagcagctagttcactcgctccgaagatcggtcctctcggtctctctcccaagaagatcggagaagatatcgctaaagagaccgccaaggaatggaagggtctccgcgtaaccgtcaagctcactgtccagaaccgccaggcgaaggtcatggtggtaccgtcggcggcagcgctggtaatcaaggcattgaaggaaccggagagggataggaagaagaccaagaacatcaagcataacgggaacatcggactcgatgacgtcatagagatcgctaaagtaatga

SEQ ID NO: 214882 - DNA, 393 bp, Gossypium hirsutum
tgacaactttatactcattagaggctacaatttccaaaagagagttagagttagcagggaaacatggaaagccttcgtggactaaacggctcttacttgatgaaaacttcttgtgctcaaaaatccgggaagaagcagatgagttgtgccgaatgctggaggagaaaaaggacagttcatgcattgcctcaaaaatggcagatgtgatctaccatgctatggttttgctaaggcgcaaagatgtaaagatagaaaatgttctagaagttcttcggcgaagattctctcaatcgggtatagaggagaagcaaagccgtgcatcaaccgagagttaaatgtaagctgtacttttgctaaagtctagatttgcagcttttatcccatgcttaggtt

SEQ ID NO: 214883 - DNA, 412 bp, Gossypium hirsutum
cggacgcgtggggttctatccaagacttggttacggtgtttaccttcctccagctgaggaagctgctattgctgcattgaagagagcccttggcgctttgaacactcatcttgcttccaacacatttcttgttggacattttgtcacccttgctgacattatcatgacatgtaacctctacttgggtttctcccagatcatgaccaagagttttacctcggagttccctcatgttgagaggtacttttggaccttggttaatcagccaaaaatcaagaagattcttggtgaagtgaagcaggcagtctctctaccacctgttccttcaaagaagcctgctgcccagccaaaagaaactaaaccaaaggctgaaccaaagaaagaagccaaaaaggaggttgagaaacaggca

SEQ ID NO: 214884 - DNA, 366 bp, Gossypium hirsutum
  unsure (1)..(366): unsure at all n locations
catagatggaaccaacatgggcttggaggggacaattacagaggattgtgtagagacttacatcctggtccgactagtttgttgcattggagtgggaaagggaagccatgggcgagactagatgctaacagaccttgtcccttggatgctttttgggctccttacgatttgctgcaaacatcctctgctttggagtcttaaaaatattggtgtatatcataccaataaatctttctttttgttgttgctattttttgtctatatgtgtatatgggaaaaatatgatctcagagtcagctttctgaagaagagaaattatcaagatgatcttccctttctccaaaaaaaaaaaaaaaaaaaaaaana

SEQ ID NO: 214885 - DNA, 318 bp, Gossypium hirsutum
gcccacgcgtccggccaaacctattctcagcaacgcaattaccaccatcaacctttgccgagaagcttccatccgcattttcttcactcgccactgccacaaatcccccgccgactacggcatgctcggtgagtggtgggacaacgacctcatcttcgacggcaccgttgattccgaactgatccccgagatcggacggctttcgaaacccgacgaggtggttgagaaaaacacgtacagcgcgttcgagaacacgcgactacatgagatgctgatggagaaaaaagtggaggaggttataatcacgggggtcatgac

SEQ ID NO: 214886 - DNA, 403 bp, Gossypium hirsutum
  unsure (1)..(403): unsure at all n locations
gtggcgttgagagaaatcaggaagtcccagagaagtcccgaccttttgatccgtaaccttccgttccaaaggctagtaagggaaatcgctcaaaatttcaggacggttctgaaattccaaagtagggcggtggcggttttacaagaagcggcggaggttaatctggttggcctgtttgaggatcccaatctctgggctattcatgccaagagggttactattatgcctaaaaatattcaactggctcggaggattaaaggagagagagcttaaataatgtatatggtgatttgctttgaatgatttatgcttttaggatctgnnngtgtatgttttctctagatgtagatctctcagtttagtggttnngtgtcagtgatgatgaaatgaaagtttggaaaga

SEQ ID NO: 214887 - DNA, 378 bp, Gossypium hirsutum
cccacgcgtccgatgaatgcaaaggttgtattttgcatccacaacatagcctatcagggaagatttgcctttgcagatttcaaacgtctcaatttgcctgaacggttcaagagttcattcgatttcattgatgggtataacaagcccgtcaagggaaggaaaattaattggatgaaggctggaatattggaatcacatagagtcttgactgtaagcccatactatgcccaggagcttgtatctggtgaagacaaaagtgtagaacttgataacatcattcgtaaaactggcatcaccggcattgtgaatggcatggatgttcaagaatggaatcctgcctctgacaaatacatcagtgtcaaatatgatgcaacaact

SEQ ID NO: 214888 - DNA, 405 bp, Gossypium hirsutum
aagacactcactgaatggttttctccatgtgagaaactaggaattgctgctgagcatggctacttcttgaggctcaagggagacgtggaatgggagacgtgtgtaccagccgtggactgtgcatggaagcagattgcagaacctgtgatgaagcaatacatggagactactgatggatcctacatcgaagataaggaaactgcccttgtctggtgttatgaggatgcagatccggattttggatcatgccaagctaaagaacttcttgatcatctcgaaagtgtgctggccaatgaacctgttacggtaaagagtgggcagaattttgtcgaggttaagccacagggtgtaagcaagggtctagttgcaaagcgcctactctccacaatgcaagagaggggtatg

SEQ ID NO: 214889 - DNA, 220 bp, Gossypium hirsutum
ctcagttgtaagaggttgcgatagaatcgttcctgttgacatctatgttcctggttgtccagccactgcggaggcgttattgtacggagttcttcaattgcagaaaaagatcaacaggcgcaaggatttcctccattggtggtccaagtaagaaaatttgcaagttatttcagggctatttgcactgcattttgcagtgttgagtaacaaataaattaaa

SEQ ID NO: 214890 - DNA, 373 bp, Gossypium hirsutum
  unsure (1)..(373): unsure at all n locations
cccacgcgtccggtgaattaacctgtgacttagcaacccatgtcttgtgccatccttgtgccgtttgtcaggaaggtcgtgagattcgtcgaaggttgcaccatccagggttcaatgctcaacctgtctttaccatggtccctcctggcgagcaaaccatggcccgtggagcctaatttcatgttctgcccattccctaccttataactaaaggtaatctagtagctagctcaacaacattttgttgcgtgatgtctatgttgtgaaaaatatattgcgtgtaatgtgttgtggaaataaagttaaaaagcagctttatgttacattttctagtatgaaagttgattgctctgntatgggcagatcatataca

SEQ ID NO: 214891 - DNA, 302 bp, Gossypium hirsutum
cccacgcgtccgcccacgcgtccgccagttttggacactcacggttgggaccatgattgtggctatgatggtgttaatgttgaacatagtccagcaatcgctagccagtttcctgctacagtttccgttcaactcaccaaggataagaaagagtttaacatccatttggactcttcagtttctaccaagcatggtgaaaatggatcaaccatggctggttttgacatccaaaatgttggaaagcaattagcttacattttcagaggggagaccaaattcaaaaatctcaaaaggaacaaaac

SEQ ID NO: 214892 - DNA, 182 bp, Gossypium hirsutum
caatattttagccggtggggcattcgacggagcctcaatgaacccagccgtttcatttggaccagccttggttagctggtcctgggaaaaccactgggtctactgggctggaccacttattggtggtgggctcgctggtctcgtctatgagttcatcttcattaaccagacccatgaacaac

SEQ ID NO: 214893 - DNA, 326 bp, Gossypium hirsutum
tcgacccacgcgtgcgcccacgcgtccggcagctcctttgagtataatgaggtcggtcattcacaccaaaagtgtggagttcatgccattcactttatcatttttcctcacctgcagcgccatcttgtggttggtttacgggctacttcttaaggacttttatatatctctcccaaacattgtgggagttgttctaggaacaatccaaatgctactatatgtagtctacaaaaagttcaataacaactttgccaaagaccatgaaaggaagcaaccgtcgccgactgtgaacggaaagaacatgaatcatatcaaagcttcaaata

SEQ ID NO: 214894 - DNA, 375 bp, Gossypium hirsutum
gacccacgcgtccgcccacgcgtccgggcaaacagatacttcactggcggctgctcaacaaaggattcaagagcagttaagtgctgttactgcagatatggtgatgctatctaccaatgaagagaagaaaaagtcagtgaagaagactgcggagcctgatgtcaaggtacatgagaaatgtttcaatacccacgagaaacttgttaacgagataaaggaacatctcacgaaagggtcttctccaactcagcttaaatccttcctaggttcactctctggaacttcccaagaaatcatggatgctcttttcacagcactctttgaggatgttgggaaagggtttgctaaggaagtaactaagaagaagaactacct

SEQ ID NO: 214895 - DNA, 329 bp, Gossypium hirsutum
ctgtgaacgatgtggttatatttctagccagttgacatatgcttttaccttgcctgacacgttataattgtttaaactttagcatgcatttgatatgcctaatttatgataaagttctgccttgtactggagtggttaaagcactgatagctgtctgcagtatagttaaaactgatctgatcttatacatggtatacagaaatggtgcaaagcttgtgtcttgctggaggggctgaatcgaggtttaccaaagcttggcattggtcgtaatcaaggcctaaatagtgatggtaagaaagatagaaaaagagatagcagaacgccaagta

SEQ ID NO: 214896 - DNA, 244 bp, Gossypium hirsutum
cccacgcgtccgagttgcaaagctttctcagttggaactaccgtttaaagaaattactagaaactataggaagcaactgcaaggtagacccgaagtttactgcagtgtatttgttgacagatcatcaacacaacagaacgggagaaccaggcaggatcatgttggtattgtcgcattttacaatacaaaattcattcctgccataaaatatttgcttgaagaacttgatctttccagaacgact

SEQ ID NO: 214897 - DNA, 422 bp, Gossypium hirsutum
cacgcccgtccgatataatattggaggaatcaatctcatatattacaatgtatgcgcagatcgtactttactgcgtggcgagtccaatattcaatccactgcatatatatggaccaccccattaatcaggaggctctatgattagaaacagaggtatatgtgggatgccatcaatggatgacccaagtaacatactctagctcatgattgccactacgaggggaccagtgcagatgattgtgcagatgataatctgcaaaaaaggacgctgaccatacacggataatcgatggacaaaccctagaatgggggaaatgaacttctcttttaaaactgtctgtaacatgcggaaatgcaacacacctaagcctggacactaagcttgcaaacaagataaaaattcaaaacaaaaaatgccccca

SEQ ID NO: 214898 - DNA, 367 bp, Gossypium hirsutum
cccacgcgtccgcctcaagccgatcctttagccatagatttgttgcaaaggatgcttatttgcgacccgtccaagagaattactgtcacagaagcactccaacatccttacatggcaacactatatgatccaaggtgcaatccaccagcccgagtcccgattaatctcgacattgatgaaaacatgggagaagaaatgattagggggatgatgttgagtgagatgcttcactaccacccagaggctgcatcaacaaatgcttacaccacattgttttagctttgcttacaaaaacagtattggtattggtatagagaattctactaccttggagcttaccaattgagcaaaacattttgtctttaac

SEQ ID NO: 214899 - DNA, 379 bp, Gossypium hirsutum
  unsure (1)..(379): unsure at all n locations
ggccatcgcagatttctggggtacaagcagacaatattattggaccgaaggcttttggttgatctgatagaccagtacaatagtggatccctaagttggaatgagttctcaaatgccgggaaggaatctcacaaatatcggaaggggcaaccaacacaaagatcggtgtttcccgacaggcctaaagaagaggattacttctatgccaacccagaagaatgcttgaaaccatcatcatatggtcaagtgagtagcacgtgatctttctatctggggattgtcacgaatattggtgtttttnctttttctagcgtgctaggcatcatacctaaaaccttaagtagtttccctgcacaagtatgactacaatgaaggtttt

SEQ ID NO: 214900 - DNA, 322 bp, Gossypium hirsutum
gtcttgccgacgctgaaggtgcaagggtttgtggtgtttctcggatcatggctgttgatgtgaacggaaaacaattcgaagaagctaacaggtttgggattacagaattagggaatccaaaagactactatcagccatttaaagaggtgattgtggagatgaccgccgtaggagtgaatcgcaatgtggagtgtacagggagcgtccacccatgatttgcgttttagaatcctcccatgatgattggggtgtatggtgctgttggatgtgccaaaaaaagacaatgcattcaaaactcatccaatgaatctactaagtgaga

SEQ ID NO: 214901 - DNA, 336 bp, Gossypium hirsutum
cccacgcgtccgcggacgcgtggggaagagactcttttcgcatggaagaataggttgcgaagctggggctatgaaccggtcttttgcagtgttgagaccaaaaacggacttgattctcttgcattttacttgagggatctaacaactgtaattgttggtcctagtggggttgggaaatcaagccttatcaatgttcttcgaagtgatcaccgcgctactgattcccttgaaggagataatttgtttgatcccatttcaggcagcaagtggtttgaagatcagagggttggggaggtctcgacaagaagtggcagagggaaacacactacgcgacat

SEQ ID NO: 214902 - DNA, 368 bp, Gossypium hirsutum
aaaacatcaatttcctttgataaattgttgattggagcagcaagagaagcagtgaaggcacaatgggaactcattctgttaaagaagaatactattgataatttaaggtggaaaggttactgtggaaagaatgggatcttaactgaaacactcaagtcacgtgtcaagcaggaaggtatgagaagggaatacctctgtagcacctttcagacaaagaggaaggacaaaaacttcaattctactagcaaaagggaatgtagcatatgttactttgatttgcacctctcagcagtgcactgttcatgttcttctcatagatatttgtgtttaaatcatgcaaagcggctttgttcttgcacatggacaga

SEQ ID NO: 214903 - DNA, 332 bp, Gossypium hirsutum
  unsure (1)..(332): unsure at all n locations
gtttgccaaatacatgctctttgtcaaggatattcttagaaggatagaagaaaaccgtggggttactgtaactgattctggagtcccagatgtaaaacctgctaccactgccaacgggctttaatctcaagtcttgagcaaagcaaatggaactgtggcttcttgcaaaaagcacccaccatggaatgaaaacctgggttcctactaccaaagcagcttgcaatgccagtcacactgtcccacagcctnccaaggacaatttatcctttcactctattttgggtgatcagtcaattcaatcagcacccacacaatctcaatcttccttaata

SEQ ID NO: 214904 - DNA, 424 bp, Gossypium hirsutum
cccacgcgtccgatccatggcgtgaaaagttggccaagtacaaagtagagttatcaaagggagtatggggctattgggaacttggagcctggaagcctctaggcatcagtgccaggcatcgagccagactccgaaaagaaatgcttctagcgggccaagattggccatacgatccagagaagaaagagatgagaagcaagatgaaaggtcacaagtgcgacagaatagccgcggagagaagggagaatactgctaatttgatgcagaaaatgcctgagatgttgcttgcttataagaaacgcagatgggagaagaaaatgaaggaagaagagaaagctaaagataaataaatctgcatttttttccttatttgggtggttgagaacaaaagaaaaatgttgaatcttgtactaatgaattcaat

SEQ ID NO: 214905 - DNA, 352 bp, Gossypium hirsutum
cggacgcgtgggcggacgcgtgggctcttttctcttggaaaaaaataagaccaccttgaagtaggaatactgaaatagtgatggaaggtatttcagcgaccatgtacaagaacttgacagggtactggaggaggagaggctacgtgaagctaaatggtacgagtggagcacggcggagtcgggtggagctgggctcctcacggcggaagaggttctggaagatcaggatcaaggcaaagctgagaataagatcgccgaagaagtggttggtttggctacgtgatgcgtacatgaaaatgatgctggggttagccaactccaggatggtaagcagtgggtatggaggtagcat

SEQ ID NO: 214906 - DNA, 375 bp, Gossypium hirsutum
gtttgacagtgtaagtgaatttcatggcaggttgcatcatggtgggactatggttaccaagccactgccatggctaatcgcactgttatggtcgacaataatacctgaaacaatactcatatcgcaactgtcggcactgccatgtcttctactgaaagggcagcttgagaaattttccactccttggatgtcaaatatgttcttgtagtctttggaggtctcattggttaccccagtgatgatattaataagttcctgtggatggttcgaatcggacgtggtgtctttcctcatatcaaggaaccagattatcttagagaccgacaatatcgaattgactcccaggccactccaaccatgctaaaatggctaatg

SEQ ID NO: 214907 - DNA, 377 bp, Gossypium hirsutum
cccacgcgtccgcccacgcgtccgaacaaggtaagggctgttagggctggtattgtgccaccattgatgagactgttgaaggatgctggaggtgggatggtggatgaagcattggcgattcttgccattcttgcaagccatcatgaagggagggcggcaatcggtcaggctgacccgattcctgttttactagaagtcatacggactggttctccacgtaaccgggagaatgccgccgccatactctggtcactttgcaccagtgacttagaacaattaaaaatagccaaggatttcggtgcagaggaggcattaaaggacctgtctgatactggcaccgacagggcaaaaaagaaaagctgggagtatcttggaac

SEQ ID NO: 214908 - DNA, 347 bp, Gossypium hirsutum
ggtgccttgaacgtggatgtaacagaattccagaccaacttggtcccttacccaagaatacacttcatgctttcttcatacgctccagtcatctccgctgagaaggcttaccatgagcagctatcagttgctgaaatcaccaatagtgcctttgagccctcatctatgatggccaagtgtgatcctcgccatggcaagtatatggcttgctgtttgatgtaccgtggtgatgttgtgcccaaggatgtcaatgctgctgttgccaccatcaagaccaagagaactattcaattcgttgactggtgcccaactggattcaagtgtggtatcaactaccagccaccgac

SEQ ID NO: 214909 - DNA, 425 bp, Gossypium hirsutum
gaagagcttcctttttttttttctctccttttccaccgccgtcgatctcgatccttatcctcgttttcaaacaagctcgaaaaagatggccaacgctgcatcgggaatggctgtgcatgatgattgcaagttgaagttcttggagctcaaggcaaaaagaacccaccgcttcattgttttcaaaattgaggagaagcaaaagcaagttattgtggagaagcttggtgaaccaaccgaaagctatgaggattttactaaatgtctccccgctgatgaatgtcgatatgctgtgtacgattttgattttctaacggccgagaacgtaccgaagagcagaatctttttcatagcatggtctcccgacacgtcaaggatcaggagcaagatgatttacgccagcttcaaagatagattcaagcgagaac

SEQ ID NO: 214910 - DNA, 327 bp, Gossypium hirsutum
  unsure (1)..(327): unsure at all n locations
ctttatgatcctccttattatgaatggtatcaagtcaacgagatagagtgtgttcatttcgatgaatgtattgcatgcatagaagattatatgattaaacatggtccctttgatggtctactgngtttttcccagggtggaatgctagcatctgtggtgcctccaatgcaaagagagggtgccgcttttactagtgtgccaaagataaagttcgtgatcataatatcaggttttgaacttcgagaattgaagtctgggccgccgaaattgcttgctaatgtttattcagttccaattgactgcccatctcttcatttgattggagac

SEQ ID NO: 214911 - DNA, 320 bp, Gossypium hirsutum
  unsure (1)..(320): unsure at all n locations
cccacgcgtccggctttcggttcatctgaatcgcatcaagagttggctgtagttcctgcaaattcaactgtttattatgaggttgagatggtctcgtttgtgaaggagaaagaatcatgggaaatggatacaccgcagaagattgaagctgctgggaagaagaaagaagaagggaacgcactaatcaaggctggtaaatttgagagagcatcaaaacgatatgagaaggctgntagcttcatagagtatgactcttctttcaacgatgaggagaagaaacaagcaaagttgctaaaagtaaattgtaaccttaacaatgc

SEQ ID NO: 214912 - DNA, 159 bp, Gossypium hirsutum
acccttccgcgaccccttggccgaccccttggatcctggacaaattggaaacggatatgccccaatcctcgactggcacaccttacacattggtgttaagtttgctgaacttttgaccaaaaatgacaggcgatcttgtgaggagctttagaaggaacc

SEQ ID NO: 214913 - DNA, 378 bp, Gossypium hirsutum
atggacggaggcttgtatgagcggtaccctcagtatagaaggtacttaaaagaggccgtagccgagcttcttggaccggaaacatcccaaaacattgtgatagagcactccaaggacggatcagggattggggctgctctcttggccgctacaaactccaagtatggtcgaaatctttaggtaaatcaacctcatagtttccgaaaggaaaattattgcttttgtattttatcgaaaaaaaaaaaaactggggagtaattgcaattttgttagaatagagtgtaaaactatatgcaagtcagattttaaatccagattgtaataatttgtattgtgtattagtaaagccaataaagatggaatcaatgaatttattct

SEQ ID NO: 214914 - DNA, 405 bp, Gossypium hirsutum
  unsure (1)..(405): unsure at all n locations
agcttgaatccgatgagaaggagaaaattgaagcagccgtgaaggaggcccttgagtggcttgatgacaaccagaatgctgagaaggaagactacgaggagaagctcaaggaggttgaggctgtctgcaaccccattatcacggctgtttaccaaagatctggcggagccccaggggctggaggatcaaccgaagaggaggattcgcatgatgaactttaaaaatctcttagcaatatcgagggttggtgatgaacaagcaagagtgaggatgaggagagcgtanggtagttaagacgaggatttttgaaaattttcttcatgggataatggcccccctgcccccctttctttgctggttttttttggtttttttccccttaatttaatttaattttgggggaaa

SEQ ID NO: 214915 - DNA, 401 bp, Gossypium hirsutum
gaagaggtcacactggaagcggaagtgacgaataaaggagcactggcactttatgggcgtcttgggtttatcagggcaaagcggctttttcactactacttgaatggtgttgatgctttccgtttaaagctattatttcctcctcctcgccaagtattgtagccatgataacaaacggggatgcaagttatgaatttcgatccagacacttgaagaatgtgcaatgctggtgcttatgaatgtttaaggttattgctattaggtcctataaatttaagtacatcttctaagattatatacagtaatatattttcgtttaatatgctaaaaacgatgaataaagttgtccactggtaggatataatatgtatactcttgatttagtcaattcatttagactt

SEQ ID NO: 214916 - DNA, 245 bp, Gossypium hirsutum
ggctgagcgaatttgcggtttgttagttcgtgtgtgaaagaggtaataaaaggaaaaaaacgatgggtgttttcaaatttgtgtgcaggagcaaaggcggtgagtggtctgccaagcagttggagggagagattgaaagctctgctgcttccacttacgagctccagcggaaactcgtccaggctgccaccgcctgcgactcctctggtggtgtcacctcctctttctctgtcgttacccctaat

SEQ ID NO: 214917 - DNA, 207 bp, Gossypium hirsutum
gaccaatagaggtctgacttctgaggaagatgaagaatctatatttgtggatcaatcaaagcgtggaaaatatttgggatttatatggtgaaacatatagacaatcccaccattgatgatgtattacaacctggaaataatctcgtagcagcccgggtattgtatgtacggaaagcttcctgcacgtttagtgctaaagtacctggg

SEQ ID NO: 214918 - DNA, 348 bp, Gossypium hirsutum
gctaaacagtatgcatacattccgctcaagaaccagaagcagaagattctcatttcaggaacgtagctctgatctgcctcaagcgcatttgtggtattctactcatgaggttgtcaatgctttaaagctcttccttgcggctggaaatgatttagctgggagcctcacatatagatacgacttggtcgacttaacacgtcaagtgttgtcaaagctagcaaaccaagtctatttggatgcaataaatgctttccgaaggaaggatgtcaaagctttgaatattcacagccagaagttcattcaactaataaaggatattgatgtactactagcttctgatgacaattt

SEQ ID NO: 214919 - DNA, 346 bp, Gossypium hirsutum
caaaaagatcttccagtcaccatttatgaaagtgaaaaatttagtaagaatacagaacaaagcaggcgagagacattcaatgtactgtttggtggctagtaagcaaatggttggcatatttctcacaatttggatgagaattgaattgagagatcatgttaaaaacattcattgttttttccttgttcattgtttactgaaatattctttcagtaaacattcattgtttactgaaagaatattacactcttttgcttataatttctgacatgataatttttcccttttgtacaaagatgaatgatgaaaataactttatcaatggcacatctttgcattcgtcctg

SEQ ID NO: 214920 - DNA, 408 bp, Gossypium hirsutum
cggacgcgtgggttaagctcacagctgatcaattgaacaccctgaaagccaaagctaatgttgcaaatgcaaacggtggtataaaatatagcagcttcaacatcttggctgcacatatatggcgttgtgtaagtaaagcaaggggtctcccagctgatcaagataccaagctgtattttccagtcgacggtcgatatagattggatcctccgctcccaccaggctacttcggcaatgtaatctttacgactgcattaattgctcaagctggtaatctcgaaaccgaatcgtttactgacaccataaagaggatccatgaaggattaaatcagataaatgatgaatatttaagatcagctattgattacattgaaaaagtgcctgatttaaacaccttggttagaggac

SEQ ID NO: 214921 - DNA, 410 bp, Gossypium hirsutum
tgactggagaaatgacactgagaggtcttgtgttacctgtcggtggtattaaggataagatactagcagcacaccgtcatggtatcaagagagttattctaccagagagaaatctaaaggacttagttgaagtacctgcgtctgtgctttccaacctagagattctgctggccaagcgaatggaagatgtgttggagcaggcgtttgatgggggatccccatggagacaacactcaaaattatgacaaagctgcttcaagcatgtctctggtgaccaaattgtttgttcggggctttgtctgttcacagattccaattatttatagtcttgtttggaaataaagctcagctgtcatggaccttttgcaaataaggcttatatacctctgttgggaagcttcgggtggaaa

SEQ ID NO: 214922 - DNA, 403 bp, Gossypium hirsutum
  unsure (1)..(403): unsure at all n locations
cccacgcgtccgcaaaacaatttcaaaattttaaatattctttttttttgatcgatactggattattatgtcagaagaagaaaaggaagccaagggtttggccaagggccggccaaaagccccaccaaggggctctgcgataacactcacaggaaatcacaaaccgggataccccgtgtatatcttataggaggtgttaagcgtatcagtggcttgatctacgaggaaacccgtggagtgttgaagatcttcttggagaacatgatccgcgacgccgtgacctacactgatcacgccaggagaaagacggcgaccgccatggatgtcgtttatgccctcaagaggcagggtaggactttgtacggnttcggtggttagattggtgtttactgttcaggattgc

SEQ ID NO: 214923 - DNA, 410 bp, Gossypium hirsutum
cgctagatcgttcgtggagaagaattacaaggatctcaagactttaaaccctaagcttccaatcctcatccgtgaatgccgtgggattgagccccaaatgtgggctagatatgatatgggtgtcgagaagggcattcgcttggaaggtttgagcgagccacagattttgaaagcactagaagaccttgccaaagcaggggcatcgaccaaagcctaaccatattgctaccattgaatccaaaaggttcgaaataaaactcatgtcttttgaggaactgtttccttttaatggttgttgtgttcttccctctgttttcagccatcataactgattttgtgagatgattgttgaaagttgtcagtatttgtgttctttcccttgcattgcctttgccttgtaaggtttcaaa

SEQ ID NO: 214924 - DNA, 403 bp, Gossypium hirsutum
aaattatttatctcctgactgatcagaacccaattcaagtcattgtcgatgctataatcaacagtggacctcgtgaagatgctactcgtatcggttctgcgggtgttgtgaggcgtcaggctgttgatatttctcctcttcgtcgtgtgaatcaagccatctatctcttgaccaccggagcacgtgagtctgcattcagaaacattaaaaccattgctgaatgtttagccgatgagcttattaatgctgcaaaaggatcatcgaacagctacgcgatcaagaagaaagatgaaatcgagagggttgccaaggccaaccgttgaggcattagacgagattattacaccgtgggcggggagaatttcaattgttttaatcagtactttatgggctatctattatt

SEQ ID NO: 214925 - DNA, 409 bp, Gossypium hirsutum
  unsure (1)..(409): unsure at all n locations
cccacgcgtccgggttctttgaagaggaagccaaggttgaggccaatggtaatgatttccgctacctcccctttggcgtggggagaagaagttgcccaggaattattcttgcattgcccatccttggtattactttgggtcgattggtacagaattttgagctcttgcctccccctgggcaatctcaaattgataccacggagaaaggtggacagntcagtcttcatattttgaagcattccaccattgttgctaagccaaggcaattttaacttgttctcttctatccattttagtgaactcttgtaagacagtatgaaacattattcagttgaaaatatttgtgaggtgtgacaatgtaaatccatgaatcaatcaagatttgcaataagattaatattttcccttc

SEQ ID NO: 214926 - DNA, 412 bp, Gossypium hirsutum
agaaaatggctactttgggtggaattagccaggtcgatggaagcgccaatagcctggagattgaaaacctcgctcgttttgctgttgatgaacacaacaagaaagggaatacgatgctacagtttaagaaggtgacgaatgtaaaacaacaagtggtttctgggactatgtattacataacattggaggcgatggatggtgacaagacgaaagtttatgaagccaaggtgtgggacaagccatggatggatttcaaggagttacaggatttcaaggttattggcgatgctcccgccggttgtacttccaccgcttaaggtgactggagattgtagaggaaaggatatcaggataccgaatgcgggttttaaataaatgtaactgtcttatgttaatttggatttagactact

SEQ ID NO: 214927 - DNA, 405 bp, Gossypium hirsutum
cccacgcgtccgctgtgggatatgtacaggttttggggccactgtgaatgttgctaaacccaaaaagggtcaaactgttgcagtttttggactgggtgccgttggtcttgccgccgctgaaggtgcaagggtttgtggggcttctcggatcatcgctgttgatgtgaaccccagaagatttgaagaagctaagaggtttgggattacagaatttgtgaatccaaaagactacgataagccagttcaagaggtgattgtggagatgaccggcggaggagtggatcgcagtgtggagtgtacagggagcgtccaagccatgatttccgcttttgaatgcgtccatgatggttggggtgtttgtgttctggtgggtgtgccaaagaaagacgatgcattcaaaactca

SEQ ID NO: 214928 - DNA, 361 bp, Gossypium hirsutum
gtttcgatatttgtattaagaatcgccctttagtgatcagtgaggtgaagaaaaatgtcttgctgtggtggaaactgcggttgcggctccggttgcaagtgcggcagcggctgcggcggttgcaagatgtaccctgagatgaactttgctgagcaaaccacaaccgggacacttgttcttggcgtggcaccccggaaagtgcactttgatggagctgaaatggaaactggggctgaaaatggctgcaaatgtggagataactgcacttgcaacccttgcaattgtaaatgagaaaaaaaagctaagcatattatggaagctgatctaaataatatatgatgtatttgggtttttactatta

SEQ ID NO: 214929 - DNA, 417 bp, Gossypium hirsutum
cgagaaaatatgatgcagatgggaaccttagggtaccatatcagatagtgacgacgacgatgaattcacctcctggtttcactttatctccttcatctcctactgagttctcatcacacaagagaggtaaaggaaggtccccagggaactggcagcttcttgcttctctaggtgagttgtttgctcacacggccggcggagacttcacggcacatgtggtcaaagttaataccggggaggatgtagcaggaaaagttgtgtcattatcacaaaagggtcctcgtgggatttgtattctatcagcaaatggagctgtttctaatgttacccttcgacaacctggttcctctggtgggattttatcattcgaggggcgttttgagatattgtctctaaccggttcatttacattcactg

SEQ ID NO: 214930 - DNA, 411 bp, Gossypium hirsutum
ggtttctgccacgactggtgttgctaacaaccccgagattttcgacataatcggtcattttgccgacccaaagccaggtgcaacattgcctaaaacacccattgtttgcaaaccacaagatagtgccattgaacttgctctcaagattgccaaaatcaatcctcaaagaacattgttctttgacgatagtgtccgtaacatccaagccggaaaacatgtcggtctacacactgtgttggttggtacttcccaaagaccaaaaggtgctgattacgcattggaaagcattcataatatcaagcaggcattaccggagctatgggaaactgatgtcaaatccgatgttagttacgccggccaagttgccgttgagacatcggtgacagcttagatcctatgtttatgtttaga

SEQ ID NO: 214931 - DNA, 422 bp, Gossypium hirsutum
gttgtcactcggtggggtgtcacgcgtctgccccgtaagacccacagaggtctgcgtaaggttgcttgtattggtgcctggcatcctgccagagtctcctttacagttgccagggcaggtcagaatggataccaccaccgtactgagatgaacaagaaggtctacagggttggcaaggttggtgatgagacccactctgccataactgattatgacaggactgagaaagatattaccccaattggtgggttccctcactatggtgttgtgaaaagtgattacctgatgatcaaaggagggtgtgttggacctaagaagagggtggttacacttcgtcagtctcttattaaccagacatctcgtgtggctctggaggaaatcaaactcaagttcatcgacacctcctcaaagtttgggcatgg

SEQ ID NO: 214932 - DNA, 416 bp, Gossypium hirsutum
ggatgtcttgatcattatgcaggaaccagttattccaggatgctttcttcgcgctaaagctataggtctgatgcctatgattgatcagggtgagaaagatgacaagattattgctgtctgtgctgatgatcctgagtatcgtcactacaatgatatcaaggaactcccacctcaccgcctggctgaaatccgtcgcttctttgaagactataagaagaatgagaacaaagaagttgctgttaatgactttctgcctgcctctactgcatacgaggcaatccaacactccttgaatctctacgcggactacatcgtggagagcttgaggcggtagttgtcgattcaccgtgccccgtctatatacaaatatatatattaatatgaatatgaatatgttgctgctatacaagaaattc

SEQ ID NO: 214933 - DNA, 415 bp, Gossypium hirsutum
cccacgcgtccgtgggaagaaagaagaacgattagatcataaaaaaagtaaccaaatggaatgcaaagcaacacactccattgaagaacttactttctgaacccaacagtgaaacaaaaccgatgtccccgaattcaaaacaaagcgccacaccagttgtgggtcaaaattatgataaagtaggtgaagataatgaagatatgggaggtaaagttagctcaactgcgggccctgaaacaccagtagctgagccaactaacattgaagtagagaaagaatggagttcgccggcaaggttccctgccgagattaagcgagagaaaaggagagtaaaaggtaggccattgtggtttcaatttgtatgctgctcatctataaattaggatcataaaaggctctaaagactttaaagttt

SEQ ID NO: 214934 - DNA, 406 bp, Gossypium hirsutum
gaaccggtttcctcccaaactgacgttctaactgatcaaagtctatcggagtctagagctatagttcctgttccagcaatgaatgttgaggcactagctgtcatccctgccagcccaaaagtccgaaaaaccgaacttgcacagcgtcgaactaggaggccgttttcagttttagaagtagaagcattggtacaggcagttgaggagcttggtacggggaggtggcgtgatatcaaactgcgagcttttgagaatgccgatcaccgaacttacgtggatttgaaggataaatggaaaacattggttcacacggcgaaaatttccccacagcaaagacgaggggagccagtaccacaggaactgttggacagggtattagctgctcatgcatactggtctcagcatc

SEQ ID NO: 214935 - DNA, 413 bp, Gossypium hirsutum
cccacgcgtccgcccacgcgtccggtgaactcagaggacataaaggaaactgggtacacatatatcatgccaaagaacattttaaagaagttcatctgtatagcagatctcaggactcaaattgctggatacttgtatggaataagccctcctgataacccccaggttaaggaaatccgatgcattgccatgccaccgcaatggggtactcatcagcaagttaatcttccatcagctcttcctgaacatgatttcttgaatgatctggagcctttgggatggctgcacacacagccaaatgagcttcctcaattatcgccacaggatgtgacatcccattctcggatattagagaacaacaaacagtgggatggagagaagtgcataatcttgacatgcagtttcactcccgg

SEQ ID NO: 214936 - DNA, 408 bp, Gossypium hirsutum
attgatcaagagagttcttgacaactttgtcccagacgagttttgccctgatccggttccagatgttgtgcttgaagccctggaggctgaggatcctgccgaagccagggaagggtttgtcacaagctttccctatgttgcatctcctccaatttattcaccgccttctgcaacatcagttgctagcatcattggtgaagttggtagccaatctcagctgagaagaagtcggtcatcggtcctcagaaaatcatacacaagcgacgatgagcttgatgaattgaattcacccttggcttcaatcttcaatgatggcttccgatcctcacctgttcaatcgaaacctatctggatatcgaaggggaacaactaccaaaatgctattagatatgaactcctaagagatgt

SEQ ID NO: 214937 - DNA, 358 bp, Gossypium hirsutum
cggacgcgtgggcgagaagctttctcaagattcttcgaggctcgcacgctataacaagaagcccaccatcacctcccgtgagatccagactgccgtaagatggtcctgcctggggagttggccaagcacgctgtttccgaagggactaaggctgttactaagttcactagttcttagtttccgtaagtctaaaatgccaaagaattgtagttttgtataatttattttatttgagagttgcatttagttagtttaagatatatttttcatgcctttttgattagtagaaaaggttggtctcaaagaaatgaaaggtggattttattattaatattaaaaaccatttgggccttacatt

SEQ ID NO: 214938 - DNA, 408 bp, Gossypium hirsutum
gggaactacagggaagaaaatggatgatgaatatcagaatttcttggctgagctaggtggtactgtccctgattcagctaacaagcaaaactcttcgtcagtcagttctggaagcaatcctccttgggctagcagcactggaggtgctggaagtgcacaccctggcttaggttccaatgctgttaagccccccaaagaatatgatgatactaatttgtacattggatacttgcctcccagtcttgatgatgatggtttgattagtttgttttcagcttatggtgatattgtgatggcaaaggtaatcaaggaccgggttactggactgagtaaagggtatggttttgtgaagtatgctagtgttgacatggcaaacaatgctattaagggaatgaatggtagtcttct

SEQ ID NO: 214939 - DNA, 391 bp, Gossypium hirsutum
  unsure (1)..(391): unsure at all n locations
ggttgcttggcttcgagcttcgtgatggggctgtcggcttggtttgtttgggttgaaggtgggttccacgttaaaccgacggctttgtctctttatttgggttacttaggattgagtatggcttggcatccgactgtgctttggatgggagctagctgggctgggttgcttgtgagtttggcgatggttgggaccttggtcgggtgttcaagagattttggaaaggtgaatccgattgctggtaactcggttatgccttgtttggcttgggctgcgtttttggcgactgtaaatctaaaacttgtcttcctttgaagcatataccaccatcttttgttctgcaagaaatagtattgttttttttttccctcttatgaattaanaaatttaa

SEQ ID NO: 214940 - DNA, 418 bp, Gossypium hirsutum
acgaattgtccctgttaaaatatgtcactgtgattattaatggccaccgctgaacctggggttggagtcactgagcaacagcccgcggcagcagaggagccaaagccggcggaaaagcctgagaaggagaagagacccatagctccaaaggagaaaaagcctaagcaacccaaatccgcagcacatcctccttattttcagatgatcaaggaggcgcttttggctttgaaagagaagagtggatcaagtccgtacgctatagcgaaatacatggaagagaagcacaaggcggtgcttccagcgaatttcaggaaaatcttaggtcttcagcttaaaaactcagctgccagaggcaagctgataaagatcaaggccttttacaagctcttcgaagccggcaaaaaagagagagcccctg

SEQ ID NO: 214941 - DNA, 401 bp, Gossypium hirsutum
aaagcattatactcgtactaagaagaaactagttgtaggcagctattatatcgtttctcctttctcccttctcttaagagtagaatgattattggaaggttacgccaatggttaagtctactggtctgtgtgcttgctgttatactactcaaatctgaaggcgctagtgtagggattacttatctgcaggatgccgtagcgaaaggagctgtttgtttggatgggagtccaccagcttaccattttgacaagggctctggcgctggacttgataattggattgttcacatggagggtggaggatggtgtgaagatgtgccgacttgcctctctcgtaagaacaccgatttagggtcatcaaagcaaatggtgaagcaatttggcttctctggactcttgag

SEQ ID NO: 214942 - DNA, 390 bp, Gossypium hirsutum
cccacgcgtccgcccacgcgtccggccatgtacaggaagatttacagaggagatttcaagtgcccaccttggttttcccctgaagctcgtagattaattactaagcttttagatcccaacccaaatacccgaatcaccacttcaaaggtgatggactcgtcttggttcaagaaatcaatacccaagactattagaaccaaggaggagctagaatttgaagccttcaatggcgagaaatcatccaagcctgagactctgaacgctttccatatcatttccttatccgagggcttcgatttgtcaccgttgtttgaagagaagaagagagaagagaaagaggagctaagattcgctacaacaaggccagcgagcagtgtaatatcgagactg

SEQ ID NO: 214943 - DNA, 419 bp, Gossypium hirsutum
gagattttgtagctgctgccactgatctgcggcccaactgcggtgttaatcgcttgctgattgacaagctctcagttaaaactcctacaggtgaagcaaagttgaaagtcatgaaggaaatagctaaggatcacaacatagaatgggatacaagtgaatcagaaaaggagctgctcaagcctcctgaagagcttattgaggggccacgtaaattcgttagtgcaaccagcgtacctgtgaaacctgctacaaatcattgtcccgaaccaaaagagtctatgaccagaggagaagagggccataatcgttttaaagacacggttgcagctgctgaagcagcagaagaatctgcaaaaaaagcaattgctgctgcacaagctgctgcatatttggccaaccgagagagtaatctatttagt

SEQ ID NO: 214944 - DNA, 413 bp, Gossypium hirsutum
cccacgcgtccgcccacgcgtccggtggaaggaatttactgaatctgaggtgcctattacctttcaaggaaaccatatgaagccagtgcttgatttgatcaatccacaagataaaggtccatggggtgctctctctccaattcccgagaataatgccattgctgttgatcctcaggggggatccatcttttctgctgctggtgattcttgtgcatattgctgggatgtggagaagagtgaaatcaaaatggtatttaagggacacacagactatttgcattgtattctatcacatgcctcttccagtcagattataactggatcagaggatgggactgcacgaatatgggattgcaaaagtggtaagtgcattaaagtaattgacccactaaaggacaagaagttgaggggcg

SEQ ID NO: 214945 - DNA, 404 bp, Gossypium hirsutum
gaaaatatctcaaatctcctcctcctcctcagaaatcttagtatcatcaccatggcctcaaatcccaaggtcttctttgacatgactatcggtggtcagcccgctggtcggattgtgatggagcttttcgcagattgcactcctcgcactgctgagaacttccgtgccctctgtaccggcgagaaaggcgtcggccgcagcggtaagcccctccactacaaaggctcctctttccatcgtgtgatccctaactttatgtgccaaggaggtgacttcacggccggaaacggtaccggaggtgaatccatctacggatccaagttcgctgacgagaacttcatcaagaagcacactggtcccggtattctctcaatggctaacgctggtcccggaactaacggatc

SEQ ID NO: 214946 - DNA, 271 bp, Gossypium hirsutum
gtccttatttgaaatttgctcattttacagctaatcaagccatattggaagctttttcaatggctaatagagttcatgttattgattttgggctaaaacaaggtatgcaatggccagctttaatgcaagcacttgcattaagacccggtggaccaccggcgtttcgattgaccggaataggaccacctcaaccggatgatactgatgcgttgcaacaagtggggtggaagctagctgaattggccgaactcatcgggatcgaattggattt

SEQ ID NO: 214947 - DNA, 403 bp, Gossypium hirsutum
aaaaggattatgaacagacagttaaacaagctaattaagaaagacactgctgcggaaatggctaagaagcgagagcaggagcgccaaagactggaaaaacttgcagaaacaagccgattaagtcgtcaaaggcatcgcagccgcagtaggagttacagtcgctctcctccaagaagatatcgacggagtagaagtccaagtaggagtaggagttctagaagatattattctcggtcacgatcacgatctaggtcccactcttactctcattcacgttcacgctcaaattcccgttcacccagggtaagaagccgttcaaggtactgagaaagtgattgacataaatgttgcaggcaaagctatttgatatattatgtaaagcgatgctagttttgggtagctt

SEQ ID NO: 214948 - DNA, 380 bp, Gossypium hirsutum
ggaaaaaccgggccgacccacgcgaacgaaatggattatgatcagtacttgcaaacaagttttatgaagaaagacactggtgtggaaatggcgtggattctatagcatgactatcaaagactggaaaaacttgcagaacaagatggataattttgcaaatggatctcatccgaattatgagaaacagccggtcttctgtaacaagatataaaagggtgtgacgtacaagtaagactctgcactataaaagatattattttcattcagtgataccttactttatgtgctactgatgtgactttactgcacgcaaaagtaccggaggagaaaccatataaagatccaaattggcttacgagaactttatgaataaacacact

SEQ ID NO: 214949 - DNA, 417 bp, Gossypium hirsutum
ggggtttggtactctcgtttgaatcaaagaaaccataactgtttgttctttttttctccctttgaattgaaacgattgaaagaagaaatgggttcagaaggatcatgtgttgttgtacccaggagtttcagattgctagaagagcttgagaggggtgaaaagggaattggagatggaactgttagctatgggatggacgatgctgatgatatatacatgcagtcatggactgggactattattggccctccaaacactgttcacgaaggatgcatatatcagttgaaactgttctgtggcaaggattatccagataatccacctagtgtgaggtttcaaacccggataaacatgacctgtgtcaatcaggaaactggagtggttgaacctagccttttccccatgcttgctaattgg

SEQ ID NO: 214950 - DNA, 399 bp, Gossypium hirsutum
gcaaaggaagctgttggggaatatggcggttttgcagcactggtggaggcgattgaagatggctccgtgaaggggaaggagttcgcggtgttgacactgttgcagttgtgcgctgataacattagaaaccgtggtttgcttgttagagaaggtgggatacctcctcttgtggcgctttctcagactgggagtgtaagggctaagcataaggtaattttagccgatttggattgccctatgtttgaattaagaacttgaaatagctgtctatagaagtaactttattttgattgattcccataggataaggttgaatgcttgataatcactagatagttgaagcttaaaactgtgtttctaataccaatgcaggttatagtttattgaattgcttgattg

SEQ ID NO: 214951 - DNA, 389 bp, Gossypium hirsutum
catgtatcatctgattccgcgagccccataaaacccatagagcacaacaaaacaatcgagtctgctcctttgttcctttatcaaagacccaggacattttcaaaacacatgatggctatcttcctcctcagattcgcaacgagggcatctggagtttgcagttactcttttatacttcagattagccagggatgggatatagttccaggaaatcctccatatgaggattaaaatcttttgtggtagttgtaaattccataggttcttgtaaaattctttagtttcggtctgtactaaataactattaagctccaaactagcttcttgtaataagttgtatgcgctccgaactgaagactcacctgatttgtcacctttccacacctgca

SEQ ID NO: 214952 - DNA, 301 bp, Gossypium hirsutum
gagaattgcaagaaggaataccccaatgcatttattagaatcattgggttcgacaacgttcgttaagtgcagtgcattaatttcattgcctacaagcctaaaggctactaagttgtttacttccctcctaggaattccatttgtttcaaagttgtacttaaattaagcccctcaaacccccccccgctttttctttttcttttttaaatgaggtatttggcttggggtatttctctttgttttgtttaggatttccaatggaacggatgacaactaatgaataaaaaggtagattcttgcc

SEQ ID NO: 214953 - DNA, 417 bp, Gossypium hirsutum
cccacgcgtccggaaaaaagcttaggagaaattgatcgtgctcgagcaatatatgtatttgcatctcagtttgctgatccacgctctgatgcagatttttgggataaatggagggagtttgaggtgcaacatggtaatgaagataccttcagagaaatgttgcgtattaaacggagtgtctctgcaagttatagccagacacacctcattctccctgagtatctgatgcagaaggatcagaacatcgatgaagctaaggacaaaatgaaacaggctggtatctctgaggatgaaatggctgctcttgaaaggcagatactacctgcggctgataatgctattgccaaagacaactctaggaaagtagggtttgtgagtgctggagttgagtcacaagccgatggtgggttgaaaaca

SEQ ID NO: 214954 - DNA, 409 bp, Gossypium hirsutum
atttaattcccgttttctaatctttttgggaaatcggtagcaaaaaaatgtcgtcgtcggggaggaagatcacccttaagagctcggacggcgaatcattcgaggttgatgaagcggtggcgttggagtcgcagacgattaagcatatgatcgaggacgattgcgctgataacgggataccgttgcctaatgttacgagcaagatcttagcgaaggtgatcgagtactgcaagaaacacgtcgaggctcctaagacagacgatcgatccgccgatgacgagctcaagagttgggacgctgactttgtcaaggtcgatcaagccactctctttgatctcattctggcagcgaactatttgaacatcaagggtttgctggatctcacttgccaaactgttgctgacatgat

SEQ ID NO: 214955 - DNA, 295 bp, Gossypium hirsutum
gaggcactcaaagatagcaccaggattagataccttgacggccacttaaagtgccttctaaaagcaattcaggagggtgttaacatgaagggtcactacatgtgggcgtttttggatgacttcgaatggacttctggatatactcttaggttcgggttcacatacactgattacaagaacaacttgagaagataccttaaatattcagcttattggttcaagaagtttttccttaattaacaacaacaatgtcacaatggattgcaacacaacagaataatagtattacttcatt

SEQ ID NO: 214956 - DNA, 410 bp, Gossypium hirsutum
cggacgcgtgggcggacgcgtgggcggacgcgtggggatggaacatattcgccttcgactaacctcttggtttaacaatcgtcgtgaaacaggaataagatggacctcaattcttgttccctccgccgagaagcggatttcataggcaattgcagatgctcattgctaccaagtacttagagcgaatgaagttgagtttgagatcgtctcaactgagcggacaaacataggtgatattaggagtcgtgtgtgttcctgtcgccgttggcagttatacggtttaccgtgcgcgcacgctgctgccgcacttatttcttctgggcagaatgttcatctgtttgccgaaccttgttttacagtggcaagccaccgagagacctatttgcaaatgataaatgctatcccggata

SEQ ID NO: 214957 - DNA, 407 bp, Gossypium hirsutum
ggctgagctaattcggcatcccaacatcatgtctcaagttcgtaaagaattggactcagtcgttggtcgagaccgcctcgtctccgacttggacttgcccaatctaacctacttccaagccgtcatcaaagaaaccttccgcctccacccgtccaccccgctctccctccctcgtatggcctccgacagctgcgacatcaacggctaccacatccccaagggcgccaccctcttggtcaacgtatgggccatttctcgagaccctaacgagtggaacaacccgcttgagtttcggccctagaggttcttgcccggcggcgaaaggccgaacgctgatgttaggggcaatgattttgaggtcataccgttcggcgccgggcgtaaaatctgtgccggaatgagcttgg

SEQ ID NO: 214958 - DNA, 408 bp, Gossypium hirsutum
caagaccagctaattgacaattctcagcatccacaaagctcaaaaaacgataccaatgttgttgggctggctcttggtcctccacaatcatctatcatagggttccaaaatattggttcttcaatgcagccatcaaatcttaatcctttcaacgattggacgaagaaccacgataagggagttgaggactttttatcagaggaagagattcgcgtaagaagtaatgaaatgctcgagaatgaagaaatgcagcaccttctccgtctttcaatatgggaggtaatgcttccattaatatgacagaagacagtgggtacgggttcccaaattacataccatccccaatgccaaactttgtagacgaagaccgttcacgttctggcaaagctgttgtagggtggttgaaga

SEQ ID NO: 214959 - DNA, 273 bp, Gossypium hirsutum
cccatgcgttcgttcgaaatttccttttctttttcgattttttcctccgatttgtatttgaagtgatggatgcaggatcaaaggtgaagaaaggagccggaggaaggaaaggcggcggtccaaagaagaagccggtttctcgttcggtgaaagccggattacagtttcccgttggtcgaattggccgatacttgaagaaaggccgatactctcaacgtgtgggaaccggtgctccggtttaccttgttgctgttcttgaataccttgctgctg

SEQ ID NO: 214960 - DNA, 408 bp, Gossypium hirsutum
gtaatgcacaaaatattaaggataacaaaggaagtgaggaaagaactacaatcaatcatgtggaagtatgttgggattgttcgatcaacttcaagactacaagaagccgagcaaaaaatcggtaagttggaagccaaatgggaaacatacttatttgagcacgggtggcagcaaacaatggttgccctcgaggcttgtgaaatgagaaacctcttttgttgcgcaaagctagtggtgagcagtgccctcgctaggaacgagagtcgtggacttcactacatgaccgattttcctcatttggaggaaagcaagaggctacctacagtgatattcccgagttcccatacaaccggcacatggagttcacgacaactacaccagcagcctatagttaagtccatggtctga

SEQ ID NO: 214961 - DNA, 357 bp, Gossypium hirsutum
gaaaaaaactgggagaaatggcgagtggtggtaaagtgtcttttaaagtcactcttacatccgatccaaagctccctttcaaagtgtttagcgttcctgaagcagccccgtttacggctgttttgaaattcgcagccgaggaattcaaagtccctccccaaaccagcgctatcatcaccaacgatggtgtgggaatcaatcctcagcaaagtgcaagaaatgtgtttctgaaacatggttcggagcttcacctgattccccgtgacagggtgggagccttttgaatgcttaaaaacttaacgctagtttatcaccttcaattatggatatattttattgacatgattgaacttttac

SEQ ID NO: 214962 - DNA, 241 bp, Gossypium hirsutum
ctttttagcaacttccgcattgaagaggtccttccaaacagaaatacgatcccccttaccaaccctccagcaaagtcctcattcgagaatgccttttgccgactagatacttttccaggtaagcgaacgtaaattccctaattgagcagttagaaaacacgcattcggataatatttagctttcaatactcgagctagcaaagaatctggaaaattaatgagacgccagccctgtttagct

SEQ ID NO: 214963 - DNA, 311 bp, Gossypium hirsutum
aagtctctcaggtgaacggagatggcaggaaaaggtggaaaggggcttttggcggcgaaaacaaccgcagctaacaaggacaaggacaaggataaggacaagaagcgtccggtttctcgttcatctcgtgccggaattcagttcccagtgggtcgtatccaccgtcatctcaagtctagggcatctgcaaatgggagagttggggccacagccgccgtttacttggcctctattcttgaatacctgacagctgaggttcttgagttggctggaaacgcaagcaaggatctgaaagtgaaaagaatcacccc

SEQ ID NO: 214964 - DNA, 407 bp, Gossypium hirsutum
cttgtcattggtccatttcttatgccttcaatgccacctagtctaattactggcctttcaccccttactgggaatgaagctcattatggtatcattaggcaagggcagtttgtgcacttggatgatctctgcatgtctcacatattcttgtttgaaaaccctaaagctgaaggcagatacatttgctcctcccatgaggccaccattgttgagcttgccaaaatgctaagagaaaaatacccagactacaatattcctactgagttcaaagatgcagatgaaaacttgggaaatgtggtcttcaattccaagaagctgttggatttagggtttcaatttaagtacagcttggaagacatgtttgtcggagctgtggagacatgtcatgaaaaagggttaattgcacc

SEQ ID NO: 214965 - DNA, 373 bp, Gossypium hirsutum
gcgcccacgcgtccgttaaagatgaaggcctctagatttattttcagcgagataaatcagagattccccatcctgccattcaccgctcgtgccttggaagagaaaagggctcgtctaggtttagttgaatgtgtgaatcacgatctcttgcagccataccctgttctctatgagaagcctggtgattatgttgctcatatcaaatttacagtattgctaatgccaaatggatcagatcggattacatcccatcccctgcaagaactgcagccaaccaagatgatagacgatcctgaaatcaaggcctggttggctttgggaacaaagacaaagaagaaaggtggtgggaagaagagaaaagtaagaagggtga

SEQ ID NO: 214966 - DNA, 392 bp, Gossypium hirsutum
gaacaggttactctatgaaaggtcacatcaacgttgacactccgtttggagctatgaaattacccatcagcaaggagggtggcacaacccgccttaagaagaatagggaagacggtggtgatgatgatgatgatgatgaggattaaagcaaaagatcaacagggatggtccccttgagcttcttttgttttgttacagagttcattgcaataatatactaatggtgtgtggaatttaatgtttagattgtgacggtaacatgtactacaattatggaaaagttggtacctataattatgcatattatgtattatgtatgtatgcatgaatgggatgctgtgaccctggtttttattttgtctagcagcaccccccccccctcttagcgaacc

SEQ ID NO: 214967 - DNA, 375 bp, Gossypium hirsutum
tttaaatccaaaaaaaaaaaaaaagaagtcattttttcagggctaagaaagagaaaaaaaaatggctttgcaaaaggcgaaggacatcgtatctaccaatcctgtcgtcgttttcagcaagtcctactgtccgttctgtgtggatgtgaagcaattgcttcaacaacttggagcttctttcaaggccattgagctcgacagagaaagcgatggatctgatattcaagcagctctggctgagtggaccggccagcggactgcgccaaacgttttcattggtgggaaacacattggtggctgtgattctacaatggccttgcacatagaaggtaagctggttcctctgctaactgaagctggagctattacaaaatc

SEQ ID NO: 214968 - DNA, 403 bp, Gossypium hirsutum
cccacgcgtccgcccacgcgtccgcccacgcgtccgggtgacgaatataaggagattggctgagatggtagagaactgcgatgatgagtttctgaaattggacttggaatatgaacaggttttctctctctctctcttcatgcatgtagtttccgacacatgctcttgttgcagtacacgactagacatacattgatgtttgtggtttgatgcagacagtagtgcttcgaacaaagacagcaaaagcaactactccggacattcttgcaacccactgtataccatcagcaatgtcagctgatctcaaagcattgagaccatggacttaattaattgattttttgtaccttttatatatagcttttcctgtttctttttttttttttggggcatgattatattt

SEQ ID NO: 214969 - DNA, 410 bp, Gossypium hirsutum
cccacgcgtccggtgctccactcatgctccgtctagcgtggcactcagctggaacttttgatgtcaagaccaagaccggatgtccattcggaaccatgaagcaacctgctgagctcgctcatgctgctaacaacggtctcgatattgcagtcaggcttctcgagccgatcaaggagcagcttcctatcctttcatacgctgacttctatcagcttgctggtgttgttgctgttgagatcaccggtgggccggaaattccattccatcctggaagagaggacaagcctcacccaccacctgagggtcgtcttcccaatgctactgagggagctgatcacttgaggcaggtgtttagtaatcaaatgggtcttagcgaccaggacattgttgctctttctggtggccatacc

SEQ ID NO: 214970 - DNA, 407 bp, Gossypium hirsutum
gcccatgctgcccgacatgtgaccgataagatgatgttcaatgcttctttcatatttcctcacagcacacctactacaaaagaagcatattactacaggatgatttttgagaggtttttccctcagaactcggctagattgactgtccccggaggagctagtgtggcatgcatcacagctaaagctgttgagtgggacgctgcctggaaaaacaaccttgacccttctggccgggctgccttgggggttcatctctctgcttatgacgcagagactcccctcagcaacaagccatccaaggttattgatagtataccacggatggactttcctggagttgccatacagagttaatgcctgcctactggatgacaacagaatgtatgaattatttaataaaatgagta

SEQ ID NO: 214971 - DNA, 329 bp, Gossypium hirsutum
ctggaatctacaactcacctctctctctgaggatgaaatcatatcaatcattaatcacgcctttgctaaaggaatcactttctttgacacggctgatgtttacggagcgcataccaatgaagttttggttggcaaggccttgaaacaattaccaagagaaaaaattcaactagccaccaagttcggtattgcagggatggcacctactggtatgatcgtgaaaggtagtcctgagcatgtccggtcgtgctgcgaggcgagctttgaacgtctcgatgtcgattacatcgatctctattatcagcatcgggtggacacgttggtaccta

SEQ ID NO: 214972 - DNA, 383 bp, Gossypium hirsutum
gggtcttatgaccactgttcattctattactgctacacaaaagactgttgatggtccttccatgaaggactggagaggtggtagagctgcttccttcaatatcattcctagcagcactggagctgccaaggccgtcggcaaagttttgccagcactgaatggcaagctgactggaatggctttccgtgttcccactgttgatgtctctgtggttgacctcactgtgagacttgagaagaaggcttcatatgatgaaattaaagctgctatcaaggcggaatctgaatgcaacttgaagggaaatcttggttatgtggtcgaagatttagtcttaactggacttatctgaaacatcaattcaagcattttttatgccaaggctt

SEQ ID NO: 214973 - DNA, 407 bp, Gossypium hirsutum
gatcgtgtggttgactcaccttgctgtttagtgactggcgagtatggttggactgcaaacatggagagaatcatgaaggcccaggctttgagggataacagcatggctggttacatgtcaagcaagaagacaatggagatcaacccggagaaccccatcatggaagagctgagaaagagagccgatgcagagaagaatgataaatctgtgaaggaccttgttctccttctcttcgagactgctctcctcacctctggcttcagccttgatgagcctaacacctttggcaacagaatccacaggatgctgaaactcggcttgagcattgatgaggatgcaggtgaaggtgaaggtgatgctgatatgcccccattggaggatgctgatgccgaaggcagcaagatggg

SEQ ID NO: 214974 - DNA, 400 bp, Gossypium hirsutum
cccacgcgtccgcccacgcgtccgcccactcgtccgacggaaggtactatttgattcagtcagtgaatgcatggacttgagatgcagacggtatgttggtggaggatacaaaacgtggacgaaagggatgacaatcctgagacgaaatgagtggctagctgaagaagtgtacaaggagatatgtgggtggagaggcatgggagattgcatggtggatgagcttgtggacaaagacatgagaagccaacatggaaagtggctggatttcgaagtagatgcgttcgcactaggagcagacatcgagggtcaaatactgaatgtcttggttgatgagatgattagtgagttcttgccattttaaaagctttgtcagtaatgtacggtggttgagtttatgcac

SEQ ID NO: 214975 - DNA, 375 bp, Gossypium hirsutum
gcgtccgaatttttaattttatcaactttacggagctttttttatagactttccaggggttatagtgaggggggtttttaaagtcgtgtgggatcctaacgttgagagggttaatttggaatccggaaaaccattggtccctgattatgccatgtcttttgtcggtggctcatcaagcataccatttgctcgtctatggtgggatgaaactgtacccacagtggtcactagtgcagaacctcataatcaggcgatattgcatcctgtacaagaccgagttctctcaattcgcgagaacgcaaggttgcaacgctttcctgattactacaagctttttggccctgtcaaggaaaggttcatccaatttggaaatgc

SEQ ID NO: 214976 - DNA, 405 bp, Gossypium hirsutum
gggaatcagaaggcaacttaatattgtttccaagataatagaatgtaaggactctcacctctacaggcatttggagaagctgcaggcagaggattgtttttttgtttataggatggtggtggttctctttaggagggaattgacatttgaacagacaatgtgcctatgggaggtaatgtgggcagatcaggcaacaattagagctgggctttcgaaatccacctggagtaggataagacagaaggcacccccgacagatgatttattgctgtatgcaattgcagcttcagtcttacagaggaggaaattgatcattgagaagtacagcagcatggatgaaattttaagggagtgcaacagtatggccgggcaacttgatgtatggaaactccttaatgatgctca

SEQ ID NO: 214977 - DNA, 401 bp, Gossypium hirsutum
gaaatttctgttgtgccaaaaacttctctattatttcttaccagcaccatcaagaagcctgttggagcaaataaacttgggggtcttggtgcccgaaagcttactaataagcacagtgaaaatctctatgaccagaagcctgaagaaccagttgtccctgttgcttcctctagtattaacactgcacctattacctcaccttttccatctcgttttgagtatgtggaaaatgcacaatctactatgttgaattctgatggtccacaattgctcggccatgttgctctacctaagtcatcaagcttctttgctgaatttgaaatggacaatggttttcataagaaatcaagctcataatcctctaaagtgctagatgttattcaggaaaccgattaaactag

SEQ ID NO: 214978 - DNA, 395 bp, Gossypium hirsutum
catttccaatatgcctgccctctgtgctccaaatcggtttgtgacatgtcaaaggtctgggagaaattcgacgaggagatcgcagctacaccaatgccggaacagtaccaaaacaaaatggtctcgatcctttgcaacgattgcgagacaaaatctctagttcggtttcatgtcctggctcagaaatgcccgaattgcaagtcatacaatactaggcaaacacgaggctgaagtggcttagagtgggatgtagaaaccgacttggatggcatattttccaaatcgatgcatcaagcattgggttctggttaagcttctgcaacgtgtattggtaccagtcgtggcgcatggttccttcgggggttcggtttaatgcttgggattttcaattcttt

SEQ ID NO: 214979 - DNA, 406 bp, Gossypium hirsutum
ggttgttattgctcatgatgtggatcctatttagttggtagtgtggctccctgcattatgcagaaagatggaggtcccttactgcattgtcaaggggaaatctcgtttgggatcgactgttcacaagaaaactgctgccgttttgtgtttgaccacggttaagaatgaggataagttggagttcagcagagtccttgaggccatcaaggcaaacttcaatgacaaatatgaggagaataggaagaagtggggaggtggtgttatgggctccaaatcacaggccaaaaccaaggcaaaggagaagcttcttgccaaggaagctgctcagaggatgacttagaaatgttcattttttttcctatcaccattaattggtgtttatttttcttttttgataatgctcctt

SEQ ID NO: 214980 - DNA, 378 bp, Gossypium hirsutum
tttaaatccaaaaaaaaaaaaaaagaagtcattttttcagggctaagaaagagaaaaaaaaatggctttgcaaaaggcgaaggacatcgtatctaccaatcctgtcgtcgttttcagcaagtcctactgtccgttctgtgtggatgtgaagcaattgcttcaacaacttggagcttctttcaaggccattgagctcgacagagaaagtgatggatctgatattcaagcagctctggctgagtggaccggccagcggactgtgccaaacgttttcattggtgggaaacacattggtggctgtgattctacaatggccttgcacaaggaaggtaagctggttcctctgctaactgaagctggagctattacaaaatcatc

SEQ ID NO: 214981 - DNA, 380 bp, Gossypium hirsutum
cccacgcgtccgctgaaatctttaacacttggtgtaatattcttaagcgtgtacctaatagtgcactttggctcctcaaatttccagctgctggagaaatgaggctgagagcatatgctgccgcacaaggggtacagccagagcaaattattttcacagatgtggccatgaaacatgagcacatcagacgcagtgctttagctgatctctgtcttgacacgcctttatgcaatgcacatactactggcacggatgtgttatgggctggtttaccaatagtgactctaccccttgagaaaatggcgacaagggttgctggatcactttgtttagccactggattgggggaagagatgattgtaacagtatgaaggaatatg

SEQ ID NO: 214982 - DNA, 384 bp, Gossypium hirsutum
agccaaacgaaatctaatcatttttgaaaaatggcaccaaaagctgaaaaaaagccagccgagaagaagcctgcggaggagaagaaagccgtagctgagaaagccccggcagagaagaagcctaaggctgggaaaaagcttcccaaggaaggcggagcggctgccggagacaagaagaagaagagagttaagaagagcgtcgagacctacaagatctacatcttcaaggtcctgaagcaagttcaccctgacatcgggatctctagcaaagctatggggatcatgaacagtttcatcaatgatatcttcgagaagcttgctcaagaagcctctaggctcgcgaggtacaacaagaaacccaccatcacttccagggaaattcag

SEQ ID NO: 214983 - DNA, 399 bp, Gossypium hirsutum
gttctttgcttacaaatttggtattggatctttatccaaatctcaaatcgtaaattgcatagaatgaacgatattagtctgtgtgagtatagcttttctcatcaatatcctcgaagtccaagctttacttgtcttaactcttgcctgacggaacgatggggcgatttgcccttgaaagtcgatgactctgaggacatgcttatatacaactcccttcacgaagctcttaattttggatggtctcctttcgattcaacgctgccaactgccattaaagactagcctgaggtgttgacaccagttattaaaagtgaactccatcgggtcgactcaacccgtatcttctgcaacaactcaaatgtttttcggaacctgtttcatgggaataagcagtgaaaa

SEQ ID NO: 214984 - DNA, 334 bp, Gossypium hirsutum
tattccattttttccttttttttcttacagctaaacaaatccatgggggcgtcttttctcttcataaaagatcgaaacacccgtctggaggatgggaacttgataatttatgccaccaactccatcagctggtctcttccgtacagcccccacaagacataattgatcgcataatgagagtatttccaggcaatgtacgcttaattgttccttcaattgccaatgttgaggatttggcggggatgtcagctgctggactatatgaatccatcccaaatgtcagtccttcaaatccaactgttttttccagtgctgttagccatatttgggcctt

SEQ ID NO: 214985 - DNA, 402 bp, Gossypium hirsutum
cccacgcgtccgggcattccgtgtccctacacccaacgtttctgttgtggatttaacctgccgacttcaaaagagtgcctcatatgaaactgtcaaagctgccataaagcgtgcttcacaggggccacttaaaggcattcttggatacacagatgaggatgttgtctctagtgattttgttggtgatccaaggtcaagcatattcgacgccaaagccgggatagggttgggcaattcattcatgaagcttgtttcatggtacgataatgagtggggttacagcaatcgagtagtcaacctaatacagcacatggaactggtaggatcaacacccaagtaaattatttagcaaggtatgctgttgaaactgagcgacgctgctgcaattttagtgtgcgcaat

SEQ ID NO: 214986 - DNA, 407 bp, Gossypium hirsutum
cccacgcgtccgaaagaagttgaacaggatgaaatcattgaagggtaagaaacgtcaacggtttaaagaaaggtttataagtgggaaccataagtacaatgaagctgctaggagtataattaagcctaagattggttatggtttagctagtgagctaaggagagctggggtttatgttaaaaccgtggaggataagccccaagcagcggattgggcattgaaaagacaaatgcaacattcaatgagtagagggattgattggttgtttttagtttctgatgataaggattttgtggagatgttgaggagagcaagggaagcagatttagggactgtggttgtaggtgattgggataggggtttaggtagacatgctgatctatgggtgtcttgggttgaggtagaaa

SEQ ID NO: 214987 - DNA, 400 bp, Gossypium hirsutum
tgcaaagatctccgaagaacggattaagaatatcgaaagcatactcaaagatgtaatgctggtaacatcgccgcagctaccggatttcttgccgatcctcactccgttgtttcgtcggcaaatgaaagaggccaaagcactaagaaagaggcaattggattgcttggctccattaataaagaaccggagagcttttgttgagaaaggtgaaaaccctaaccaagaaatggtgagtccaatcggtgcagcctatatagactcactcttcggactagagccaccaacccgaggtccgttgggggaagaagagtacgttaccctatgttcagaggtgatcagtgccggtaccgatacgagtaccacgacagttgaatgggccatgcttaatttggtaatgaat

SEQ ID NO: 214988 - DNA, 387 bp, Gossypium hirsutum
ggagtagttattccatttggctccatggaatgggctttagagcaaaacaaatccatggaaacattcatgtctcttcgagaaaagattgaaacagcacgtctggaggatggtgaacttgataatttatgccaccaactccagcagctggtctcttccgtacagcccccacaagacataattgatagcataatgagagtatttccaggcaatgtacgcttaattgttcgttcaagtgccaatgttgaggatttggcggggatgtcagctgctggactttatgaatccatcccaaatgtcagtccttcaaatccaactgtttttgccagtgctgttagccaagtatgggcctcgctctatacacgaagagcagtactaagtcggcgagct

SEQ ID NO: 214989 - DNA, 410 bp, Gossypium hirsutum
ctgcctattatcttccttccttttcattccttttgctatggcaggaactggggtggtcgctgtttatgggaacggcgcaatagctgaaacccacaaatcccctttctccgtcaaggttggcctagcccaaatgctccgtggcggggtgattatggatgtcgtcacccctgaccaagctcgcatcgctgaagaagctggagcctgcgccgtcatggctcttgaacgagtccccgccgacatccgagcccaaggtggcgtggcgcggatgagtgacccacaactcatcaaagaaattaagcaagctgtcaccattcccgtcatggccaaggctcgtattggccatttcgttgaggcccagatccttgaagccattggcatcgactatgttgacgagagcgaagtccttaccc

SEQ ID NO: 214990 - DNA, 406 bp, Gossypium hirsutum
ctgaaattttatagcaagactccttatttctccgatgtcgatcttcgaatacaacgggagtgccctaatagccatggtaggcaagaactgcttcgccattgccagcgatcggagactcggagttcaactccaaactatcgccaccgatttccagaggatttataaagtccacgatcgcctcttcctcggtctctccggcctcgccaccgatgctcaaaccttgtatcaaaggcttgtctttcggcacaaactgtatcagctaagagaagaaagagacatgaaacctgagacttttgctaaccttgtttctgcgattctttacgagaaaaggtttggtccatacttctgccaacctgtaattgctggattaggagatgaagacaagcccttcatttgcaccatggat

SEQ ID NO: 214991 - DNA, 385 bp, Gossypium hirsutum
gtcctccgtcttcgtgggggtatgcagatcttcgtcaaaaccttaaccggcaagaccatcaccctcgaagtcgagagctccgacaccatcgataatgtgaagtctaaaatccaagacaaggaaggcatcccaccagaccagcagcgtctcatcttcgccggaaaacagctcgaagatggccgtaccttggccgattacaacatccagaaggaatccaccctccaccttgtcctacgtcttcgtgggggtatgcagatcttcgtcaaaaccttaaccggcaagaccatcaccctcgaagtcgagagctctgacaccatcgataatgtaaagtctaaaattcaagacaagggaggcatcccaccagaccagcagcgtcttattttcg

SEQ ID NO: 214992 - DNA, 409 bp, Gossypium hirsutum
  unsure (1)..(409): unsure at all n locations
cacaaacggatgctaagcctgaaaaggggtctgaaaaggaggctgaaaaaattgaagctatggcgtctaccaaatctgaaataaccacaaaagctgctagtacagatcctgggcctgagggagaaatgtcaagaaaggagcagaanagtgatcctaataagaaggtgcctgctattgataaggatttgttgcaggctttcaagttttttgaccggaatcgagttggctacgttagggtcgaagatatgaggttgatgattcatagcttgngaaagtttctatctcatagggatgtcaaagaactagtgcanagtgcattgttagagagcaacacaggaagggacgatcacattctttacgataagctggttcgtatgtctgacatataanaagccttggggtccaataa

SEQ ID NO: 214993 - DNA, 411 bp, Gossypium hirsutum
cccacgcgtccgcagagagagaaaaaaaagaaagaaaaaatggttctgctagacaaaatgtgggacgatgtagtagctgggcctcaacctgaacgtggtctcggcaggcttaggaagatcaccacccagcctttgtccatcaaagatgaaggagaaaagaaaaagtaccagaggtcgttgtcgctgccgaatagtccagtgtcaggtccgacacccgtgacaccgacgactccgacggcgcgtaaggagaacgtgtggaggagtgtgttccatccgggtagcaacctagccaccaaaagtataggttctgatgttttcgacaagccacaacccaactctcctaccgtctatgactggctttacagtggggagaccaggagcaagcatcgctgagagggtggcgactgacag

SEQ ID NO: 214994 - DNA, 393 bp, Gossypium hirsutum
cccacgcgtccggttctcggtactcggggtccacgaaggatgcattgtatgatgcactctatccgtgcttcggctcttgacgccagtggtgttgtccctggccagcccgagcttctccgtcatccattagaggactcattcagaagcatttccttctctaaatctcttgaccactctgttgagttcagcagctctcggttttccgaaattggcacatcttatgatgatgaggacgggaaaatgaaacccttgatcctcaaaaacaagcccccaagatggcacgagcagttacagtgttggtgcttgaatttccgaggtcgagtaacagttgcttcggttaagaacttccaattgattgctgccacacaagcagctgctggtgcacccacccca

SEQ ID NO: 214995 - DNA, 406 bp, Gossypium hirsutum
gctgactaaagttgcatgtgctcttgccttttcgctatgccaaaagcgcattcaagtctctgtattgcgtgaggatgaatatgaaaagcttgataaattacttggcaccaagtctgagggtaaattggttctctcaaaaagttacacttttaagacatggttagttggagatggattgagtgaagtagaacaaaggaaagcaagcaaaggaactctatttattcccttctcgcaattcccaccaaagaagttgcggacggactgcttctatcataccacaccggccatgcaaactccgttggcccttgagaatgtggattcttgcgagaactggttgccgaggagggtgatgagcgtatggcgtatagctgggttagtacatgcactggaaagatgggaggaacat

SEQ ID NO: 214996 - DNA, 362 bp, Gossypium hirsutum
gctttgagaaaggtgttcgaagtctctgatttcgcctcttagtggaaaagatgtcttcagccggcgaatctgcttgctcttacgccgcattgattctctatgatgatggcatccccatcactgctgagaagattgcaactctagtcaaagctgcaaatgtctctgttgaatcttattggccaagcttgtttgctaagctttttgaaaagtgtaacattgaggatctcataaccaatgttggtgctgccggtgctggtgccccaattgctgcagctgcacctgttgcagctggtgctggtggtggagctgctgcttcacctcctgccgaggagacgaagaaaggagagccagaggaagagagc

SEQ ID NO: 214997 - DNA, 285 bp, Gossypium hirsutum
tccttgcttatgctgggaatccaaaaattttaatcgggtggttactggtgaaaagtcttttaacggtccgaccagagaccgagactccagtcagggctgtttccataaggaaattgcctagggtccaagcccatttgccttggtttgatatcctcaatgaatttcaaaagggcagcagtcatatggcagctgtagggaaggttaaaggaaagaccgaagaccctcattttttggttgatggacagaaaatttgacaagcacataggttaccaatgggaaattctc

SEQ ID NO: 214998 - DNA, 340 bp, Gossypium hirsutum
cccacgcgtcccaagaagaaggcttggaggttgttgcgaaagtatgaacttggtcgtcagccagcaaattctaagctctctagcaacaagactgtaaggagaatccgtgttagaggaggcaatgtgaagtggagggcattgagattggatacaggcaactattcatggggtagcgaagctgtcacccgcaagacccgtattcttgatgtggtatataatgccctcaaacaatgagcttgtcaggacacagaccctcgtaaagagtgctattgttcaagtggatgctgctccctttaagcaatggtaccttcaacactattgtgttgatattgggaggaag

SEQ ID NO: 214999 - DNA, 258 bp, Gossypium hirsutum
  unsure (1)..(258): unsure at all n locations
ttggttatggaaggagtcctaaattcttaatcagctggaattctagtttacatggcattagtagatctcattgctgcagattttttaagtaagaggatgagctgcaattttagccttcaagtagtatcttacttcatgctncttctaggagctggtttaatggcttcccttgccatctgggcctaaaaaactcactanctgtgggtttgctagttctttaatttgggcatttatttttgggaattcaatcacaaacca

SEQ ID NO: 215000 - DNA, 134 bp, Gossypium hirsutum
cttgtttaaaatataagaaaaaaaatcatacgcaatgagcactgctggtcaggttattcgttgcaaagctgcggtggcatgggaggcggggaaaccactatcgatagaaaaaaggggaggggccccccccccaa

SEQ ID NO: 215001 - DNA, 385 bp, Gossypium hirsutum
gcattttctgaagaactgaaaccacatcagaaagcactgcttcctgataattatactgtgctggaccgtgccataatagagcataatcttctgagtgctagcaaactgtacacaaatatacgttttgatgagttgggtactttgctgggcattcctcctcataaggctgagaagatagcctcaagaatgatttgtgaagatagaatgaggggatcaatcgaccaggtggaagctgttatacagtttgaagatgacactgaagaactccaacaatgggatcaacagatagttggtgtgtgtcaagctcttaacgatatacttgatagcatggccaagaaaggcatggaagttcccatctaatcctgaccagtcggtgcactgttcg

SEQ ID NO: 215002 - DNA, 402 bp, Gossypium hirsutum
ggagttcctttcacagatgatgaacagaaacaaggagtggttgaaaaaatagcgaaagtgcggagctttgagaacttgaaagaattggaagtgaacatgaaggacgtacatacttctggagttccacacacacatttttttaggaaaggagaagtgggagattggagcaattatctcacacccttcatgattgaatgtttggagaagcttattcaagagaaattgaatggctcgggtttaacatttaaactgctctccgaaactgctaacaatattgcttctacatgatcgcggggatgtcttctagcttttttgggaatgaaatctcttgtattcccattgtctgtataaataatcctgactagaatcctcttgtgatcatgatcagaataaattgctttg

SEQ ID NO: 215003 - DNA, 408 bp, Gossypium hirsutum
caattatcatcttccatggaatcccagaatctcaaacaccgttccagggatgaccctcgttttgccaccaccacctccaacgaaaagaacagagcatacaggcgagaaaaaagaatggcaatggccaaacgtgggctaagatcactagtcatagcagtttccttccctttgtctctcaccttgttaaacatatacttgtttggttcaagtcgtggttacgcctctttagccaaacctttctggttccctcctttgtggcttttacatacaggttgcttggcttcgagcttcgtgatggggctgtcggcttggtttgtttgggttgaaggtgggttccacgttaaaccgacggctttgtctctttatttgggttacttaggattgagtatggcttggcatccgactgtg

SEQ ID NO: 215004 - DNA, 384 bp, Gossypium hirsutum
ccggatcgacccgtgcgtggacgcctgggggaaagatggaatttagatctctcaaaggaaacatgtcgctgatctttggaaagtgtttaacatgtttagttgcaaggttgttggtactccaatgaatgtgaatgcttgaagatggtactgacaaggctgatggtagatattttcgaagcttagttggagggttgatctacttgactcagacacgtccaaatatagttttctcagttggaggcatttcaagattcatgcacagcccccacgagcgtcagcttggagcagctaagagaatctcgcgttatattgctgaaactacaacttttgggctgtgcagctatttcttggagctataaaaaacgaccaactgttgcaatgtca

SEQ ID NO: 215005 - DNA, 324 bp, Gossypium hirsutum
ggacgaacgagtcctaagcagagcaagattggcgggagattgtgacatacttttcatacccattgaagagcaaggactattcaaggtggcctgataagccagagggttggattgaagttacaaaggagtacagcgagaagttgatgggcctagcttgcaagcttcttgaggtgttgtcagaggccatggggttagagaaggaggctttgactaaggcatgtgtggacatggatcagaaagtggtggttaacttctatcctaaatgccctcaacctgacctcactttaggactcaagcgccacactgacccaggcaccatcacac

SEQ ID NO: 215006 - DNA, 422 bp, Gossypium hirsutum
taaccgaacatcatcaaaatcatttcggggtcctggaatggctgaaggcttgcagatccttgagaaagttaaagtagcatatgacattccaattgtaactgatgtccatgaaactattcagtgtgaagcagttggaagagtcgctgatgttattcagattccagcattcttatgtcgtcagacggatcttctagttgaggcggccaagactggaagaattatcaatattaaaaaaggccagttctgtgctccttctgttatggtaaattctgctgagaagattagattggctgggaatccgaatgtgatggtttgtgaaagaggcaccatgtttggctataatgatcttattgttgatccacgtaacttggagtggatgaaggaagcgaattgtcctggtgttgctgatatcacacattcac

SEQ ID NO: 215007 - DNA, 422 bp, Gossypium hirsutum
cggagactcaccaaagcacgaaagccaggatctttcagaaaatggattcctattcgaagagtgcataaccgcatggataagctcacactaacccgtcaattttggatccaattcgggattttccttggggggtatcagtaaggaattggaatgtaataatattgattcatataggaggaaaaggttctctattgattcaaatgctgtacctatgggatagggatagagaaagaggagaaaccgaagatttcacatagtgcttttgatcgaaaaatcaatctgatttatttcgtacccctcgctcaatgagaaaatgggtcagattctataggatcaaacctatgggacttagggaatgatggaagggaataaaataaataagagaaggaaatcatactgagaatactgaaataaaagggcgg

SEQ ID NO: 215008 - DNA, 370 bp, Gossypium hirsutum
cggagactcaccaaagcacgaaagccaggatctttcagaaaatggattcctattcgaagagtgcataaccgcatggataagctcacactaacccgtcaattttggatccaattcgggattttccttggggggtatcagtaaggaattggaatgtaataatattgattcatataggaggaaaaggttctctattgattcaaatgctgtacctatgggatagggatagagaaagaggaaaaaccgaagatttcacatagtgcttttgatcgaaaaatcaatctgatttatttcgtacccctcgctcaatgagaaaatgggtcagattctataggatcaaacctatgggacttagggaatgatggaagggaat

SEQ ID NO: 215009 - DNA, 185 bp, Gossypium hirsutum
tacgcttttctaaaatcactaaggacttgttagtacctgcagagtcacgggtgacaggcattaatgagatatgcggccaagcgttaacttcagatcttacaaaggactttttgggtatactagccgataatggaatgcttagacatatagaaagcattgcgaatagatttgtggaggttaccatt

SEQ ID NO: 215010 - DNA, 446 bp, Gossypium hirsutum
  unsure (1)..(446): unsure at all n locations
cccacgcgtccgcgatggcatagtccttgagaaccttgctgttcggttcatgaaagaggtccaaatctccgaggcgcgtgctttttatggtttccaaatcgctatcgaaaatatccactccgagatgtacagtctccttctcgagacttacataaaagattccgatgaaaagaaccgtcttttccgcgccatcgagacggtgccgtgtgtggctaaaaaagccgagtgggctatgaaatggatcgacggcggagaaactttcgccgaacggttaatcgcttttgcttgcgtagaggggatctttttctccggaagtttctgtgccatattttggttaaaaaagagggggttaatgcccggattaactntctcaaacgagttaatctcacgagatgaaggtctccactgtgatttcgcttgcttgctgtactctctccttcggtcaa

SEQ ID NO: 215011 - DNA, 432 bp, Gossypium hirsutum
gtttttatttgtacgataataaacgcaaagctaatcccgatcccgaactaaaaatgtacattgagaaggcgaggagcatctctggtgtagctgttgaccctaagtttgtgaaattgtcggagaaggacattgtggaaatgatattctttccagtggttaatgaggcttgccgagtgtttgctgaaggtattgcagtgaaagcatctgacattgacattgctgctgttatgggcatgggattcccaccttacaggggaggactcatgttttgggctgattctcttggttctaagtacatttattcgagacttgaggagtggtcgaatttatacggaggatttttcaagccttgcgctttcttggctgaaagagctgccaagggtgctccattgagtgcaccactggagatgggaaaatcaagactattaaact

SEQ ID NO: 215012 - DNA, 393 bp, Gossypium hirsutum
aggattcggagcaacaagagtactttgatccaaagatagcagacgaggagcgtgagaaagggaacgaatgtttcaagcagcagaagtatcccgaggctgtgaagcattatacggaatcattgagaagaaatccgaaagatccaaaggcatacagcaacagaactgcatgctacacaaaaatgggtgcattggcccgagggcttgaagaatgctgaaagtgcattgagtttgacccaacctttttcaaaggttacacatgaaaaggtgctgttcagttcttcatgaaagagtatgacaaagctttagaaacataccacgaaaggttgaaacaccatgccaataaccaggagctgctcgatggtgttcgaagatgcgtagaacagatcaacaaag

SEQ ID NO: 215013 - DNA, 263 bp, Gossypium hirsutum
cgaaaacccctcctcaagaaatattcagtctctgtgcaattacaactccaagaaaaaatggcaacggaactaccaaaaccggcaaccgaagacgtaaagtttgatttgattgaagatgatgatgagtttgaagaatttgagattgatgaagagtgggagttaaaggaagaaggaaaggatattacacatcaatgggaagattactgggatgatgatgatgtcactgacgatttctctttacaactgaagagggaacttgagaa

SEQ ID NO: 215014 - DNA, 444 bp, Gossypium hirsutum
caagattacgatcacaaacgacaagggtcggttgtctaaggaagaaatcgagaagatggttcaagaagcggagaagtacaagtccgaggatgaggagcacaagaagaaggttgaagccaagaacgcattggagaattatgcctacaacatgaggaacactgtcaaggatgagaagattggttcaaagcttgacccggccgacaagaagaagattgaagatgccattgatggagcaatccaatggttggatggcaaccagctagccgaggccgatgaattcgaggataagatgaaggagctcgagagcatctgcaatcctatcattgccaagatgtaccaaggtgcaggggctgacatgggtggtggcatggatgaggatgccccacctaccggtggcagcagtgccggacctaagatcgaggaagtcgactaaattaacagctt

SEQ ID NO: 215015 - DNA, 388 bp, Gossypium hirsutum; identical to SEQ ID NO: 196826

SEQ ID NO: 215016 - DNA, 436 bp, Gossypium hirsutum
cccacgcgtccgaaagaaacgtaaaaaggacaaagttgtatgggatgaacagactggtgcatggaaacgtcgctttggttatgatcgtgtcaatgatgataaagacatacccatcattgaggccaagatgactgatgagccatgagaggatccttttgctaaaagacaagatgataaaaagaaacgggttgagaagcaagagaagaatcgcctccagaacttgaaacaagctgcaaaacttggtgctttgccaagccatgttcagcttgctgctacggctttgcccataacaggaacccaagctccacctaagaaagtaaccaaagatgaattggggaatgtagctgggatggctgctacatctacagccagtggtgggaaattcgataggaaattgccaggagaaaagcctgctaaaaagcaaggaaagcatcgc

SEQ ID NO: 215017 - DNA, 160 bp, Gossypium hirsutum
accacgcgtccggccgaaccctccatttgtctctgccaccagccgcacccaaagatgcaaatcttcgacaaaaccctaacggggaagaccataaccctatagggtgagactttcgacaccatcgacaatgtcaaagccaagatccaagacacggaaggca

SEQ ID NO: 215018 - DNA, 418 bp, Gossypium hirsutum
cccacgcgtccgatttatgggaacttggttccagtactggagggcgaaaaattatccctcagagtcttggtggatcattcgatcgttgaaagctttgctcaaggtggaaggacagtcatcacatctcgggtttatccgacgaaagcaatctatggagctgctaagctgttcttattcaacaatgctactgaggccagtgtcagtgcctcacttaggatctggcaaatgaactctgctttcattcgaccttatccaaacgataaggagtcccaataggaccgaatagaagttaatccaaaagtcaccattgattaattaattattgtacctcctgctattcaaaggaaaatgaagtttcttgttttttgtactagttattcttttcggctttttagtaggccaataaaaattttattag

SEQ ID NO: 215019 - DNA, 444 bp, Gossypium hirsutum
ggtttacttttccatctgaagaagggggaagagcaatctttgcgaagaaccaaagatgccgaagaacaaaggaaagggaggaaagaaccgtaagaggggaaagaacgaggccgatgacgagaaacgtgagcttatcttcaaagaagatggccaagaatacgcccaagtctcacgcatgttgggtaacggccgctgcgaagctatgtgcatcgacggcaccaagcgcctctgccacatccgggggaagatgcacaagaaggtctggatcgccgccggcgacatcatcctcgtcggccttagggattatcaagatgacaaggctgacgtcatcttgaaatacatgcccgatgaagcaaggcttctcaaagcttacggtgagctacccgagaataccaggttgaatgaagggattgctggcggcattgatgaggaagatgatggtgc

SEQ ID NO: 215020 - DNA, 443 bp, Gossypium hirsutum
gggatagcaatataagcacagtcttgaaaggagatgctctgaccttgaacaagctgaaactgaggtcgatctcttgggtgatgaggtggaagtacttgtaggccttctcgagaaaatatacattgcacttgatcattattccccaatattgaaacattatcctggaattatggagatactgaagctggttctaagagaattgagtggagaatgtgacacgtgactttgatttatccttcattagatgaatgttgattctttttcacccctattcatcatgagggaaggaatggtcgcacggacaaaatgttccactgctgatacaatcaataacagggttatgtgcaggtgaacccggaaaaatacattcttatccctgctgattatgttattctccctgtatagaaacttataagatagcacgtaaaaattgtggcgatggt

SEQ ID NO: 215021 - DNA, 442 bp, Gossypium hirsutum
cccacgcgtccgaagagatttaatgcggccaagatctttagccaccctgatgttgttgctgaggagccttggtatggtattgagcaagagtacactcttcttcaaaaggatactaagtggcctcttggatggcctgttggaggattccctggaccacagggtccgtactactgtggtgtaggtgctgacaagtcctttggtagggacatcgtggactcccactacaaggcttgcctttatgctggcgttaacatcagtggaatcaacggtgaagttatgcctggtcaatgggaattccaagttggtccatctgttggaatatctgcaggtgatcaaatatggattgcacgatacatactcgagcgaatcactgaaatcgcaggagttgttctttcttttgatcccaaacccattccgggtgactggaatggtgctggtgctc

SEQ ID NO: 215022 - DNA, 440 bp, Gossypium hirsutum
cccacgcgtccggatgctttccatgtcaataccgtggacacaactggcgccggtgactcctttgttggtgcattgctatgcaagattgttgaaaacccaaccattcttgaggatgaagcaaaattaagggaagtgttgaaatttgcaaatgcatgtggagccatcacgacgaccaaaaagggagcaatccctgcactaccaaccgtggccgatgcccttgccttaatcaatggagcttagattttaagcaacttgaataatttgcacgttgttttgcctcccgtgattatcctttcatttcaaagagttctcaatttattcccctttgatatgcgacctttgttccccccacacccgattgcttgtgttctaatgatggaaaaggctttgtggttttaagcgtgtaggaaattcttttccctcttttataattttgcaat

SEQ ID NO: 215023 - DNA, 325 bp, Gossypium hirsutum
gaagtcaaacgtaggttctacaagcattggtgcaagtccaagaagaaggctttcaccaagtactcaaagcggtacgagagtgaagaaaggaagaagagtatcgaggctcaactggaaaagatcaagaaatatgccactgttggtagggttttggcccacacacagattatgaaaatgaaaggattgaagcagaagaaagcacacctaatggagatccaagttaatgggggaactattgcagacaaggttgattttgcttacaagttctttgagaaacaagtccccatcgatgcttgtttccaaaaagatgaaatgattgatatca

SEQ ID NO: 215024 - DNA, 441 bp, Gossypium hirsutum
gaatgataagttgaaaagaagaagagagaaaactgtaaggacagcaatgcttgccattcatgcaagccaccaaagcccattccaccacctgctgcatgccctccaccaccagcaaagcctgcttcttgccctaaggacacattgaagctaggcgtttgtgctgacctgcttggactggtaaacatagtggtgggagcacctccttcgagcaaatgctgtgctttgctccaaggcttggctgatttagaggctgccctttgcctttgcaccgccattaaagccaatgtgcttggggccaacctcaacatccctattacccttagcttactccttagtgcatgtcagaaggaaatccctccaggcttcaaatgttgatatttttttttaagaagcacaatcagttgttgatgttggctaatggctaagtttgctctactttaa

SEQ ID NO: 215025 - DNA, 306 bp, Gossypium hirsutum
cccacgcgtccgcccacgcgtccgcaaagaagctcaagcgcaaatgaatgaggagctttccggatggaagcttgtcgtgggtgatgttttcagagaacctaatcactcgaagcttctctgcgtgatgattggtgatggagttcagattatgggaatggctttagtcactatagtttttgcagctttgggtttcatgtcaccggcttcacgaggaatgctactcaccgggatgatcattctctatcttttcttaagtatagctgccggatatgtcgctgtttgtctttggagaactcttaaagggac

SEQ ID NO: 215026 - DNA, 253 bp, Gossypium hirsutum
gacaatcttacaaatcttcctgttcatatcagatatcttagtatcatctctatggcctcaaatgccaagggcttcgttgacatgaccatcggtggtcaacccgctcgtgcaacatgtatggagctttttgcacattgcacttctagcactgcggagaactttcgagccatacgtactggccagaaaggcgtgagtcgaagcggtaagcccctgcactacataagcttttcttttcattgggtgatccctaact

SEQ ID NO: 215027 - DNA, 372 bp, Gossypium hirsutum
gcaaactctctctagaactacagaaaaactagggaaaatgactgaggcagtgataaggaagaagccaggaatggcgagtgtgaaggacatgccacttctccaagatgggcctcctccgggtgggttcgcccccgtcaggtacgcccgtcggatacccaacaagggcccaagtgctatggctatctttctagctgcttttggtgccttctcgtatgggatgtaccaagtcggccaagggaacaagatccgcaaggcactgaaggaagaaaagtttgctgcacgtagagcaatattgcctgtgcttcaagctgaagaagatgaaagatttgtcaaagagtggaagaagtatcttgagtatgaagcggaagtgat

SEQ ID NO: 215028 - DNA, 446 bp, Gossypium hirsutum
aaaatggtgaagggacgccaaggagagcgagtgagactctatgtaagaggaaccatcttgggttacaagaggtcaaagtcgaaccagtatccaaacacttcattgatccagattgagggagttaacaccaaggaggaagtagcttggtatgctggcaagcgtatggcttatatctacaaggccaaagtgaagaagaatggctcacactatcgctgcatttggggaaaagttactagacctcatggtaacagtggggttgttcgtgctaagttcaagtctaaccttcccccaaagtctatgggagatagagtcagagtcttcatgtaccccagcaatatatgagtagtgtagatcgacgactcgaatgacgctctaccatttcacttttgtttttatgaacttagtcaagattttgtgtgctttgaatcagtcattttgtttctttg

SEQ ID NO: 215029 - DNA, 431 bp, Gossypium hirsutum
ctctctctctctatctttataaaaaaacctccggctattggggtttttggtttcgtagattcgtttcgcttcatttttgtctcgttttaaacagtaatttccttcttttttttttcatttttttcttggaatttttgaagtgtttaataaaaaaaaatggcgttagtttcattcgtcgggagggttcttttcgcttcagtgttcatcctctctgcttggcaagagttcaatgaatttggtgttgatggagggcctgcagctaaggcactcaaaccaaaattcaatgtcttctcaaagactgtgacagctcatacaggggtggaagtaccagaatttgatattaaggttctagttgctgctgctgtagccttcaagggtgttgggggtatcctttttatctttggcagcactatcggggcttatcttctggc

SEQ ID NO: 215030 - DNA, 444 bp, Gossypium hirsutum
taaggatggttttatcatccggaagcctaccaagattcactcccgatctcgtgcacgcagaatgaaagaggccaagagaaagggtcgtcattctggctatggtaagaggaagggtaccagggaggcaagattgcctacaaagatcctttggatgaggagaatgcgagtactaaggcgtttgcttcgtaagtacagggaatccaagaagattgacaagcacatgtaccatgacatgtacatgaaggtgaagggtaatgtatttaagaacaagcgtgtcttgatggaaagcattcacaagtccaaggctgagaaggcaagagagaagacactctcagatcagtttgaggccaagcgagctaagaacaaggcgagcagggagagaaagatggccagaaaggaagaacgccttgcacagggacctggtgtgaaagcagcacctgcagc

SEQ ID NO: 215031 - DNA, 448 bp, Gossypium hirsutum
  unsure (1)..(448): unsure at all n locations
ccagaaaccctcgttattaatcggcggaagcagatagcctctagccatgactttcaagcgtaggaatggtggccgcaacaagcatggccgtggccatgtcaaattcatccgctgttctaactgtggcaaatgctgccccaaggataagtcaattaagaggtttcttgtgaggaacattgtggaacaagctgctgttagagatgtccaagaagcctgcgtttatgacacttatactttgcctaagctgtatgttaagatgcaatactgtgtctcgtgtgcgatccactcccacgttgtgagagtccgatcccgcaccgataggaggaaacgtgatccacccgcccgcttcatcagacgcagggatgatatgccaaagcctggtcagcctggtcaagcaccacgtncaggtgttgcagttcctgctcgtgcttaaaggctgtgaaagctt

SEQ ID NO: 215032 - DNA, 427 bp, Gossypium hirsutum
  unsure (1)..(427): unsure at all n locations
cccacgcgtccggagagatttgtatagcagcttctcctctcaaccgccacgccaaacatgccttcacataagactttcagaatcaagaagaagctggccaagaagatgaagcagaacaggcctatcccttattggatccgcatgcgcaccgattacaccattaagtacaatgcgaaacgtaggcactggctgccgaccaagctaaggttctaagctttatgtgccttttttggagttttgtactcacgcaaagctctgttttttggttaattcatgaaatttgatgtggccttgacgttttatatgatggtattgacgatatttagccattggttcgactgttgtctatctaatgttttgatttcgagctttgaatttttatgaaactgaatcattatgttctttggaataatgaanactgttatta

SEQ ID NO: 215033 - DNA, 446 bp, Gossypium hirsutum
aaacacttgaaaatatctctcttcactttcttctcttttcaacgcagagtgaaaggcggagaggccgtagacaatctctcttgcgctcttctcgtagaatggatcagattcaacatccatctgtcatgcataaggtagctggccagctcctttcttctagcatttcccgagattttcaagggtatgatgggtctttcaggaggcctgctctataccaaggacattttgcatatgggaattattccaatgctggaatgcactatcctattgttccatcaacagctaccgccatttgtgttcaagcccctgcagagaaaggatttaccagctatgccattgatttcctcatgggtggagtttctgctgctgtgtcaaaaacagctgctgctccgattgagcgtgttaaagctttgatacagaaccaggatgaaatgatcaaaactggt

SEQ ID NO: 215034 - DNA, 378 bp, Gossypium hirsutum
cccacgcgtccgcatggttaagctggtatgctccgacaggaagaccggcggagttgttttcgagaaggagggatataccgacaaaaccggaaaataccagattcgtgtatccgaagatcacttggatcagatctgtgatgcagttcttgtgaagagcccccagcttggatgtgccacaatgtcccccggtcgtgaacgtgcccgtgttatcttgaccaactccaatggcatttcatccaccacccgttatgccaatagcatgggcttcatggttgacaaggctgaagttggctgtgctgagatgatgaagatgtatcgtgaggatgaggaggatgtctagtgtgtgggtttggattaatttgcatatgaaatgtgatg

SEQ ID NO: 215035 - DNA, 453 bp, Gossypium hirsutum
  unsure (1)..(453): unsure at all n locations
taaccgaacatcatcaaaatcatttccgagtcctggaatggctgaaggctngcagatcctttgagagagtgcaagtagcatatgacattccaattgtaactgatgtccatgaaactattcagtgtgaagcagttggaagagtcgctgatgttattcagattccagcattcttatgtcgtcagacggatcttctagttgaggcggccaagactggaagaattatcaatattaaaaaaggccagttctgtgctccttctgttatggtaaattctgctgagaagattagattggctgggaatccgaatgtgatggtttgtgaaagaggcaccatgtttggctataatgatcttattggtgatccacgtaacttggagtggatgagggaagcgaattgtcctggttgtgctgatatcacacattcactgcaacagccagctggaagaaagttggatg

SEQ ID NO: 215036 - DNA, 370 bp, Gossypium hirsutum
cggagactcaccaaagcacgaaagccaggatctttcagaaaatggattcctattcgaagagtgcataaccgcatggataagctcacactaacccgtcaattttggatccaattcgggattttccttggggggtatcagtaaggaattggaatggaataatattgattcatataggaagaaaagggtctctattggttcaaatggctgtcctaatggatagggataggagaaggaggaaaacccgagaattcacaatatgcttttgatcgaaaaaatcaatctgtttatttcgtacccctcgctcatgagaaaatgggtcagaatctataggatcaaccctttggaccttagggaatgatggaagggaatt

SEQ ID NO: 215037 - DNA, 412 bp, Gossypium hirsutum
  unsure (1)..(412): unsure at all n locations
gcgcagagactcaccaaagcacgaaagccaggatctttcagaaaatggattcctatncgaagagtgcataaccgcatggataagctcacactaacccgtcaattttggatccaattcgggattttccttggggggtatcagtaaggaattggaatgtaataatattgattcatataggaggaaaaggttctctattgattcaaatgctgtacctatgggatagggatagagaaagaggaaaaaccgaagatttcacatagtgcttttgatcgaaaaatcaatctgatttatttcgtacccctcgctcaatgataaaaatgggtcagattctataggatcaaacctatgggacttagggaatgatggaagggaataaaatanaaaaaaaaaagaaatcaaataaagataataa

SEQ ID NO: 215038 - DNA, 168 bp, Gossypium hirsutum
cttttctcaattcactaaggacttgttagtacctgcagagacacgggtcaaagccattaatgagatatgtgtccaagctaaattttcagatcttacaaagaacttattggctatactagctgataatggaatgctatgacatatagaaagcattgcgaattgatttgt

SEQ ID NO: 215039 - DNA, 416 bp, Gossypium hirsutum
ggccaaatgtgacccacgccatgggaagtacatggcttgctgccttatgtaccgaggagatgttgtgcccaaagatgtgaatgcggctgtggccaccatcaagaccaaacgcacaatccaatttgtggattggtgccctactggattcaagtgcggtatcaactaccagccaccaactgttgttccaggaggggaccttgccaaggttcagagagctgtctgcatgatctccaactcaaccagcgttgcggaagtgttttcccgcattgatcataaatttgatctcatgtatgccaagcgtgcatttgtgcactggtatgttggtgagggcatggaggaaggagagttttccgaggcacgtgaagatctcgctgccctggaaaaagattatgaagaagttggcgctgagtctggtg

SEQ ID NO: 215040 - DNA, 382 bp, Gossypium hirsutum
gacggatgcgtccgcgcacgcgttcgcgatggcatagtccttgagaaccttgctgttccgttcatgaaagaggtccaaatctccgaggcgcgtgctttttatggtttccaaatcgctatcgaaaatatccactccgagatgtacagtctccttcttgagacttacataaaagattccgatgaaaagaaccgtcttttccgcgccatcgagacggtgccgtgtgtggctaaaaaagccgagtgggctatgaaatggatcgacggcggaaaaaactttcgccgaacggttaatcgcttttgcttgcgtagaggggatctttttctccggagtttctgtgccatattttggttaaaaaagagggggttaatgcccggattaactt

SEQ ID NO: 215041 - DNA, 437 bp, Gossypium hirsutum
  unsure (1)..(437): unsure at all n locations
gaactaatgtatcggtgtgaggatgataatggaggagccatgcgtgacgatacttgattgccttgacggcgttgagtaagggctggtagtatatgatcgattagctagagatactggtttcagactactgattggatacaagagtacccttgctatgtactaagtattgtagtactggatctataaagcatatgcagatgaagtcggcataccttttatggaaaccagcggcaaagattccatgaacgtggaacaagccttcatggccatggctgctttcattaaggatagaatggcgagccaaccggccatgaacaatgcaaggcctncgaccgtacagatccaaagacaggctgttgcacaaaagagcggctgctgctcttttaaaaaggaaaagggaaaaaagtcaattatgtggttagattttacatggttct

SEQ ID NO: 215042 - DNA, 357 bp, Gossypium hirsutum
cccacgcgtccgcccacgcgtccggggactcgaaaaatcgggggagcaagctgatgattcagatgcacttctagctcaggtgcgtcgtttgtcaacggagatcaggcaactggcatcagcacggcagataactgttctgaatggggattctggcggtaagttaacctctcttgtagtgccagccgcaacattgggggcattgggttatggttacatgtggtggaagggtatttcattctctgatcttttctgggtcaccaaacgcaatatggcgatggctgtggagaacttaacaaaacatctggattctgtctcagatgctctctctgctgcgaagaagcatttgactcaacgcat

SEQ ID NO: 215043 - DNA, 456 bp, Gossypium hirsutum
gtttttatttgtacgataataaacgcaaagctaatcccgatcccgaactaaaaatgtacattgagaaggcgaagagcatctctggtgtagctgttgaccctaagtttgtgaaattgtcggagaaagacattgtggaaatgatattctttccagtggttaatgaagcttgccgagtggttgcttgaagtattgcagtgaaagcatctgacattgacattgctgcttgtatgggcatgggattcccaccttacaagggaggactcatgttttgggctgattctcttggttctaagtacatttattcgagacttgaggagtggtcgaatttatacggaagatttttcaagccttgcgctttcttggcttgaagagctgccaagggtgctccattgagtgcaccacttgagatgggaaaatcaagactattaaactgctttgattgcggtgctcggagat

SEQ ID NO: 215044 - DNA, 449 bp, Gossypium hirsutum
cggacgcgtgggtttgggtttgaaacaatggagtccaacaccaaaatgtcagctcttcttttgagttgcatgcttttcatttcttcagtgacaccaattcttgggtgtggttcatgtgggaaagcacacaagcatcgaaagcctaagggaaagtcccctaaaggtcccatcactttgccttcccttgtgaaacctccaatcaagttgccaccggttgttcctccaatagttaagccacccattggacctccttcggttacggtccctccaattaaccttcctccagggacggttcctccagtaactaagccaccaagtgggaaaccctgcccaacaccaccaaccaaggacacttgccccattgacacactgaaattgggtgcttgtgtggatctgctgggagggttggtgcacattggactaagtgacccggttgtgaaccaatgttg

SEQ ID NO: 215045 - DNA, 302 bp, Gossypium hirsutum
accactcgtccgcgatggcatagtccttgagaatcttgctgttcagttcatgaaagaggtccaaggctccggggcgcgtgctttttatggattccaaatctctatcgaaaatattcactccgagatgtacagtctccttctcgagacttacataaaagattccgatgaaaagaaccgtcttttccgcgccataaagacggtgccgtgtgtcgctaagaaagccgagtgggctatgaaatggatcgacggcgtacaaactttctgcgaacggttaatcgcttttgcttgagtagaggtgatct

SEQ ID NO: 215046 - DNA, 457 bp, Gossypium hirsutum
ggaagaggaagaaggatataggaagccaagttatggtagatccgaggaagaagcagaaggatataggaagccaagttatggtagatccgaggaagaagggtattggccgaaggaacattgccattacgacagggaatatgaatatgaaaagaagcgtcaccaccaacggtataagggcccacaacataagcgccatgatgactatgacgactagtcagactgggcgttccctctacaaatggaaatctgcagtaatagctattaaataaatgatcgaggcatgccacctttgatcgtttcttctaccatttacgtgtgttatttgtgtgtgtgtcagtgtttgatcgtcaataaaatgcccgaacattagggtttgcgcaattgtgcttgttgattatcaatctgatgatgataatataatgccatgatctacttgcatattaactattaatgctta

SEQ ID NO: 215047 - DNA, 303 bp, Gossypium hirsutum
attgtatgaattaactaaggacttgtcagcatctgaacagacacgggtaaaagccgtgaatgagatatgtggaccagctaaattgtcagatcttacagggaactttttggatatacttgctgacaatggaaggttatgacatattgaaagcattgggaagagatttgaggagttgaccatggctcataagggagaagtgaaagctattgtcacaagtgttattccccttccttcttaagaggagaagtgactaaatgagaccttgggggagatcattggaaaggggaagcatgttaagcttga

SEQ ID NO: 215048 - DNA, 302 bp, Gossypium hirsutum
atcatcattgatgtgcctttggctaccggtcttatatttagaggctttatttggccagtcgctgcttacagagagcttatcaatggtgaccttgttgtcaaggacgtttaatctcctcagggatcgaatggaaggacttgaactccaaggaatagctagggaagaagatgggagtgcttttagactgaatattcttggtgggaaatttcttgtacttaaaaatgttgtttaaaaaaacatacttttgagtcttatgtaatgctaatgttgaaacatttgttaactgaacgactttccatttc

SEQ ID NO: 215049 - DNA, 446 bp, Gossypium hirsutum
  unsure (1)..(446): unsure at all n locations
accacgcgtccgagtaaatatttgggacactgatgagttctgcagaccccttactttctttgatccttggaagaacggagttatttgtatgcttgttatggttgagcagtcacttcctgtagcctttggtgctgaaacagctaaatggatttgtgttggtgctattgacataactcaattatctatagctgggtatcttctaggggctggtaagccgtattatgcactcgccctagttggtttaatagttccacaagttgtatttcagttccagtactttctaaaggatcctgtcaagtatgatgtaaagtatcaggcaagtgcacaaccatatctggttcttgggttactggtgactgctttagcaacgagccattgatgaagtataactggtggaggacangaaagagatgaagtaagctgatgagcagagtaaattgtgatcg

SEQ ID NO: 215050 - DNA, 339 bp, Gossypium hirsutum
cacgatccaaagtttccaaattcctctccgggttttgctcttcaccacttagtctcaaatggttcgtaggccaaacgacccggaacactcccgtttcgcctctctcgtcctcctcttggtggctctgttctcctgtcttctggtctatgcggttgtttccacactattgaaccccaccgtaaatcctcaggattccagctttgagtctttggaatcggtggcgggtattgattttggggaaaagaagggcgagtgttgcagaggcattgagaatttggagctgtggggtgcagctgtgaagtgagggtctgacttcaagttaacttcctctgtggaatg

SEQ ID NO: 215051 - DNA, 414 bp, Gossypium hirsutum
cccacgcgtccgcccacgcgtccgggagctttgaaaatgtggatgttatagggaagcctgataggttttcttctatgggttctacacatattgctgccacgttgcatgctgctgctatgttgatgaagcttgatcgtggctgggattggtttattgctttgagtgctttggactatcccttagttactcaagatgatttgtcccacgtgttctcctctgttaggagggacctcaatttcattgatcatactagtgaccttgggtggaaagaagatcaacgggtcctgcctattgtggttgacccagggatttacctagctaggaggactaaaatttttcacgctacgcagaaacggctaatgcctgatgcttttaaagtgttcacaggttcgccatgggttgtcttaagcagat

SEQ ID NO: 215052 - DNA, 224 bp, Gossypium hirsutum
cccacgcgtccgcccacgcgtccgcccacgcgttcgcccacgcgtccgcgttgtcgtccacacctgctgattggatcggatcccatccccttctttacacaatttctttctttctgttgttaatttcgtttatgaatttgtgtgctgctcctcgtcgctgtcttacccaacattcttgtacttttataacccagtaatattacgatgaaattaattttacgaag

SEQ ID NO: 215053 - DNA, 455 bp, Gossypium hirsutum
aggattcgtagcaacacgcgtactttgatccattgatagcacacgaggagcgtgagacaggtatcgaatgttataagcagtagaagtatcctgaggctgtgaagctttatacgggatcattgagaagaaatccgagagatccaaaagcatacagcagcagagctgcatgctgcacacaattgcatgcattgtcctaggcgctgaaagatgctgaaaagagcattgagtttgaccgaaccttttacataggttacacaagaataggtgctgttcatgtcttcatgaaagagtatgacaaatctttagatacataccactaagggttgaaacacgttgccgataaccaggaactgctctatggtgttcgatgatgcgtagaacagatcaacatggccaatcgaggtgatttgagccctgaagaactgaatgaaagacaggctaaggctatgctagat

SEQ ID NO: 215054 - DNA, 450 bp, Gossypium hirsutum
cccacgcgtccgcccacgcgtccgatacacctttccagtgacccaaaaaagcttcattgtctcttctattgaaaaccccatggctgctcttaagctagtttgtgctctagtgttgtgcatgttgatggttgagcccattgccacaaccgtcataacatgctgcgatgtgacatgcacagtggccggatgcttatcatacttgcagaacggagggaacgtgccgaaggcttgctgcgactgcatccggtccctgaacatcatggctcgaaccacccctgaccgacaaaccgtgtgtgggtgcttgcaaactgccgctaaggctgtcaaaattaaaggcaacttggctgagaccctgacggccgaatcgtagtgtcaacatccattacaagatcagcacttgcactaactggaaaaatgtgaagtgagatggatgaagagagggttttgcag

SEQ ID NO: 215055 - DNA, 420 bp, Gossypium hirsutum
cgaaaacccctcctcaagaaatattcagtctctgtgcaattacaactccaagaaaaaatggcaacggaactaccaaaaccggcaaccgaagacgtaaagtttgatttgtttgaagatgatgatgagtttgaagaatttgagattgatgaagagtgggagttaaaggaagaaggaaaggagattacacagcaatgggaagatgactgggatgatgatgatgtcactgacgatttctctttacaactgaggaaggaacttgagaataacactgagaacaacaactaagctggacttatgcattcctctgcactgaacttgtctgaatccgggttattttttttggttgattttcttttccatgcaaagcgaatgaaagaatcagctgtaactctttatgcttgggtgtactggtagaaactt

SEQ ID NO: 215056 - DNA, 413 bp, Gossypium hirsutum
  unsure (1)..(413): unsure at all n locations
aataagcttcagcgtccgaatcgggaggaaatggtgaagggacgccaaggagagcgtgtcagactctatgtaagaggaaccatcttgggttacaagaggtcaaagtcgaaccagtacccaaatacttctttgatccagattgagggagttaacaccaaggaggaagtagcttggtatgcaggaaagcgcatggcttatatatacaaagctaaggtgaagaagaatggctcacactatcgctgcatttgnngaaaggtcactagacctcatggtaacagtggtgttgtccgtgctaagttcaagtctaaccttcccccaaaatctatgggagatcgagtcagagtcttcatgtaccctagcaatatctaagctgtctcgatgccgaacggcttgtgattgactacttgagtgac

SEQ ID NO: 215057 - DNA, 466 bp, Gossypium hirsutum
caagattacgatcacaaacgacaagggtcggttgtctaaggaagaaatcgagaagatggttcaagaagcggagaagtacaagtccgaggatgaggagcacaagaagaaggttgaagccaagaacgcattggagaattatgcctacaacatgaggaacactgtcaaggatgagaagattggttcaaagcttgacccggccgacaagaagaagattgaagatgccattgatggagcaatccaatggttggatggcaaccagctagccgaggccgatgaattcgaggataagatgaaggagctcgagagcatctgcaatcctatcattgccaagatgtaccaaggtgcaggggctgacatgggtggtggcatggatgaggatgccccacctaccggtggcagcagtgccggacctaagatcgaggaagtcgactaaattaacagcttctgctggtgctatattttattt

SEQ ID NO: 215058 - DNA, 383 bp, Gossypium hirsutum
gctgctataagatttgatgcgggcttatttagtttttattttttactttagcccatacacttggactatcatattcccatatctatgcctgaaaatgtgttcagcatggatgtcaaacaccgaccaaagagtcccaacaacttagctataaaaattaaattattaactttgtactgcatgtttcagtcaagtgtgtttcattcccaacccaaatctatcataggagccccagcctacattgcaccagaggtcttgtctaggaaacaatatgatgggaagataattcttattccctgtttctgtactttttggtctataagacatactattccgagttgagctgagtagaacttcatatgaatgaaaacttagagactttttgg

SEQ ID NO: 215059 - DNA, 443 bp, Gossypium hirsutum
cccacgcgtccgaaagaaacgtaaaaaggacaatgttgtatgggatgaacagactggtgcatggaaacgtggctttggatatgatcgtgtcaatgatgataaagacatacccatcattgaggccatgatgactgatgagccaagagaggatccttttgctaaaagacaagatgatacaaagaaacgggttgagaagcaagagaagaatcgcctccaaaacttgaaacatgctgcataacttggtgctttgccaagccatgttcagcttgctgctacggctgtgcccataacaggaacccaagctccacctaagaaagtaaccaaagatgaattggggaatgtagctgggatggctgctacatctacagccagtggtgggaaattcgataggaaattgccaggagaaaagcctgctaaaaagcaaggaaagcatcgcaagttct

SEQ ID NO: 215060 - DNA, 450 bp, Gossypium hirsutum
accacgcgtccggccgaaccttccatttctctctgccaccagcggcacccagagatgcagatctgggtcaaaaccctaacggggaagaccataaccctagagggcgagacttacgacaccatcgacgatgtcaaagccaagatccaagacacggaaggcatcctacccgaccaacagcgcctcatgtatgccggaaagcagctcgaggacggccgcaccttatccgactacaacatccagaaggaatacaccctacatctagtgctccgtcttaggggaggtgctaagaagagaaagaagaagacctacactaagcccaagaagatcaagcacaagaagaagaaggtcaagctcgctgtgctacagttctacgaggtggatgaatcggataaggctcataggctgaggaaagagtgtgctaatgctgagtgtggagctggaactttcatg

SEQ ID NO: 215061 - DNA, 453 bp, Gossypium hirsutum
accacgcgtacgaccacgcgtacgattcacttttgcagtgacccaaagaagcttcatggactctgctattgaaaaccccatggctgctcttaagctagtttgagctctagtgttgagcatgttgatgattgagcccattgccacaagcatactaacatgcagctatatgacaagcaaagtgtccggatgcttatcatacttgcataacggaaggaacgtgacgaaggcttgctgcgactggttccgatccctgaccatgatggctcgaactacccctgaccgtcaaaccgtgtgtgagtgcttgcaaactgccgctaaggctgtcaaaactaaaggcaacttggctgagaccctgccggtcaaatgtagcgtcgacatcccttacaagatcagcacttgcagtaactggaaaaatgtgaagtgagatggatgacatgagggtgttgcagcaga

SEQ ID NO: 215062 - DNA, 389 bp, Gossypium hirsutum
  unsure (1)..(389): unsure at all n locations
gaatggtgtctcctatataaatcccgatacccctttgaagcttgctgattattttaacatccccggaggttttagcacgaattccctcagtgaacttccttcaggtcgtgctgcaacgctagctacgtctgttatggcaacatctctccatgatttcatcgaagttgtctttcaagacaatgaaaacaccatgcaagcttggcatcttgatggttacgatttttgggtccgttggtgaagttcatgctctgnttgtttgtacaattggttcctttgctggacaaggtactaatcattattattacaatatacacaggtttggctcggngcaatggacacctgacaaggagaagagctaccatctagtcgatgctcttactagacacact

SEQ ID NO: 215063 - DNA, 477 bp, Gossypium hirsutum
  unsure (1)..(477): unsure at all n locations
gacggatgcgtccgggtgtacttttccatctgaagaacgaggaagagcaatctttgcgaagaaccaaagatgccgaagaacaaaggaaagggaggaaagaaccgtaagaggggaaagaacgaggccgatgacgagaaacgtgagcttatcttcaaagaagatggccaagaatacgcccaagtctcacgcatgttgggtaacggccgctgcgaagctatgtgcatcgacggcaccaagcgcctctgccacatccgggggaagatgcacaagaaggtctggatcgccgncggcgacatcatcctcgtcggccttagggattatcaagatgacaaggctgacgtcatcttgaaatacatgcccgatgaagcaaggcttctcaaagcttacggtgagctacccgagaataccaggttgaatgaagggattgctggctgcattgatgaggaagatgatggtgcaggcgatgattacatcgag

SEQ ID NO: 215064 - DNA, 416 bp, Gossypium hirsutum
  unsure (1)..(416): unsure at all n locations
cggacgcgtgggcttgacactgttctaggacctggtaaccagatcactgaacctgacacccacaaacttgcctaccttcaggctgtgatcaaggagactttgaggttacgaatggcaattcctctactcgtgccccacatgaacctgcatgatgcgaaattgggtggctatgatatccctgctgagagcaaaatcttggtaaatgcatggtggcttgccaacaaccctgctaactggaaaaatcccgaagaatttaggcctgaaaggttctttgaagaggaagccaaggttgaggccaacggcaatgatttccgctacctcccctttggcgtggggagaagaagttgcccaggaattattcttgcattgcccatccttggtattactntgggtcgtttggtacagaaatttgagct

SEQ ID NO: 215065 - DNA, 408 bp, Gossypium hirsutum
gatcaatacaggtctctaacttacatgcgtccgttggccatatgggcaatgcaatgggccttatcaagagcaaaagttccaaagcaggagctaaaacctgaaatggaggcggattcgctacgtgtacaccatgccggcttctccaaagttgctcgccttctaaaattgcctgaagatcaaagatccaaaagtcttttacagattatgttcgattatacttgcaagagaatgttgacttaattgattggtgcaattattagtgtgtatggtgagtgtgcaatgcattattcaataattggaaaacttgagtatttgcaaaaatataatggtattggaaaataagtgtattcagtacttcaaaatataataatttgcagtgtaagcaaaaaaaaaaaaaaaggccggccg

SEQ ID NO: 215066 - DNA, 434 bp, Gossypium hirsutum
  unsure (1)..(434): unsure at all n locations
gggatagccatataagcaaagtcttgacaggagatgcttttaccttgaaaaagctgaaactgaggtcgatctattgggtgatgaggtggaagtacttctaagccttatagagaaaatatacattgaacttgatcattattccccaatattgaaacattatcctggaattatggagatactgaagctggttcgaagagaattgagtggaaaatgtaacaagtcactttgagttatccttcattagatgaatgatgattattttgcacccctattcagcatgagggaaggaatggtctcacggacaaaattttccactgctgatacaatcaataacagggttatgtgcacgtgaacccggaaaaatacattcttatccctgntgattatgttattctccctgtatagaaacttagaagatagcacgtaaaaattgt

SEQ ID NO: 215067 - DNA, 374 bp, Gossypium hirsutum
ggcatgccgtcagaagagatttaatgcggccaagatctttatccaccctgatgttggtgctgaagagccttggtatggtattgagcaagagtacactcttcttcaaaaggatactaagtggcctcttggatggcctgtctgaggattccctggaccacagggtccgtactactgtagtgtaggtgctgacaagtcctttggtaggtacatcgtggactccgactacaaggcttgcctttatgctggcgttaacatcagaggaatcaacggtaaagttatgcctggtcaatgggaattccaagactggacatttgctggaatatctgcaggtgatcaaatatggattgcacgatacatactcgagcgaatcactg

SEQ ID NO: 215068 - DNA, 381 bp, Gossypium hirsutum
accacgcgtacggcaaagccgactatttgtctttggaaggagcggcgccctgaagatgcgaataggggttagatctcctaacggggacgaccataactctagatgttgagactcatgactccatctacgatgtccaagtcaacattcaagactaggaatgaatgacatgcgaccaacatagcctgatgtttgttgctaagcattttgaagtctacataactttagcttgctacagcgtgcgtactgaatccacggtacaactcaagctacgacttacgagaagtgctaataagattatgaagatgatctacgatatgcgtaagatgattatgcacaataggaataatgttgagctcgttgatctacacttgtacaatgtgg

SEQ ID NO: 215069 - DNA, 327 bp, Gossypium hirsutum
cgtttcaccagcagttagccatttttttgtaggatcaaaatctcaaaggcttagaactgtatgtcttggagaaatggggcttggttatttttctttggtccctttctcggctcgctattactatgttgattcatggagttatgcaggggaagattttaaagtagttttatacatttgtcatcatcttgctgaaattcatattcatggtatgttgattcccctgctattgaaaacaaggttgattttgcttacaagttctttgagaagcaagttcgcatcgatgcttttttcctgaaggatgaaatgattgatatcattggtgtcact

SEQ ID NO: 215070 - DNA, 370 bp, Gossypium hirsutum
gcaccaacaggaacctgtgctgtttgtgttgttggtggtgaaaggtcactcattgcaaatctatcagctgctaactgctacaagtctgagcatttgaagaagcctgagaattgggcgttggttgagaaggccaagtacttctatattgctggatttttccttactgtatctccggaatccatacagcttgttgctgaacacgctgctgcaaagaacaaggtgttctcaatgaatctttctgctccatttatttgcgagttcttcaaggatgcacaagagaaagcactaccgtatatggactttgtctttggcaacgaaactgaagcaagaaccttctaaaggttcatggcttggagactgatgatgttgc

SEQ ID NO: 215071 - DNA, 382 bp, Gossypium hirsutum
tccacgcgtccggatgctttccatgtcaataccgtggacacaactggcgccggtgactcctttggtggtgcattgctatgcaagattgttgaaaacccaaccattcttgaggatgaagcaaaattaagggaagtgttgaaatttgcaaatgcatgtggagccatcacgacgaccaaaaagggagcaatccctgcactaccaaccgtggccgatgcccttgccttaatcaatggagcttagattttaagcaacttgaataatttgcacgttgttttgcctcccgtgattatcctttcatttcaaagagttctcaatttattcccctttgatatgcgacctttgtttcccccacacccgattgcttgtgttctaatgatggaaa

SEQ ID NO: 215072 - DNA, 404 bp, Gossypium hirsutum
cccacgcgttcgggcggcaccaagccagcttaacctaacggaaatcatgtcgaagcaaggatgtaaagcttttgcggatttgctgacagcttcgggagccgatgacaaatttaacgaaaacatggacgcgggtttaacggtgttttgcccgaccgacggtgccgtcaaaagtttcatgcccaaatacaagaatctgacgtcgtcgaagaaagtgtcgctgctgttgtaccatgggattccggtgttcatgtcgttgcatatgctgaagaccaacaatggagttatgaacacgttggcaacggatggagcgaacagctacgatttctcggtgagcaacgaagacgaggtggtgtccttggatacgactgtcgtgacctcaaaggttttggggtttttgaaggagg

SEQ ID NO: 215073 - DNA, 324 bp, Gossypium hirsutum
  unsure (1)..(324): unsure at all n locations
gaagtcaaacgtaggttctacaagcattggtgcaagtccaagaagaaggctttcaccaagtactcaaagcggtacgagagtgaagaagggaagaagagtatcgaggctcagcttgaaaagatccagaaatatgccacttgtgntaggggttttgcccacacacagataaggaaaatgaaaggattgaagcagaagaaagcacaccctatggagatccaagtaaatggtggaactatngcagacaaggttgattttgcttacaagttctttgagaagcaagtcccgatcgatgctgttttcagaaagatgaaatgaatgatatca

SEQ ID NO: 215074 - DNA, 436 bp, Gossypium hirsutum
gaatgataagttgaaaagaagaagagagaaaactgtaaggacagcaatgcttgccattcatgcaagccaccaaagcccattccaccacctgctgcatgccctccaccaccagcaaagcctgcttcttgccctaaggacacattgaagctaggtgtttgtgctgacctgcttggactggtaaacatagtggtgggagcacctccttcgagcaaatgctgtgctttgctccaaggcttggctgatttagaggctgccctttgcctttgcaccgccattaaagccaatgtgcttggggccaacctcaacatccctattacccttagcttactccttagtgcatgtcagaaggaaatccctccaggcttcaaatgttgatatttttttttaagaagcacaatcagttgttgatgttggctaatggctaaatttgctctac

SEQ ID NO: 215075 - DNA, 457 bp, Gossypium hirsutum; identical to SEQ ID NO: 196833

SEQ ID NO: 215076 - DNA, 422 bp, Gossypium hirsutum
gaaaagcttacaaatgtgcttgtacttatgagttatctgaggatcatgactattgcttgaaatgggaagggctaggatgacatgaccataggtgctgaatccggttgtgggatagtgatggatgctttctaagattgcacttcttgcactgagaataactatcgagctctacgtactggcgagaaaggcgtctgccggatgcggaagcccctgcactacataagctcttgtttacatcgtgtgatccctaactttatgtgccaaggaagagactataccggctgaaactgtacctgaggtgaatccatctacggatcaaagttcgatgacgagaacttgatcaagaagcacactggttccgggattctctcaatggctgacgcttgaacgggaactaacggatcctaagtcttcatttggac

SEQ ID NO: 215077 - DNA, 455 bp, Gossypium hirsutum
  unsure (1)..(455): unsure at all n locations
cccacgcgtccggtggcctcattccgtgctcaacaacttcgatttcgattttctcgacgctccctttcctgctagaggaaaatccgacgttgaatccctttatgatcctccttattatgaatggtatcaagtcaacgagatagagtgggttcatttcgatgaatgtattgcatgcctagaagattatatgattaaacatggtccctttgatggtctactgggtttttcccaaggtgggatgctagcatctggggtgccttcaatgcaaagagagggtgccgcttttactagtgtgccaaagataaagttcgtgatcataatatcaggttttgaacttcgagaattgaagtctgggccgncgaaattgcttgctaatgtttattcagttccaattgactgcccatctcttcatttgattggagacaaggatttcctgaaagaacgagggttcacgc

SEQ ID NO: 215078 - DNA, 450 bp, Gossypium hirsutum
aaaatggtgaagggacgccaaggagagcgagtgagactctatgtaagaggaaccatcttgggttacaagaggtcaaagtcgaaccagtatccaaacacttcattgatccagattgagggagttaacaccaaggaggaagtagcttggtatgctggcaagcgtatggcttatatctacaaggccaaagtgaagaagaatggctcacactatcgctgcatttggggaaaagttactagacctcatggtaacagtggggttgttcgtgctaagttcaagtctaaccttcccccaaagtctatgggagatagagtcagagtcttcatgtaccccagcaatatatgagtagtgtagatcgacgactcgaatgacgctctaccatttcacttttgtttttatgaacttagtcaagattttgtgtgctttgaatcagtcattttgtttctttgggat

SEQ ID NO: 215079 - DNA, 434 bp, Gossypium hirsutum
  unsure (1)..(434): unsure at all n locations
ggaagaggaaaattcaagggcaagcccaccggccaccgccacttctctactcccgaagagctccgtgctggtacctcagctcgaccccgtacatttaggaaggaagaagctgaagtagaggaagaagaagaacgagaagagtctgaagaggaaatagaagaagagcccgagaaacgaaaagggacccaagggcttattgagattgagaatccaaatttggctaaacaaaagaatgtcaaagccaaagatgttgatatggggaaaacaactgaactatcaaggcgtgaaagagaggagatagaaaagcaaaaagcacatgaacgatatatgaagctccaggaacaaggganaactgagcantcaagaaaagatttagagcgcttagccatgattaggcaacanagggcanagactgctaagaagagagaagagga

SEQ ID NO: 215080 - DNA, 352 bp, Gossypium hirsutum
cggacgcgtggggtctcttgatgcgcatgcgcagaaagcattagattgcccttgtgtatctgagctgcggaatggcgcttgcgggactcaatttacagaggctttcctttgttttctcaaaagcactgctgaagaaaagggttcggattgcgtgcatccctttgtagccttgcaaacctgcatcaaaggtaaccctgatgcatttcctaaaaacatcattgaagataaagaagtcaagaaagaagaggaaccaatccaagaatataaaatctatcctcctatatggttcaaggaatctcagaaaccaaaagcaaaaccaaaaccaaagctgtatgacaacagttcattctta

SEQ ID NO: 215081 - DNA, 425 bp, Gossypium hirsutum
ctctctctctctatctttataaaaaaacctccggctattggggtttttggtttcgtagattcgtttcgcttgatttttgtctcgctttaaacagtaatttccttcttttttttttcatttttttcttggaatttttgaagtgtttaataaaaaaaaatggcgttagtttcattcgtcgggagggttcttttcgcttcagtgttcatcctctctgcttggcaagagttcaatgaatttggtgttgatggagggcctgcagctaaggcactcaaaccaaaattcaatgtcttctcaaagactgtgacagctcatacaggggtggaagtaccagaatttgatattaaggctctagttgctgctgctgtaaccttcaagggtgttgggggtatcctttttatctttggcagcactatcggagcttatct

SEQ ID NO: 215082 - DNA, 308 bp, Gossypium hirsutum
gccacgcgttcgtcaggcatatggctacatactgtaacagtgcgacgctttatgctaggaccggtcagctgacgtgtacgtaagataggtactgtttagaggacggccatcaggtactaaatactgtttacaaagcaacctgctatactggagatcgcgcgactcatcatttgacatcatgggcacgtaccatgcacaaagactgaacaaacttgtcacgtatggtcgaccctctactacaaggtcgatatctggaccgcgtgctttaccaagcacttgacatagctccaatgcgcgttcaagagcat

SEQ ID NO: 215083 - DNA, 436 bp, Gossypium hirsutum
taaggatggttttatcatccggaagcctaccaagattcactcccgatctcgtgcacgcagaatgaaagaggccaagagaaagggtcgtcattctggctatggtaagaagaagggtaccagggaggcaagattgcctacaaagatcctttggatgaagagaatgcgagtactaaagcgtttgcttcgtaagtacaaggaatccaagaagattgacaagcacatgtaccatgacatgtacatgaaggtgaagggtaatgtatttaaagaacaagcgtgtcttgatggaaagcattcacaagtccaaggctgaaaaggcaagagagaagacactctcagatcagtttgaggccaagcgagctaagaacaaagcgagcaaggagagaaagatggccagaagggaagaacgccttgcacagggacctggtgtgaaagcagc

SEQ ID NO: 215084 - DNA, 404 bp, Gossypium hirsutum
aaatattctgcagggaaagcccatcaccatttatcggggaaagaatcgggttgatttggcccgagattgtacctacattgacgatatcgtgaaaggctgtttgggatcgttggatacatccgggaaaagcaccggttctggtgggaagaaaaaggggaacgctccatataggatttttaatttggggaatacgtcgccggtcaaggtgccggagctggtgaacatcctggaaagacatttgaaagtgaaagccaaaatgaatatcgtagatatgcctggaaacggtgacgttccattcactcatgcgaatatcagcttggcccatagagaattcgggtacaagccctcaaccgatttgcaaaccgggttgaagaagtttgctagatgggatttatcttattatg

SEQ ID NO: 215085 - DNA, 439 bp, Gossypium hirsutum
cccacgcgtccggagagatttgtatagcagcttctcctctcaaccgccacgccaaacatgccttgacataagactttcagaatcaagaagaagctggccaagaagatgaggcagaacaggcctatcccttattggatccgcatgcgcaccgataacaccattaggtacaatgcgaagcgtaggcactggcgccgtaccaagctagggttctaagctttatgtgccttttttgtagttttgtactcacgcaaagctctgtttttttgtttatttcatgaaattttgatgtggccttgaacgtttttatatgatggttattgacgatatttagccattgtttcgactgttgtctatctaatgttttgatttcgagctttgaatttttatgaaactgaatcattatgttctttggaattaatgaaaactgttattattcagt

SEQ ID NO: 215086 - DNA, 88 bp, Gossypium hirsutum
acgcggacgcgtgggcggacgcgtgggctgacgcgtggggttttttttgtgcctgggaattgttgggagaaggatagggagggaagag

SEQ ID NO: 215087 - DNA, 451 bp, Gossypium hirsutum
ctcacgcgttcgcccacgcgtccgaatatgttcaagcaagctggatggggtgtgatggccagccaccgcagtggtgaaacggaggatacttttattgctgatctttcagtcggtttggccacgggccaaattaagaccggagctccatgcaggtctgagcgtttagccaagtacaatcagcttctgcgaattgaggaggagcttggtgcggaagctgtctatgctggagccagcttccgtgctccagttgcaccctattaagatgcttgtttagatgataatttgctgagactggatgcgtgcggcagagcttcagtggtttattgtgaccctaaaacatgtttcaataattttgatagcaattttgtacttggtcagaattatatcaatcttcgtgttattcttgttggactttgcctgcattaaaatatttttttttttgttttttttt

SEQ ID NO: 215088 - DNA, 447 bp, Gossypium hirsutum
cttcgcaaacaattggaaggtcctcgtcagatcctgagggatgaggaaggtaaaaagctcggtttgaaagctaatgagaaaagctccagctcaaaagatgatgatgtcaagatgattgatggagaggggtcatccaatgcaagtggagaatcaactgtgactacatctcaagaaggggttccctctgacaaggaaacacgtttaactgggatttatgatttggttgctgtgctgacccacaagggccgaagtgccgattcagggcattatgttgcgtgggtcaagcaagaaagcgggaaatggattgagtttgacgatgataaccctatcccgcagcgagaggaggacattgttaaactttccgggggaggtgattggcacatggcatacatctgcatgtacaaggcacgcactgttttaatgtaatctttggttttattatgaact

SEQ ID NO: 215089 - DNA, 433 bp, Gossypium hirsutum
agctgtgcgaattgttcttgaaatggcaggtgttgagaacgcattgggcaagcaacttggaagtaaaaacgcccttaacaatgctagagctacggttgttgctgtgcagaaaatgaagcagttccgagaagttgctcaagaacgaggaattcccatggaagagctatggaagtgatggtcgtggaaacaacttcaccattaccctcaattctcctctgcaaatgtagatacagtacatgaagctttggtaatgtaagtcaaccaacaagatttgagcatctatttaacttttcgattataaaagttatgttactctgagcttctattagaaattttccattttcttttcatttcttgtctctgatgtttgtaaaaactgaatttcttgagaacttgccatcgattactgaaaaatcaagtaccttttgtaggc

SEQ ID NO: 215090 - DNA, 448 bp, Gossypium hirsutum
  unsure (1)..(448): unsure at all n locations
cataaggtctacatgcacaccggctgtacatttaatcatcgatacgtgaaatccagccctcgggaagttgaaaatgctacatggatgctaacagtattccattgttttggtcagtatttctgcctacactttgaagccttccagttgggaatggctccagtttacatggcatttatccgtttcatgggtgacgagacggaagctaggaactatagctacagccttgaagtcggagcaaacggacggaaacttatatgggaaagcgccccacgtagcatccgtgatagtcaccggaaagtcagggacagccatgatggtctaattatccaacgaaacatggcacttttcttctccggtggggatagaaaggagctgaaactganggttactggacgaatatggaaggaacaacaaaatccagatgccaacatgtgcataccaaactaat

SEQ ID NO: 215091 - DNA, 474 bp, Gossypium hirsutum
  unsure (1)..(474): unsure at all n locations
agcaaccattatggtggtctaggtggtggccactacactgcctatgctaagttgattgacgagaatagatggtatcatttcgatgatagtcacgtctctgcagtcaacgaatccgacatcaagacatcagctgcttatctcttgttctataagagagttagatctgaatccaaagtggaggcaggagaggcatcacatagtcattccatctcttaaagatcccgatgagtgcaatctccaatactattgccttatcgagctgcctccaatcaaggattggcagccggcctcacctgcaacaaccactgttatactacaatgatttttacttgtctgagcagaagctgagcgaaccctcaatgttataaaagatacgataggtgagcctaactcggaaacaactcacaacgaagcagcggcgcaattcaaaggtaggggcaactattattattagttctattaaattnttttaat

SEQ ID NO: 215092 - DNA, 460 bp, Gossypium hirsutum
  unsure (1)..(460): unsure at all n locations
cccacgcgtccgattctacaaaaggagaataccattcctgttcgtttttatgccaaagaggctgctgctcccattgctaataagggagatgagatattgaaaaatatctttttggaggttaaggcaaaatatgaggcggcattgggaatatttaggaaggagaagatcaccattgacccagatgaccctgctgctgtttctcagtatgcaaaggttatgaagacagttaggcagaaggctgacttgttttcagaatctcagcgcatccagtacaccatccaaacacgaactcatgacattccagatgctcgaacatatttattgatcctgaaggatataaggatcaagagaggactcactgatgacctttgtgctgaggctatgatgatgaatgctttggataaagtcgaaaaagaaatcaagaagcctcttttgaggaatgancagaaatcaatggctc

SEQ ID NO: 215093 - DNA, 458 bp, Gossypium hirsutum
attgattactggcgtgttcctatcacagtacgaattgttggtgtctggcgtagaaggcatgaagtcgagcagaaccatgaagtgcctggtcttcggattcttcaagatagcgggttatggatcagaaagcgaagctgatgaggaagctgcaacagttactctgactagtgatcttagtcgagttaatcgtgcctctacaaaaagcgcagttaagcttcaagaaattggacctagaatgactctccaactcaccaaaattgagggtggactatgttctggtgaagttatgttcagtgaatatggcaatggtggcaataagaaagagccaggcaatgagggtaatgaaaaggaagacggtgacaatgatggccaaatggaggatagcgatgaagatgatgaagcggataacgaggaagatatggaagaaagtgaagaagattagtgctttagcaaagtgg

SEQ ID NO: 215094 - DNA, 450 bp, Gossypium hirsutum
gagattttctcatcaggcactggcgagtttgatgaagaagaagtctatgacaaaatcccagcagatctcaagattaatcctcagaaggcaaaaggtgttgttcatgatctcgcacggactaggttgtccaattcacttattcaagctgtggcattgctaccgcaggagaaaccgacagggagcggtttcctcgcttaatgatttgctagcttgtgacaaagctgtgccttcggagccactatcatgggaggtgcctgaggagctagctgatctgtttggtgtatacgcacaaagtaatcctgttcctgagaagttgtcccgcttgcagtatctgcttaacataagtgattcagtggcggcagctgccaaagagatgggacatggatcagtatcagtcggagcagaggaagaaaagtttgtgttttgaatgtttgcttgaaattgtggtgt

SEQ ID NO: 215095 - DNA, 241 bp, Gossypium hirsutum
gggacggtctgctgggtcagctaaaggcaagcctaaaattgaagtctatgacaaggatcgaaagaagggggccgggttgataactcctgccaagagttacaatcctgcagcagattcagttcgcgggcaaacaacaaactcgggtgctcttgatgagcaagacacagccccaaggaagaagaaaaaggtcgatgtcgaacctcaggaggaggaagcagcagaagtggctgctattgaagat

SEQ ID NO: 215096 - DNA, 396 bp, Gossypium hirsutum
gttggtatacttggtattgcttgggcttttggtggcatgatctttatccttgtttactgcactgctggtatctctggaggacacatcaacccggcggtgacgtttggactggtcgtggggcggaaagggtcacttgtcccaacccctgtggaccttggggcttcatgcttgggtgccatccgggggtgttggttggtgaaagctttccaaaagacttactaccatagctattgaagtggtgccaacgagctccaagatgggttcaacaagggcaccggcttgggtgctgagatcattggcaccttcgttcttgtctacactgtcttctcagccactgatcccaagaggagtgcaagggattcccatgttcctgtgttggcaccactttccattgga

SEQ ID NO: 215097 - DNA, 445 bp, Gossypium hirsutum
gttgctatactgggtatcgcttgggctcatggaggcatgagctgtatccttgttggctgcactgctggtatctctggaggacacatcagcccggcggtgacgtttggactgttcgtggggcggaaggtgtcactgatccgagccctgctggacatggtggatcaatgcttgagtgcaatctgagggtgtgggtcggagaaggctatccagaagactcactacaatagctatggaagtagtgccaacgagctccaagatgggctcaacaggggcaccggcttgcgtgctgagatcatcgacaccttagttcttgtatacactgacttatcagccactgattgcacgacgagtgccagggattccaatgttactgcgttggcaccacttaacattgtattcgtcgagttcatggttcaccttgccgctgtccgtatcactggcactg

SEQ ID NO: 215098 - DNA, 449 bp, Gossypium hirsutum
actagtggatcccccgtgctgcatgaattcgcgaacgtgtcgacccctggcccggttcaaaccgctcaaatacatctacgagacggagactgtcatgtatgcctactataaaaacctcaactacttcagcacggagcgcacctactcaccgtttgcggcgcgaagactgtcccgcgagttcatcatggacctggagctgacccaaccgtgcgccatcatcgacctgatccagacctgagctcaaactaggatacaggactactacaaggcggtcgtccatttagatgggcacctgcactcactgaggatacctgaacatgcacaaaatctgcaaggcgctcctattgctggacgctctgaaaaacgtccgaccgcggataggcattgctagggtgaatcagggatcggcctgagtaaggaagcgctaacccggttgttcgcctgtacat

SEQ ID NO: 215099 - DNA, 450 bp, Gossypium hirsutum
gcaagttaagctactgtacaagcgacacaaaaacactgctttttcttggctgagaaacattttccatgactgtgctgtccagtcatgtgatgcttcactgctgctggactccacaagaaggagcttgtctgagaaggagacagacaggagctttggcctaaggaatttcaggtacattgagaccatcaaagaagctgtagaaagggaatgtcctggagttgtttcttgtgctgatatccttgttctgtctgctagagaaggcatcgtttcgttgggaggcccttacattcctctcaaaactggaagaagagacggtagaaggagcagagcagatgttgtggaggagtatcttccggaccacaatgagaccatctctggcgttctcgacaggtttgccgccatgggtattgacacccctggagtcgtttgccttctaggagctcacagtgt

SEQ ID NO: 215100 - DNA, 348 bp, Gossypium hirsutum
ggttgacctcagcttcccatccagtcctaatgtctcaatggaggctagaaatctcatcaaccggcttcttgtgaaagactcctcgaaaaggctctctcttcagaagataatggagcacccttggattattaagaatgcaaaccctacgggtacttgcaaaaaatagaacttgtagtagttttagattctatgtcgtaaaagctgttaacagattgcaattcagctgtgaatgtattgttcaaactgggatgataatcatcactttattctcttttgtgatgcattaagctctacttttgtccatataagcgttcatctatgaatctgattacataggattatagttgt

SEQ ID NO: 215101 - DNA, 455 bp, Gossypium hirsutum
cccacgcgtccggtcatcagatccattggaacctggttcccaagcagcagcccatgttgctgagatccgtaagaggaagggattgaaggagcagatgaccccactttctgagtacgaggacaaactgtaaggttgagaataactcagcttctgccgctatattttctgctgcaattttttgttttcggtgtctgtctcttaatgttcttgttagtagttttgggtgccttcacccatactgtcttatcatgcaaggtcatttcagtccttttcagacggtttttacaatgtacttcgctctccatctgtgttgttaatttttattgctttgatgaaatgtatttgagtcaacattgatcgtcttaaacctatatttttctttaccttcaaaaaaaaaaaaaattaaaaaaataaaaaaaaaaaaaaataaaaataatttaataaaaaaaaaatca

SEQ ID NO: 215102 - DNA, 459 bp, Gossypium hirsutum
  unsure (1)..(459): unsure at all n locations
cattcaagcccgatgcacctgcttccggtatgtattcctgcaattgtaacatccaagatatgggtatcgaagaaggccaatttgatattcctgtttttcctactaaggaagcttatacttccattttactccttcacattgttctgcatcatacttccattaacaatgttcattcctgaagctgaacttcccctttgggttatctgttatatcccaattttcatgtcattcctaaacatccttccggccccgaaatccttccctttcttagtcccgtaccttctgttcgaaaacacaatgtcggtaaccaaatttaatgccatgatctcgggactattccagctcgggagcgcctacgaatgggtagtaacgaagaanacaggtcgatcttcagaatccgacttagtggccttagctgaaagggaatcgaaatcattgaatgaagaaaagatcacgagg

SEQ ID NO: 215103 - DNA, 388 bp, Gossypium hirsutum
  unsure (1)..(388): unsure at all n locations
gctgtgcaagtcacacctgaggaacgtgaagccatagaacggcttgaagcaatggggtttgaccgtgcaactgtgctccaagtgttctttgcgtgcaacaagaatgaggaacttgcagccaactaccttttagatcatatgcatgattttcaggattgagttggtaaaagaaatggcttggggaagtacaatatcattttctctttcgttctttgggggtccattgtcattcatgttccccctgccctcccctacccccaaaactctaccgactttattcttaatcaagtgatgtaagtgtttggtgtagagacaagggatgtgaagatgttaacttcatttntttntctttcttctttatatttccgaaggacccattatttataac

SEQ ID NO: 215104 - DNA, 445 bp, Gossypium hirsutum
  unsure (1)..(445): unsure at all n locations
aacagattgaggctgctggcagaggtgttttggtataccttcgtggacatgaaggcaggggaattggtttgggccacaagcttcgtgcatataatcttcaggacgctggtcgtgacacagtcgaagcaaatgtggaacttggattgcccgttgattcaagagaatatggcattggcgcacagatactgagggatcttggcgtgcgaacgatgaaactgatgactaacaatccggccaagtacagtggactcaagggttatggattaacaatagcaagcagggttccactactaactcctattacaagggagaataggagatacttggaaacaaaaagagctaaactgggtcacgtatatggcttagattntaacggcagtttgaacagtctcattatcggcggcaatggtaacacggntgctccgacggatgctgcatctgaatc

SEQ ID NO: 215105 - DNA, 452 bp, Gossypium hirsutum
cgagagatctaggggagcttccgtcacgactgcataaccgtacacaaaatgggcaaggatctaagcgacgagcaagtctcatcaatgaaggaggctttcactctcttcgacaccgacggtgacggcaagatcgctccatcggagctagggatcctaatgaggtctctcggcggtaaccccacccaagcccaactcaaagctattatcgctgaagagaagctcacggcgccctttgacttccctcgctttttagatctcatgtccaagcatatgaaacctgagcccttcgataggcagctacgcgatgctttcaaggttctggataaggacaatactggctttgtctccgttgcagatctgagacatatactgactagcatcggagagaagctggagccctcggagttcgatgagtggatcagggaagtggatgtcgggccagatgggaagat

SEQ ID NO: 215106 - DNA, 345 bp, Gossypium hirsutum
cccacgcgtccgaaaaaaaaagaaaagaggaaaaacgttctctcccacgaaacccaccattactgcaaatggcgacgacggcccccgacaacctgagccgcgatcagtacgtttacttagcgaagctatccgagcaagctgagcgctatgaggagatggttcagttcatgcaaaaactggtcctcggctcaaccccagccgctgaattaactgtcgaggaaaggaaccttctctccgtcgcctacaaaaacgtcatcggatctctacgtgccgcgtggagaatcgtttcttccatcgagccccaagaaagaagaatgtcgaaagaacgaggaacatgttgtgctg

SEQ ID NO: 215107 - DNA, 421 bp, Gossypium hirsutum
agtggagcaattctgcattaccagcccaaatggcaatgattcgtgggacatgcacgaggaaatgttgaagaactctgaggaattttatcaggagataaagctaccttatcaaatcgtcgccattgtttctggcgctcttaatgatgccgctgccaagaaatatgatttggaagcatggtttcctgcatctcaaacttacagagagctggtgtcttgctcgaattgtacagattatcaatcaaggcgactagaaatcagatacgggcagaaaaagaacaatgaacaggcaaaaaacccaatatgttcatctgttgaactcgactctcaccggaacaaaaaggaccatgtgctgcatacttgagacttaccagaaagaagatggtgtcgaaatacccgaaagtttacaaccgtacatgggcgg

SEQ ID NO: 215108 - DNA, 418 bp, Gossypium hirsutum
gtcttccctgaaaccaacaccggcatcattgtgttggctgaaggacgtctcatgaacttgggttgtgctactggccaccctagctttgtcatgtcatgctctttcaccaaccaggtgatcgcccagctcgagctgtggaaggagaaggcaaccggcaagtacgagaagaaggtgtacgttttgcctaagcaccttgatgagaaggtggctgctcttcaccttggaaagcttggggctaacctcaccaagctcaccaaggatcaggctgactacattagcgtccccattgagggtccttacaagcctcctcactacaggtactgaggagagaatacgagagagagagagggagagagttggactagaaaaaggaaccatacaacgggatggtttgatttgttgtttttactaaaattta

SEQ ID NO: 215109 - DNA, 441 bp, Gossypium hirsutum
gagagatggtatcgcttaagctccagaaacggttctcagcgagcgttctaaagtgtggaaaaggaaaggtttggctcgatccaaatgaagtcaacgagatctccatggccaactctcgccagaatataaggaagctggttaaagatggttttatcatcaggaagccaaccaagattcactctaggtctcgtgcacgccgcatgaaggaagccaagagaaaggggcgtcactctggttatggtaagcgcaagggtacaagggaggcaaggttgcccacaaagatcttgtggatgaggaggatgcgtgttctgagacgcttgctccgcaagtatagggaatcaaagaagattgacaagcacatgtaccatgacatgtacatgaaagtcaagggtgacgtgttcaagaacaagagagttctcatggagagcatccacaaatcta

SEQ ID NO: 215110 - DNA, 354 bp, Gossypium hirsutum
ctcaggaatggcaactggaacagcaccaccaataggaagtgcagcagcagctgcaaacatgcggaggaggagaacgacaagtggtgcaggtgcctcgggaggagctgctggcacaatgcttcagttttacacagatgatgccccagggctgaagatctctccaaatgtggtgcttgtcatgagcattggtttcattgcatttgttgccattctccatgtcatgggcaagttgtattttgttcgtaaggagtagggaggggctttcctcaatacctgtattaacaagtaccaaacaaagatcaatgttgtagttttcagttttgcttaataaatggattttgatttgatttctcc

SEQ ID NO: 215111 - DNA, 403 bp, Gossypium hirsutum
  unsure (1)..(403): unsure at all n locations
tcgatcagattaaggttgagcacatatggccaagtttaagaaccacaccgctcacaatgagtcttacaaggctcacaagaatggcatcaagaagcccaagaggcaacgccatacttccaccaaagggatggatccaaagtttttgaggaaccagaggtatgcaagggagcacaacaagaagaatggggaatctgccgctgaggaagagtaaatttaaatgaaaaagaaattacccttcattaaggcttttctagttagggctgctttactatattctatggaatttggtgttaattttacactccttttgtttttgtattggtgatttatgggattattgattatatttgntagaaaagatctgaacgtgcgagcttattaatatcatgaacatgttttgatc

SEQ ID NO: 215112 - DNA, 312 bp, Gossypium hirsutum
  unsure (1)..(312): unsure at all n locations
angagttaagaactgcaagttaaggctctactttaaagatttttgatcgtttgatctatttagcagcccctactggaaagatgcgagtgttggagctgcacttttcttattctcaacagttatctgggatcaaagctgtagtttactattctacagctgtgtttcagagtgctagaattgcatctgatgttgcatcaagtgctctcgttggggcattaaatgtctttagctcatatattgtatcctctctgatggacagacaagggagaaaaagtcttttgatgacaaattttaaagaatggctgcttaatg

SEQ ID NO: 215113 - DNA, 443 bp, Gossypium hirsutum
  unsure (1)..(443): unsure at all n locations
cccacgcgtccgggagtatccggaccgaatgatgcttacgttttcggtgtttccatctcccaaggtttctgatactgttgttgagccttacaacgcgacactctcagttcatcagcttgtggaaaatgctgatgagtgtatggttcttgataacgaagctctctacgatatctgtttccgtaccctcaagctcactactccaagttttggagatctcaaccatctaatttctgccaccatgagtggtgtaacatgctgccttcgcttccctggtcagcttaactcacatctccgcaaacttgctgtaaaccttattccattccctcgactacatttcttcatggtgggatttgcgcctctcacctcacgcggttcccaacagtacagagccctcactgtccctgaacttacacagcanatgtgggatgccaagaacatgatgt

SEQ ID NO: 215114 - DNA, 373 bp, Gossypium hirsutum
taaggatggttttatcatccgtaagcctaccaagattcactcccgatctcgtgcacgcagaatgaaagaggccaagagaaagggtcgtcattctggctatggtaagaggaagggtaccagggaggcaagattgcctacaaagatcctttggatgaggagaatgcgagtactaaggcgtttgcttcgtaagtacagggaatccaagaagattgacaagcacatgtaccatgacatgtacatgaaggtgaagggtaatgtatttaagaacaagcgtgtcttgatggaaagcatccacaagtccaaggctgagaaagcaagagagaagacactctcagatcagtttgaggccaagcgagctaagaacaaggcgagc

SEQ ID NO: 215115 - DNA, 421 bp, Gossypium hirsutum
gacgaggttcaagaatggctgtatactgatggtgaagatgcaactgctacagagtttcaagaacgcctaaatttgttaaaagcagccactgacccaatatttttccgatttaaagagttgactgcacggccagaagcggtaaaatttgcgcgacgataccttactgaattgcaacagactattcgtgggtgggagaaggacaaaccttggctgccaaaagataaagtagaggagttgtcaatcaatattgataagttcaagacttggttggatgaaaaggaggccgagcagcagaagatgtctggattgaggacgcctgttttcacatctaaagaagtctacgagaaggtaaccttcgtgcaaaacaaggctgatagcattaagaaaatccccaagccaaagcctaagactgagaagccat

SEQ ID NO: 215116 - DNA, 357 bp, Gossypium hirsutum
  unsure (1)..(357): unsure at all n locations
cggacgcgtgggcttttggagctgctaatcggaaagaaaccgctagagaaaatgtcaccaactcagcaccaatctcttgttacatgggtaatttctttggaccatacattttgaatttctttcagccatggcttaatacttcatttatatactatttttataggtcatgccccagcttaccgacagattgaaacttccgaagttagttgatccagtaataaaagacacaatggatttaaagcacttatatcangtcgctgctgttgcggtgctgtgcatacagcccgaaccaagttataggccaactataactgatggactgcattctctcatccctcttgtaccgatagaactcgg

SEQ ID NO: 215117 - DNA, 317 bp, Gossypium hirsutum
atatgaaaatgacattgtatatgatgggatatgaggatgtttcatcagcaccaaatgacccagttgagaaaactatttggacatttggaagaccagctactatggaactaacacacttttggggtaccgaaaacgatcctgaattcaaaggataccacgatgggaattcagaacctattggctttgggcacattggcattaccgtggatgacatgtacaaggcatgcgagagatttgaaagtcttggagtagaatttgtcaaaaaaccaagcgatggttttgcattcatcaaggatcccccttgatggtattgggat

SEQ ID NO: 215118 - DNA, 306 bp, Gossypium hirsutum
tgaagctggaagccaatgaagatggggatgccgatgtacattttgaagctttccaaatgagtgatatgtgtgttaagttatttaaggaaggatggttcgtgaccgagttcggggaagacgatgatccaaagctttccaagatgaagaaagaagtcgtcgtaggtgggaaggatgttaaggaggttgataatgatttcttcttggtggtggttaagattatcgaccatcagggacctctttcatcaacctttcctattgagaaccggaacaacctcgcgacgatgaggacactgaaaagtaaaatca

SEQ ID NO: 215119 - DNA, 449 bp, Gossypium hirsutum
  unsure (1)..(449): unsure at all n locations
cccacgcgtacggcatagagatccaaagaacagattaggtgcacgtgaaggggccaatgaaatcaagcgacatccattctttaaaggtgtaaattgggctctcgttcgctggatgactccacctgagcttgaagttcccatctctgcaactgaaactaggaaggaagaagataaagcaatggaccctcaattacaggatttacaaactaatattttctgagaagcttggaatgctttatcacttcaccattagaggcttcgggttttataaatgttgtgtcgttctctcatgggccctaccattatgttggattcttcttttatcttttttgggaataaaatgcccccnttctggtgattggtaaataaaaatcaaattgttccttttaatttctttatatcatcaatacaggtaaggagatttggggggtattctttagattcttaaa

SEQ ID NO: 215120 - DNA, 393 bp, Gossypium hirsutum
  unsure (1)..(393): unsure at all n locations
cccacgcgtccggctcaatctctccttttagctcagaacgctcttcacgctgtgtagaaatgccgttcaaaaggtacgttgagatcgggagagtcgctctcgttaactacagcaaagactacggcaagctcgtcgtcatcgtcgatgttgttgaccagaacagagctctagttgatgccccagatatggtgaggggccaaatgaactttaagaggcttcaattgactgatttcaaaattgacattcctcgtgttccaaagaagaagacactgattgaagcaatggaaaaagctgatgttaaaaacaagtgggagaatagctcatggngtaaaaagctgattgttcaaaagaagagagcatctctcaatgacttcgacagattcaagatcatgt

SEQ ID NO: 215121 - DNA, 365 bp, Gossypium hirsutum
caaaaccttcattccatcccactcaccccgaacaacctctctccaccaacatggggaaaacacgtggtatgggagcggggcgcaagctgaggacccaccgcaggaggcagaggtgggctgataaggcatacaagaagtctaaccttggaaatgaatggaagaagccatttgccggttcttcccatgctaaaggaattgtccttgagaagataggtatcgaggctaagcagccgaactctgccatccgaaagtgtgctagagttcaattgatcaaaaacggcaagaagattgctgcttttgttccaaatgatggttgcttaaactacattgaagagaatgatgaggtgttgattgctggatttgga

SEQ ID NO: 215122 - DNA, 431 bp, Gossypium hirsutum
cccacgcgtccgtatatagccatgggtttgtgaccaacacagcaacacttagcactgcattgttcaacaatgggttgagctgtggttcttgttatgaaatgaggtgtgatggtgacccaaaatggtgcttgcctgctaccattatggtcactgccaccaatttttgtccccctaattttgctttgtccaatgataatggtgggtggagcaaccctacattgcaacactttgatttggccgaacctgctttcttgcaaatagctcaataccgtgctgagattgtacccgtttcattcaggagagtcccatgtataaagaaaggaggagtccgattcacaatcaacggtcactcatacttcaactcggtcctaatcactaacgttggcggcgccggagatgtccactcggtgtcgatcaagggctcgaaaact

SEQ ID NO: 215123 - DNA, 417 bp, Gossypium hirsutum
  unsure (1)..(417): unsure at all n locations
cccacgcgtncggtttttctctcgtatactgtcgttctttgcggtttgaagataaacccgattattcctatttgaagaggcttttccgagacttgtttttaagagaagcgccccccccccctttttgttgatctgttggaggcttggagttgtcaatttagtaaatcccttagctttgaagatagtgttttgtttttgtttggcttgagaatggataatgtgattggtggtaagttcaagcttggaagaaagattggcagtggctcttttggagagctttatttacgggtaaatgtgcaaactaaagaggaagttgctgtcaaactggaatctgcaaagaccaagcatccacagcttcattacgagtcaaagttgtatatgcttcttcaaagaggaacgggtattccacaccttaag

SEQ ID NO: 215124 - DNA, 397 bp, Gossypium hirsutum
  unsure (1)..(397): unsure at all n locations
gaacgtgaggtcggaaaagagaagtttaagataggaatgtataaagaagcatgcaagatttgtactcgccaatgcactgcttcaactttggatgattttttgacacttgatgcttataattatatcgtcattcatcatccaaaggatgtttcttctaagctttgatgaagcttccatgaaagcttagaattatggggtttgagtgaaaaaaaatagtgccattgctaaataagcaaataatcataattgtggtttttacgggaaatggttcaataaggtatgttttatttcaaaaaannngggtttttatagattatttttatggttttanttgagttattancnnntaaaattgtagtcgtttgactttttctgtttgtaccgcttgcaccaatag

SEQ ID NO: 215125 - DNA, 439 bp, Gossypium hirsutum
  unsure (1)..(439): unsure at all n locations
cttggaggtattcttatgaatctgtctctagcatccctcaaaagtcgctctacctcaatgagcaatacttgaatgtgaaaaaggctttggtcgatgctttctttggtcctcctgaacggngtgtatatagtgcatctgttcaaagcactcttttgcagatggcaaaggctgtacttggcaagttcagtgacatatcatcagttaaactaaaaatgccgaatatccatttcttacctgttaatatatcaagcaaggatcacggcagcattgtaaagttcgatgatgatgtatatcttccgacagatgaaaaaacctcacggatcgatcgaagctagcttgagcccggtctggtcaaaagatgtaggtacaagacaaacgtagtgtatggtgggaagaagggtataataaaatntctgcttcatgctntgttcattatcta

SEQ ID NO: 215126 - DNA, 434 bp, Gossypium hirsutum
ctcgagttctttcattcctgattccgatcttaaaaaaccctcgttatccccattctttatattctatggctccaaaggttggtgagaagaagcccgccgagaaaaagccagcggaaaaggctccggcggagaagacgccaaaggcggagaagaagatctcaaaagaaggcggcgcacataagaagacgaagaatgttgagacgagcgctgagacttacaagatgtacatcttcaacgtattgaaacaggttcatcctgatatcgggatctcgagcaaagcgatggggataatgaacagtttcatcaacgatatctttgagaaattggctcaagaagcatcgagattggctaggtataataagaagccgacgattacatctaaggagatccaaaccgccgttcgattggctttgcctggtgaattggctaagcat

SEQ ID NO: 215127 - DNA, 430 bp, Gossypium hirsutum
cccacgcgtccgaatatttacgaagttctaccgtcatggggagaagacctgcaaggtgttatcgtcagataaaaaacaaaccttacccgaagtcacgttattgtcgtggtgttcctgatcccaagattaggatttatgatgtgggaatgaaaaagaagggtgtggatgagttccctttctgtgttcacttggtctcttgggagaaggaaaatgtctctagtgaagctctggaagctgctcgtattgcttgcaacaagtatatggctaagtatgctggaaaggatgccttccacttgcgagtccgtgttcacccattccatgtcttgcgtatcaacaaaatgctttcatgtgctggagctgataagctccaaactggtatgcgaggtgcttttggcaagccttcaggaacatgtgctagagtagccattgg

SEQ ID NO: 215128 - DNA, 357 bp, Gossypium hirsutum
cccacgcgtccgcccacgcgttcgcgaagcttgagatcactaagctggtttctgggatgctgtattttggatacatgctagttgcttcatatgcatttttcgtgctaacgggcaccattgggttttatgcatgtttttggttcacaaggcttatctactcatctgtcaagatcgattaatgtgtaaaacgggatatgcttttatcatatataatcatgattcttagattcgatcatgttttcagatgagataatcgctattgtttgtcttacgttacaattcaaggttaagatctaatcatgctttcagatataaactgttaatgctcatttctgggctgagcttttatttttttaa

SEQ ID NO: 215129 - DNA, 359 bp, Gossypium hirsutum
cccacgcgtccgcccacgcgttcgtggcaaccaggcttggtgctcgcctcactgaagttcgcaagaacggaacttgccctaggctcacacctgatggcaagactcaagtcaccgtcgcggattacaacgacaagggtgccatggagactgttcgtgaccacaccgcgctcatctccactcaacatgacgagaccggcactaacgatgacataactgataatttgaaggagcacgtcatcaagcctgttatacccgagaagtacctcgatgagaaaaccattttgcaccttaacccgtcagaacttttcgacattggaggtccccatggtgatgctggtctcactggtcgcaagattatc

SEQ ID NO: 215130 - DNA, 418 bp, Gossypium hirsutum
  unsure (1)..(418): unsure at all n locations
cccacgcgtccggtttctactctccaaaacattatgcctcanggaaagcttcaagttgtccttgttagtgccaatggtctcgagaacacagattttctctgtaacatggatccttacgtgcttcttacttgccgaacacaggagcagaaaagcagtgttgcatcaggaaaaggatcagaaccagaatggaacgaggatttcatattcaacatctccgaacgtgcttcggaactcgcactgaaaataatggacagtgatactggttctcaggatgatttcgtgggagaagtagctataccactggagcctgtatttatcgaaagaaacattccccttactgcatatactgttgtcaaggatggagaatatcgtggggagattaaacttggtctcactttcacccccgaggaacgtgaaa

SEQ ID NO: 215131 - DNA, 452 bp, Gossypium hirsutum
  unsure (1)..(452): unsure at all n locations
atctttgcaaagcatccgcatagggcaggagacatggtgattgaatatactggtgaacttgttagaccttctatagctgataggagggagcatttcatatacaactcattagtgggtgctgggacttatttgttccgaattgataatgaaagagtgattgatgccactagagcagggagcatagcacatctaatcaatcactcgtgtgaaccaaattgctattcaagagttattagtgttcatggcgatgagcatattatcatttttgcaaagagagatatntaaacgatggggggaagagctgacatatgattatagattcttttccattgatgagcggtttggcatgttactgtggttttccaagatgccggggtgttgttaatgatactgaagctgaggagcaagtctcaaagatattggtaaaccgcggtgaattaatacaatggact

SEQ ID NO: 215132 - DNA, 420 bp, Gossypium hirsutum
caagaggtgctcacttgctatgttatcctggagcatttaacatgacaaccggaccattgcattgggagttgctgcagagagcaagggctgtggataatcagttatatgtggcaacttgttcacctgctcgagatactggagccggttacgtggcttggggtcactcaacccttgtaggaccttttggagaagtcctagccacaactgaacatgatgaggacataattatagcagagattgattactcaatacttgagcaacgaagggctaatctccctttggcaatgcaacggcggggtgatctttatcagttggtagacatccggagagtcagtgctcattgattagagaagagaagcatgtgaatagctatgagtcatggtggggatgtaatataaggtgcaactttactaaaatcat

SEQ ID NO: 215133 - DNA, 305 bp, Gossypium hirsutum
gcccttacagccgtttgcatcatcatgctcaagcaatctcccacattcggtactccaagtcagttctcccgacatgaagaaggtgtaactcatgttcttgtaactggtggtgctggctatattggttcacatgctgctttacgacttttgaaggagtcataccgtgtaactattgtggacaatctttcacgtggaaacataggtgccgttaaggttctacaagagttatttccagaaccaggaaagcttcaattcatttatgctgatctgggggatgcaaaagctgtaaataaaaaaaatatttt

SEQ ID NO: 215134 - DNA, 451 bp, Gossypium hirsutum
ctttggttctactcctgctgatagttatggccctaggccatctttgaagttgagctgttctccgcatggaactctttctagcagtccaccagttggttccctgccaaagtcatttccgccttttcagcatccaagtcataagctgttagaagaaaatggttttaagcaacagaagtacctaaagtttcataagcgctgcctgaatgacaggaagaagctgggaattggttgcagtgaggaaatgaattcgctgtacaggttttggtcatatttccttagggacatgtttgtttcccccttcaatgtacaatgagttccggaaacttgctcttgaagatgctgctgctaactacaattatgggttagagtgtcttttcagattttatagctatggtttggagaagaaatatcgagatgatctttataaagattttgagcaacttacccttga

SEQ ID NO: 215135 - DNA, 441 bp, Gossypium hirsutum
cccacgcgtccgcaaactcccaggacagcatatgaaagatgaagaggacaccacccaaccaccagctgctgctgccccaattgagaacgaccaccatgaaggagagacaaaagagaagaagggatttttggtgaaaatcaaggagaaaattcctggttaccactccaaaacagaggacgagaaggaaaaagagaccactgctcccaattaatgaatcaatataatgcatttcaagtaaaagatgtgtagagattgtgtggtttatcaatttgttggaactgtctgttctctgtttttctttttggggttgcatacatcatataaatttctgcgtctgttttcctgcttgtaagttaaaaaagaaaagaaagaaaaaagaaggtatgtatatttaatgcttttaatgtcattataataattaagaaatgacggtattatttc

SEQ ID NO: 215136 - DNA, 469 bp, Gossypium hirsutum
cggacgcgtgggcgaaggcaaccatctctctgccgctgctatcatcggccaagacggcagcgtttgggctcagagctccaatttccctcagtttaagcaagaagaaatcaatggcatcatgaatgacttttctgaacccggatcacttgccccaaccggattgtaccttggtggcactaaatacatggtgattcaaggtgaaccaggagctgttattcgagggaagaagggacctggaggtgttactgttaaaaagaccaatcaggccttgatcatcggcatctatgatgagccaatgactcccgggcagtgcaacatggttgtggaaaggctgggtgattatctcattgatcagggtctttgatctcattggtgtgccttatttgttgcaattcttgttggcttctatacgaaagtgcatccaccacctcctgtagtaatggttgggggtgcaattaaataatacgat

SEQ ID NO: 215137 - DNA, 427 bp, Gossypium hirsutum
cccacgcgtccgaaatataagctcatcactccctcaattttgtctgatcgtatgaggattaatggatcccttgctaggaaggctataagggaattgatggcaagaggatcgattcgtttggtgtctgcccattcaagccagcagatttacactagggcaaccaacacctagatgttttgttatagttttgcttaaattagttctatgtagtatttgcctttcttgactttctgtgaacgatttttccttttgctaaagacctccatctataatgtgtgagctacagtttcttgttgttctggtttaatggataattttttgttcctcaaaatgagattgatatgtggtttattttgttcaatcgcatattggattgtcatacatatatgtgtgtattgtgtgtaaagtttatgggatatttgtgatg

SEQ ID NO: 215138 - DNA, 466 bp, Gossypium hirsutum
  unsure (1)..(466): unsure at all n locations
gcgtagaacgccagtatcatatggtggaaggtctagtagtgtgccggacagatcacaacgttctagaagtatgtccttcagccctgagcgagttcgtgtgaggggaaggtctcccgctttcaatgcactagcagctgcatttgagaaccctaatgctagaaacctttctactccgccacctgtggttaaaaaactctatccaaaatccgtgactccggattctgcaaaaaagtctgcagctatagcagctcttactgcatcgttcgaaaaacaaccaccaccagctcgagagaccatcatacctagatctgtgaaagtgagcccaccgacacccaaaacaacaccaacaccagagcctaactccaaagagaattccatgagtagcaaactagaatccctcactatacaagaagatgctaaagagggtgaagctgaagacgaggaanggcctccaatatacccttac

SEQ ID NO: 215139 - DNA, 398 bp, Gossypium hirsutum
gcagaactcactgtgtgaagctggtgcatcgtttgtacccagaggttgaccctgccctcaaccccgaccatgttccacacatactccataaatgccctgatcagatcccagaccccaaggccgtccagtatgtgagaaacgaccgtgggacacccatggttttggataacaactactacaggaacatactggacaacaagggtttgttgattgtggatcaccaactggcgtacgacaaaaggaccagaccttatgtgaagaaaatggccaagagccaagactatttcttcaaggagttctcaagggccattactctcctctctgaaaacaatcctctcactggtagcaagggtgagatcaagaagcaatgcaatcttgcaaacaagctcactaaaatg

SEQ ID NO: 215140 - DNA, 468 bp, Gossypium hirsutum
cccacgcgtccgaagattcctgatccagatgtcgtgaagccagaggattgggatgaggatgcacacatggaaattgaagatgaggaggctgtgaaacccgaaggttggttagatgaagaacccgaggagattgatgatccggaggcaaccaagcctgaagattgggatgatgaagaagatggtgagtgggaagcccccaaaattgagaacccaaagtgtgagacagcccctggttgtggcgaatggaagaggccaatgaagaggaatccagcttataaaggaaaatggtctcctccactaattgacaatcccagttacaagggtatttggaagcctcaagagattccaaaccccaactactttgagcttgaaaagcctgactttgatcctattgctgccattggtattgagatttggacaatgcaagatggtatattatttgacaatattttgatagccaaaaacgac

SEQ ID NO: 215141 - DNA, 424 bp, Gossypium hirsutum
  unsure (1)..(424): unsure at all n locations
gtagcttggtatgccggcaagcgtatggcttatatttacaaggctaaggtgaagaagaatggttctcattatcgctgcatttggggcaaggtaactagaccgcatggtaacagtggtgtcgttcgtgctaagttcaagtcgaaccttccccctaaatctatgggagatagggtcagagtcttcatgtaccccagcaacatttgagttgtctagacgcctgacggcattcaatcgatgactcaagtgactctgcctttccaccaggttttacaaacttcgtcgaaatgttttgttttttttcnaattggcattttggttgtttactaccatagaaaactcgcttttgtcccaaatgtctcttctatctcggattttttgcgtgtttgttcatggacttcgaaagtttgggaatcaatcattatgg

SEQ ID NO: 215142 - DNA, 204 bp, Gossypium hirsutum
  unsure (1)..(204): unsure at all n locations
cggacgcgtgggcggacgcgtgggcggacgcgtgggcggacgcgtgggtcaatactgaatattgtgtcatcctttgggatattgttggtttacttgcttaatggttccttctgttaataggtcgagaaaaatgaaataatcacactagtataactagtttgcaatttatttaaactnagnngagtggatcccgaacaatgtgaa

SEQ ID NO: 215143 - DNA, 453 bp, Gossypium hirsutum
cagtacctgagctcacccagcaaatgtgggacgcaaagaacatgatgtgtgctgctgatcctcgtcacggtcgatacttgactgcatctgctatgttccgtggtaaaatgagcaccaaggaagtggatgagcagatgttgaatgtccagaacaagaactcctcatactttgttgagtggatcccgaacaatgtgaaatcgactgtttgtgacatcccacccactgggctgaagatggcatcaacatttattggcaattcaacatccatacaggagatgttcaggcgtgtgagtgagcagttcacagctatgtttaagaggaaggccttcttgcattggtacacaggggaaggcatggatgagaaggagttcactgaagctgagagcaacatgaatgatctggtctcagagtatcagcagtaccaagatgcaacagctgatgatgaagagtacg

SEQ ID NO: 215144 - DNA, 440 bp, Gossypium hirsutum
cccacgcgtccgcaccgtcgatgtctccgacgcggaggatgtcgtcgaccagcaccaccaagactcaatcatatctcatcttcctccccctcaaatccaccctatgcatgaatcccccgacggtacctccctctacgatcaccgtttcttggccatggtgtcgcccagaaacccaacttctttcactaaccgtatcgtcgacagtagcaccacagacactgcttcttttttgcgagcttgttggctttgtaatcgccgcttagctcctggtcgtgacatatatatgtatagaggggatacatcgttttgtagtcaagagtgcagagaaaaacagatgaagcaagatgaaagaaaagaaaagctaaacattaattcttcaaagaaagaagaccgccatgcccattcctcttcaaccaccacctgctccaagacttctaaag

SEQ ID NO: 215145 - DNA, 421 bp, Gossypium hirsutum
cccacgcgtccgggtttttgcttcaaggtaagagtcgattgattcttcgaaaaccataaacgaaaccaaatatggcggagaaagcaatcgagtcggttcaatgctttggccggaagaagacggcggtagccgtaacacactgcaagagaggccgtggtttgatcaagatcaatggttgtcccattgagcttgtcgagcccgagatcctccgtttcaaggccgtcgagccaatccttctcctcggccgtcagcgttttgccggcgttgacatgaggatccgagtcaaaggtggaggtcacacttctcagatctacgctatccgtcaaagcatcgctaaagcccttgtcgctttttaccagaagtacgttgatgagcagagcaagaaggagattaaggatattttggtcgggtacgataggac

SEQ ID NO: 215146 - DNA, 289 bp, Gossypium hirsutum
cccacgcgtccgtaaaaacatcaacaaccttattaaccccaacaatgtccctttcctaacaggtctaacaggtgcacaaaccagtgccatcgtccaaaactcccacaacagcgacagcgttatcaattccgacagcaaccctttcgtcacagcaggccaactcccacccggctctctccaacgtctcatgttcggtaccataaccgtcatcgacgatcagctaaccgaagcccacgagttagattcagctatcctaggcaaagcacaagggttctatttggctagctca

SEQ ID NO: 215147 - DNA, 375 bp, Gossypium hirsutum
  unsure (1)..(375): unsure at all n locations
cccacgcgtncgcccacgcgtacgcccacgcgttcgcccacgcgtgcgcaccaagctgccgttatcatctccaaccttgcaaccattaccacctctcactctcgggcgaggacggatggtccagaaaacagagtaagtccagtctgagttgagacaaacagttctaagtgcttcatgaagggccatcatccccacagcttctttgctcctatcaactgaacctgagcccaccatctttttctttttttctctttgaaaacaacaatggctgctagtgctatctgctacttctgttgctgttgctggctgcccccttttgctactttctcttggtttttaagctcgtttganaaaaaaaaaaannnannnnnanaa

SEQ ID NO: 215148 - DNA, 300 bp, Gossypium hirsutum
cgactcccctacttctaaaaacttcctgggtttcatcgtcgccttgtcggaatctatccgcggccgtaaaatctccgatcccagccatgaatctgccaccgtgtccaatatcgtctctatcatcgaaaacctgagtctctgggtcgatcagatcccacccgttcaacagtcctctcgttacggtaacatctcttatcgaacctggcacgaacgcttaaccgaaaacgccgaatccttcatgctacagttcctccccgaggatctcaaaccggccactattgaaatcgtcccttacttttt

SEQ ID NO: 215149 - DNA, 415 bp, Gossypium hirsutum
  unsure (1)..(415): unsure at all n locations
gtgttgaggttgaggaaaagtctaataacatgcaaattgaataggaatccttggaagatcgcgagcttttatctagttatttgcctctattaagagagtttatccctgcagctgctgccgaaattgaagctgatgttcgagcttacatgtttgaaaaagatgcagatggatatgtgtatgactactacactgtgaagaatgacttgggtgtaggtgaggaggatatggcttcaaatccattcccactggtgaaggtggatgatgaggatttctatgatgtgccatatgagtcagaatatgatagtgaagattcaaatgccgaagataatccgagaaatgattatcctgatgaaacatccgaagaggaggaagaggaaaaggaagaggaangggacgaggatgaggatgaggagac

SEQ ID NO: 215150 - DNA, 442 bp, Gossypium hirsutum
cccacgcgtccgccaaaaccaagtatgccactgttaaattccataacccacgtgttcaagaggatcccacctgtggtccattgttggatgcggttgctattaaggagcttgtccgtcccagagctaccagatataatctggtgaagaacaatggctttgaagagggtcctcatcgcctagtcaactccaccaatggtgtcttgctcccccctcggcaagaggatttcacatccccactcccgggctggatcattgaatcacttaaagccgtaaaattcatcgatgcaaagcacttcaacgtcccggcgggacactccgcagtcgagctggttgccgggagagaaagtgccatcgcccacatgctcaggaccatcccgaacaaatcatacaacatgacgttcatcatcggggacgctcgcaacggttgcaacgggaaaatgat

SEQ ID NO: 215151 - DNA, 385 bp, Gossypium hirsutum
  unsure (1)..(385): unsure at all n locations
gctggttctacttcgttatcgacacccgaaggtgaagtcaacagcctgatgcagcaggtggctgatgattacggattagaggtctccgttgggttgccaaacgctgctgctcatgctgttccgacgaagactgaagagaaggtcgacgaggatgatttgtcaaggcggcttgcggagcttaaagctcgaggttagaatgaaaatggttgaattttatttgaatgagcttgtaatattatgataacattatgatgtttgggattataattgctgcttatatagatcataatctgtttgtaaatttgactgaatttgttgctttacaatgtcattaatgctgatgcccctttagtgtgagttttccattttgcannnnannnnnnnt

SEQ ID NO: 215152 - DNA, 432 bp, Gossypium hirsutum
  unsure (1)..(432): unsure at all n locations
ctcgtcctctgtttactttcccctttcttcttccttttcaataaacaaaagaaggaaagatcaaatcaatggcagattggggtcctgttttagtagcgacggtgctgttcgtattactgtgtcctggtctgttgtttcagatacctggtaagaacaaggttgtcgagttcgggaacatgcaaaccagtggagcttcggttctcgttcacgctattatctactttggtctcattaccatcttctgtctcgccattggtgttcatatctatgcttcccaataatctttagctgttgcttgctgcacttttcactttctcattattaatgggtttcattttctattgatattgcttgatctgttataattgaagctgtgttttaatagactcttttacggattaatttatgtattttggtcgatctnggaaatgc

SEQ ID NO: 215153 - DNA, 445 bp, Gossypium hirsutum
aagaacatgggcctctatggcgaacgtgttggtgcattgagtgttgtctgcagggcagccgatgtagcaagcaaggtcgaaagtcagctcaagcttgttattcggccaatgttttcaaatccaccaattcatggtgcatctattgtggtaaccatcctgaaggacagcaacatgttcaatgaatggactattgagttgaaggcaatggctgaccgtatcatcagcatgcgcaaacaactttttgatgctttgcgtgctagaggaacacctggtgactggagtcatatcatcaaacatattggaatgttcaccttcacgggactaaattcaaagcaagtggaattcatgaccagagaataccatatctacatgacttctgatggaggaattagcatgcaagaactgattaaaagacagtcctcatcttgctgatgcaattcatgat

SEQ ID NO: 215154 - DNA, 371 bp, Gossypium hirsutum
cccacgcgtgcgcacgcacgaagaagattattacgaggctcttaaacacaccaatgctggtggcaccatggaactgcatgcactgaatgtgcaaatattcattaagatgcatcggtcggactatgcagagagacagctgagggtcatgcagcagattgatgaggatcatacactgacacaactagcaaatgcatggctgaacctggcagtgggtggttacaagatacaggaagcctacctgatcttacaagatttctctgagaaatatcctatgactggactaatcctcaatgggaaagcttgctgctgtatgcatatggcgaaactgtgatgaagctgaaacacttttgcttgaagcacttaataaggat

SEQ ID NO: 215155 - DNA, 340 bp, Gossypium hirsutum
gaaataggggaggtaaggttgaatttatttataattagggcactctgattctgttctgagtgcatttaggaccttcgacttctgttttaaatcctattctgattttcttttttggcttagaagttttctagcttgaagattagggcttttgggaattatacagtaattatctaagatctggcttttccgtgttatgtttggtagttaatgagaaaatgtaactagttttatattttttaattgtcttctgaaattattcatatctttgcagagatggcccgtaccaagcagacagcccgtaagtcgactggtgggaaggctccaaggaagcaacttgcta

SEQ ID NO: 215156 - DNA, 452 bp, Gossypium hirsutum
gacacgcgtcaacaatatcgcacgctttggggattcgagaagctgctgttgagagaggcaagaacgggaattcggcgtgacaggaaatatgcaattcatgcgaagaatgcattcgcaacgggagtgcatatgtcggagaatgctattgggaaaacattacatacaacagaaactaagattcgttattatcactatcacaacaccattgccgtacaccaagagctatgcagagagtacctacctccctctgccaaaaacaatgtcacttggttcaataagctaccctatgtctacgatgataacatgaagaaactggccaacaccatcaaggaattcgagcataaaaccattggagacctcggttctctatgaccccacaccccacattccactccagcagctaccacatgtatcagtttaatgcgttaatggttgagcattcatggcatatg

SEQ ID NO: 215157 - DNA, 279 bp, Gossypium hirsutum
ccgaaagccatttcttctcattatcgagagcatcttttttaacggctccttccatatcttctgagcagatattaatcacaaaaatggcgctggcttctatcatcggcacggttgctctcgcgtcagcgtacatactatctgctcggcaagagttcaatgaatgaggcgtcgatggtggcccagcggcgaaagagctgatgccagagtgcaacgtcttctcaaagactgtgacatctgacacaggcttgcaagtgcctgaatttgatatcaatgatgtag

SEQ ID NO: 215158 - DNA, 345 bp, Gossypium hirsutum
aaacttttcacttgtgccagtgagaacaatggaggaaaatttgcatacgtgcatgttgctgtagcatactatattatgattcgacggagggatatataatttttttagtgatgtagtttttgaaactcttggcagggaacttacaagtgtccaaggtctatcagactggttggattctgcatatagttatttggcaatggttaattacccgtatccttcaaactttttaatgcctttgccgggacatcccataagagaggtctgcaaaaagattgatgggtctcctgccgggtctagcattctggagcatatattcaatggagtaagcgtatattacaattatac

SEQ ID NO: 215159 - DNA, 359 bp, Gossypium hirsutum
cgttactgtagcaaggagagtggtgatgaagcagtggcctcctctatcatcggcttcgccgattgaagtaatggcgtcgccgcgggcaccgaccctttgcggccgaggagacaagaagacgaagaagggaagagattcaaaggatcgtacgggaacgccagacccaagaaggagaagaagattgaacgtatcaaagacaaggtcgaagttcccaggtccaccccttggcctctccccttcaagctcatctgattatttttcaaaatctatgcgttttttcttttttttaatagctgtaataataaagctaaaatttttgtacaattttcagggtttttattattagtagctttgctttt

SEQ ID NO: 215160 - DNA, 447 bp, Gossypium hirsutum
  unsure (1)..(447): unsure at all n locations
cccacgcgtccgcccacgcgtccgcccacgcgtccgcccacgcgtacgcccacgcgtccgctcagttggagcagatccacggcgaaatccgggatcttttccgtgctctttcaaatggcttccagagactggataagatgaaagattccaataggcaaagcatacagctggaagagcttactggcaagatgagggaatgtaaaagattaatcaaggagtttgatcgtgaaattaaagatgaggaaagcaaaaatcctcccgaagtgaacaagcaactcaatgatgagaagcagtctatgatcaaagaactgaattcgtatgtagctatgaggaaaacatacatgaataccctnggtaacaagaaaattgaactctttgatatgggagctggagtcaagtgacctacagctgatgaaaatgttaaaatggcttcatcaatgtcaaacc

SEQ ID NO: 215161 - DNA, 382 bp, Gossypium hirsutum
gcttcctccatcgagcagaaagaggaaggacgtggcaacgccgaccacgtctctgtcatccgtgagtacagggccaagatcgaggccgaattgtccgagatttgcgccggaattttgaagcttatcgacgagaagctcgttccggccgacgggaccggtgattccaaggtcttttacctgaagatgaagggagattaccataggtacttggctgagttcaagactggcgatgacaggaaagcggctgccgagaatacgctcactgcgtataaatctgctcaggcttttgatgaagccattgccgagctggatacacttggagaggattcatacaaggacagcactttgataatgcaacttcttcgtgataacctcactttgg

SEQ ID NO: 215162 - DNA, 428 bp, Gossypium hirsutum
accacgcgtccgatataactaagataacttctgctgccatttccttgtttcggcgagtccggataccctaacgaaaacaaaactttgatccaatcagaggaaattcttggtcagggctgtaatggctgccaacaacatgccagctggaatagacaaagagcaggcctttggcatggcggaaacagagatggaatatagggtagaactttttaacaggcttgcacaaacatgtttcaacaagtgtgttgataaaaggtacaaggaatctgatctaaacatgggggaaaacagttgcattgatcgcttgcgtttctaagtattggcaggtgaatagcatgattggtcagatgctcagtgctggtggtcggcctccgatgtaaaacagattcattgtcatccttcttccatcttgaattcgtttaaaatgt

SEQ ID NO: 215163 - DNA, 356 bp, Gossypium hirsutum
cccacgcgtccgcccacgcgtccgcccacgcgtccgcccacgcgtccgaagaaaaggcccgaggattccaaaacatgtccctactttcaccaacttgatgctttatatagagaaaagaacaaacatgacagctcctccactcaattcaaaccccagaactcagtcccattaatggtacgcccagagcagcaatggccccctcttcctccttccgatcccgaccatcaacaccgtcgcgaccccgaagacttagaaagctatcaaaatcatcaggacgaagacggcaatgacgagtatgaagatgaagatgaagatgaaaggggtgagtatgaaattgtagccagcaaaccagtgtc

SEQ ID NO: 215164 - DNA, 453 bp, Gossypium hirsutum
cggacgcgtgggcggacgcgtgggcggacgcgtgggcgagaaagagcttccttatgaagttgcggagagcattcggttacttcgctgcaagcctcccactgaagctgaagatggtgaggcagtggttgttcctttgagagagaaacaaatccggagaatacaaaaagctttagactccgacgatgttgagcttgttaaactgcttttaaccgagtccgatgtaactttggatgatgccactgccctccattacgccgcagcgtattgtgatcccaaggttgtttctgagattcttgccctacgtctggctgatgtcaatcgacgaaactctcgtggttatacggttcttcacatagctgcaatgcgtaaagaaccggccgtgataatgtcacttttagcaaaaggggcatctgcttcggagttgacgttggatggacgaagtgcttttaacat

SEQ ID NO: 215165 - DNA, 393 bp, Gossypium hirsutum
attggggtcagtcgctactgatgtcacatgaaaggagctacgcttgaagagaccgatggcgatggcaatcgctgtggagacaggatacgagccgtgagagaggaacgaaatgaggcactgaggatctgtcagttgcgcaactgacatctcgaatctctcatatatctagagacttgagtaaaatgagctgaacgtgtgttagaatacatgatcagagggtcactcgctagacatgctctgtgggattgggaaggattacgttccactgtcttggatacataggttacacttatgtatcggtgcaacacgtggattacattaccttcacaccgttgctaagcatgctgtaatcgaccgacacatcaacagctgcaacatacttttagatgaaga

SEQ ID NO: 215166 - DNA, 469 bp, Gossypium hirsutum
acgtagacgcacgcgttcgcaagaacatgcttgagagggtcagatttctatacgaggaatgccttccaatataccggatcggacgttttagaatcacatcaactctgaccgtttaagagatagatgtgaccagacctgagacatacctatcatacgatgagttcaaggagaaattcatgatgaaaaaagacgcattctataaattgccgaagtggaaacacatcaagctaaaaatggctcttcaactgttctaaaagccccctttgattcatctgtgctatttattcaaaacccgctttcaaatgagagtgcagtgggaagaaccctaaccctgttattcaggatcgaaaaaaagggacagcttcagtgcatatttagctgcttctgttcccctaagaagctgtggggtattctcttacttgggacattaatagacatatcttggattttaactcccttcccttttatt

SEQ ID NO: 215167 - DNA, 414 bp, Gossypium hirsutum
gccaatgttacatatgaggacattcttttgaaggaagagttggatagccttgttgccaactaccctggtcgcttcaaagtctactacgttttgaaccagcctcctgaagtctggaatggaggtgtcggctttgtgtcaaaggaaatgattcagacccactgcccagcaccggctcctgatatcaagattctaaggtgtggccctccaccaatgaacaaagccatggctggccatcttgatgctcttggctattcacctgagatgcagttcccgtttctaatctcgctagacgaggtcaagctttactcagacctattaatcttcttcattggtgagaacaaaaccatttgctatcaactcttggtgtaattggaactttttaagcattggaaccaagattcagatgtttttaac

SEQ ID NO: 215168 - DNA, 429 bp, Gossypium hirsutum
acgccacgcgtacgggtcgcctcatttttttcactcggtcaatctttggttggttttgggcggggttgaaaatgctcgctcggctcgcgtctcgacgttttctcgagatccgtcaagctttccgtcaatcttctcaggcctctcgatctttgtccactgccctgaactatcatcttgataccccacataataatcccgaccttccatgggaattttcggaggcgaacaaacaaaaggtcaaggagatattgtctcattatccatccaactacaagcaatctgcagttattcctttgctagatcttgctcagcagcagcatggaggatggcttccagtttcggcaatgaatgcacttgcgaaggttatagaagttgctcctattcgtgtgtatgaagttgcgacattttattcaatgttcaaccgatcaa

SEQ ID NO: 215169 - DNA, 450 bp, Gossypium hirsutum
ctaaaattcattatgctggaatgcttcaatatgatggtgagttgaagcttccaggccactaccttgtttctccccccgagattgacagaacatccggcgaatatttggtgcacaatggtgtacgtacttttgcgtgcagtgagacagttaaatttggccatgtcacattcttctggaatggaaatcgctccggctatttcaaccctgaaatggaagaatatgcggaaatcccaagtgatgttggcattacattcaatgttcaaccaaaaatgaaggcactggagattggtgaaaaggctagggatgcaattctgagccgcaaatttgaccaggtgcgtgtgaacattccgaatggtgacatggttggtcatactggagatatccaggctactgtcgtggcatgcaaggccgctgatgaagctgtcaagatgatcattgatgccatagagc

SEQ ID NO: 215170 - DNA, 372 bp, Gossypium hirsutum
gggatatgaacaccccagaaaagattgaagccgcaggtaaaaagaaggaagaaggaaatgtattgttcaagtctggaaaatatgcgagagcttctaagagatatgaaaaggcagtaaagtatatcgattatgattcttccttcagcgaagaggagaaaaagcaagccaaggcattgaaggttgcttgcaatctgaacaatgctgcttgcaagctgaaactgaaggatttcaagcaagctgagaaactgtgcaccaaggttttagaaatagaaagttcgaatgtgaaagcgttgtatagaatggctcaagcatacattcatctggcagatttagatttggctgagtttgatgtcaagaaagcccttgagattg

SEQ ID NO: 215171 - DNA, 343 bp, Gossypium hirsutum
aacgtcatcgcgtagggatgctctcatatggaggtgagttgtagctttcatgccaatggcttgggtctctccaaaagattgtccgaccataaggagaatatttgaagctcaaaggtgtagcgtactctttcttgcagagagacagattaatacggacatgtcacaatcttctggaagaggtaatcactctaactatttgaaccctaccaatgaacaatatgctggcttgccatcttaaggctgcattacattcaacggtgaagcagaaatgaaggctctggtcattggacaaaatgctactgatgtaatacctattcgtatatttgaccaggggcaacagaac

SEQ ID NO: 215172 - DNA, 434 bp, Gossypium hirsutum
ctagattttctctgtaagctctacctagagaagaagccatggctaatgcagcgtctggaatggctgtgcatgatgactgcaaactgaagttccttgagttaaaggccaaaagaacataccgctacatagtattcaagattgaggagaaacagaagcaggttgttgtagaaagcttggtgagccaagtcaaagctatgatgatttcacttcaagcctccctgctgatgaatgtcggtatgctgtctatgattttgactttgtgactgctgagaattgccaaaaaagcaggattttcttcattgcatggtctcctgacacctaaagggtgagaagcaagatgatttatgcaagctcaaaggacaggttcaagagagagttggacggtattcaaatagagctgcaggcaactgacccgactgagatggaacttgatg

SEQ ID NO: 215173 - DNA, 437 bp, Gossypium hirsutum
cccacgcgtccgattcaccatgtgtacgttggagaaacgcggcaacctctttattttaacgtttaccggcgaagaccagcaccggtttaatcccaatgtcatcggctcccttctcagccttctctctcaggtcaaggctgaagccactcgtggctcagctcttattacccaagcccaaggtaagttcttctccaacggcttcgatctcgactgggctcaagccgccggatctgaacaaggagccgcggaacggttacaccacatggtggatttgtttaggcccgtcatcgcggctcttctgtccctcccgatgcccaccgtcgccgccatcaccggtcacgccgctgccggtggatttgccctcgcgttgtctcatgattacctcattatgaggaaagaccgaggggttctttacatgtccgaggtggacatagcgc

SEQ ID NO: 215174 - DNA, 221 bp, Gossypium hirsutum
tcgaccaatatattataggccccaatttgatttccgtggactgacaaattttgcttgaattgtttcttacaaatcatcggtgaaccatgcttcttaaatggatgtttggagctggagactggattgtgctgcttgttttatttattttatattcaaggttcttgataacattaatgttaatatctattattgtactatattatttttatataaaatttatt

SEQ ID NO: 215175 - DNA, 456 bp, Gossypium hirsutum
  unsure (1)..(456): unsure at all n locations
tcgnccacgccgttcgcagaagaagatgcttcatgcactaataaaggaaagtgggactgaaggagcggattgttgccttcattgctggacttactgctcctccaggacggcgtatgggtcatgcaggagctatagtatcagggggcaagggtactgcacaggacaaaatcaagactctaagggaagctggagtgacagttgctgaatctcctgcaaagattggtgtagcaatgcatgatgttttcaagcaaagaggcctcctgaattaacacccttttttttttcctagaaaaaggaaaactttttttcctgaataagtttcaggtggacatttttcatataattccattgtttttcttttgtccaaaattatttttatactaaaaaatgagggaaaaatcttataccttagtcaatgaaaccagatttggcttaaacaagacgggcaatactttt

SEQ ID NO: 215176 - DNA, 451 bp, Gossypium hirsutum
gcgcctctcccgatttcttcttcttcactttgaggtttgagcagatcgtatggcaccaaagaaagacaaggcccctccaccttcttccaagccagcaaagtctggtggtggcaagcaaaagaagaagaagtggagcaagggaaagcaaaaggagaaggtgaacaacatggtgttgtttgaccaggctacttatgataagcttttatctgaggctcctaaatataagctcatcactccctcaattttgtctgatcgtatgaggattaatgggtcccttgctaggaaggctataagggaattgatggcaagaagatcgattccgttggtgtctgcccattcgagccagcagatttacactaaggcaaccaacacctagatcctttggtatatttttgcttaaattagttctatgtagtatttgcctttcttgactttctataaatgatttttc

SEQ ID NO: 215177 - DNA, 349 bp, Gossypium hirsutum
ctgaaacatgaactatcagtgctgcggagcacagcacgggcagcagatcagcgtctgcaggtatacatatgtgttggaactggccaccatactaggggttctcgtactccagcgagacttgcagttgctgtgcaacggtatctgcttgaagaagagggccttgactatacagaaccacagccagggctacttcgagttgtcatatattgaagccatggaccttgacagcgttgaggtataggagtttttgacactacagaaaaaagaaaccatcaagtcatagtcaccatagtcattcttgtatctgtacatgggaagaaaatgaaaaggggaatgtagttgaatctgg

SEQ ID NO: 215178 - DNA, 426 bp, Gossypium hirsutum
cggaaccacttcgatccacagtgtcttctactttcagcggcgatgaaacggcaccgttcttggtcttcctcggcgccgatgctgctctcgtcttctcctgtatgggagctgcatatgggacggctaagagtggtgttggtgtggcttcaatgggtgtgatgaggcctgcattggtgatgaaatctattgtaccagttgttatagctggtgttttgggtacttatggcttgattatcgctgacattattagtactgagatcaatcctaaggccaaatcgtattacctattcgatggttacgctcatccatcttatggtcatgcttagggccatgctgggctgtctgctggaatggctcttggaattgtcggcgatgctggctgtagagctgacgcacagttaccacagctttatgctggaatgatcc

SEQ ID NO: 215179 - DNA, 290 bp, Gossypium hirsutum
cccacgcgtccggaaggttgtcaaccttcattaagtatctcgacattgatgtcctggttcatggagagcctgagagaaacgatatggttgagtactttggtgagcagttgtctggttttgctttcactgttaatgggtgggtgcaatcttatggttctcgctgtgtcaaaccaccgatcatctatggtgatgttagccgccccaaggcaatgactgttttctggtcatctactgtccaaagcatgacttaacgcccaatgaagggaatgcttaccggtcctgttaccatt

SEQ ID NO: 215180 - DNA, 415 bp, Gossypium hirsutum
cccacgcgtccgcccacgcgtccgcccacgcgtccgcccacgcgtccgcccacgcgtccgattactttccctggagaagcagatgaagcacccgacacagttactggggatattgtatttgtcctccaacagaaagatcatccaaaatttaaacgaaagggtgatgacttatttgtagaacatacgttgacacttactgaggcagtttgcggcttccagtttatactgacccacctagatggtaggcaacttctcattaagacccatcctggtgaagtggttaagcctgatcaatgcaaggccataaatgatgaagggatgcctatgtatcaaaagccattcatgaagggtaaactatacattcactttaccggtgattttcctgactccttggcccccgagcagtgcaaggcac

SEQ ID NO: 215181 - DNA, 454 bp, Gossypium hirsutum
cccacgcgtccgcattctttcttccgagacgatggacatccccgatggggttagcgtcaaaataaaagccaaggttatcgaagttgagggtcccaggggtaagcttatccgcgacttcaagcacctcaacctcgacttccatctcattaaggacgaggagaccggcaagcgtaagctcaggattgaggcttggttcggctccaggaagactagcgccgccatccgcaccgctctcagccacgtcgagaacctcatcaccggcgtcaccaagggataccgttacaaaatgaggttcgtctatgctcactttcccatcaacgccttcatcactaacgccaacaagtccatcgagatccgtaatttccttggcgagaagaaggtgcgcaaggtggatatgttggaaggggtttccatagttcgatctgagaaggtgaaggatgagattggtttggat

SEQ ID NO: 215182 - DNA, 284 bp, Gossypium hirsutum
atcatatttgcaccagtagcagtgttgtcatggttcccattcatctcaaccttccagtctcgccttctctttaaccaagcctttagccgtgggctggagatttctctcatccttgccggaaacaaagctaatgtcgagacatgatttctactttctggctgcggttaggtttgcttgaactagttattgtttttattttttggcctcgatttattaatttatgaatttaactacaatccttttatagtatatattatttttgatggaaaaaaacagtcacatac

SEQ ID NO: 215183 - DNA, 447 bp, Gossypium hirsutum
cccacgcgtccggccacgcgtacgcaaatctttcgtctcttaattttggttggatatcgaagatgtcaggaagaggaaagggaggcaagggtcttggcaagggaggagctaagcgccaccgtaaggttctccgtgacaacattcagggcatcacaaagccggcaattcgacgccttgcccgtaggggaggagtgaagcgtatcagcggcttaatctatgaggaaacccgtggagttctcaagatcttcttggagaacgtcattcgcgatgcggtcacatacaccgaacacgccaaggagaaagacggtgactgccatggatgtggtttatgcgctgaagaggcagggtaggactttgtatggatttggcggttagttgatttagggtctaggttttaaaataggggaagaattgtaagactcagttaaagttacaagctgggttttg

SEQ ID NO: 215184 - DNA, 454 bp, Gossypium hirsutum
  unsure (1)..(454): unsure at all n locations
tttgcatccactgattttgcgttctttgttttgtggaatcaaagcttcgccgttgaccatgattctccggtcagtattggtcttggttctgttggtgggggttttattccgtgcatcgcaatctttgcgtttcgatctgcaatcgggacaaactaaatgcatcgccgaagacatcaagagcaattcaatgactgtcggaaagtaccacgttgttaaacctaacgaagatcatcctttgcccgattctcacaagctcaccgtcagggtaacgtcttcgtatgggaataattttcactcggcagaaaaggttgaaaaatgggcagtttgcattcacggcgacggaacatggtgattacatggctttgctttgngcgccggagcattcgccgncgatcacggtcaccngtgatttcggttggaggactggagtccacaccaaggactggactaacgt

SEQ ID NO: 215185 - DNA, 449 bp, Gossypium hirsutum
caagaagatgctaaagagggtgaagctgaagacgaggaaggccttccaatatacccttacgaacgtgtcaaaataacatcaaccgatcccgtttctgagatagatgtgaccagacgagagacatacctgtcatccgaggagttcaaggagaaattcgggatgaaaaaagacgcattctataaattgccgaagtggaaacaaaacaagctaaaaatggctcttcaactgttctaagtcccccctttgattcatctgtgctatttattcaaaacccgctttcaaatgagagtgcagtgggaagaacccgaacccgttttctcaggatcgaaaaaaagggacagcatcagtgcatatttagctgcttctgctcccctaagaagcttttggtttttctcttttttgggtcattaatagacatatctggatttcaacccccccccctttttttc

SEQ ID NO: 215186 - DNA, 441 bp, Gossypium hirsutum
cccacgcgtccggtgctataattatgtttgacgttactgcccgtttgacatacaagggtggtcctacctggcaccgtgatctttgcagggtgtgcgagaatattcctattgttctatgtggtaacaaggttgatgttaagaacaggcaggttaaggcaaagcaggttacattccacaggaagaagaatctgcaatactatgaaatctcagccaagagcaactacaattttgagaagcctttcttgtaccttgcccggaagcttgcaggtgatcctaatcttcactttgtggagtcacctgctcttgctcctcctgaagtacacatcgacttggctgcacagcaacaacatgaagctgagcttgcagcagcagctatccaacctcttccagatgatgatgatgatgcatttgagtagagaagagaatacaatattagctttt

SEQ ID NO: 215187 - DNA, 450 bp, Gossypium hirsutum
tccacgcgtccgccaacatcgatagttagttacaaccatctgggaaataatgatgggatgagtctgtcagcaccccaaaccttccgttccaaggagatctcaaagagcaatgttgatgatgacatggtttcaagcaatggaatcctctatgagcctggtgaacatcctgatcatgttgtggtcatcaagtatgtgccgtatgtgggagacagcaagagagccatggatgagtacacatcatagatattcatgggaggcaagaacaccattgtgttgcacaacacatgtgaggattccctgttggctgctcccattatgctagacttggttctccttgctgaacttagcaccagtatccagttcaaggctgatggacagggcaagttccacactttccatcctgtggctacaatcctcagttacctcaccaaagcccctcttgatccacca

SEQ ID NO: 215188 - DNA, 458 bp, Gossypium hirsutum
gggatatgaacaccccagaaaagattgaagccgcaggtaaaaagaaggaagaaggaggtgtgttgttcaagtctggaaaatatgcgagagcttctaagagatatgaaaaggcagtaaagtatatcgattatgattcttccttcagcgaagaggagaaaaagcaagccaaggcattgaaggttgcttgcaatctgaacaatgctgcttgcaagctgaaactgaaggatttcaagcaagctgagaaactgtgcaccaaggttttagaaatagaaagttcgaatgtgaaagcgttgtatagaagggctcaagcatacatccatctggcagatttagatttggctgagtttgatgtcaagaaagcccttgagattgatcctgataatagggagataaagatggaatacaaattattgaaggagaagatgaaggagtacaataagaaggaagccaaattctat

SEQ ID NO: 215189 - DNA, 422 bp, Gossypium hirsutum
gtcctttacagatcatctttctctctctcattttccacttgagcactttatttgccttttcttttttttttttccccttcggagtttgcttttttgcagatcaaggaagaaagttatggcagaagaagaaactgaactgagcgacaagcaaaagaaagagatcgccaaatggttcctcctcaatgctcccgcaggcgaaatccagtacgttgccaaagatttaaaatccgttttgaataatgatgacgtctacgatgaggcggcatcggaagcatttcctgtttataacaaatctcacatgatttgcctcgaaatgcctggtagattcggagatgtgctggttacatcatatggggagcttcagggtaatgagtatctaaaccccaagactggccaagttgctatagttgaccatgtcaaac

SEQ ID NO: 215190 - DNA, 409 bp, Gossypium hirsutum
ccagaaaccctcgttattaatcggcggaagcagatagcctctagccatgactttcaagcgtaggaatggtggccgcaacaagcatggccgtggccatgtcaaattcatccgctgttctaactgtggcaaatgctgccccaaggataagtcaattaagaggtttcttgtgaggaacattgtggaacaagctgctgttagagatgtccaagaagcctgcgtttatgacacttatactttgcctaagctgtatgttaagatgcaatactgtgtctcgtgtgcgatccactcccacgttgtgagagtccgatcccgcaccgataggaggaaacgtgatccacccgcccgcttcatcagacgcagggatgatatgccaaagcctggtcagccttgtcaagcaccacgtccaggt

SEQ ID NO: 215191 - DNA, 453 bp, Gossypium hirsutum
cccacgcgtccggcaattttagctgaggagaaacaccttcccatgtatcaagaaatggcatccaagcccaatgtagagtatattgctggaggtgctactcaaaattcaatcaaagttgcacagtggatgcttcaaattcctggtgcaactggttacattggctgcattgggaaggacaagtttggggaggaaatgaagaagaactcaaaagctgctggtgttaatgttcaatatctcgaggatgaaactgcaccaacaggaacttgtgctgtttgtgttgttggtggtgaaaggtcactcattgcaaatctatcagctgctaactgctataagtctgagcatttgaagaagcctgagaattgggcgttggttgagaaggccaagtacttctatattgctggatttttccttactggatcttcggactccatacagcttgttgctgaacacgct

SEQ ID NO: 215192 - DNA, 447 bp, Gossypium hirsutum
cagaaaaacatggtgacagcccaaggcaggaccgaccctaaccaaaacacgggcattgtgatccagaaatgtacgataggtgccacttctgatttacagcctgttcgtaaaaactttgcaacatatcttggcaggccctggaaggagtactcgaggactgtggtaatgcaatcaacaatcagtgacgtgattcaacctgctggttggcacgagtggagcgggagtttcgtcctgaaaacactgttttatgccgagtaccataacaccggtgctggtgccataacttctgcgagagtgaaatggggagggtacatggtgatcactagtgcacgtgaagctcaggcttttactcctggcaggttcattgctggaggaagttggttaagctctacaggctttcctttcgctcttgggttggaataattttaaagattgtattgtcaatgt

SEQ ID NO: 215193 - DNA, 454 bp, Gossypium hirsutum
cccacgcgtccgcagacctcgtccgtggtctccgagagcacaccgatgccggtggcataatcttacttctccaagacgaccaagtccctggcctcgaattcctcaaggacggtcaatggtttagaatcccaccgtcgaaaaacaacaccatattcatcaacaccggcgaccaaatcgaagtgattagcaatgggaagtacaagagtgtgttgcatcgtgtaatggctgagaaacaagggaataggctttccattgctacgttttataaccctggtagtgatgctgtgatttcgccggcaccggaattgttgtacccgggaaattaccagtttggggattatttgaaactatattcgactactaagtttttggagaaaggaccaaggtttgaatcgatgaagatgacgatggttaatggtcaccatggttgaaaaaagcagtgatttgcatggcc

SEQ ID NO: 215194 - DNA, 439 bp, Gossypium hirsutum
cccacgcgtccgccaacatcgatagttagttacaaccatctgggaaataatgatggcgtggatctgtcagcaccccaaaccttccgttccaaggagatctcaaagagcaatgttgttgatgacatggtttcaagcaatggaatcctctatgagcctggtgaacatcctgatcatgttgtggtcatcaagtatgtgccgtatgtgggagacagcaagagagccatggatgagtacacatcagagatattcatgggaggcaagaacaccattgtgttgcacaacacatgtgaggattccctgttggctgctcccattatcctagacttggttctccttgctgaacttagcaccaggatccagttcaaggctgatggagagggcaagttccacactttccatcctgtggctacaatcctcagttacctcaccaaagcccctc

SEQ ID NO: 215195 - DNA, 359 bp, Gossypium hirsutum
cccacgcgtccgcccacgcgtccgacaggagaaaagatatttaacatgatttatatgctattcaacattggtcttacagcctacacaatcggtaacatgactaacctggtcgttcatgctgctgtcagaacctttgccatgagagatgctctgaatgagttattgcgttatgcaagcaaaaatagactcccagaagggttgagagaacaaatgatggcacacatgcagctcaagttcaagacagcagagttacaacaagaagaagtgctacaggacctgcctaaggctataagatccagcattgcccaacaccttttccgtagaactgtcgagaaaagctacctattcaatggagtctc

SEQ ID NO: 215196 - DNA, 354 bp, Gossypium hirsutum
ctagaagcctagctgatgccatggtttggttggtatgctccgacaggaagagcggcgaaggtgtcttcaaaaaggagggatacaccgacaaaaccggaaaataccagattcgtgtatccgaggatcacttggatcagatctgtgatgcagttcttgtgaagagctcccagcttggttgtgccacaatgtcccccggtcgtgaacgtgcccgtgttatcttgaccaacttcaatggcatttcatccaccatccgttatgccaatgccatgggcttcatggttgacgagcctgaagcatgctgtgctgagatgatgaagatttatcaggaggatgaggagaattcttagtgtgttg

SEQ ID NO: 215197 - DNA, 287 bp, Gossypium hirsutum
ggaaaaaataaatctagatcatgtttttgttcgattggttctatgggattcttgcgtcccgcggtctatggcataaagaggccaagatcttgtttttagggcttgataatgctggcaaaaccacgctccttcacatgctcaaagatgagagattagttcagcatcagccaacacagcatcccacatcagaggaattgagcattgggaaaatcaagtttaaagcttttgatttgggaggccatcagattgctcgaagagtttggaaagattactacgccaaggtggat

SEQ ID NO: 215198 - DNA, 279 bp, Gossypium hirsutum
ttcgacctacgacgtacgcgtacgcgtacgcctacgccttcagacatgcttcatgttcatagcactgaacctatatctatggcccgggagctatcacagcctccacagtctggggcttaactgaactagtcccctattcagacaaagaaaacctctatcatgacatatgcatagaccctgatactaagatgatctagcaagattaaacacgcatcaagaagtggagaataagaagggccttacatgacgaataacatccctatctgccaaagcatatcc

SEQ ID NO: 215199 - DNA, 438 bp, Gossypium hirsutum
ggccgatcaacttacggacgatcagatctctgagttcaaggaggctttcagcctttttgacaaggatggcgatggttgcattactaccaaggagctggggactgtgatgcgatcacttggtcagaaccctactgaggcagaactccaagatatgatcaatgaagttgatgctgatggaaatgggaccattgattttcctgaattccttaacctaatggcaaggaagatgaaggatactgattccgaggaagaacttaaagaggctttcagggtgtttgacaaggaccagaatggtttcatatctgctgctgagcttcgccatgtcatgacaaatctcggtgagaagcttacagatgaggaagttgatgagatgatccgtgaagctgatgttgatggtgatgggcagataaactatgaagagttcgtcaaagtcatgat

SEQ ID NO: 215200 - DNA, 423 bp, Gossypium hirsutum
cccacgcgtccgccgggagacatgccgcaagatcaaggcccttcaccaatatgattgcctgagagctaacaaagcaacgtcagcatggggattagaggcacgagtccccttcttagacaaagaatttatcaatgttgccatgtctatagaccctgaagcgaagatgatataaaaagatgaaggacgcatcgagaagtgggttctaagaagggccttcgatgacgaagaacatccctatctgccaaagcatatcctctacagacaaaaagaacagttcagtgatggtgtccgttatagttggatcgatggtctcaaagcccatgcttgccgacatgtgacccgataagatgatgttcaatgcttctttcatatttccctacaacacaccaactacaaaggaagcatattactacaggatgattt

SEQ ID NO: 215201 - DNA, 381 bp, Gossypium hirsutum
gtgcggacgagatcatatggcttacagatctgcttatttccctgtcaaggatgtgattgatggggatttgtgtgagcagtttccgaccctacctctggatctgcagagaaaaattgcagacgagttggaccgtactcctggggagatactgaagaaactcgaagaagtccgaaacaagatcatttgagatagcagatagcatcaaaggtcaagttctcttttacccggattgcgggataccaattgcggttaagaaggctttagcacgtcagaatccaaggcagatgagggagaaaatgggacgatggaagtcgagaacacgagaccaagaatgggagtattgtataagtagttattagacaaactaggtgtgttagaggc

SEQ ID NO: 215202 - DNA, 451 bp, Gossypium hirsutum
  unsure (1)..(451): unsure at all n locations
gtttggaccggatgcttctaaagtgttggtagcgaagctaattgacggctacctagctgaaattgctcgagatccgaatttaccggtttcaaatttcgttaaccttgctgaaattgtatcaagcgtctcgagaccttgtcatgacggactttaccgtggcatagacatgtatctgaaggaacacccgggaatcagcaaaagtgagagaaagagaatatgcaggttaatggactgcaagaagctatcggctgaggcctgcatgcatgctgtgcaaaacgagaggcttccattacgtgtcgtcgtgcaggttcttttcttcgagcaagccagagccacaacgtcctncggcagtagcacccccgatcttccggggtccattagagcccttcctcccggaaggtctcaccgtagctcaaggtccacaacaaccaacactgaagaggattgggat

SEQ ID NO: 215203 - DNA, 313 bp, Gossypium hirsutum
ctagaagcctatctgatgccatcggtttgtttgtatgctccgactggaagagcggccaaggtgtcttcaaaaaggagggatacaccgacaaaaccggggaataccagattcgtgtattcgaagatcacttggatcagatctgtgatgcagttcttgtgaagagctcccagcttggttgtgccacaatgtcccccggtcgtgaacgtgcccgtgttatcttgaccaacttcaatggcatttcatgcaccacccgttatgccaatgccatgggcttcatggttgacgagcctgaatcaggctgtgcttagatgat

SEQ ID NO: 215204 - DNA, 445 bp, Gossypium hirsutum
cccacgcgtccgcccacgcgtccgcccacgcgtccggaaatctttcctttctttttttgcattcctctcacttctcctgtttgtagacaccattgcagcagctaggaaagatgctggagagtactggggagctgtaacgaaagatcaacctatgcctgaggcactccaagagcttgttcggattgaggctgccgttgtcagccccgatgagaaaaccaagtgccatacatcaggtaatattgagcttaaggaagagaagattattgttaatgaggagttcgaaccaaggccaaacgtttcagcttatggtgatgacgctaatctaaaaagaggataatcatcatcttttgctgaagattttgaaccgagacctaacgtttcggcttacgggggcgatgatgctggtcttaaaggacagaaagaatcattcactaaagaattcgat

SEQ ID NO: 215205 - DNA, 419 bp, Gossypium hirsutum
  unsure (1)..(419): unsure at all n locations
ctgagggcgagtatggatcgggttatggaggtagaacagagactgaatacggntgcgggtgtgagaggaaaccaagttatggtagatccgaggaagaggaagaaggatataggaagccaagttatggtagatccgaggaggaggaagaaggatataggaagccaagttatggtagatccgaggaagaaggatatggccgcaagaaacatggcgatgacgacagtgatgatgatgatgaagagaagcgtcaccaccaccgctataagcaccaccaccataagcgccacgatgactatgacgactagtcagactggccattccctctacaaatggaaatctgcagtaatagctattaaataaatgatcgaggcatgccacctttgatcgtttcttttaccatttccgtgtgctttttgtgt

SEQ ID NO: 215206 - DNA, 410 bp, Gossypium hirsutum
gattcctctcaacaatattccaggctttggggattcgagaagcttctgtttagagagtcaggaacgggaattcggcgtgacaggaaatatgcaattcaggcgaagaatgcattcgcaacgggagtgcatatgtcggagaatgttattgggaaaacattacataatacagaaacaaagattcgttattatcactatcacaacaccattaccgtacaccaagagctatgcagagagtacctccctccctctgccaaaaacaatgtcacttggttcaataagctaccctatgtctacgatgataacatgaagaaactggccaacaccatcaaggaattcgagcataaaaccattggagacctcggttctctattaccccacaccccacattttattccagcagctaccacatg

SEQ ID NO: 215207 - DNA, 447 bp, Gossypium hirsutum
ctgctttggtgaagatggcgaaatgctcaaaagattatgaaccagccatcgagactttccagaaagctcttactgagcatcgcaatcctgacacgttgaagaaactaaatgatgctgaaaaagccaagaaagaactagagcagcaagaatattttgatccaaagatagctgatgaggaccgtgagaaagggaatgaaagtttcaaacagcagaagtatccagaggctgtgaagcattataccgagtcattgagacgaaaccccaaagatccaaaggcatacagcaatagagcagcatgctacacgaaattgggcgctttgcctgagggattgaaagatgctgagaagtgcattgagctagatccaacattttcaaagggttacacaagaaagggagctgttcaattcttcatgaaggagtatgacaaagctttagaaacataccaag

SEQ ID NO: 215208 - DNA, 364 bp, Gossypium hirsutum
cttctttctgcttccctttttttaaaaaaataaaaaataaaaatcccattaaggcttgaactgttcttcagccaaaatgggtatttctcgtgattcaatgcacaagaggcgtgccactggtggcaaaaagaaggcttggaggaagaagagaaagtatgagcttggaaggcaacctgctaacacaaagctgtcaagcaacaagacagtcaggaggattagggttcgtggtgggaatgtgaagtggcgtgctctgaggctcgacaccggaaactactcatggggaagtgaggctgtgactcgtaagaccaggattttggatgtggtgtacaatgcatccaacaatgagctgttcgcactcaaactc

SEQ ID NO: 215209 - DNA, 457 bp, Gossypium hirsutum
cagaagcagcttatgcaaccagttcgcagccatggtgaagtattcgaaggagtcagataatcccaccaagtcctgcaaggcaaggggctctgatctcagggttcatttcaagaacacacgggagactgcgtattgctatcaggaagttggctttgggtaaggctaagacgtatttggaggatgttatggctcacaaacaggccatacccttcagacgcttatgtggaggagttggacgtacagctcaggcaaagaacaggcattctaatggacaaggtcgctggcctgtaaaatctgccaaattcattctagatttgctgaagaatgctgagagcaatgctgaggttaacggtttggatgtggatgcactctatatttctcacatccaagttaaccaggctcagaaacaaatgcgtcgtacataccgtgcccatggcagaatcaatccttacatgtc

SEQ ID NO: 215210 - DNA, 423 bp, Gossypium hirsutum
cggtctcctaccacctaccctgcttcccagaccggcggccccaaggtaccggctaaagatctcgtgatgggtcaagttaagatcctgaaacgcggtgaggttctaaaaaaaccgacgctggaaaagtgcgtcaggttcgaaaaggaaaacattgacgttggagatctgggttccactaaccgtttgggtcctgatcccggttacgttccgacccagatccgactgaccaagtcaaacaacaattagaaggtcgtcccagcctctttttatgctgggtcggtctttataacctcgccgactacgagttccgtaccgatgccggtgttttgcaccaagaagatcagcgttaccgtaaagaacgactacgccacgagcgacttacggaggatattaaggctcgatttgtagtcatacccaggaatt

SEQ ID NO: 215211 - DNA, 356 bp, Gossypium hirsutum
cccacgcgtccgtaggatttctgccttgagtcaggctagagttatctacgttatgacccatgattccattggtcttggggaagatggaccaactcaccagccaattgagcacttggcaagcttccgtgcaatgcctaatgttttgatgctccgtccagctgatggaaatgaaacggctggagcatacaaggttgctgtcctcaagaggaagacaccctcaattcttgccctttccagacaaaagctaccccaattagctggaacttccattgagggggttgaaaaaggtggctacatcatttcagacaattcttcaggcaacaatcctgatgtaattctgattggaacttggtctg

SEQ ID NO: 215212 - DNA, 317 bp, Gossypium hirsutum
tcgccacgcgtccgaaccctgacaagattcatttgttcccatttctggttttgagggtgataacatgattgagaggtctaccaacttggactggtacaagggccctacacttcttgaggctcttgaccagatcaatgagcccaagaggccttcagacaagcctctgcgtctaccacttcaggatgtgtacaagattggtggtattggaactgtcccagttggtcgtgttgaaactggtgtcttgaagcctggtatggttgtgacctttggtcctactggtctgaccactgaagttaagtcttgtgagatgcaccatg

SEQ ID NO: 215213 - DNA, 446 bp, Gossypium hirsutum
  unsure (1)..(446): unsure at all n locations
gagttttacttacaatagtaacatcaacattgcagtagctgttgctatcaatggtggcttgattacccctgttcttcaagatgcagataagttggatttgtatctactgtctcaaaaatggaaagaattggtggagaaagcccgggcaaagcagcttcagcctcaagagtataattcggggacattcactctgtccaatctgggcatgtttggagtggacaggtttgatgccattcttcccccaggccagggagctatcatggctgttggagcatcaaagccaactgttgtagctgatgctgagggattcttcagcgtgaaaaacaaaatgctggtgaatgttactgctgaccaccgaattatctatggtgctgatttggctgccttccttcanaccttctcaaagattgttgagaacgctgnaagcctcactttgtagatgattc

SEQ ID NO: 215214 - DNA, 452 bp, Gossypium hirsutum
cccacgcgtccgctctttatatatatagcaccaccattatagtctccaaaaaccagtaagaatcaaccacttcgataatggccatgcataacctagttcaagctcttgtttttgttgctgtttttttcaacacattggcacccacagtcgcaaatgttgaaggggatgctttgtatgcattgaggagaagtgttaaagaccctaaaaatgtgctcaagagttgggatccaaccttggtggatccttgtacttggtttcatgttacctgtgatgctgataatcgtgttactcgtctagatcttggaaatgcaaaattgaagggcagattggtacctcagttgggaaagcttgaacgtcttcaatatttagagctgtatatgaacaacttggagggttccataccagaagaaattggagggttaaaaacctttagtgagttggatctttacaat

SEQ ID NO: 215215 - DNA, 382 bp, Gossypium hirsutum
ggaatacggaaagatgatggaagctgagggcccaccaaaatttgatgagacggctgtaccagacttaaaaaagaacttggatgatccacctggtgagggaccaatccttaggtggcaaactcgggcggtgtttgctcctggtggtgatgcgtggcatcccaaaaacagaaaagtaaagatgtctgttacagtgaaggagctcgggctttcaaagcatcaattccgcccggtacgagagcttgttggaaagaaataccatccaggcaaaaatgaacttacatttactagtgaaaaggttggacccccgggaaaagaccaaaaaaaatggcttaaaaccatttttttttttatttgaggaacccggaaaagctaccaaatgggg

SEQ ID NO: 215216 - DNA, 311 bp, Gossypium hirsutum
aattgacggacggatccacgcgtactaccactcgttccttcacgcgtgagcaacgcttgcgatcaatatgtcggattgggagtagtgaaagggttcatggggaatacatagtatggtgctatgggtgggggagctaactctacgaatcatggctacacaattggagatggacgtggtgctgaaatagatgcacctttgtgcttgtttacactgtgttctcagacactgatgccaagcgcagtgccagagactttcacgttcatattctggcaccattgccaattgggttctcagtgttcttggagcactta

SEQ ID NO: 215217 - DNA, 310 bp, Gossypium hirsutum
cgttgacaagggcaatatactacatggtgatgcagtgcttgggagccatatgtggggctggtgtagttaaagggttcatggggaagacaaggtatggtgctttgggtggtggagctaactctgtgaatcatggctacacaaagggagatgggcttggtgctgaaattgttggcacctttgtgcttgtttacactgtgttctcagccactgatgccaagcgcagtgccagagactctcacgtccctattctggcaccattgccaattgggttcgcagtgttcttggtgcacttagccaccatcccaatcac

SEQ ID NO: 215218 - DNA, 393 bp, Gossypium hirsutum
  unsure (1)..(393): unsure at all n locations
aaactccaacactaaccgcttcggttgccacggaagctgtcactgagactgaaacaccatccgacttcatcattcctcagaaacctgaggaggtggtcaagcaagttggaaagccaagactggttttgaaattcatatggatggaaaagaacatcgggcttgcccttgatcaagtcataccgggccacggcactgttcctctaagtccatatttcttctggccaaggaaagatgcctgggaagagctcaaggccactctagaaagtaagccttggatttctcagaagaagatgattatccttctcaatcaggccactgatatcatcaatctatggcagcaaagtggtggcaacctttcccagagctagatgtgcatntttttatataattttt

SEQ ID NO: 215219 - DNA, 419 bp, Gossypium hirsutum
  unsure (1)..(419): unsure at all n locations
gttccatccaaatatttatgctgatggtagcatctgtttggacattctacaaaatcagtggagtccaatttatgatgtagctgcaatactgacatctattcagtcattgctttgtgatccaaatcctaattcccctgcaaattctgaagctgctcggatgtttagtgagaacaagcgcgaatacaataggagagtacgtgagatagtcgagcagagttggactgctgattgatctctcatgttggatttccatagtcagaacaaagcgtggatacattaggagagcatgtgagactgtcaagcatagttggactgctgattgatagctcaacgtttggtttggtttctatggaacgtcaaaaatagtccaatgtcgtgtctaaataacattgaacaccgcanatgtgttgcaaactact

SEQ ID NO: 215220 - DNA, 366 bp, Gossypium hirsutum
cccacgcgtccgcccacgcgtccgttctccttctccaacttgttgctgctgatcaactggtgacaagtgccagcaagcgcaagggaactgccccccctgcgaaaattgactgcggcggggcttgtgcggcgaggtgccgattatcatcgaggccacacctatgcaagatggcatgcgggacatgttgcgcacgctgcaactgtgttccaccggtgacagccggtaaccaagaaatgtgtccttgctatgctagcttgaccacccacgggggccgacgcaagtgcccttgagtgttaatcaacaatcggaacggattttttcttttgaaggtggtatgaaaataataaaccgatgcctgggttaagt

SEQ ID NO: 215221 - DNA, 397 bp, Gossypium hirsutum
cccacgcgtccgagtgtcgtatcatgtactattggtataagaagcagaaggacttacctgggtcggagatgggaggtttcactcgtattttacactctggaaatcctgacaatttgatgaacgagattcctactgtcatagtcgatcctcttccagcagggcttgatcggggatacatcgtcttaaatcgaccatgggcttttgtgcaatggctggaaaaggctacaattgaagaagaatacgtattgatggcagagcctgaccacatttttgtcactcccctacctaatctagcacatggaggatacccggctgcattcccctttttctacattaagccggatcagaacgaaaagttgttaaggaagtttttcccggaggagatgggaccggtgac

SEQ ID NO: 215222 - DNA, 355 bp, Gossypium hirsutum
gatctacgcaagcttgccgtcaatctcattccattccctcgcctgcatttctttatggttggctttgctccccttacttctcgagggtcacagcaatacagggctcttactgttcccgagctcactcaacaaatgtgggatgccaaaaacatgatgtgtgctgctgatcctcgccatgggcgatacttgactgcttcagccatgttccgtggcaagatgagcaccaaggaagttgatgaacaaatgattaatgtccagaataagaactcatcttaacttgggggaggggacccccaataatgggaagtctcctgttggggatatccctccaataggctggaaaatggcctaaccg

SEQ ID NO: 215223 - DNA, 397 bp, Gossypium hirsutum
caaaggatgtgagagttgatgtcaagctgaacaaacatatctggagccgagggatccgaagtgttcctagaaggattagggtccgcattgcccgcaagagaaatgatgatgaagatgcgaaggaagagctctactctctagtaactgttcctgaaatcccagctgaaggactgaagggtttgggcactaagcccatcgatgatgatgatgagtaatttattgatgtttagttttatgaaaacttgcatttgttcaccaagaaatttaccccgattttgggctagtggtaccatttggtgaacctgggaaacatcattcctactcatatatttgggttattggtggcaaaaacttttaaacctggttcctggggcaatggaggttccaaccgattttt

SEQ ID NO: 215224 - DNA, 245 bp, Gossypium hirsutum
  unsure (1)..(245): unsure at all n locations
tcgtccacgcgtacgaaactctccacaaaggtaacctaattaaaattcctttttctccttttttgcccccctgaaatctaagttcttttatcgagaccaaagcagaaaagggaaaaaaaaagagggagatggggttgtcttttacaaagcttttcagccggcttttcgccaagaaggagatgcgtattttaatggtgggtcttgatgcagctggtaaaacntactatttatacaagctcaagctc

SEQ ID NO: 215225 - DNA, 396 bp, Gossypium hirsutum
caagattgagcaggtggccgtgacccgtgatgaaatggaaatgtatgttgatttacatcctctcaccaacacaacccctttcactgtggtggaaagcttgtcagtggctaaagccttggtgctgttcaggcaagtcggactccggcatttgctcatcgtgccaaagtatcaaggtgcaggggtggctcctgtagttgggatcttgaccaggcaagacttgcgggcttacaacattttgagtgcctttcctcatctaaaaagacccaacctttcttaagggaaaaataaaccaaaggtccattaccggttttgtttgaaccacccttatttggttttttggtttcaaccttcttaagtcaagccttcacaattggacctattttttggagatttttt

SEQ ID NO: 215226 - DNA, 449 bp, Gossypium hirsutum
atttgatcagcttggaaaggttaaaatgatcatggctacaaaccgacctgatgtacttgaccctgcacttcttcgtcctgggcggctagatagaaaaatagaaattccattgccaaatgaacaatcgagaatggaaatcctcaagatccatgctgctggcattgccaagcatggtgaaattgactatgaagctgttgttaaacttgctgagggttttaatggtgctgatctacgaaatgtttgcacggaggccggaatgtcagcgattcgtgcagaacgtgattatgtaatccatgaagatttcatgaaggcagtaagaaagttgaacgaagccaagaaactggaatctagtgcacactacagtactgattttgggaaagagtagagagattacttcttttccgttttggaagccatggagtacggggcagtgcattatattttagatg

SEQ ID NO: 215227 - DNA, 446 bp, Gossypium hirsutum
ctcaatttttcttgcgccgtcagtatccctcccagccaaaggtaagccatggttaaacataacaatgttgtgccaaatggccatttcaagaagcattggcagaactatgtgaaaacttggttcaatcagcctgcaaggaaggctagaagaagaattgcaaggcaaaagaaggccgtgaggatcttcccaaggccaactgctggacctctacgccctattgtccatggacagactttgaagtataacatgaagttgagagctggcaagggtttcacccttgaagagcttaaagctgcgggtatttcaaagaaacttgcacccaccatcggtatatcagttgatcaccgtcgtaagaaccgatctcttgaaggtcttcaagccaatgttcagaggcttaagacttacaaggccaaacttgttgtcttcccaagacgtgcacgcaagtc

SEQ ID NO: 215228 - DNA, 312 bp, Gossypium hirsutum
gcagtttgttaggagccaagattctaatcgatgataatcccagatatgctgttgagtgtgctcaagttggaatcagagttctgctttttgattacgagaactcgtatccatggtgcaagacagagtcaattgataaacatcctttggtgactagggtaaataattgggaagaagcggagcaacaaatagctgcttggatttttagttctactatcccataggatggactctatagagccttccactgcatatcattgggtattggttcttatgccccgaacattcaataaggccaaaatggtggcttattgg

SEQ ID NO: 215229 - DNA, 280 bp, Gossypium hirsutum
gggggcattccaacatcagcaaatccccaagtatatgccaaatggtccaaaaaccattccttcaagctcggagactctctcttgttcctatacccaccaagtcaagattcagtgatccaagtgacggaacaatcctacaacagttgtgacctcaaagatccaatcttgtacatgaacaatggcaactcactgttcaacatcactaagcctggggagtatttcttcaccagtggggagcctggtcactgtgaaaagaagcagaagctgtacatcgctgtgc

SEQ ID NO: 215230 - DNA, 351 bp, Gossypium hirsutum
  unsure (1)..(351): unsure at all n locations
agatcgcgagcggcccccttttatttttttttttcatttcccactctacaagtactgggactcagttattcacatggagactgatccatatgctatgcattcgcagctcctatattcccatggatccatagattgagaaggagaaagcaaaggactactctgtggcagcaacaactgttggcccttccaccttgaatttagcaccccatatctcctcttcttcagcaggcactgcaangatcttgctcttaggattctcatagcgttgtaatcctcctactgctggggagtagaaacagccttggggaaaagaagcaagagatttgccacaagcacctttcaacagttcgg

SEQ ID NO: 215231 - DNA, 422 bp, Gossypium hirsutum
ctggattactttcttatgggatttggcttatacaggtcgactctaagtgttagccggagaagcccattgagtccaacttgtatctccccggagcttctttcaccggaaagcatgggcttgaagttgaaaccgattaaaacccggatttcttaggaagtccaagagaagatgacagagaaagggcaagatcagcttcttcttctttttttgtttataataatataatatattatgtaagggtgtttatgagcattactagggatgtagatagagaaaggaagtagagagagaagataaaaaggagattattgtcaattctttaattagttgagttgaagtcattatcaatatctgtgaatcatgggaataattattttacaagagaaaacgctaataatggtatgctttacttttttcaaaaa

SEQ ID NO: 215232 - DNA, 397 bp, Gossypium hirsutum
aattcccttctgccctacgaacttaaagaaatagttcatgccaacgctgaggtattggaagattttgcaaaactcaacatggttcttaaagtgaagagaggagacaaggaagagaagttcaaggtggaggtacaccataagaacgaagggacttaccatgtgaaccacatggagcaagaccagtcttgaaagctaacggtatggtaaaactgttaaaaagagtttgaatcttaatatgatgatatgactataaaaaagggtgaacctggtttcatgggtgcatctttactccggtggaaaaacctatgtttgtaaaaatgttcggaaaacatccccaattaaaaggccttggattatggggtaaacccttggaatataatggcgaaccttggaattt

SEQ ID NO: 215233 - DNA, 318 bp, Gossypium hirsutum
cccacgcgtccgcccacgcgtccgcggacgcgtgggcggacgcgtgggctgtcgcgtagagagacccgtgcttagtgaacagagaccagctgacatgtacacattgagcgcatattttttagcgaggactacaagcgaccttccacttgatctaatattaccagtacttttccttctggtagtctacttcatggctggcctgagactgagtgccggccccttttttctcagcatgcttacggtttttctctgcatcattgccgcccagggtcttggactagccattggtgccacactaatggacttaaagagggctac

SEQ ID NO: 215234 - DNA, 432 bp, Gossypium hirsutum
cccacgcgtccgaatccatcggatccattgaatggagaagctgctgcacttatgatgcgtgatcgtacatcttatgaacaaagagtgaaagagtattgtgagaagtatgccaagccagaagacattggagcagcccctgaagagaagtccagtgatgaagaactaagcgatgacgaatatgctgcctcggatgacgaggaaatagctggaaaagctgacccttaagctgatatgtgcctttagagaaaaaattcccttgtgttgtacataatttaaaacctgacaaacaacttgtggggggggggtatggaaaaattcctgcctcccccctctttgtgtctttattttcaatggatgatgatgtgtaaataaaaaatcccacttgctgtttaacatttgaaaaatattcattcacagtttgcaatttgcatc

SEQ ID NO: 215235 - DNA, 281 bp, Gossypium hirsutum
  unsure (1)..(281): unsure at all n locations
cccacgcgtccgatctcaaatctcctcctcctcctcagaaatcttagtatcatcaccatggcctcaaatcccaaggtcttctttgacatgactatcggtggtcagcccgctggtcggattgtgatggagcttttcgcagattgcactcctcgcactgctgagaacttccgtgccctctgtaccggcgagaaaggcgtcggccgcagcggtaagcccctccactacaaaggctcctctttccatcgtgtgatccctaactntatgtgccaaggaggtgactt

SEQ ID NO: 215236 - DNA, 296 bp, Gossypium hirsutum
cccacgcgtccgcaataagaaacttccagagatccgcaagtggctttttggtcaggttgctgcttgaaggcttaagatggtattgtttttctcagcagcttttgtcatcggccatagagcatagtgattaagttatttgttccatgtatttgctttctcatattgttctccccgaatagtttatttgtttgataaaagtcagtgaaactcttgttcgatgggtccgttttcatttggtggaatggggaaagtcctgtttttaattatggataaaaattggaaaggttggctattcc

SEQ ID NO: 215237 - DNA, 334 bp, Gossypium hirsutum
tcgtgcattcaaaacacccccaaaaaaaattccaaaaaaatataaaagaaaaagaaaatgagccgaggaagtggaggcggctacgatcgtcatatcacaatcttctctcccgaaggtcgtcttttccaagtggagtatgcgtctaaggcagttaaagcagctgggatcacgtcgattggtgttcgaggcatagactctgtctgcgttgttactcaaaaaatagttcccgacaacctatgggatcaaactagggtcactcatcttttccctataaccaagtcccttggattgttggctactggcttgacagctgatgcaaggcccttggtccacc

SEQ ID NO: 215238 - DNA, 402 bp, Gossypium hirsutum
gtcaaaccctttggaaacgaggttgccgaacgcaccggatatggaaatctattctctgtatggagttggcctaccaactgaacgagcatatgtgtacaagttatcacctcatgccgagtgtagcattccgtttaagatcgatacatctgccgatgatgaagatacctgcctgagagacggtgtgtattccgtggacggggacgagacagtacctgttttaagtgcaggtttcatgtgcgctaaaggctggcgtggtaaaacccgatttaatccctccggaattcgaacatacattagggaatacaatcatttgcctccggccaacctattggaaggccgtggcacccttagcggtgcccatgtagatatcatgggaaactttgcattgatcgaagatgttat

SEQ ID NO: 215239 - DNA, 411 bp, Gossypium hirsutum
cccacgcgtccgttcatggcgtctccttcgctcttacaatccacatcctcctccttccacggcccctcccctttccttgcaccaccattctccgcgcgcctgccctactctaaccccagaaatggatacgccggcgtcgtttcggtgagggcaacgggagagattgtgttggtggataaatcggaagccgaaaaaccctaccgtctcaaaactacttacctagacaaaattattcctttgcttaaagaagagttcaagtacaccaatattcaccaggttccaaagcttgaaaagattgtggtgaattgtgggattggagatgctgcccagaacgcgaaaggcttggaagccgcaatgaacgagatggcattgataacggggcaaagacctgtgaagacgcgagccaggaat

SEQ ID NO: 215240 - DNA, 384 bp, Gossypium hirsutum
cccacgcgtccgatcgaagtttttgatcaccatgagtataaacaatgaagctcctttcacggggcgtccgctttccttgcaacaccattctccgcgcgcctgccctactctaaccccagaaatggatacgccggcgtcgtttccgtgagggcaacgggagagattgtgttggtggataaatcggaagccgaaaaaccctaccgcctcaaaactacttacctagacaaaattattcctttgcttaaagaagagttcaagtacaccaatattcaccaggttccaaagcttgaaaagattgtggtgaattgtgggattggagatgctgcccaaaacgcgaaaggcttggaagccgcaatgaacgagatggcattgataacggggcaa

SEQ ID NO: 215241 - DNA, 385 bp, Gossypium hirsutum
cccacgcgtccgcccacgcgtccggtcatctctggatctgtaggagatatggcagagctaggaatctctgaagccttcaaagtcaagcaagccgtattgctatctgcaactgaggctgctgaaatgattctcagagttgatgaaatcatcacatgtgcgccaaggaagagagaagacagaatgtgaaaatgacgatagtcaacggcacgttcatttgttgtaatggattactgtctttggcatttgcttgttgattttgattgtttttcactgcagtatggttgaattctaaaactgaagtttgggggcttggttcaatttttaactgaaaaggaaaccattcttcattcctttaaaaatttaaacctaccaattttcaatggct

SEQ ID NO: 215242 - DNA, 242 bp, Gossypium hirsutum
gcgggatctaagccttggaggtacacagggaaggaggctaacatgcaaagagaagacattaagatgcttgttcagaaatggtgggacatttacaacgacgagtcacttgattaccgtaccatcgcggctgtaggagggacatagaccgtgaacctgcgaccgttcctggcggcactctctgaagttggtgcagtccatttcgtggccgccccatctgcggcgtatatatgttgtgtaacgac

SEQ ID NO: 215243 - DNA, 296 bp, Gossypium hirsutum
gggaaatcagctgctcgtattcaagatcatcttcggcctaatggtgcacatagatggcataactacatgaagacaccaaatgagatcaaattggatgaggctgctgttctgcattatacataccccaaattttctgatctaacttcaaggcacgatcgatgtggctgcaagcctacaaaggaggatgttaaaagatgtttcatgttagagtttgatagagctgcattcataattgcgtcaactgcaacggaggaggaaatgcttcgctggtaccgggagcatgtagtgtggactga

SEQ ID NO: 215244 - DNA, 279 bp, Gossypium hirsutum
gagaattgggcgttggttgagaaggccaagtacttctatattgctggatttttccttactgtatctccggaatccatacagcttgttgctgaacacgctgctgcaaagaacaaggtgttctcaatgaatctttctgctccatttatttgcgagttcttcaaggatgcacaagagaaagcactaccgtatatggactttgtctttggcaacgaaactgaagcaagaaccttctcaaaggttcatggctgggagactgatgatgttgcagaaatagccctg

SEQ ID NO: 215245 - DNA, 431 bp, Gossypium hirsutum
cggacgcgtgggaacagattgagagcctacagcgtcctattacaatggaagcaggctcgattgttctaatggatttattatggtctgatccaacagaaaatgatagtgtggaagggttgcgaccgaatgctcgaggtcctgggttggttactttcgggcctgatcgtgtcatggagttctgcaataacaatgatcttcagttgatcgttcgagctcatgagtgtgttatggatggctttgagcgctttgctcagggacatttaatcacccttttctcagcaactaattattgtggtaccgctaataatgctggtgcaatcttagttttgggtagagatctagtggtagttccgaaactcattcatcctttaccccctgcaatgtcatccccaagagcatcatcggaacgtcatatagaggatacatggatg

SEQ ID NO: 215246 - DNA, 441 bp, Gossypium hirsutum
cggacgcgtgggcggacgcgtgggctgaagctgccaaagctcgagaattcaaaccgaaacaaaaaagaaaaagagctcttaaacccccaaaatacctaaaaagaaatggctctgaaattcaaccccatcacttttcaatctcagaaactcccttcatttgctcttccaccaatggctggccttaggtctcccaagtttttcatggcctctactcttcgttctggttccaaagaggtcgatctcaagaagcctttcatgcctcctagcgaggtgcatgttcaggtcacacactcgatgccccctcagaagattgagatcttcaaatctttggaggactgggctgagaacaacattctaacttacctcaaaccagttgagaaatgttggcaaccccaagattttcttccggatcccgcgtcagatggatttcatgaagcaggt

SEQ ID NO: 215247 - DNA, 340 bp, Gossypium hirsutum
  unsure (1)..(340): unsure at all n locations
cccacgcgtccggaaattcgaacttgctggagcttctcctacagatatagctgttatgataaagaaccactgctccaacgtgactgcatcggaaggtgtaggattcaagattgatgagattgtacaggcatggaatgaaatgtatgatgtgaaaaggtggcagattggtgttccatcattccggctggaaccattgttccgtcgccgggctccaaagcttcaatctgccttggagcaagtctgagtttttcatgattggatattctttggaggcatttgacaagtacaagtgcttcagttttgtttaattctttttncaagatcagttttgtgtgctact

SEQ ID NO: 215248 - DNA, 402 bp, Gossypium hirsutum
ggttaccgcacaagatgtgtccacaatgctgcgatgtgggcagaagaccgtaatcttcctcataaacaatggtggctacaccattgaagtcgagattcatgatggaccatacaatgtgatcaagaattggaactacactgtcttggttgatgcaattcataatggtgaaggcaagtgctggacagccaaagtattttgtgaggaagagcttatagaagcaattgagacggcaacgggagccaaaaaggactgcttattgcttattgaagtgatagttcacaaggccgatactaccaaaaacctgttggagggggggcttagggtttttgttgccattagccgacccccaaatcctaagtaaattttacagatggcttattgcattaacctttgaagtttttg

SEQ ID NO: 215249 - DNA, 397 bp, Gossypium hirsutum
gaacttgacaccaaaactggatgcggaaaagcaagagtccttcaagaaaaacattgagggagcaaccaagtttttgctttcaaaattgaaggaccttcaatttttcgtaggagagagcatgcatgatgatggatgcttggtgtttgcttactacaaggatggtgctgttgacccaacatttttgtactttgcatatgcattgaaggaggtcaagtgctgaggtttgaagcaaagaaaaaaaaagtggttgctgaagaatttagtcctttttattattgcttttgtctcttgttttcagtactctgctaaagacataaattatttgtgggtgttgatgcttttggtttaattgttcgtagtttatcatggaatgggttctatttttatggggtggcgt

SEQ ID NO: 215250 - DNA, 403 bp, Gossypium hirsutum
gcgatcagaagcaaaaatcgcgcgaggaaaacatgatgtcggggcagcaggaataagataagaaacccggcgatcagtccgtcgctcacatcagcctcaaagtcaaaggccaggacgggaatgaagctttcttcaggatcaaaagaagcgcacaagtgaagaagctcatgaatgcatattgcgaccgacaatctgtggatttcaactcgattgccttcttgttcgatggtcgccgcctgcgaggtgagcaaactccggacgagcttgagatggatgatggtgatgcgatcgatgctatgcttcaccataccggtggtactgtgtgaagcgagtgctactttgccgcatttagtatttgatgaagcaggtatggtccgattatgtaagatgtttccaatgtttt

SEQ ID NO: 215251 - DNA, 317 bp, Gossypium hirsutum
tcggtcaaaccacgcatcggatgaagtgtatattggacagcgaacacccatctgggccactgatgcagttccgctacaagcttcggatgctttcaataggagacttgctgaaatctacggggtgatcttaaagatgaacatcgacaagaaactgaagaaccggatcggtcccgttaatgttccttataatttgctccatcccaccggtgaaattggaatttctggtaagggaattccaaatagcatctcaatataatttaagtaaaagatgaataaggaataatttgcatgaaataaatgttggtgcaacacatcaa

SEQ ID NO: 215252 - DNA, 419 bp, Gossypium hirsutum
agcatttacaggcattctcaggtcatcaaaagcctgtgtcatgtttaagttttaggcaaggtactacagatcttttttctggatcgtttgatcgaacaatcaagtattggaacatggaagaccgagcttacattgacacaatatgtggtcatgaaagtgaagtgttgacccttgattgcctaaggaaagaacgagtattgacagttggccctgatcaatgtatgatgtggtttaaggttctcgaccagcctgaatgggtttttcgtccccaaccaacatcttgggagtgctgttgcttaattaacaaggataaattttaatttgcctcggccaatggaagtttccacctttggaccgttttaaaaaaaaaaccgtgttttttggggaaaatggctattcctttgttgccggttggccaa

SEQ ID NO: 215253 - DNA, 440 bp, Gossypium hirsutum
  unsure (1)..(440): unsure at all n locations
atctagtcaagatcaagctagaaaataccaaaaaaagagaagagaagaagaagaagaaaaagaaggagaagaaggggctgaaagaaaagattgaagagaagttagaaggagaaaagaaagaagaggacacctcagttccagtagagaagtgcgatgagccagtagtccagccagagacgccagagaagaaaggtttcctcgagaagatcaaggagaaactccctggacaacacaagaaagctgaagaggccagtagcccagctccagccccagcagctgagccccatcacgaaggggagtcaaaggaaaagaagggaattctggagaagatcaaggagaagcttcctggtaaacactccaaatcagatgaagaaaaagaaaaggcttgagattcaagttcacataaaaatactgatgggnatgtgtgttctttaattggt

SEQ ID NO: 215254 - DNA, 425 bp, Gossypium hirsutum
agaaaaccctagccaacctttgcgcagctcgctaatgggggcttacaagtacgtgtcggagctatggaggaagaagcaatcggatgtgatgaggtttttacagagggtgaggtgctgggaataccgtcagcatccatccattgttagggtcaaccaccctactcgtcctgacaaggctcggcgcttgggttacaaggctaagcagggttatgtagtttatcgtgttcgagttagaaagggtggtcgaaagaggcctgttcccaaaggtattgtctatggtaagcccacaaaccaaggtgttacccaattgaagttccatcgcaacaagcggtctgttgcagaggagcgagctggtcgaaaattatgaggtctcagaagtgttaactcatactggatcaacgaggattctacttacaagtactttg

SEQ ID NO: 215255 - DNA, 429 bp, Gossypium hirsutum
ggaagcttgctgataactgtaccggccttcaaggtttccttgttttcaacgctgttggtggaggcactggatctggtcttggctccctccttttggagcgtttgtctgttgattatggcaagaaatccaagttgggtttcactgtcttcccatcaccccaggtctccacatctgttgttgagccctacaacagtgtcctctcaactcactcccttttggagcacactgatgtggctgttcttcttgacaatgaggctatctatgacatttgcaggcgctctcttgacattgagcgacccacttacaccaatcttaaccgtcttgtctcccaggtgatctcctctttgactgcttcacttaagttcgatggtgccttgaacgtggatgtaacaaaattccagaccaacttggtcccttacccaagaatac

SEQ ID NO: 215256 - DNA, 378 bp, Gossypium hirsutum
atcactctcgaggtcgagagctctgacacgatcgacaacgtgaaagccaaaatccaagacaaggaaggcatcccgccagaccagcaacgtctcatcttcgccggaaagcaactcgaggacgggcggactttagccgattacaatatccagaaggaatcgactcttcatctggttctccgtcttcgaggtgggatgcagatcttcgtcaaaactttgaccggtaagaccattactttaaaagtggaaagctcggatccaatggataacgtgaaagcgaaaattcaggccaaaaaaggaattcccccaaatcaccaaaggtggattttggctggaaaacacctggaaaatggaaggactttggctgattccatttttcaa

SEQ ID NO: 215257 - DNA, 313 bp, Gossypium hirsutum
acggtcacaggcctttgctaagtcttgctcgggcatgattgcagagaccaaacatacctgttcttgatgaagcaaccgcgggtgacgatgtcttaactgatgctcttattcagaaaacaattcgggaagaaatcacattgtgtaccatgctcatcattgttcacatacctaatacagtaactgactgtacatcgcttctcttgcttgagtctggcatggtgctggaatatgatacgccagacgaactatggctaaatgaaaggtgttgtttatgcgaagggctcaaaccacaggggatgctaatgcacaatac

SEQ ID NO: 215258 - DNA, 349 bp, Gossypium hirsutum
cccacgcgtccggcttgtttctcaaaacattcgcagtggccgcctgagagctttcgcttttcgccgggcttgagagcttgtgctgcttttatccttccttggatgtctgagaccttttattatatctttataattgtttcacattttaaatataatttgtgattgaaatccagttatattcggtgagaaggagtttttaaattgatgtatatgtgttgatgatgacaaattcaaaggcttgtttctcaaaaacattcgcagtggccgcctaagagctatcgccttcgccaggcttgagagattgtccgatttatataataccgaaacccaaagaataacctgattcgag

SEQ ID NO: 215259 - DNA, 442 bp, Gossypium hirsutum
  unsure (1)..(442): unsure at all n locations
cccacgcgtccgaagtaatcgcggatcccgaagcagattcagctgaagatatcttgctgaaacagttcatgaagaaggatctggagaaggtattggacagtctgagtccaagggaaaagcaagtgattagatggaggttcggaatggaagatggaaggatgaaaacattgcaagaaatctgggagtcgatgggtgtaagcagggaaagaatccggcaaattgagctatgcgcttttcggaaattgaagaacaaaaggaggacaaaacatctacagcaatatttactttcatatgcctcatagatacttcatttctttccttctagttttcctttttcattcctacaagntcagagaaaacatgcaattttttttactgtatcaaacataaaatccaggtactaataacatttttttctcattaattatcaaatgtagatgaa

SEQ ID NO: 215260 - DNA, 320 bp, Gossypium hirsutum
aattgctattaagcccaggccaaataatggatctctaaatgaggctaatcaaatcggcatcaaaagaagtcctgtgagaagtgttgaagagaggaaggaagagtatgacagagcacgggcacgtattttcagtagccctagtactcctgattctgacgattcttcacctcagaactctgttgatggaaaaaatgaatctcttatcagagatgagtttgaaaattaccggagctccatggttgatccagataaaaatatgactgtcagagatggtacatctcgagtagccattttcagagacagagagaaggatcgtactg

SEQ ID NO: 215261 - DNA, 426 bp, Gossypium hirsutum
aatcagtattatagattgttcatccagagatctaagcttattagcttaagctataaaaatggtgaaaagatcgttgggctttttctttcttctcctcattgtcttagcctcccaatggggggtgcagccaactgaggcaagggtttgccagtcacaaagccataagttccacggtgcatgtgtgagtagccacaactgtgcgatggtgtgcagggacgaaggtttctccggcggcagatgtcgaggattccgtcgccgctgcttctgcactaagctttgctaatgcaagcttgcccttagctcatattttaaggatttttcttgagtaaaagacctttatgtttttcgtgcatgcatgtcaatgtttcaataaggtatctcctaattacttctgttttgggagatcattttcgtctctttttcatg

SEQ ID NO: 215262 - DNA, 144 bp, Gossypium hirsutum
tgctagtgccttcttcgttttcatggaggagttccgtgagcaatacaagaaggatcaccctaaaaacaaatccgttgccgctgtcgcaaagctggtggagataaatggaagagcttgtctgaagctgaaaaagcacccttatgt

SEQ ID NO: 215263 - DNA, 444 bp, Gossypium hirsutum
cggccggaatcccggtcgccacgcgtcggctgcttggctaacttggggcaggctgctgtaattgaacttaattgcgagacggatttcgttgcaaggaatgaaattttgagtacttggctttggcattggcaaagaaagctttgtttgtccaaaactcttcccaacagattcctggggttttctcatttgggcctgagtgtttagaggacttaaaattaaatcttgaccatccaaaaattagtggggagacaaccattcaaaatgcagttacagaagtggctgcaatgatgggagagaatataaaactcaggaggggtgttgtgatgtcaacatcttcgcatggagttgtttctgcttacctccatagatgtcctcaaccaggtttgggtcgaattgctggaattttatctcttgaagttgagaatgagaattctcaatgggatg

SEQ ID NO: 215264 - DNA, 460 bp, Gossypium hirsutum
acgctcgcgtagttccactcgtgcgggcagtcttccgtgaaggagtgaagtacggtgctggaattggacccggtgtctatgacatccactctcccagaataccatcaaccgaagagattgctgacagaattaacaagatgcttgccgtgctcgagaccaacatcttgtgggttaaccctgactgtgggctcaagactcgcaagtacgctgaggtgaaaccagccctgagcaacatggttgctgctgccaagctgctccgcacccaactcgccagcgccaagtgataggctcccgagatattggaaatccgaatcccataccattccagagagattaaaaagaaaaatggcaaagaagtttcttctatcttatcatttgaataactctggtggtgatgaaatatttgttacatgcccttggcgtccctttgatttcctttatttttggtgggtctttctct

SEQ ID NO: 215265 - DNA, 336 bp, Gossypium hirsutum
ggaaaacattagaatatctgttattggagatctaactaagctccctaaggcccttcaggaactgatgatcaacttagaggaagccaccaagaacaatacactttttcaactaatcgtagcggtcagttacagcggacactatgatgttgttcaagcttgtcaaaggcttgctctgaaggcaaagtgtggtcttatcgaacccagtgacatcaatgtctctctaatggaacaggagctagaaacaaattgcacagaattcccccatcccgacctgcttataaggacaagtggagagttcagaattagcaatttcatgttatggcagctggcatatac

SEQ ID NO: 215266 - DNA, 486 bp, Gossypium hirsutum
accggcccggaagacccagcgcgtacggacgctaccatcaaaacgaagaggaccgtgcagtttgttgactggtgcccaactggtttcaaatgcggtattaactatcagcccccagctgttgtccctggaggtgatcttgctaaggtgcagcgagctgtttgtatgataagcaataacacagcagtggcagaggtgtttgcacgcattgaccacaagtttgatctgatgtactcgaagagagcttttgtgcattggtatgttggagagggcatggaagaaggtgaattctcggaagcccgtgaggatctggctgctcttgagaaggattatgaagaagttggtgctgaaggtggagatgatgaagaggaaggtgaagaatattgatgctactatcgcaatatcatttattttgaagatgatgggttcaccctgtgagggtatcctgttctttcttattcgtgtgagggttctcaaattatgcctatg

SEQ ID NO: 215267 - DNA, 394 bp, Gossypium hirsutum
cggacgcgtgggcggacgcgtggggtggacaagtaacggataagtggaggaacttcatgaaagatcagataaaacgagcgaggatgttcttcgacgaggcagaaaagggtgtttccgagctaaatgcggcaagcagatggccggtgtgggcatcattgttgctgtatcgacagatattagacgtcattgaagaaaatgattataacaatttcagcaaaagagcgtatgtatggaaagtaaagaaatttgcttcactacctgtggcatatggaagagcacttatgggcacttccaaattgttctgaagttagtcatttttactttaatttcccctcttcttttttttttttttttagttttatccataaaatttgtttttgatttgttgcaatgc

SEQ ID NO: 215268 - DNA, 458 bp, Gossypium hirsutum
  unsure (1)..(458): unsure at all n locations
cccacgcgtccggggtttatgaggttccagctttgaaggttacagctcttaggtttactgagactgctagagctaggattgagaaggctggtggagaatgtttaacttttgaccaacttgctttgagggctccattgggtcagaacacggttctcctcagaggtccgaagaatgcacgtgaagcagtcaaacactttgggccggctcctggtgtgcctcacagccacactaagccatatgtgcgctcaaggggccggaagtttgagagggccagaggacgaaggaacagcaaggggtttagggtttaagatgacttcagtgtttgttctgaggcttgtttttcatttattactgcaaacaaaattntgctatacattangtttctctggcatttgtttacttcatgttggattttgtttaaatatggagtagttttctggttgacattgacattctta

SEQ ID NO: 215269 - DNA, 458 bp, Gossypium hirsutum
gtttgaaaaagacacggaaacttggcgtcatcgggttgagagctattggaatctcttgagtccaaagattgaggatgacacttcgagaaatttgatggacatgaaagcaaactggggatcatttgcagctgctcttaaaagcaagaatgtttgggtgatgaatgttgtcccggaggatggaccaaacacacttaaggtgatatatgacagaggtctgattggcactactcataactggtgtgaagccttttccacataccctcgaacctatgatttacttcatgcttggactgtcttttctgatatcaagaagaaaggctgcagtgccgaggatttgttactcgagatggatcgtattctccgtccaagtggattcgttatcatccgggacaaacaaccagtgatagatttcgtaaagaaatatttatcagctttgcactgggaagcggtagcaacag

SEQ ID NO: 215270 - DNA, 421 bp, Gossypium hirsutum
  unsure (1)..(421): unsure at all n locations
gtgaccgtcaagctcactgtccagaaccgtcaggcgaaagtcatggttgtcccgtcggcggcggcgctggtgattaaggctttgaaggagcctgaaagggataggaagaagaccaaaaacatcaagcataatgggaacatcggccttgatgacgtcatcgagattgctaaagtaatgaggccaaggtcgatggccaaggacttaagaggtacggtgaaggagattctgggcacctgcgtctccgtgggatgtacggttgatggcaaagaccccaaggatttgcagcaggaaatcgacgatggcgatgtcgatgttcccctggagtgagaatgcttgntttctttttttcttttattatcaatattattctcccgttttactttcctttttttttaaattttgttagtttaatgtttggaca

SEQ ID NO: 215271 - DNA, 291 bp, Gossypium hirsutum
cccacgcgtccgctaatcctcgaacttacaccagctccaaaggctattcttttcccaagaagacagaggtcctcttgacaaaaatcataccccttaaggagaaagtggagatcatcgaaggaggcgacgccatggaagaatgaagcacttacgcaactgatgattagtatatcaactctctagcgttcatttatgctctatcaaagaactattttctgatcagtattgtgcaattgctcatctgtttgaccaaagattttgttggtaatcaaaccttttgagtttgtttta

SEQ ID NO: 215272 - DNA, 366 bp, Gossypium hirsutum
  unsure (1)..(366): unsure at all n locations
aacggaatctccttttcggtggctacaagaacgtgatcggcgcccgccgggcttcctggaggatcggttcttccatcgagcagaaagaggaaggacgtggcaacgccgatcatgtctccatcattcgtgagtacagggccaagatcgaggctgagttgtctgatatttgtgccggaattttgaagcttctcgaagagaagctcgttccggctgccgggaacggagattccaaggtcttttatctgaagatgaagggagattaccataggtacttggctgagttcaagactggtgatgaccggaaagccgctgctgagaatacgctctctgcgtataaatctgctcaggacattgcagnttccgagc

SEQ ID NO: 215273 - DNA, 379 bp, Gossypium hirsutum
gccggttctaccagcactggtgccagtccaagaagaaagcttttgtcaagtactcaaagcagtattaaagggaaaaaaggaagaagagtatcccagccccggtggaaaagatgaaaaaatatgccactggtattaaggtcttggctcacactcaaattaagaaaatgaaaggattggagcaaaaaaaagcacacctgatggagatccaagtcaatggtggaacaattgctgacaaggttgattttgcttacaagttctttgagaagcaagtccccattgatgctgttttccagaaggatgaaatgatcgatattattggtgtcacaaagggtaaaggttatgaaggtgttgtcactcgttggggtgtcacacgtctgcc

SEQ ID NO: 215274 - DNA, 442 bp, Gossypium hirsutum
ttgggcctgtcccttatgctctttatgggacgggtctaccttggcctaatcattatcctgggtaagcttttctggaaaaaaccagagaagccgtacaaatttgggcttattcaagaagatggggaacttcgtagctttaatttccccggcggtttaatccaaattccaatggtcaatggaaaagaaggttaccagaatctcattggagcagcttggtgactttcatggccgtcggatcgtctcgtgatccaagtacttgatgattcaactgaccctgcaatcaagttgatggttgagcaagagtgccaaagatgggcgagcaaaggcatcaacataacgtaccaaatcagggaaaatagaacgggttacaaggcccgagcttttgaagaaggttaaaacgaagctacgttaaacactgcgaatacgtggccattttcgatgc

SEQ ID NO: 215275 - DNA, 134 bp, Gossypium hirsutum
  unsure (1)..(134): unsure at all n locations
tcgnccacgcgttcggccacgcgttcggcgagcctctcgtcacagaggaaaagtgaaggcattcccaaaggatgaccctaccaaaccttgcaagctcactggctttctggggtacaaggctggtatgacacaca

SEQ ID NO: 215276 - DNA, 453 bp, Gossypium hirsutum
ctatgatattgttcttgatataacagttatcaataggaccaaggaaacccttcagaattggtgcttggagttggcaactatgggtgatctgaaactcgttgagcgtccacaaaactataccctagcccctgaatctagcaagcaaataaaagccaacatcaaggtgtcatcaaccgagaccggagtcatatttggcaacattgtttatgagacttcgaatgtgcttgaaagaactgttgttgttcttaatgacattcatattgatatcatggattatatttctcctgccgtttgtaccgatgctgcattcagaactatgtgggcagaatttgagtgggaaaacaaggttgctgttaacactgtaatccaagatgagaaggaattccttaatcatattatcaagtcaaccaatatgaagtgtctcacaccagtatctgcgctagatgatgagtg

SEQ ID NO: 215277 - DNA, 404 bp, Gossypium hirsutum
  unsure (1)..(404): unsure at all n locations
ctctgatataggtcttgatatatcacttatctataggaccaaagaaaccctggataattggtgcttggagtagggaactatagtttaactgaaactcgtttagcgaacacaaaactataccctagaccctgaatctactagcaaataaaagccaacattaatgtgtcatcaaccgagaccggagtcatattttgcaacattcgttatgagactttgtatgtgcttgaaagaactgttgttgttcttaatgacatttatattgatatcatggattatatttttcctgccgtttgtaccgatgcatgtattcatatctatgtggccataatttgagtgggaaaaaaaggtcgctnnntacactgttttccaagattagaaagaattcctttatcatattattaagt

SEQ ID NO: 215278 - DNA, 430 bp, Gossypium hirsutum
gaaaaacagaaggctgaggatgagtccactgattcagatggattttcagccgtccagaagaaggtctttgatgtcctttacaaggttgctgatattcctttcttaagtgaatacaagcttcaaatccttgatctcattgagaaggctgagaaacagccaaacatcaccattggtgtcatcgtctccattttggtgattatggtcacagttctcttcagacttcttttcggtggcaagaagcaaccaaaagtagagaagaaaccggaggttgctgagacatcaaacaatcaatcaaccagtggagaaaaggctgaagaagaagaagaagaagaagagaaagaaggaaccgctgctgctcctcgcaggaggaggcgtgacacttaaaacagaggtgaatggtgataatctgttttagtatgggcaaattttt

SEQ ID NO: 215279 - DNA, 366 bp, Gossypium hirsutum
ccgtcgatgaggtcggcggtcctggcaaaagctacgatgatctcgctgcttctttgcctaccgatgactgccgttacgctgtctttgatttcgattttgtcaccgttgataactgtcggaaaagcaagatcttcttcattgcatggtccgtcgccttttctacttataccgtcactactgtacattttcttgtaggaactttattatttatacaaggataacatgttatatggcatacataaagaacaataatgaagagtattattttctttagtgggttaataataaccaaataattgaggtttatataagaatggtcgggaacatgtattaataatttatgaattggaatccaagtatctcttt

SEQ ID NO: 215280 - DNA, 409 bp, Gossypium hirsutum
ccaacgttgatggaaagcagaagatcatgtttgctttgacctccatcaagggtattggaaggcgtttcgctaacattgtttgcaagaaggctgatgtcgacatgaacaagagggctggtgaattgactgcacaggagctggacaatctcatgaccattgttgcaaaccccaggcagtttaagatccctgactggtttttgaataggcagaaggattacaaggatgggaagtattcccaagttgtgtctaatgctctcgacatgaagttgagagatgacttggagcgattgaagaagatcaggaaccaccgtgggctgaggcactattggggtcttcgtgtccgtggtcagcacaccaagaccactggtcgcagaggaaagactgtaggtgtctctaagaagcgttgaat

SEQ ID NO: 215281 - DNA, 329 bp, Gossypium hirsutum
atttcatggctcggaaattctttgtcggtggcaactgggaaatgcaatgggacaactgaggaggttaaaaagatcattacaacattgaatgaagctgaagttccttctgaggatgttgtggaggttggtgtgagccctccatttgttttccttacctttgtgaaaagtctgttgcggtctgatttccatgttgctgctcagaactgttgggttcgcaaaggtggtgcttttaccggagaaattagtgctgagatgcttgtaatctgagcattccatgggttatcatcggtcactctgaaagaaaggctctcttgatgagtccaatgagt

SEQ ID NO: 215282 - DNA, 456 bp, Gossypium hirsutum
cgctgatgatcaccgccgtaagaacaaatcacttgaaggtcttcaagccaatgttcacaggcttaagacctacaaggccaaacttgttgtcttcccaaggcgtgctcgcaagttcaaggctggtgattcacctgccgaggagctcgcaactgcaacccaagtccaaggaccatacatgcctatttctcgtgagaagccttccgttgagctcgtgaaggtcaccgactacatgaaatcattcaaggcatacaacatgctccgtgttgaacgtacgaacaaacgtcatattggtgctaggatgaagaaggctgccgatgccgagaaggcagacaagatgtaaggttacccttttggggacagtgttttgatatttggcttgctaaaaagaccttacattttgtattcattttgtcaagtgaactgagacagctatagaaaactgtggtattatgacag

SEQ ID NO: 215283 - DNA, 319 bp, Gossypium hirsutum
cccacgcgtccgaaccaaacaaaaccttccattgtcttctagaactatccaagcacactggtattaatcaatggctcgtacaaagcaaacagccaggaaatcaaccggtggaaaagctccacgtaagcaattggcgaccaaagccgcgaggaaatcagctccagccaccggaggagtgaagaagcctcaccgtttcaggccaagaacagtggcgttgagagaaatcaggaagtaccagaagagtaccgagcttttgatccgtaaacttccgttccaaaagctagtgagggaaatcgctcaagatttcaagacggatctg

SEQ ID NO: 215284 - DNA, 435 bp, Gossypium hirsutum
  unsure (1)..(435): unsure at all n locations
gatttttgggttggtgggtttggctcaagacaggggagtccaaaaaaaagaagaacctaccatctaagtgatgctcttaccaaaaccaacaactaagggtatcccaattcatgggccggcctattggtgtcccttgacaacccaggtatgtgggacatgagggctgcatcaatggaaaaggcatatctggggcaacaattttatctgagagtctggaaatcctgtcggagtcttgctaacgaatacgacattccttctaatgtcttactctgcggtaaagtagttgggcgccatccttagccagccggtatgcccctagtggctattgtctgttaccagtcatcagagtttgactgctgataaaatagattgagagaaagaaatnngattgaatgttggcccttattcatttgatatcttagaagcatagactaa

SEQ ID NO: 215285 - DNA, 443 bp, Gossypium hirsutum
catcgccgctaaaaacttgaaagaacaaaaaaatatcttgaaacccggagatgtcggacgaggagcaccatttcgaatccaaggccgacgccggcgcctctaaaacctttcctcagcaggccggtactatccgcaagaacggctatatcgtcataaaaaaccgcccatgcaaggttgttgaagtttccacctccaagactgggaagcatggtcatgctaagtgtcactttgtcggaatcgacatcttcactggcaagaaactggaagatattgttccatcttcccacaactgtgatgttccacatgtcaatcgtactgattaccagttgattgacatttctgaggacggatttgtgagtttgctgactgaaagtggagacaccaaggatgatttgaggcttccaactgatgacaacttgttgaaacagataaaggaaggtttt

SEQ ID NO: 215286 - DNA, 446 bp, Gossypium hirsutum
  unsure (1)..(446): unsure at all n locations
aagccagtcttcatcaggcgccgaactgatgaggatatcaagttagcaaacagtgttgatctagggtctcttcgtgatccacaggaggatgcagcaagggttaagaatccagagtggttaattgttgttggggtttgcacacatctgggttgcattcccttgccaaatgctggtgattatggtggatggttttgcccttgccatggttcccattatgatgtctctggcaggattcgcaagggtccagcaccatacaacctggaagtacccacttacaccttcttggatgagagcaaactgcttatcggttaagaattggtagcgttcctttgggttttcgtaattnttataattttattagataatgccgaaggtttgttacagaattttgcttttccttgccttggactttgagggcattgntagtgttgtttttgtaactggaa

SEQ ID NO: 215287 - DNA, 365 bp, Gossypium hirsutum
cccacgcgtacgagagaggagctacatgttgtcaagagtcaggacgcagggcaaccttatatggccatgattattagataatgttcgtcctgatatgagaatagcatgggacgagccatttggacccggtttgcctgacataaggagtacttcagtcgaagaaggaattcatcattgtaatgctagcaactttggcctgcaaggttgtgtctgtacaagagatataagcgaagcaattctgatcagcgacgcaacggagactggtacagtttatatcaattctgctacggcacgtggacccgatcattttcctttccagggtctcaaagatagtggcattggatctcaaggaatcaccgacagta

SEQ ID NO: 215288 - DNA, 442 bp, Gossypium hirsutum
cttctgaaagtgcttgctggaatagataccaacttcactgtcacttcaaaggcgtctgatgatgatggcgattttgccgaactttatgttttcaaatggacatcacttctcattcctccaaccacagtactcattatcaacctggtgggcattgtggccggcgtgtcgtatgctataaacagtggttaccaatcctggggtcctctttttggcaagcttttctttgccatctgggtgattgctcatttgtatcctttcttgaaaggtttggtgggtcgtcaaaatcgtaccccaacaattgtcatcgtgtggtctatacttctggcttccatcttctcattgctgtgggtgcgtatcgaccccttcacctcagaagctacaaaagctgctgctaatggtcaatgtggcatcaactgttagtttcgtttccggattattttat

SEQ ID NO: 215289 - DNA, 393 bp, Gossypium hirsutum
cccacgcgtccgtgataccaatatttagaattagtactggaaaaattacatattggtatcagatataattatattaccaaacttcacatctttaaatgaacatcacttctcattactccaaccacagtactcattatcaacctggtgggcattgtggccggcgtgtcgtatgctataaacaggcgttaccaatcccgcggtcctctttttggcaagctttcctttgccatctgggtgattgctcatttgtatcctttcttgaaaggtttggtgggtcgtcaaaatcgtaccccaacaatcgtcatcgtgtggtctatacttctggcttccatcttctcattgctgtgggtgcatatcgacccctttaccttaaaagctacaaaagctgctgct

SEQ ID NO: 215290 - DNA, 441 bp, Gossypium hirsutum
  unsure (1)..(441): unsure at all n locations
caacattggtcactttgacaatgaaatcgatatgctcggtcttgagacctatcctggtgttaaacgcatcaccattaagcctcaaaccgataggtgggtcttccctgaaaccaaaaccggcatcattgtgttggctgaaggacgtctgatgaacttgggatgtgccactggacacccaagttttgtcatgtcctgctcgttcactaaccaggtgattgcccagctcgaactatggaaggagaaggcaactggaaaatatgagaagaaggtttacgtattgccaaagcacctcgacgagaaagttgctgcacttcacctcggcaagctcggagctaagctcactaagctcactaaagatcaagctgattacattagtgtgcctgttgaaggtccttacaagcctnctcattacaggtactgagagaagagtngatgagtttt

SEQ ID NO: 215291 - DNA, 426 bp, Gossypium hirsutum
  unsure (1)..(426): unsure at all n locations
agactatttttggttcttccggttgcaatcttagatgccttcttcattctttggatatttacttcactctcttcaactttaaataaacttcagacaagaaggatggtggcaaagctggatatatacaggaagttcacaaatgcattggcagtagcagttattgtctctgtcggttggatttgctacgagatttacttcaaggcaaatgatgtttacaacgagcagtggcagaatgcttggatcatcccagccttctggcaaatcttatctttctctctgctatgtgtcatctgtgttctttgggctccttctcagaattctacgcggtatgcttactctggtgaagcaaatgaagattttgacaaagatgatactaatttgacactcataaaaccctctccaacaccttcaaaagattntagaact

SEQ ID NO: 215292 - DNA, 377 bp, Gossypium hirsutum
  unsure (1)..(377): unsure at all n locations
cggacgcgtgggcttcactgggctccaagatttggtttggctgggctgctctatttcttccttctctggtagagggttggaatttagcaaaaacatatgagttatctgggtgtgggagttagccctgggaatgttcccgtctaccatggcactaatttgaaggtcattgatagaagaatgagagttgcagaacttgttttgaagtgtctcatatgtggcttaagtgttcttgcagctgttcttgttggaacaaatacccaaatcaaagaaatcttcactattcaaaagagagctagatttacagacatgaaagctctgggtgttntggtggcggccaacggcataactgcagcttactcattggtacaaggagtgcg

SEQ ID NO: 215293 - DNA, 444 bp, Gossypium hirsutum
acctatcgctacctgcgagcttacgtcaacagcgacaccacaggtcgtgaccctttccaggtcatctgctccggcatctccgccgctctccaccactattatcctctggctggatctctccgccgatccagcaacggtaggtatgagcttttctgtgagttggatcaaagcctaccgctcgtcagtgccagcgtggactgcacattggagtctgtaaatcaccttgatgaccctgatatgaattcggctgaacaactggctaccgacccaagcccggaagacacgttggtcaacccctgtactttacagctaacggtgttcaaatgtggtgggtttactcttggggcggctatacacaatgctttatgcgatgggcttggcgcgacccagttgttctgtatggcagctgatatcgcacgtggggtggacaaagtagaatatcag

SEQ ID NO: 215294 - DNA, 453 bp, Gossypium hirsutum
  unsure (1)..(453): unsure at all n locations
cccacgcgtncgcccacgcgtncgtgcaaccgtcaaataacagtttcttacgcatataagagagacaccaaaggggagcgtcatggcaccccagcagagagggttttggctgcaagcaatccaagttcccagaagagcaggccccatactttgtttgcgagtggacctccaacacttccttctggtccccaggccaatggtggtataggagcaccggtgccgccacgaccttttccaaatggcactgttcctcctggctctatgccagtagcacggcctccaccccctcaaaatgttccctacccacaaatgcagcttgccggacagtcaccttggcagggtcagccacagcatcttggacaacaaattccacctccagtcatgcctcctcctccaatgcagtacagaccacctatgccaaacatgccaccaccaccacccccacaatcagta

SEQ ID NO: 215295 - DNA, 404 bp, Gossypium hirsutum
cggacgcgtgggcttcaaccctttcaaattgaagctcatcagtgtggatcgatcttttgccgagaagcactatgctgacctgtctgcaaaacccttctttaatgggctcgtagagtacattatctccggtccggtcgttgctatgatttgggaaggtaagaatgttgttaccacaggtcgcaagattatcggagccacaaacccagctgaatctgctccgggaacaatccgtggtgactttgcaattgacattgggaggaatgtgatccatgggagtgattccgtcgagagtgcaaggaaggaaatcgccctttggttccctgaatgccctgttaactggcagagcagccttcacccttggatctacgagtagagatcatttggtcgaagctattggccgtcat

SEQ ID NO: 215296 - DNA, 431 bp, Gossypium hirsutum
  unsure (1)..(431): unsure at all n locations
gccagaaaggtgatcattaccaaggattcgactcaactaattgctgaggcagcctcaaaggatgagatacaaactagggtggcacaactaaaaaaaagagctagttcagacagattctgtctatgattcagaaaaattggcagaaaggattgccaaactatctggtggtgttgcagtcattaaggtgggggctgcaacagagactgaacttgaggatcgtaagctacggattgaagatgcgaagaatgctacatttgctgccatagaggaaggaattgtgcctggtggtggtgctgcattagttcatctttcaagttgtgttcctgcaattaaggagaagcttgaagacgcagatgagcgcttgggagctgacattgtgcagaaggctctggttgcaccagcttcgttgatagctcaaaatgcangaatgg

SEQ ID NO: 215297 - DNA, 395 bp, Gossypium hirsutum
  unsure (1)..(395): unsure at all n locations
nnnnnnnnnnnnnnncggaaagaggaaatagaatgagaggagaggagaggaaagtggagttttaaaacttgagagaaaggggagagttaataatttccaaagacatggggaacagctgaagatgttgtttggcttgtgatcttccctgtggagctctagacttgatccgtatagtccatttgaatgggtacgttgaatagcttactggtgctatcacagctgctgagatcctcagaggcaaccctaaccatgtcctaagcacaccaacctatcaaggtgttctacgtagaatgttgatcctctctcccgattccgagctcaaaagacgcaacatctactgtttgattccatgcccaccgtcactgccgcaaaagaaaaaaactggtgtgcaccac

SEQ ID NO: 215298 - DNA, 330 bp, Gossypium hirsutum
  unsure (1)..(330): unsure at all n locations
tgatggtgggctacattttgcatttagttggctttttttggtgtgccgtgttaagtgaactcaaaagtctggtttatgtcggngaagttagggatcattgtacgatggtctacttgatattaatgtactattattttagcctttcaccgtatcgccaccattaagatgacgggccctatggggctggcggtgggcggacaattggtgcttaattccctacttgcttaccttccatcttttaagcattttgcttaagaggatgtttggagctggagaactgtattgggtgcttattattatttaatattcaagggttttgagaacattaat

SEQ ID NO: 215299 - DNA, 425 bp, Gossypium hirsutum
gcgcgcatgcgttcggaaagaccattggaaggcctcagcctctgcagtatggtgtcaatgcaggcttcttaagccgattatacagtgattatcttgatgctgctgatacacctggatggtattgtggtcccaatttctattcaactgatgtcttgcgtgaatttgccaaaacccaaatggattacatccttggcaaaaatcctccggaaatgagctttcgtgtgggttttggtaaccattacccaaaacatgttcaccatagaggtgcatctatccctaagaataagatcagatataactgtaaggggggatggaaatggagggattcaaaaaagccaaacccgaatacgcttgtgagagccatggttgctggacctgacaagcatgatggatttcacgatgttcgcacaactacaactacactg

SEQ ID NO: 215300 - DNA, 445 bp, Gossypium hirsutum
  unsure (1)..(445): unsure at all n locations
gtcgccggcgcccatcaccgttgcgtcgtcccgctcgttcctccatcaaaacactttcgtcattccggtcaagctgctgtttcctctgttgccggcgttcatcactgccgtcgtcttctccgctgcagcattcagtcgtcgccgtcccgctgtgccgccggtcaatctcatccaattccgggtgattctagatgggagaggctcgggatggggtgaaggtaaagagagtggttttcgttacagtgggaacaacatgttttgatgcacttgttaaagtggcggattctcaggaagttaaggatgagttatatagaagagggtatactgatcttctcattcaaatgggtcgagggtcatatcttcctatnaagtctactggtgatgatggatctttggctgtagactacttcacattttcatcgagcattgggactatctgagatct

SEQ ID NO: 215301 - DNA, 366 bp, Gossypium hirsutum
cccacgcgtccggaaggatgggttgcttaacactgcttgcgggactccaaattatgttgctccggaggttttcactcatgaactcagaaaataattagttgtattgatgcaactcttttttttttttttttgccttttcattctggtatctgatatttttattttcaggtgttcaaagataaaggttatgatggtacatcatctgatatttggtattgcggagttattctctttattctcatggctggttatttgccttttgagccaagccttataggcttgtataagaaaatctgggaggcttctttcagttatccatcatggttttcatctggtgctaggaatttgattaagcgtattcttgat

SEQ ID NO: 215302 - DNA, 374 bp, Gossypium hirsutum
gttgagtagccgcaacaatgccaagttgagcttggttcaggcgacgaaggaatcgtccacggcgagtacgaatgatagtgctgctgttttttctggtgaaaatctccaccagatagctactaacggcaaggcaacaaacattgtatggcacaaaagttcagttggtaaagttcatcggcaagaggtgcttcagcaaaagggttgtgtcatatggattacaggtctcagtcgctcaagaaagagcactttggcgtgtgcactgtgtcaagccttgtattcaaggggaaagttggcttacatccttgatggtgataatgttcggcatggtttaaaccgggaccttagttttaaagcaaaagatcgggcagaaaaca

SEQ ID NO: 215303 - DNA, 399 bp, Gossypium hirsutum
cccacgcgtccgggagaagtttcaaactttgcgtctgcaagagcaaaagtattttgatgacatggttcagaagtgcaaggatgttggtgccaccttggttatctgtcaatgggggtttgatgatgaggcaaatcatttattaatgcaccggaacttgcctgctgtcagatgggttggtggtgtggagttggagctcatagcaatagctacaggtggaaggattgtaccaaggttccaggagttgaccccagaaaagttgggaagggctggtttggtgagaaagaaatcttttggcaccacaaaagataaaatgttgtacattgaacattgtgcaaattccatggctgtaaccatatttattcgtggaggaaacaagatgatgattgaagagacaaagcg

SEQ ID NO: 215304 - DNA, 439 bp, Gossypium hirsutum
aaaagaaaagaaaaattacagtgaaaatggcaacccttaaagttccagctcatgtacctgccccttctgaggatgctgagcaacttcgtaaagcttttgaaggatggggtacaaatgagcaattgattatcgacattttggctcacaggaatgcagctcagcgcaatttgattcgtaaaacttatcgtgaagcttatggggaagatctccttaagtctttggatgaggaactttcaagtgactttgagcgagctgtggtgctgtttactttggaccctgcagagcgtgatgcatttctggctcatgaagctacaaagaggttcacatcaagccattgggttctcatggaaattgcttgcactaagtcttcacatgaactgttcaatgtgaggaaggcgtatcacgatctttacaagaaatcccttgaagaagatgttgc

SEQ ID NO: 215305 - DNA, 445 bp, Gossypium hirsutum
cagggcaaccgtatttaatacagacaaacgtgtataaaaatggtgttggaggccgtgaaatgaggcacatgctttggttcgaccccactgaagagtttcattcatattccattctatggaacaaccaccaaattgtgttttttgtggatgaagttcccataagagtattcaaaaacaatggtgatgagaaaaacgacttctttcccagtgagaagccaatgtatttgttctccagcatatggaacgcagatgaatgggcgacgagaggtgggttggagaaaacagactgggaaagagccccatttgtgtcgtcttacaaggatttcagcgtcgagggttgccaatgggaagacccttaccctgcctgtgtttccagcaccaccaagaactggtgggatcagtacaaggcttggcgtttatctgattcccagaaaatggattatgc

SEQ ID NO: 215306 - DNA, 404 bp, Gossypium hirsutum
ctccctaagccctgttgtttctttcttggattacaagtcacttggaggatagccaatttagagcgtcacttctctaccagaaacccaactgaatggaacactgggtgattccttggccctcaattgagctctctcctctaactttctaattctcggtgcaagtccacacacaaattcctgagcttcacggccctcaggtgaaagtccaatgagttccttcaacttccatcggtcaaccagatattcaactatatcagcatagtcccgggcagtgtaaaccccaattctttgtgcaacagacgagtagtggtcgaaaaagttttcgtcacggccatcatacatcaagtgggctggcatggagattttcttcctcatcatgtcagcaaatgcccagaaagaaacca

SEQ ID NO: 215307 - DNA, 309 bp, Gossypium hirsutum
cggacgcgtgggtcttcacggcctggtcaatgtggccgtgcagatggttacatcttggagggcaaagagctggagttctacatgaagaagatccagagaaagaaggggaagggagctgcttaaaaaattattgcatagttttcagcattcatatcagaatgccgcccttagggtttgcctttcacatttccagaacatttaaagttgtgttagcattgaacttttaatctggatccctgagagttattatttttgtattggaatttagattatctttgaactttataaatgcagcttattttggttggt

SEQ ID NO: 215308 - DNA, 385 bp, Gossypium hirsutum
  unsure (1)..(385): unsure at all n locations
caaattaactggacctatccctagggaacttgtcggtatttcaagcctcaaagttgttgatgtctcaaacaatgacttgtgtggaacgattcctaccagtggaccgtttgagcacattcctttgaacaactttgagaaaaatccccgactggaaggtcctgagctgctggggcttgcaagctatgacacaaactgctcgtaaagggcatgttgacgctataaagctttgaattagatatgaatccgcatgaagtaatatgtaaatctgtataccagctcgactgtattagcatctgtaactcaattaccctactcctaaaatgttgaagacgactagtattggtgaatgtaacggtagcgacaagtttcctttctgtgtgcnnna

SEQ ID NO: 215309 - DNA, 245 bp, Gossypium hirsutum
gggtcttcccatcggacagcatataagttgcaggggcaaggatagccaaggtgaggaggttattaaaccatatacgcctactacattggattctgatgttggtcattttgaattagttattaagatgtatcctcaaggaaggatgtcacaccatttcaaaaagttgcgtgttggtgattatcttgctgtgaagggtcccaaggggcggttcaagtatcaacctggtcaagttagagcatttggga

SEQ ID NO: 215310 - DNA, 371 bp, Gossypium hirsutum
  unsure (1)..(371): unsure at all n locations
ctccttgcttgtcttggncgtaacgatgaattttgcagcagcgacattgaagtctgtctccttggaagcttggtcccttgtgtgctatatggaaccaatgtcgaaagacttggatctgatcccgggacatttgcaaatcactgcttgccatactcagttctttacctaatcggtaattcattttttggctggaattgccttgcaccatggttttcgtaccctactcgtactgccattcggcgaaagtttaatctcgagggaagctgcgaggcactccataagtcatgtggatgttgtggaagctgcgtagaagatgagttgcaacgtgaacaatgtgaattaacctgtgacttagcaacccatgtcttgtg

SEQ ID NO: 215311 - DNA, 440 bp, Gossypium hirsutum
cggacgcgtgggcggacgcgtgggcgagctttacgctgagaaggtcaacaacagaggcctttgcgctattgcccaggccgagtctcttcgctacaagctactcggaggtcttgccgttcgcagggcctgctatggtgtactgagattcatcatggagagtggtgccaagggatgcgaggttattgttagtggaaagctaagagcacagcgtgccaaatctatgaaattcaaggatggatatatgatctcttctggtcatcctgtcaatgagtatattgactctgctgtcagacatgttcttttgagacagggggtgcttggtatcaaggtcaagatcatgcttgactgggatcctaagggtaagcaaggccctactactcccctacccgatctagtcacaatccaccctcccaaggaggatgaagaaatcaggagagtag

SEQ ID NO: 215312 - DNA, 432 bp, Gossypium hirsutum
cgctgatttacgccttcgtggcgcgaggcaccatggttttagccgactacaccgaattcaccggcaacttcactggcatagcttctcaatgcctccagaaacttcctgcttccaacaacaagttcacttacaactgcgatggccatacctttaactatctcgtcgataacggctacacttactgcgtggttgctgttgaatccgttggccgacaagtcccaattgcctttcttgagagaattaaggaggattttaccaagcgatatggtggaggaaaagctgcaacagcttctgcaaacagccttagcaaggagtttgggcctaagctaaaggagcatatggaatattgcattgatcatccagaggagattagtaagattgccaaagtgaaagctcaagtttcagaagtcaaaggagtaatgatggaaaata

SEQ ID NO: 215313 - DNA, 437 bp, Gossypium hirsutum
cgatcaaaaacctcagctctcttaccgccaaaggaggatcatcttttcaggttttgcgatggcatcgaagcggatcttgaaggaattgaaggatttacagaaggatcctcctacatcttgcagcgctggtcctgttgctgaagacatgttccattggcaggcaacaatcatgggtccaccagacagtccttatgctgggggtgttttcctggtgaccatccattttcctccagattatcccttcaagcctcccaaggtggcatttagaacgaaagtattccatcctaatattaacagcaatgggagcatttgcctagacatcttaaaagaacagtggagtcctgcgctaacgatatccaaggtactgttatcaatctgttctttactgacggacccaaaccctgatgatccattggtgccggagattgctcacatgt

SEQ ID NO: 215314 - DNA, 438 bp, Gossypium hirsutum
  unsure (1)..(438): unsure at all n locations
cccacgcgtccggaaaacagaggcaggcagccatggcaaggatcaaggtgcacgagttaaggagcaaatcaaagacagagctgttgactcagctcaaggatttaaaagccgaactttctctccttcgtgttgccaaggtcactggtggtgcccccaataagctctccaagattaaggtggtgaggctatccattgctcaagtattgacggtgatatcccaaaaacagaaggctgctttgagggaagcttatacgaagaagaagtttttgcctcttgatctccgtcccaagaagaccagagctattcgccgccgccttaccaagcaccagcaatctttgaaaaccgagcgggagaaaaagaaagagatgtactttccgatgaagaagtatgccattaagggtataagcttgaaatttgacttangatggatacctttat

SEQ ID NO: 215315 - DNA, 439 bp, Gossypium hirsutum
gtcaaggaggcgactttaccgccggaaacggtaccggaggtgaatccatctatggagccaagttcgcggacgagaacttcatcaagaagcacacgggacctggcatcctttccatggcgaacgctggacccggaacaaacggatctcaattcttcatctgcacgaccaagacggagtggctggacggaaagcacgtggtgttcggacaggtagttgaaggcatggatgtggttaaagcgattgagaaggtggggtctagcggtgggaggacttccaagcctgttgttattgctgactgtggacagctttgaaaaagggcttattgaattgtgtttccttcataatatctggtctttttaagctccttttttttatgctatgctgcttctatggctactgggtttttgtgttttttaagaaagtgcttgatgtagctttt

SEQ ID NO: 215316 - DNA, 429 bp, Gossypium hirsutum
agcaactggagatggatgctgagtatgaggtaaatgttgaggcaactggggaggacttcactgttgaaccagcagagaccaggaggcctttccgtgcgctccttgatgttggtcttatcagaactactactggtaaccgtgtttttggtgttctcaagggtgctctggatgggggaattgatattcctcacggtgacaagaggtttgctggatttaacaaggacagtaagcaacttgatcctgaagttcaccgcaaatacatttacggtggccatgttgctgcatacatgaggactttaatggaagatgagccagagaagtaccagtctcacttcagtgagtacattaagagaagcattgagcctgacaccatagagggaatgtacaagaaggttcataccgccattcgtgcaagtccagaagcaaaga

SEQ ID NO: 215317 - DNA, 439 bp, Gossypium hirsutum
cccacgcgtccgtgctgcacttaacctcggcaggctcggagctaagctcactaagctcactaaagatcaagctgattacattagtgtgcctgttgaaggtccttacaagcctcctcattacaggtactgagagaagagttgatgagtttttatcaagaaagaaaaaacatccggatggtttgattgtttcttgttttactgaaatttcatgatggttaggtttttgttttatttttagagttttttttgtgtttgggtgatgggaaagtgcctgggggtgggaaaatgatgtgggatttggtatcttcttgtatgaagatgaccaaatgggtttgaaataaaaatgttagggatgtgtggaagattatatagtatttgccattaatgcagtcttgttttgctgcattgcttttttttaaagcaattttattttatatac

SEQ ID NO: 215318 - DNA, 402 bp, Gossypium hirsutum
gctttttcaagaagtataactcctttggtgcttttgttcatatttttaagctttgcacaaggtaaagaaatcatggttggtggcaaaacaggcgcttggaagataccttcttctgaatcagattctctcaacaaatgggctgaaaaagctcgtttccaaatcggcgactctctcgtgtggaaatatgatggtggtaaagactcggtgctccaagtgagtaaagaggattatacaagttgcaatacgtcgaacccgattgccgagtacaaagatgggaacaccaaggtgaagcttgaaaagtcaggaccatatttcttcatgagtggagcaaagggccactgcgagcaaggccagaagatgattgtggttgtgatgtctcaaaagcataagtacattggaatc

SEQ ID NO: 215319 - DNA, 425 bp, Gossypium hirsutum
cccacgcgtccgcccacgcgtccgcacgcttcatactggaatcagtccatctagagtcgctgaagcagtttttgactccccaccggtcgtgatattcaccgtcgacaatattttgttaccctctgagttgttcggaaagtcaccgtcgccagcacctgctcctgaaccagtttcttcaccttcaccgacaccttctccattatccgaagcaccatcgccattagccgcttcacccccagctccaccaaccgacactcccgccggatctccagctgattcgccggctggttcgtcggagaacagcacctccgataatgctgccggtcacgtgagtcccactgttatcttcactgtgttggccattgtccgctattcactatgttaatttgatcttttctgggtttgctattttgcttattttcttt

SEQ ID NO: 215320 - DNA, 299 bp, Gossypium hirsutum
actgcaagatgcccttcgaatttatgaaaagcccatgccagggtttcccccggaggaaattgccactggcctcactgatgtttctgccatctatgaatcaatgaatgaccttgatcaggcaatcaagttgctgcagaaggccttaaaaatatacaatgatgtccctggtcagcaaagcacagtagctggaattgaagctcagatgggagttatgcactacatgttggggaattattcagaatcttacaactccttcagcagtgccatttcgaagctacgcatatgtagagacaagaaat

SEQ ID NO: 215321 - DNA, 442 bp, Gossypium hirsutum
  unsure (1)..(442): unsure at all n locations
cccacgcgttcgcccacgcgtncgcgaattataggttctagaaatcattcatcactatgttgagatacttgatcgatactttggcagtgtctgtgaattggatttaatcttcaacttccataaggcctattatatattggatgaactcttacttgctggtgaacttcaagagtcgagcaagaaaactgttgcacgtttaatagctgcacaggattcactggtggagaccgcgaaagagcaagccagttccattagcaatataattgcacaagccacaaagtaggttatgaccaaaagtggttgcggattgccatttgtattgggggtggttttggtatctcatctgttgtgaaaactctttctggattttaagttgagaacttaattgtatgtttatgaatgtagattcgggagccctttgtagaaatgatcacatattatc

SEQ ID NO: 215322 - DNA, 447 bp, Gossypium hirsutum
gaaaaacaagtggctagactttaaagcaaggttgaacaagattttgagcatgacagaaccttggactttaattctggatgatgcattagctaactcttttattgcaccagcaactgatgatattaaagatgaccatcaattaatttttgaggaatatgagagatcatgggaacaaaatgaagaactgggcctgaatgacatcgacacctcttcagctgatgctgcttacaactcaaccggggtgacatccaatgagaacccccaagaataaatgaactgcaaatgatgtgtgatcgaaagcaagcattggatcaaactgtgctgtgcaaaactattcatactggctgctggactgaaacaatgtattcctaaaagatttaaagccagactgcaattttgaggcttcatatatacttattacttgaaaattatactgtaaggaatttt

SEQ ID NO: 215323 - DNA, 435 bp, Gossypium hirsutum
agctcttggcaagctatgaacatagagttactgttgaaggttttgtttggggcatcaattggtttgaccagtggggagttgagttgggtaagtcactagctactcaagtccgaaaacagcttaatgcatcacgtacgaaaagtgaacctgtcgaaggctttaattttagtactactacgttgttaactagatatctacaggcaagttctgatattccagctgagccacccactcttctacctcggatataactgtcttggtgctgttggccttattgcggaatgccttgcactacagcttcatctgtagtttgtccccatgttaaaaaagttttctggtccttttttggtatgtttggtgtatgcggagatccactgaatcttgtgggttatacggtggattttaataaatttacaacgactgacttggaataca

SEQ ID NO: 215324 - DNA, 415 bp, Gossypium hirsutum
gcgacggaccgggcccaagtcccctggaaaggggcgccggagagggtgagagccccgtcgtgcccggaccctgtcgcaccaagaggcgctgtctacgagtcgggttgtttgggaatgcagccctaatcgggcggtaaattccgtccaaggctaaatacgggcgagagaccgatagcgaacaagtaccgcgagggaaagatgaaaaggacttgaaaagagaagaggcataaatagtgcattgtacgttaaatacgagaattgctattgactaagcggatgactgatctcccgtttttccttagctttacatttaaaaaagacctagctatgaataatgcaggatgtatttttatttttagaaggtttagacgatgttataatagttctgtaacagttaaatttgctataggaaaca

SEQ ID NO: 215325 - DNA, 388 bp, Gossypium hirsutum
ggcttctaacttgttgcatacgtcctagcagtatttttggccctggagatgggttgttggttccatctttggttgcggcagccagagcagggaaatccaagttcataattggtgatggcaacaatgtatatgatttcacttatgttgagaatgtggctcatgctcatatttgtgctgaacgagctctagcatctggaggagaagttgcagaaaaagctgcagggaaggcatattttataaccaatttggagcctatcaagttttgggagtttgtttctctaatacttgaaggtcttggctatcagaggccaaaaataaagattcctgccattgttgtaatgccaattgcacatattgtggagtggacatatcggctattaggcccata

SEQ ID NO: 215326 - DNA, 438 bp, Gossypium hirsutum
cccacgcgtccgcccacgcgtccgctgagaactaaaggaaacaaaggccttcttcttagcactccgccgcccgttatctcatcgcaatcatgatcatcccagaaaagaaccgcagggagatatcaaagtatctctttcaagagggtgtttgctacgccaaaaaagattacaacttggcaaaacacccagaaatcgatgttccaaatcttcaagtaataaagctgatgcaaagcttcaaatccaaggaatacgttcgtgaaacttttgcttggatgcattattactggtaccttaccaacgatggcattgaatttttaaggacataccttaatctcccctctgagattgttcctgctactttgaagaagcaaactaggccccgtggtggtcgtcccatgggtccttctgatagccgcccacgtggtccgccacgctttg

SEQ ID NO: 215327 - DNA, 342 bp, Gossypium hirsutum
tgccaaaaaatggagtgacctgccacctttggtgatggctaactgtgtgaaggtaaacccggattcacctcaaaagcaagtcaggtttctcactctttctgatggcaagaagttgcttactccgcaacctcgcttgagaaccggtttcttttcaatactcgagtcctctatgttgactcctagtaccatcaacgaggcatgcacttctgtaggggttgcaaagtatggaaggccaattggattggatgaaaagatcaaggttgatgtaattgtcattggttcagttgctgtagatccgaagactggggctcgactcggcaagggagagggatttgctgaact

SEQ ID NO: 215328 - DNA, 433 bp, Gossypium hirsutum
gtcattctcaccggttatctccctttcgatgatagaaaccttgcagttctttatcaaaagattttcaaaggggatcctcagatcccgaaatggttgtcacctggggctcggaacatgataagaaggattcttgacccaaaccctgaaaccaggataacaatgacgggtatcaaggaagatgactggttcaagcaagactatactcctgctgtacctgatgatgaggaagaagatatatatattgatgatgaagctttctcaatgtgtgaagtgggttgtgatggaggtaggagtcaagaatcacctactctcattaatgcttttcagttgataggaatgtcatcgtgcctagacctttctggtttctttgagaaggaggatgtatctgaaaagaagatcagatttacctcaaatcgttcgggtaaagatttgc

SEQ ID NO: 215329 - DNA, 444 bp, Gossypium hirsutum
cggacgcgtgggcggacgcgtgggcggacgcgtgggctaaacgtgagagagccatggcatatgctctggctcatcagtggcaagcaggatcaagacagcagtcagtgcctgctggatttgaaccagataaaagcagctggggttggaactggttggagagatggatggctgtacgtccatgggagaatcgtttccttgacattaatcttcgagatggagtaaagatacgcgaggatagtcctgctgagggaaagaatgatgccagttctcagataaaacctgctatcgggaaaccagctgcatcaagtcttcatgctaacctttcaaataaaaaaacaggtccatcccactttgatgggagcgattccccacctggtaagtctgcatgtgtgcttgaagcagtgaatgcgccatcttccaagccaaaatccaaaccaaatcgtg

SEQ ID NO: 215330 - DNA, 437 bp, Gossypium hirsutum
ggagaagctcccacccacggattctaggcttagaccagaccaacgtcatctggagaatggagaatatgatagagcaaatgctgagaaacaacggttggaaaggaggcagagaatgtcaagaaaactacaagaaaatgggtggaagcctagatggttccatcaagatagtgaaaatggatccttccgctacacgggcgggtattgggaagcaagagaacaaggaaaatgggatggatgtccaaatatatttggtgtattcgatgaagaatttgttgattcctctgaatgatcctgatttcaattttagatcaatattgagatggtctttccaggagacattcaaggtggatcatttggtgggggtagataatggaaaggtcaaagtgtaaaagtttaatgtaacaattataatatatatatatgtagggggggaattg

SEQ ID NO: 215331 - DNA, 446 bp, Gossypium hirsutum
tagaaggctagctgatgccatggttaagctggtatgctccgacaggaagaccggcggagttgttttcgagaaggagggatataccgacaaaaccggaaaataccagattcgtgtatccgaggatcacttggatcagatctgtgatgcagttcttgtgaagagcccccagcttggatgtgccacaatgtcccccggtcgtgaacgtgcccgtgttatcttgaccaactccaatggcatttcatccaccacccgttatgccaatagcatgggcttcatggttgacaaggctgaagttggctgtgctgagatgatgaagatgtatcgggaggatgaggaggatgtctagtgtgtgggtttggatttatttgcatatgaaatgtgatgttgtctgctatttgttatgtgaattgcttcgttatttctacgttagaggacttctataactt

SEQ ID NO: 215332 - DNA, 386 bp, Gossypium hirsutum
ggaagtaccagaagagcaccgagcttttgatcaggaaacttccattccaaaggttggtgagagaaatcgctcaagatttcaagactgatttgaggttccagagtagcgctgttgccgctcttcaagaagctgccgaggcttaccttgttggactgttcgaggataccaatctctgtgccattcacgctaagagggttacgatcatgcccaaggatattcaacttgctaggaagattagaggggagagagcttagagtttgattttcggctgggtaacgtctaaagctggagatctaagcttttcatcatttgtacgttttgctttctcagcaaatgttcatttaaattgatggaaaacagttggaagctttatgatttcgtttgtt

SEQ ID NO: 215333 - DNA, 267 bp, Gossypium hirsutum
cccacgcgtccgggaagatgacaaaagatcttgcgcttttgattcacggtcctaaggttagtaggtctcagtatctaaataccgaagagtttatcgaagcagtagccaaagagttgagtaacagaatgtatgtgaaaccaaagttgtaaagcatgcgtgtattgtgtgccctctcgtctatcttttaggcttatttataattgcgaataaataaggtctagtacatgtcctgcaatgcatgcccagtctataaattaataaacaaat

SEQ ID NO: 215334 - DNA, 437 bp, Gossypium hirsutum
  unsure (1)..(437): unsure at all n locations
cttcgtcaaaagctgtcacgtcatcgttggggatggtgaagttggtacccttcgtgaagtgagcgtcatctcgggcctccccgctgccaggagcacagagcgcctcgagatccttgacgacgagcgtcatgttatcagcttcagcgtcgttggcggagaccataggctagctaactacaggtcggtgacgaccctccacccttccacttctgggaacggaacggtggtggtggaatcctacgtggtggacgtgccgctgggtaacaccaaagatgacacctgtgtgttcgtcgacacaattgttcggtgcaacctccagtcactggctcagatcgcagagaatctctccaggcgcaaatagcaaacaacgaaaccaagtcattttcgtgagtagattcagaaccctncatcaaaatagattaatttctctccgtctc

SEQ ID NO: 215335 - DNA, 424 bp, Gossypium hirsutum
  unsure (1)..(424): unsure at all n locations
acaagctagggtgcaacaattaaagaaagaactagccgagacagattctgtttacgacacagaaaaattggcagaaaggattgctaaactatctggtggtgttgcagtcattaaggttggggctgcaactgagactgaacttgaggatcgcaagctacgtattgaagatgccaagaatgctacctttgctgccatagaggaaggtattgtacctggtggtggtgctgcattagttcatctctcgacttgcgtccctgcaattaaggataagcttgaagaccctgaagagcgcataggagccgacattgtgcaaaaggctttggtagcaccggcctcgttgatagctcaaaatgcangaatggaangtgaagtaatggtggagaaaggtaagaacagcgagtgggagatcggttacaatgcaatg

SEQ ID NO: 215336 - DNA, 290 bp, Gossypium hirsutum
cccacgcgtccggaaagataggaaagcaaagaaaaagaaggataagttagagaaaggtaagaaaggtgctgttactaattcgtgggggaaatatggaattatcagagaaactgatatgtggaataagcgacctgaattcacagcatggttagctgaagtgaaacagataaacttggaaagtctgcccaactgggaagagaagcagttgtttaaagattttatggaagatcacaacacagccacctttccttccaaaaaatattataaccttgatgcttattataagcgcc

SEQ ID NO: 215337 - DNA, 437 bp, Gossypium hirsutum
agaaaaagaatgagagttttgtcatatgagttcttttccttaaccatggtttataggctgagaagatttctacactagttaaagctgcaaatgtctctgttgaatcctactggccaagcttgttcgctaagctttttgagaagtgcaacattgaggatctcataaccaatgttggagctggtggtggtggtgccccagtagctgcagctgcacctgttgctgctggcggaggagccggtgctgctgctccacctcctgctgaggaaaagaaggaagaaccggaggaagagagtgatgacgatatgggattcagtttgtttgattaggtgtgttttggtcaattactagttatatcacatgaaggtagtaacgcttttagagttgtattgctattggtatttgcatgttgattagaaatattacgtttttgttgaatg

SEQ ID NO: 215338 - DNA, 398 bp, Gossypium hirsutum
  unsure (1)..(398): unsure at all n locations
cgcccggattccggtcgaccacgcgtcgccacgcgncgcccacgcgtncgtttgtggggaaaatatgggttcgggcatagtgttcggtagcttgttggcgtggattgaagtgatcgagaaattgagtgagatgaagctgatttccgaagccaaaacgcccgggttggtgcagtgggcggattgcttctccgcccatgaggcggtgaaggatgtttcacccgacgtcgacaagcttgtggaatatgcgttgaagcttggggccagggtcttgaaagctacggcagccaccaattgaaatcgaagtttggagtatgtgttactttcttcttttgtcattgagtgaaacttgggtgagaattgttattatcatttagaaaataaaatatttttatttttat

SEQ ID NO: 215339 - DNA, 434 bp, Gossypium hirsutum
accaaagcaattgctggaaaagtaacaaattgggacaatgttgttttggcttatgaacctgtttgggccattggaacagggaaagttgcaacccctgctcaggctcaggaagttcattgcgagttgaggaaatggcttcatgagaatgttggcggtgacattgctgcatcaactagaattatatatggaggttccgtaaatggagcaaactgcaaggaattggccgcacaacccgatgttgatggctttttggttggtggagcttccctaaagcccgagtttgttgatatcatcaaggccgcgatggtgaaaaagaattagaagttgaaaagcaggaattaaaggtgaaacagaaacaaccttctgggaaactttaatttttgtagttgagatctttccttggaacctaatgtctgttgaaaatttcccgatgt

SEQ ID NO: 215340 - DNA, 444 bp, Gossypium hirsutum
tcttgagcgtcgtttgcaaacactagtattctagactgggatggccaagtcgattcaccatgcttgtgtgttgattaggcaaaggcacattagggttggtaggcaagtggtcaacatcccatctttcatggtgagggttgactctcaaaaacatattgacttctctctcacaagccccttcggaggtggccgccctggaagagtgaagagaaagaaccagagagcagctgccaagaaggctgctgggggagatggtgatgacgaggaagacgagtagatgttaaggccattaccctgcaactaggaacccttgaaagcatatgtttggaactttgccatcacctccattgttagacatggtttgagttttgtttccagatctctactgtagcggatattggtatatgtcttgcttagtaatctgtgtttttttaaccctgattt

SEQ ID NO: 215341 - DNA, 445 bp, Gossypium hirsutum
cccacgcgtccgctcagggaaagcttcaagttgtccttgttagtgccaaaggtctcgagaacacagattttctctgtaacatggatccttacgtgcttcttacttgccgaacccaggagcagaaaagcagtgttgcatcaggaaaaggatcagaaccagaatggaacgaggatttcatattcaacatctccgaaggtgcttcggaactcgcactgaaaataatggacagtgatgctggttctcaggatgatttcgtgggagaagtagcgtgagtgtcgtatatggatagatatatactggactcgggtttctctgttttttaatattttttatgtatttgaagggtcatatgctatactcatccaaaattactttggatatacaagtgttttacacgaatacaataagaaaaatggaaaataaaataaatattattaatttaaaa

SEQ ID NO: 215342 - DNA, 304 bp, Gossypium hirsutum
ccgtggagagcgtggagaaaacctcggctgcaattaaggttttgaaacaggtcggagcatatccggatgtggaaaaggctaaggacagacaaggaatccgacccggaaaagggaaaatgaggaaccggaggtacatttctcgtaaaggtcctttgattgtttatggaaccgaggggtcaaagctcgttaaggccttcaagaacattcctggagttgaggttgccaatgtggagaggcttaatcttttgaaactcgcccctggtggacaccttgggcgattcattatttggaccaaatcaactta

SEQ ID NO: 215343 - DNA, 429 bp, Gossypium hirsutum
agagaacaatggaagcaaagccggaagagaaggcggaatttgaagaagcggagatagaatatgttagctatggaggggagcaccatctgcctctcatcatgaacctggtcgatcaagaactcagtgagccttactccatcttcacctaccgatatttcgtctatctttggccccaactctccttccttgcttttcacaagggtaagtgcatcggaactgtggtgtgcaagatgggagaacacagaaatactttcaggggttacattgccatgttagttgtaatcaagccttatcgtggaagaggcattgccactgagctcgtcaccagatccattagaatgatgatggaatctggatgtgaagaagtcacactggaagcggaagtgacgaataaaagagcactggcactttatgggcgtcttgggttta

SEQ ID NO: 215344 - DNA, 425 bp, Gossypium hirsutum
gttttctactcgtctcctctacaaatctcgccagctttatggtaatcaagctgttctgcggcaggaggttgccattcctgtccggttttactctaaagaggcttctccccctggtttaaaaggagatgagatattgaaaaatatctttgtggaggttaagaacaaattcgagacagcattgggaatatttaggaaggagaaaatcaccattgacccatatgacccagctgctgtctctcagtatgcaaatgttatgaagactgctagagaaaaggctggcttgttttcagagtctcaacggattaaatacaccatcgaaacacgaactcagggcattccagatgtccgaacatatttattgacacttgaagaaataagatccaagagaggactcactgatgaaactggtgctgaggctatgatga

SEQ ID NO: 215345 - DNA, 399 bp, Gossypium hirsutum
catcagtcaagaattaaaccatggcaacgaatgaagtcaaagttttgggttcctggccgagtccatttgcgatgaggcctaggattgcccttaacctcaaatccctcacctatgaatacattgaagagaagttatgggaaggcaaaagcgagcttcttctccaatcaaaccctgtttacaagaaaatcccagtcctcattcacggcgataacaagccaatctgcgaatctctcatcatcgtacaatacatcgacgaggcttggtcttccggtccttctattcttccttctgacccctgtgaacgtgctgtcgctcggttttgggctgcatatcttgacgacaagtggttcccagcggtgaaaagtataggagtcgcctaaggagaggaaagcaagaaag
